United States Patent Application Publication US 2006/0150283 A1 - sequence listing, part 27

SEQ ID NO: 103989 - DNA, 1483 bp, Arabidopsis thaliana
  misc_feature (1)..(1483): Ceres Seq. ID no. 13614061
  misc_feature (1)..(1483): Ortholog of  Ceres SEQ ID NO 13655434 as cited in SEQ ID NO 64337
atggctgtatggttttggttccgatcacaaagagcatcgaatcgagctacttcctccgccggctttgctgtgtgtgtgatcgttcgtttactaaatctgaaacaagtatctaacgccttgccggagatgtcgagctcaggccaaactcagttccgttatacacagacgccgtcgaaggtggttcatctgcggaatcttccatgggaatgcgtcgaagaggagctcatcgacctttgcaaacgattcggcaagatcgtcaataccaagagcaatgtcggcgccaatcgcaatcaagctttcgtcgaatttgctgacttgaatcaagctatatcaatggtttcgtattatgcttcatcttcagagcccgcacagattcgtgggaaaactgtctatattcagtactctaatcgccatgagattgttaacaatcagagtcctggagatgtccctggaaatgtcctcttggttacctttgaaggagtggaatctcacgaagtcagcatcgatgttatccatctggtattttctgcttttggatttgtgcataaaattgccacatttgagaaagctgctggtttccaggcactagttcaatttactgatgtggagactgcatccgcggcaaggagtgcgttggatggcagaagtatacccaggtatctgctttccgcacatgttggttcgtgcagtttgcgaatgtcttattcagctcatactgatctcaacatcaagtttcagtcccaccggagcagagattacacaaatccataccttccagtgaatcagaccgcaatggatgggtctatgcagcctgctttaggtgctgacggcaagaaagttgaatctcagagcaacgtccttctcggtttgattgagaatatgcagtatgctgtcactgtggatgttcttcacacggtgttttctgcatatggaactgtccagaagattgctatatttgagaagaatggttcaacgcaagcattaattcaatactctgatataccaacagcagcaatggccaaagaagcactggaaggacactgcatttatgacggtggctactgtaagcttcgactatcatactctcgtcatactgatctgaatgttaaggcttttagcgacaaaagcagagactatacacttcctgatctaagcctacttgtggcacaaaaaggtcccgcggtgtcgggttctgcaccaccagcaggttggcagaacccgcaagcgcaaagtcaatactcaggttatggcggaagcccatatatgtacccatcatctgatcccaacggggcttcaccctcaggtcaacctccttactatggatgagatatttgtttactaaaaatttcggattttgctgccaatggggagtatttccatgtttaggttgtttgaggttaaaagtgtgattgttctttcttttttgttgttgacataatttaagtggggagaccaataataaatcgaatatgttgcgcttgct

SEQ ID NO: 103990 - protein, 441 aa, Arabidopsis thaliana
  peptide (1)..(441): Ceres Seq. ID no. 13614062
MAVWFWFRSQRASNRATSSAGFAVCVIVRLLNLKQVSNALPEMSSSGQTQFRYTQTPSKVVHLRNLPWECVEEELIDLCKRFGKIVNTKSNVGANRNQAFVEFADLNQAISMVSYYASSSEPAQIRGKTVYIQYSNRHEIVNNQSPGDVPGNVLLVTFEGVESHEVSIDVIHLVFSAFGFVHKIATFEKAAGFQALVQFTDVETASAARSALDGRSIPRYLLSAHVGSCSLRMSYSAHTDLNIKFQSHRSRDYTNPYLPVNQTAMDGSMQPALGADGKKVESQSNVLLGLIENMQYAVTVDVLHTVFSAYGTVQKIAIFEKNGSTQALIQYSDIPTAAMAKEALEGHCIYDGGYCKLRLSYSRHTDLNVKAFSDKSRDYTLPDLSLLVAQKGPAVSGSAPPAGWQNPQAQSQYSGYGGSPYMYPSSDPNGASPSGQPPYYG

SEQ ID NO: 103991 - protein, 399 aa, Arabidopsis thaliana; identical to SEQ ID NO: 27594
  peptide (1)..(399): Ceres Seq. ID no. 13614063

SEQ ID NO: 103992 - protein, 330 aa, Arabidopsis thaliana; identical to SEQ ID NO: 27595
  peptide (1)..(330): Ceres Seq. ID no. 13614064

SEQ ID NO: 103993 - DNA, 1185 bp, Arabidopsis thaliana
  misc_feature (1)..(1185): Ceres Seq. ID no. 13614076
  misc_feature (1)..(1185): Ortholog of  Ceres SEQ ID NO 12609869 as cited in SEQ ID NO 52065
  misc_feature (1)..(1185): Ortholog of  Ceres SEQ ID NO 14301506 as cited in SEQ ID NO 61159
  misc_feature (1)..(1185): Ortholog of  Ceres SEQ ID NO 13597124 as cited in SEQ ID NO 64173
  misc_feature (1)..(1185): Ortholog of  Ceres SEQ ID NO 12780602 as cited in SEQ ID NO 65695
aatattcggaaataaaaaacattttagggttttcctcagtctctctctcttatagacgccaaccacgttttccagctcttgttctttcgattctcagagaagacttttcagaacatcctccaactttctcagataagcaacaatggtgaaaggtcccggtctctacaccgaaatcggcaaaaaggccagagatcttctgtacaaagaccacaacagtgaccagaaattcagtatcaccactttctctcctgccggtgttgccatcacctcaaccggaactaagaaaggtgacttattgttgggagatgtcgcttttcagtcgaggcgaaagaacattactactgatttgaaagtttgcactgattctacttttctgatcaccgctaccgttgatgaggctgcacccggactgaggtcaatcttcagcttcaaggttcctgaccaaaattctggcaaggttgagctgcaatacttgcatgagtacgccggtatcagcacaagcatgggattgactcagaacccaactgtcaacttctctggtgtgattggctccaatgtcttggctgttggtactgatgtttcatttgacaccaagtctggaaatttcaccaagatcaatgctggtttaagcttcaccaaggaggacttaattgcctcccttactgtgaacgacaagggcgatctattgaatgcatcttactatcacattgtgaacccgctgttcaacactgcggttggagccgaagtgagccacaagttatctagcaaggacagcaccataactgttggaacacagcactcgcttgaccccttgacctctgtgaaggctcgtgtcaatagtgcgggtattgcaagtgctctcattcaacacgagtggaaacccaagtcattcttcacaatctctggagaagtcgacacaaagtcaattgacaagagtgctaaagttggattggctctcgcactcaagccttgaaactgagatggaagaagaagttgcaatagtttttttaaactagtttctttctacgtactctgttttttctctgcttggttcatggtttgagtgggcaactactgatctttcccattttcctgccggatttgtagaagaataaaaaggttgaaaatgatcatcttgagatggtgatgaaactcttaagatcctcctcttctgcttctcttttt

SEQ ID NO: 103994 - protein, 276 aa, Arabidopsis thaliana; identical to SEQ ID NO: 25200
  peptide (1)..(276): Ceres Seq. ID no. 13614077

SEQ ID NO: 103995 - protein, 156 aa, Arabidopsis thaliana; identical to SEQ ID NO: 25201
  peptide (1)..(156): Ceres Seq. ID no. 13614078

SEQ ID NO: 103996 - DNA, 1119 bp, Arabidopsis thaliana
  misc_feature (1)..(1119): Ceres Seq. ID no. 13614079
  misc_feature (1)..(1119): Ortholog of  Ceres SEQ ID NO 14311044 as cited in SEQ ID NO 53643
aaacttacagagagacaaatacctataataagccattcataatcttcttgcttcttgttcagaataatggggaatcttttctgttgcgtgcttgtgaagcaatcagatgttgcggtcaaggagagatttggcaaattccaaaaagtacttaatccaggtctccaatttgttccatgggtcatcggtgattacgtcgccggtacactgacccttcgtcttcagcaactcgatgttcagtgtgaaaccaaaacaaaggacaatgtgtttgtgacagtggttgcatccatacaatacagagtcttagctgacaaggcaagtgatgctttttacagactcagcaatccaaccacccaaatcaaagcctacgtctttgatgtgatcagagcatgtgttccaaagctgaacttggacgatgtgttcgagcagaagaatgaaattgccaaatctgtggaagaagagctagacaaagccatgactgcttatggttacgaaatccttcaaaccctaattatcgacattgagcctgatcaacaggttaaacgtgccatgaacgaaatcaacgccgcggcgaggatgagagtggcagcgagcgaaaaagcagaggctgagaaaatcattcagatcaaaagagcagagggtgaagcagagtcaaagtacctgtcgggactcggaatcgctcggcagagacaagcgatcgtggacggtctgagagacagtgttctagggttcgcaggaaacgtgccagggacgtcagcgaaggatgtgttggacatggtgatgatgactcagtactttgacacaatgagagatatcggagcaacttctaaatcctctgcggtgtttatccctcacggtccaggcgccgtctctgacgtggcagcgcagattcgaaatggattattacaggccaacaatgcctcctaatcactcaagtcaaattgtcttggtcgtctctttatatatttttgtatcttcttattaaaaaggtaaatttgacttttaatataatggtgtgcttattgtgatttgtcattatgtttgtacctatctcttttgtgagttgtgtgatagatatactttgtattttttcttaaaagtcaatataaatttctgtttgcg

SEQ ID NO: 103997 - protein, 285 aa, Arabidopsis thaliana; identical to SEQ ID NO: 39563
  peptide (1)..(285): Ceres Seq. ID no. 13614080

SEQ ID NO: 103998 - protein, 150 aa, Arabidopsis thaliana; identical to SEQ ID NO: 39564
  peptide (1)..(150): Ceres Seq. ID no. 13614081

SEQ ID NO: 103999 - DNA, 1127 bp, Arabidopsis thaliana
  misc_feature (1)..(1127): Ceres Seq. ID no. 13614094
  misc_feature (1)..(1127): Ortholog of  Ceres SEQ ID NO 14307589 as cited in SEQ ID NO 20466
  misc_feature (1)..(1127): Ortholog of  Ceres SEQ ID NO 15225111 as cited in SEQ ID NO 58444
  misc_feature (1)..(1127): Ortholog of  Ceres SEQ ID NO 13661001 as cited in SEQ ID NO 67531
  misc_feature (1)..(1127): Ortholog of  Ceres SEQ ID NO 15178920 as cited in SEQ ID NO 0
atattttcattgattttgcatattaatgcatatgttttcataaaaaaagaaaaacgagtgtaaagttattgatagtttctgttacttattaatttttaaggttatgtgtattattaccaattggaggactatatagtcgcaagtctcaaccctataaaagaaaacattcgtcgatcatcttcccgcctcgagtatctctctctctctctctcttctctgttttctttattgattgcatagacaaaaatacacacatacacaacagaaagaaagatggagacgacgatgaagaagaaagggagagtgaaagcgacaataacgtcacagaaagaagaagaaggaacagtgagaaaaggaccttggactatggaagaagatttcatcctctttaattacatccttaatcatggtgaaggtctttggaactctgtcgccaaagcctctggtctaaaacgtactggaaaaagttgtcggctccggtggctgaactatctccgaccagatgtgcggcgagggaacataaccgaagaagaacagcttttgatcattcagcttcatgctaagcttggaaacaggtggtcgaagattgcgaagcatcttccgggaagaacggacaacgagataaagaacttctggaggacaaagattcagagacacatgaaagtgtcatcggaaaatatgatgaatcatcaacatcattgttcgggaaactcacagagctcggggatgacgacgcaaggcagctccggcaaagccatagacacggctgagagcttctctcaggcgaagacgacgacgtttaatgtggtggaacaacagtcaaacgagaattactggaacgttgaagatctgtggcccgtccacttgcttaatggtgaccaccatgtgatttaagatatatatatagacctcctatacatttatatgccccagctgggtttttttgtatggtacgttatttggtttttctattgctgaaatgtcgttgcatttaatttacatacgaaaagtgcattaaatcattaaatcttcaatacatatggaggtggtgtttgagtaacttctggtcgttaaagcatatatactactgtactctttttttttctttcaaattgttgttgtttttg

SEQ ID NO: 104000 - protein, 206 aa, Arabidopsis thaliana; identical to SEQ ID NO: 38135
  peptide (1)..(206): Ceres Seq. ID no. 13614095

SEQ ID NO: 104001 - protein, 202 aa, Arabidopsis thaliana; identical to SEQ ID NO: 38136
  peptide (1)..(202): Ceres Seq. ID no. 13614096

SEQ ID NO: 104002 - protein, 175 aa, Arabidopsis thaliana; identical to SEQ ID NO: 38137
  peptide (1)..(175): Ceres Seq. ID no. 13614097

SEQ ID NO: 104003 - DNA, 1422 bp, Arabidopsis thaliana
  misc_feature (1)..(1422): Ceres Seq. ID no. 13614098
  misc_feature (1)..(1422): Ortholog of  Ceres SEQ ID NO 14311755 as cited in SEQ ID NO 57271
  misc_feature (1)..(1422): Ortholog of  Ceres SEQ ID NO 15171156 as cited in SEQ ID NO 58259
  misc_feature (1)..(1422): Ortholog of  Ceres SEQ ID NO 14302212 as cited in SEQ ID NO 66507
  misc_feature (1)..(1422): Ortholog of  Ceres SEQ ID NO 13653980 as cited in SEQ ID NO 69253
ttacatgaaaatgaggaggtagactcatgtaacataactcttaccaatagaggaagaagaaaaagttagcaagagtcggttacttgtgagaaattccaacaaatgccggaggatttatgcacatcttggagcatctgataagaggaaaaaattatgttcgctctcacatttctaaatccaaatccaagacttccatctccattgttccttgccaagtctactcctgaatcagcgttgagcagaagaagcagagctttttcatcttctaactcttatccttggagaccgaaccttagatttaatggcttcaagctcaagtcagctacagttccggagaatgtggaaggaggagatttggaatctggaagtttggttaaagggttgaagctaggaggcatgtttggagtttggtaccttctcaatatctactacaacattttcaacaaacaggtacttagggtttatccatatccagcgactgtaacagcatttcaattagggtgtggaacgttgatgattgctataatgtggctccttaaactccatccacgccccaaattttctccttctcagtttacggtgatcgtacaactagcagtagctcacacgttagggaacttgttaacaaatgtgagcttaggaagagtaaatgtctctttcacccacactatcaaagcaatggagcctttcttcaccgtcttgctttctgttctcttgctcggtgagtggccgagtctgtggattgtttgttcgttgttacctattgtcgctggagtctctttagcatctttcacagaagcttctttcaattggattggtttctgcagtgcaatggcttctaatgtgacgaatcaatcacgcaatgtcctcagtaaaaaattcatggttggaaaggacgctttggacaacatcaaccttttctctataataaccattatctcctttatcttactggttcctttagcaatcctcatcgatgggttcaaggttactccttcgcatttacaagtagcaacaagccagggtttgtcggtaaaagagttttgcatcatgtctctacttgctggtgtttgcttgcatagctaccaacaggtatcgtatatgatattggagatggtgtctccagtaacacactctgtagggaactgcgtgaagcgtgtggtggttattacatcatccattcttttcttcaaaactccagtctcacctcttaactctataggtaccgcgactgcactagctggagtatatttgtacagcagagccaaacgagtccaagtcaaaccaaatccaaaaatgtcttgaattttgtatatagaagctcttagtttattatttatgcgaaaaatgttgatatttttgttcatccatgtcgtttttacatgacactattaacttttgttaaattcaactaatctcatt

SEQ ID NO: 104004 - protein, 383 aa, Arabidopsis thaliana; identical to SEQ ID NO: 41149
  peptide (1)..(383): Ceres Seq. ID no. 13614099

SEQ ID NO: 104005 - protein, 302 aa, Arabidopsis thaliana; identical to SEQ ID NO: 41150
  peptide (1)..(302): Ceres Seq. ID no. 13614100

SEQ ID NO: 104006 - protein, 263 aa, Arabidopsis thaliana; identical to SEQ ID NO: 41151
  peptide (1)..(263): Ceres Seq. ID no. 13614101

SEQ ID NO: 104007 - DNA, 1249 bp, Arabidopsis thaliana
  misc_feature (1)..(1249): Ceres Seq. ID no. 13614110
  misc_feature (1)..(1249): Ortholog of  Ceres SEQ ID NO 15176317 as cited in SEQ ID NO 52865
  misc_feature (1)..(1249): Ortholog of  Ceres SEQ ID NO 13518893 as cited in SEQ ID NO 58108
  misc_feature (1)..(1249): Ortholog of  Ceres SEQ ID NO 12617152 as cited in SEQ ID NO 63555
accctctgttttgtttctccccaatcaaaaatctcaatcccaatcacttcgcttctaatcttaaagcctttaatttagtcttcgagccctctaatggcggatcagagcaaaaacactccagagatcttcgagctcaacaatggcaccatgcaggtcaagatctcaaactacggcaccaccatcacctctttgtctgttcccgacaagaacgggaaactgggggatgtagttctcggattcgactcggtggatccatatgtgaaagggcttgcaccatactttgggtgcattgttggtcgtgtggcaaatcggatcaaggagggaaaattcagtctcaatggagttaactacactttgcctatcaacaagcctcctaatagtctccacggtggtaacaagggtttcgataagaagatatgggaagttgcagggcacaagagagacggcgaaaaacctttcatcactttcaaatatcacagtgccgatggagaagaaggttaccctggtgcggtttctgtcacggcgacatacactctcacgtcagccacgacaatgagacttgacatggaagctgttccagagaacaaagatactcccatcaacttagctcaacatacatactggaacttagcaggtcatgactcaggaaacattctagaccataagattcagatatgggggtctcatatcacgccggttgacgaatacacagttcctacaggagagatcttgcctgtaaagggaactcctttcgatttcactgaggagaagcggataggcgagtctattggagaggttggtatcggatacgatcataactacgtgttggactgtcctgatcaagagaaggaggggctgaaacacgcagcgaagctcagtgatgctgctagctcaagggtactgaacttgtggaccaatgtgccgggaatgcagttttataccgggaactatgtgaatggagtggttgggaaagggaatgcggtttacgggaaacatgcgggtgtgtgccttgagacgcagggattcccgaacgcgattaaccagtcgaatttcccgtctgttgtggttaaggctggtgagaagtacaatcacacgatgctgtttgagttttcagcttgagtttatagatggacgttttaggtgttagatgatgggaataaagggccggttcatttgattcactgggctggaaaaagagtgattttaattttatctctttgggggagaataataaaaccaaactgtttac

SEQ ID NO: 104008 - protein, 341 aa, Arabidopsis thaliana; identical to SEQ ID NO: 26038
  peptide (1)..(341): Ceres Seq. ID no. 13614111

SEQ ID NO: 104009 - protein, 323 aa, Arabidopsis thaliana; identical to SEQ ID NO: 26039
  peptide (1)..(323): Ceres Seq. ID no. 13614112

SEQ ID NO: 104010 - protein, 188 aa, Arabidopsis thaliana; identical to SEQ ID NO: 26040
  peptide (1)..(188): Ceres Seq. ID no. 13614113

SEQ ID NO: 104011 - DNA, 1510 bp, Arabidopsis thaliana
  misc_feature (1)..(1510): Ceres Seq. ID no. 13614118
  misc_feature (1)..(1510): Ortholog of  Ceres SEQ ID NO 15226515 as cited in SEQ ID NO 58519
ctctgtgtcgcctgaagtgataacattctcattattcacccaaggagagagatcggagctaaaaagccatctctcgccggaaaatttctcagttttcttattaccttagccacagacaacaagacgacagaggaatctaatcttagccccctttcctctctgtctctctctatatctctgtctttaggctttgagatatcttcaacacgaagctttttgcttcttttttttatctctttaaaaaattccagccaatggttcgaatccaatagtagcttcaaaggtcatggatttagtcaggggtttgtggaggaaacatagaaggaagattttggtgacgacgacttgtttgggaagtgggtatttgctctataaactatacaatgcccatactcgtaagctcgctgatttggaacgagagcttgctaatgagcgtgaaaacgacgagatcatcaaaacccaaatgaaggcacatttcgataacattcagatgattgctgatactactacattgcctcacgcaattcatcacttgagtagtcgtgtagttgaagagattgatgtctcgagtattatggataagctaagcaaaggcaaaggaatattgattccttctgagaagcttcaactctggaatgagctcaaaattttgagtttcacgagaatggtcttgtccctttggtcggtcactatgcttagtttgtacattagggttcaagtcaatattttgggcagacatttatatatcgacactgctagaggtcttgggagctcccatttacttgacgaactagatctcatagagagagatgatgaacaaaagtttttgacaagcgctgattttcttgcgaccagtggcatgccgagtttgatttctaacatgcagaacgcagtgaaagaagttctcaagggaaagcagttaaaggatgtgttaaccacaagtgctcttcgagaaactgtgatgcggattctcgatgtgtttatgagcacaggaagtccacaccactgggtagattatctaatgatgtcccaagacgcaaccactgatgtttcctcttctgatgcaactgttaccaagtttcatctactcataaccgagacacgggaagtactcacaagcaatgatttttcaaatgtagcagagatctcactcaagtgttgtgccgttgcgttagtagaggagatggaaacgcagaccggtctggccacagggatgcaattggcaaagctattaccacagattgagaaaaccatgccggagatttcagctgagccggagaagaaccggttcttgcaactcatccgagatttgcctgaagttaaactcttttttactcttttatacgcaaatatgcctcagtagcattattaaaccccattgccaaaaattgtttcctgatcactttttatcatatgtttcgatttacttcaaaatagtaaaaccaaacatctctagaataattgttcaatatctatatcaaatcatttactaatatagtaatattgcagc

SEQ ID NO: 104012 - protein, 358 aa, Arabidopsis thaliana
  peptide (1)..(358): Ceres Seq. ID no. 13614119
MDLVRGLWRKHRRKILVTTTCLGSGYLLYKLYNAHTRKLADLERELANERENDEIIKTQMKAHFDNIQMIADTTTLPHAIHHLSSRVVEEIDVSSIMDKLSKGKGILIPSEKLQLWNELKILSFTRMVLSLWSVTMLSLYIRVQVNILGRHLYIDTARGLGSSHLLDELDLIERDDEQKFLTSADFLATSGMPSLISNMQNAVKEVLKGKQLKDVLTTSALRETVMRILDVFMSTGSPHHWVDYLMMSQDATTDVSSSDATVTKFHLLITETREVLTSNDFSNVAEISLKCCAVALVEEMETQTGLATGMQLAKLLPQIEKTMPEISAEPEKNRFLQLIRDLPEVKLFFTLLYANMPQ

SEQ ID NO: 104013 - protein, 299 aa, Arabidopsis thaliana
  peptide (1)..(299): Ceres Seq. ID no. 13614120
MKAHFDNIQMIADTTTLPHAIHHLSSRVVEEIDVSSIMDKLSKGKGILIPSEKLQLWNELKILSFTRMVLSLWSVTMLSLYIRVQVNILGRHLYIDTARGLGSSHLLDELDLIERDDEQKFLTSADFLATSGMPSLISNMQNAVKEVLKGKQLKDVLTTSALRETVMRILDVFMSTGSPHHWVDYLMMSQDATTDVSSSDATVTKFHLLITETREVLTSNDFSNVAEISLKCCAVALVEEMETQTGLATGMQLAKLLPQIEKTMPEISAEPEKNRFLQLIRDLPEVKLFFTLLYANMPQ

SEQ ID NO: 104014 - protein, 290 aa, Arabidopsis thaliana
  peptide (1)..(290): Ceres Seq. ID no. 13614121
MIADTTTLPHAIHHLSSRVVEEIDVSSIMDKLSKGKGILIPSEKLQLWNELKILSFTRMVLSLWSVTMLSLYIRVQVNILGRHLYIDTARGLGSSHLLDELDLIERDDEQKFLTSADFLATSGMPSLISNMQNAVKEVLKGKQLKDVLTTSALRETVMRILDVFMSTGSPHHWVDYLMMSQDATTDVSSSDATVTKFHLLITETREVLTSNDFSNVAEISLKCCAVALVEEMETQTGLATGMQLAKLLPQIEKTMPEISAEPEKNRFLQLIRDLPEVKLFFTLLYANMPQ

SEQ ID NO: 104015 - DNA, 1934 bp, Arabidopsis thaliana
  misc_feature (1)..(1934): Ceres Seq. ID no. 13614122
  misc_feature (1)..(1934): Ortholog of  Ceres SEQ ID NO 14310841 as cited in SEQ ID NO 53666
  misc_feature (1)..(1934): Ortholog of  Ceres SEQ ID NO 15178736 as cited in SEQ ID NO 56439
  misc_feature (1)..(1934): Ortholog of  Ceres SEQ ID NO 14308493 as cited in SEQ ID NO 60320
agaacactcttgtcacacttccatttagggttttctgcaaatttctccgttcgagatcaattccgtcgagatctcaagctctctcactcgtagtaaaaaaatggcggcggtagcggcaccaatggcttcgaagccccgtggatctaaagctgaatcgttcgtagacaacaagcggagagaagatatccgattcgcgaacatcaactctgctcgagcagtctctgacgccgtccgtactagtttgggaccgaaaggaatggacaagatgatttccacggcgaacggagaggtaatcattactaacgatggagctacgatccttaacaagatggaggttttgcagccagcggcgaagatgttagtcgagctttccaaatctcaagattcagccgccggagatggtaccacaactgtcgtagtaatcgccggtgcgcttctcaaggagtgtcaatcgcttctcacaaacgggatccaccctactgtcatttcagattcgcttcacaaggcgtgtggtaaggcgatcgatattttgactgccatggctgttccagtggagctcactgatagagattcacttgtgaaatctgcgagcacatcgcttaacagtaaggttgttagtcagtactctacattgcttgctcctttagctgtagatgcggttctctctgttatagatccggaaaagcctgagattgtggatttgcgtgatattaagattgttaagaagcttggtgggactgtggatgatacacatactgtgaaaggtttggtttttgataagaaggttagccgtgctgctggtggaccgactcgtgtggagaatgctaagattgctgtgattcagttccagatctcacctcctaagactgatatcgagcagagtattgttgtctctgattatactcagatggataggatcttgaaagaagagaggaattacatattggggatgattaagaagatcaaagcaactggttgcaatgtgttgttgattcagaagagtattttgagggatgcagtgactgatctatctcttcactatttggccaaagctaagattatggttattaaggatgttgagagagatgagattgaatttgtcaccaagacattgaactgcttgcctatcgccaatattgagcatttcagagctgagaagcttggccatgctgatcttgttgaggaggcctcccttggagatggaaagattttgaagatcactggtatcaaggacatggggagaactacatctgttctagttcgtggctccaaccagcttgttctagatgaagctgaaaggagtttacatgatgccttgtgtgtggttaggtgtctagtgagcaaaaggtttttgattgcaggaggtggtgcaccagagattgagctctcaaggcagctcggtgcttgggctaaggtgctacatgggatggaaggttactgtgtgaagtcttttgctgaagctctcgaagttattccttacacactagccgagaatgcagggttaaaccctatcgccattgtgactgaactcaggaacaagcatgctcaaggggaaatcaacgcagggatcaatgtgaggaaaggacagatcactaacatcttggaggaaaatgttgttcagcctctgcttgtgagtaccagtgcgatcactttagcaactgaatgcgttaggatgattttgaagattgatgacatcgtaactgtgaggtagtgtggtagtttctttcaaaacaggtcccagaacacttctattgctctatctaagcttttgtttcgtttttttcatgtgttgtgcttgcacaatggttttgaacttagactcccttttcttgcaacatgtgctattgcagttaagtggctttatttgtggtttagtgcgattgtatttctttctagtgacttgtgatatcaagatctctcagttttttttgttt

SEQ ID NO: 104016 - protein, 536 aa, Arabidopsis thaliana; identical to SEQ ID NO: 27963
  peptide (1)..(536): Ceres Seq. ID no. 13614123

SEQ ID NO: 104017 - protein, 529 aa, Arabidopsis thaliana; identical to SEQ ID NO: 27964
  peptide (1)..(529): Ceres Seq. ID no. 13614124

SEQ ID NO: 104018 - protein, 484 aa, Arabidopsis thaliana; identical to SEQ ID NO: 27965
  peptide (1)..(484): Ceres Seq. ID no. 13614125

SEQ ID NO: 104019 - DNA, 1208 bp, Arabidopsis thaliana
  misc_feature (1)..(1208): Ceres Seq. ID no. 13614130
  misc_feature (1)..(1208): Ortholog of  Ceres SEQ ID NO 13596440 as cited in SEQ ID NO 68769
accccattaaccgtttcaaaaggaaattaaggagttgttcatagtttcgtttgtaaattgcaattgtaagtttgtaactgtaatagaattagattatttagggtttgcttgatcctcgatctgtgatcgattgatctcgcttcgcacccagcaggtttatttaatgagcgtgaaagatggctaagataatgcttggatctcactcggttaagagccatggatggaaggtggctcgtgaacatctttgtgactggctcatcctcgtagtcctcggtctcatcgacattgtactcaatgttatcgagccttttcatcgctatattggacctgacatgttaaccgatctcactttcccattttatgaagacaccatccctatgtgggctgtcccgattatttgtatattggttccgatatgcatcttcatagtgtactattactatcgaagagatgtttatgatcttcatcacgccattctcggtatcggattctcatgtcttgtgactggagtcaccactgattccatcaaagacgcggtcggtaggccacgccctaacttcttttaccgatgttttcccaatggtaaaccgaaatttcatccggatactaaggatgttgtgtgtcatggagttaaaaagataatcaaagaaggttacaagagtttccctagtggtcacacttcatggtcattcgctggtttaactttcctagcgtggtacttatcgggtaaaatcaaagtctttgacagaagaggtcacgtggcgaagctatgcctcgtgttcttaccgatactcatatcaattctcatcggaatatcacgcgtagacgactattggcaccattggaccgatgtcttcgccggagctatcatcggaatttttgtcgcttctttctcttacctccacttttttccttacccttacgacgaaaacggatgggctccacatgcgtattttagaatgttggcggagaggagcactggtcgagccacgacgatgactcgaaccggttctcgaggaatgttgggcaacgacgttgagcctggcaactccgcgtcctcgccgcacgatcgccaccgtgaaagcactgattctgacttttgaaaatttcctccacaatgttttaaaaaaaagaagttaattatccgtgtaatttttaattgtatgattgttttcacttactgatatataatatgtatacttttcatt

SEQ ID NO: 104020 - protein, 308 aa, Arabidopsis thaliana
  peptide (1)..(308): Ceres Seq. ID no. 13614131
MAKIMLGSHSVKSHGWKVAREHLCDWLILVVLGLIDIVLNVIEPFHRYIGPDMLTDLTFPFYEDTIPMWAVPIICILVPICIFIVYYYYRRDVYDLHHAILGIGFSCLVTGVTTDSIKDAVGRPRPNFFYRCFPNGKPKFHPDTKDVVCHGVKKIIKEGYKSFPSGHTSWSFAGLTFLAWYLSGKIKVFDRRGHVAKLCLVFLPILISILIGISRVDDYWHHWTDVFAGAIIGIFVASFSYLHFFPYPYDENGWAPHAYFRMLAERSTGRATTMTRTGSRGMLGNDVEPGNSASSPHDRHRESTDSDF

SEQ ID NO: 104021 - protein, 304 aa, Arabidopsis thaliana
  peptide (1)..(304): Ceres Seq. ID no. 13614132
MLGSHSVKSHGWKVAREHLCDWLILVVLGLIDIVLNVIEPFHRYIGPDMLTDLTFPFYEDTIPMWAVPIICILVPICIFIVYYYYRRDVYDLHHAILGIGFSCLVTGVTTDSIKDAVGRPRPNFFYRCFPNGKPKFHPDTKDVVCHGVKKIIKEGYKSFPSGHTSWSFAGLTFLAWYLSGKIKVFDRRGHVAKLCLVFLPILISILIGISRVDDYWHHWTDVFAGAIIGIFVASFSYLHFFPYPYDENGWAPHAYFRMLAERSTGRATTMTRTGSRGMLGNDVEPGNSASSPHDRHRESTDSDF

SEQ ID NO: 104022 - protein, 256 aa, Arabidopsis thaliana
  peptide (1)..(256): Ceres Seq. ID no. 13614133
MLTDLTFPFYEDTIPMWAVPIICILVPICIFIVYYYYRRDVYDLHHAILGIGFSCLVTGVTTDSIKDAVGRPRPNFFYRCFPNGKPKFHPDTKDVVCHGVKKIIKEGYKSFPSGHTSWSFAGLTFLAWYLSGKIKVFDRRGHVAKLCLVFLPILISILIGISRVDDYWHHWTDVFAGAIIGIFVASFSYLHFFPYPYDENGWAPHAYFRMLAERSTGRATTMTRTGSRGMLGNDVEPGNSASSPHDRHRESTDSDF

SEQ ID NO: 104023 - DNA, 850 bp, Arabidopsis thaliana
  misc_feature (1)..(850): Ceres Seq. ID no. 13614134
  misc_feature (1)..(850): Ortholog of  Ceres SEQ ID NO 13597809 as cited in SEQ ID NO 64598
  misc_feature (1)..(850): Ortholog of  Ceres SEQ ID NO 12617960 as cited in SEQ ID NO 69051
  misc_feature (1)..(850): Ortholog of  Ceres SEQ ID NO 13589401 as cited in SEQ ID NO 0
aaatcaactattttacatagtgattacattcatttcattgttgtttcttaccgcagtaacttttatcttaataaatttgatccaaccatgccaatatttacgggatcgtcctccgattctgaagacgaaagaacgatccataaaacaactaagctcttcactcgtcaacgatctattcactctatatttggaggtggtaaagttgcggatattctgttatggagagagccgaaaatagcagcaacattggtgataggagtgagcatcttatggttcttaatggaagtagtggaatacaatttcataaccctaatttgtcatgcttccatgacctccatgctttttttcttcatttggtctactgcttctgattttctcaattgggaaagaccactaataccagaagttgtactagacgaatcttctttcaaacaattagcaagaagcttccatgttagattcaaccaaatcctcacaaagcttcttgacgttgcttgtggaagagatcctcctctcttttttctcacaacgatctcgctttatatcgtatccatcatcgggacatatttcaactttgtgaatcttctcttcatagggtttgtaagcatgcaaaccttaccggttatgtatgagatgtacgaggacgacgtggatacagcggcgggtaagttgatgaggaagatgaagaagctgtacaagaaagtcgatacgaatgttcttagtaaaatcccaagaggaactgtcaaaaacaagaaatttacttaattctgatcattctttacttatagagataatgtgtttgctactgtatttatgcgacctcatcaacccaaattaatatacatatctg

SEQ ID NO: 104024 - protein, 254 aa, Arabidopsis thaliana
  peptide (1)..(254): Ceres Seq. ID no. 13614135
KSTILHSDYIHFIVVSYRSNFYLNKFDPTMPIFTGSSSDSEDERTIHKTTKLFTRQRSIHSIFGGGKVADILLWREPKIAATLVIGVSILWFLMEVVEYNFITLICHASMTSMLFFFIWSTASDFLNWERPLIPEVVLDESSFKQLARSFHVRFNQILTKLLDVACGRDPPLFFLTTISLYIVSIIGTYFNFVNLLFIGFVSMQTLPVMYEMYEDDVDTAAGKLMRKMKKLYKKVDTNVLSKIPRGTVKNKKFT

SEQ ID NO: 104025 - protein, 225 aa, Arabidopsis thaliana
  peptide (1)..(225): Ceres Seq. ID no. 13614136
MPIFTGSSSDSEDERTIHKTTKLFTRQRSIHSIFGGGKVADILLWREPKIAATLVIGVSILWFLMEVVEYNFITLICHASMTSMLFFFIWSTASDFLNWERPLIPEVVLDESSFKQLARSFHVRFNQILTKLLDVACGRDPPLFFLTTISLYIVSIIGTYFNFVNLLFIGFVSMQTLPVMYEMYEDDVDTAAGKLMRKMKKLYKKVDTNVLSKIPRGTVKNKKFT

SEQ ID NO: 104026 - protein, 161 aa, Arabidopsis thaliana
  peptide (1)..(161): Ceres Seq. ID no. 13614137
MEVVEYNFITLICHASMTSMLFFFIWSTASDFLNWERPLIPEVVLDESSFKQLARSFHVRFNQILTKLLDVACGRDPPLFFLTTISLYIVSIIGTYFNFVNLLFIGFVSMQTLPVMYEMYEDDVDTAAGKLMRKMKKLYKKVDTNVLSKIPRGTVKNKKFT

SEQ ID NO: 104027 - DNA, 1991 bp, Arabidopsis thaliana
  misc_feature (1)..(1991): Ceres Seq. ID no. 13614150
  misc_feature (1)..(1991): Ortholog of  Ceres SEQ ID NO 14302828 as cited in SEQ ID NO 65549
gttgtcgccgtcgtcgtttctctcatttctgctctgttgtgctatcgtagcgtcgcgctcctttaaacgcgacggacgcagccttctctgttcatcgtttcgccggaagttttcttcagcggagatttattttcagctggttagtagttttgagtgactactgaggtaacaatggttgtagaaactatcgagaggtcttgtgagggttcaaagagaagacatgtgaacggtggagatatcgctgttccttgttcgggagaagagtgtagcaatggagatataaatgtagctcctggagtttcagcgaaaagagctagggtttctagagaaatgacgtttgaagatatttacggtgctgatgcattactcaatgatgacgatgatgaggatgatgattgtgattgggaacctgtgcaggcgcctatggagtttgtaaaatggtgttgtgtcaattgcactatgtcgaaccctggtgatatggtccactgttgtatatgcggtgagcacaaggaatctggcattttgaggcatggatatttagcgtctcccttttttaaagacactggtctcattgaagtcgaggagaaatatggaggaagctcatctgcaaccagctcgacagctgttgggttcgacgagagaatgttgctacactcagaatttgaagtgaaggcacaaccacatccagagagacctgatcgtcttcgagctatagctgctagtcttgccacagctggtgtttttcctggaagatgcttgcctatcaatgcaagggaaatcacgaaacaagaactccagatggtccacacttcagagcatgttgatgctgttgatactacaagccagcttctctatagctacttcacctctgacacatatgctaatgagtattcagcacgtgctgctagacttgcagcaggtttgtgcgctgatctagctacagatattttcactggccgtgtaaaaaatggttttgctttggttagacctcccggtcatcatgctggcgtcaggcatgctatggggttttgccttcacaataatgcagccgttgctgcattagtagcacaagcagcaggggcaaagaaggtgctgattgtggactgggatgtccatcatggcaacggaacccaagagatattcgaacaaaacaaatctgtattgtacatatccttgcacagacatgagggaggaaacttctatcccggtactggagctgctgatgaggttggttctaatggtggggaaggttattgtgtaaatgttccatggagttgcggtggagttggggataaagactatatctttgcgtttcaacatgtggttctccccatagcttctgcattttctccagattttgtcatcatatctgcgggatttgatgcggctagaggagacccactaggatgctgtgatgtgactccggctggctattctcgaatgacacagatgttgggtgatctgtgtggtgggaaaatgctagttattctcgagggcggctacaatcttcgctccatatctgcttctgcaacagcagtgatcaaggtgcttctgggtgaaaatccggagaacgagttgcccatcgccaccacgccttcagtagccggcctgcaaactgttcttgatgtactgaatatccaactggagttctggccatcacttgctatcagctactccaaattactctcagagttggaagcacgtctgatcgaaaacaaaaaaaatcagatgaaaaggaaggttgttcgggttccgacatggtggaaatggggacgaaagaagcttttgtacaactttctctcggctcgtatgatttcaagatcaaagtgattttagaaagcattcttcctaatccgtcgtaggaattgtctacacttacttgtaaccctaactgatctgggggaatttattgcaattagggagctctgaacaatctttatcacttacatttggtagggttttatagaaagaacccttttaacctgcttacc

SEQ ID NO: 104028 - protein, 552 aa, Arabidopsis thaliana
  peptide (1)..(552): Ceres Seq. ID no. 13614151
MVVETIERSCEGSKRRHVNGGDIAVPCSGEECSNGDINVAPGVSAKRARVSREMTFEDIYGADALLNDDDDEDDDCDWEPVQAPMEFVKWCCVNCTMSNPGDMVHCCICGEHKESGILRHGYLASPFFKDTGLIEVEEKYGGSSSATSSTAVGFDERMLLHSEFEVKAQPHPERPDRLRAIAASLATAGVFPGRCLPINAREITKQELQMVHTSEHVDAVDTTSQLLYSYFTSDTYANEYSARAARLAAGLCADLATDIFTGRVKNGFALVRPPGHHAGVRHAMGFCLHNNAAVAALVAQAAGAKKVLIVDWDVHHGNGTQEIFEQNKSVLYISLHRHEGGNFYPGTGAADEVGSNGGEGYCVNVPWSCGGVGDKDYIFAFQHVVLPIASAFSPDFVIISAGFDAARGDPLGCCDVTPAGYSRMTQMLGDLCGGKMLVILEGGYNLRSISASATAVIKVLLGENPENELPIATTPSVAGLQTVLDVLNIQLEFWPSLAISYSKLLSELEARLIENKKNQMKRKVVRVPTWWKWGRKKLLYNFLSARMISRSK

SEQ ID NO: 104029 - protein, 499 aa, Arabidopsis thaliana
  peptide (1)..(499): Ceres Seq. ID no. 13614152
MTFEDIYGADALLNDDDDEDDDCDWEPVQAPMEFVKWCCVNCTMSNPGDMVHCCICGEHKESGILRHGYLASPFFKDTGLIEVEEKYGGSSSATSSTAVGFDERMLLHSEFEVKAQPHPERPDRLRAIAASLATAGVFPGRCLPINAREITKQELQMVHTSEHVDAVDTTSQLLYSYFTSDTYANEYSARAARLAAGLCADLATDIFTGRVKNGFALVRPPGHHAGVRHAMGFCLHNNAAVAALVAQAAGAKKVLIVDWDVHHGNGTQEIFEQNKSVLYISLHRHEGGNFYPGTGAADEVGSNGGEGYCVNVPWSCGGVGDKDYIFAFQHVVLPIASAFSPDFVIISAGFDAARGDPLGCCDVTPAGYSRMTQMLGDLCGGKMLVILEGGYNLRSISASATAVIKVLLGENPENELPIATTPSVAGLQTVLDVLNIQLEFWPSLAISYSKLLSELEARLIENKKNQMKRKVVRVPTWWKWGRKKLLYNFLSARMISRSK

SEQ ID NO: 104030 - protein, 468 aa, Arabidopsis thaliana
  peptide (1)..(468): Ceres Seq. ID no. 13614153
MEFVKWCCVNCTMSNPGDMVHCCICGEHKESGILRHGYLASPFFKDTGLIEVEEKYGGSSSATSSTAVGFDERMLLHSEFEVKAQPHPERPDRLRAIAASLATAGVFPGRCLPINAREITKQELQMVHTSEHVDAVDTTSQLLYSYFTSDTYANEYSARAARLAAGLCADLATDIFTGRVKNGFALVRPPGHHAGVRHAMGFCLHNNAAVAALVAQAAGAKKVLIVDWDVHHGNGTQEIFEQNKSVLYISLHRHEGGNFYPGTGAADEVGSNGGEGYCVNVPWSCGGVGDKDYIFAFQHVVLPIASAFSPDFVIISAGFDAARGDPLGCCDVTPAGYSRMTQMLGDLCGGKMLVILEGGYNLRSISASATAVIKVLLGENPENELPIATTPSVAGLQTVLDVLNIQLEFWPSLAISYSKLLSELEARLIENKKNQMKRKVVRVPTWWKWGRKKLLYNFLSARMISRSK

SEQ ID NO: 104031 - DNA, 1959 bp, Arabidopsis thaliana
  misc_feature (1)..(1959): Ceres Seq. ID no. 13614154
  misc_feature (1)..(1959): Ortholog of  Ceres SEQ ID NO 14314144 as cited in SEQ ID NO 54403
  misc_feature (1)..(1959): Ortholog of  Ceres SEQ ID NO 15169663 as cited in SEQ ID NO 64659
  misc_feature (1)..(1959): Ortholog of  Ceres SEQ ID NO 13656177 as cited in SEQ ID NO 64997
  misc_feature (1)..(1959): Ortholog of  Ceres SEQ ID NO 15225015 as cited in SEQ ID NO 0
gccgcgttatcactcttacgtttctctctctctctcaacttcttccacagcaaatttcttcgattctctgagctctctcccatccttttcaagtggcttcgtttctaaaaaattgattggttgaagaaagtggaaacatggttgaatcggacaagtcatccgttgaagagctgaagaagagggttaggaagagaagccgtgggaagaagaatgagcagcaaaaggctgaagaaaaaacccacactgtagaggaaaacgctgatgaaacgcagaagaagagtgaaaagaaggttaagaaagtgagaggcaaaatcgaggaagaggaagaaaaggtggaagcaatggaagatggtgaagatgagaagaatattgtgattgtcgggaaagggataatgactaatgtgacttttgattccctcgacttatctgagcaaacttctatagctatcaaggagatgggctttcagtacatgacgcaaattcaagctggatcaattcagccccttttggaggggaaggatgttcttggtgctgccagaactggttctggtaaaactcttgcttttctcattccggctgttgagttgctgtttaaagagcgtttctctcctcgcaacgggactggtgtgattgttatttgccccacaagggaacttgctatccagactaaaaatgtggcggaggagttactcaagcatcattcacagacagtcagcatggttattggtggcaataacagaaggtcggaagcacaacgcattgccagtggttcaaacttggtgatagcaactcctggtcgtcttcttgaccatcttcagaatacaaaggctttcatttataaacacttgaagtgccttgtgatcgatgaagctgataggatactggaagagaattttgaggaagacatgaataagattctaaagattttaccaaagactaggcaaactgcgttattctctgccacccagacctctaaggttaaagatcttgctcgggtgtcattgacatcacctgttcatgtggatgtcgatgatggcagacgcaaggtgacaaatgaaggattggagcaaggctattgtgttgttccgagcaaacaaagacttatccttctaatttcctttttgaaaaagaacctaaataaaaagattatggtatttttctcgacttgcaagtcggtacaattccatacggaaatcatgaaaataagcgacgtggatgtctctgatattcatggaggcatggatcagaacagaagaactaaaacctttttcgacttcatgaaagcaaagaaaggtatcttgttatgtactgatgttgctgctcgtggtctcgatattccttccgtggactggattatacagtatgatccaccagacaagccaacggaatatatccatagggttggtcgaacagcccgtggagaaggagcaaagggaaaggcattacttgtcttgattcctgaagaacttcagtttattcgctacctgaaggctgcgaaagtacctgttaaagagcttgagttcaatgagaagaggcttagtaatgttcaatctgcgctggagaaatgtgttgccaaggactacaatctgaacaagttagccaaagatgcgtacagggcttatctctcagcatacaattcacactctttgaaagacatctttaatgttcaccgacttgacctcctggctgttgctgaatcgttctgcttctcttcgccgcctaaagtgaatctgaacatagaaagtggagctgggaaggtgaggaaggcgagaaagcagcaaggtcgcaatggcttcagtccttacagtccctatggcaagtccacacctacaaaggaggcataaagtgtcatttgtttacaaaattactattttgctccgtagttttgactaattaccaccaccaagttttgtttaaagagtaaacagtgcatttgatttaaatgaaatgttccttggc

SEQ ID NO: 104032 - protein, 568 aa, Arabidopsis thaliana; identical to SEQ ID NO: 48241
  peptide (1)..(568): Ceres Seq. ID no. 13614155

SEQ ID NO: 104033 - protein, 500 aa, Arabidopsis thaliana; identical to SEQ ID NO: 48242
  peptide (1)..(500): Ceres Seq. ID no. 13614156

SEQ ID NO: 104034 - protein, 483 aa, Arabidopsis thaliana; identical to SEQ ID NO: 48243
  peptide (1)..(483): Ceres Seq. ID no. 13614157

SEQ ID NO: 104035 - DNA, 1027 bp, Arabidopsis thaliana
  misc_feature (1)..(1027): Ceres Seq. ID no. 13614181
  misc_feature (1)..(1027): Ortholog of  Ceres SEQ ID NO 13660094 as cited in SEQ ID NO 60820
  misc_feature (1)..(1027): Ortholog of  Ceres SEQ ID NO 13656436 as cited in SEQ ID NO 69154
aaaataatagtcacaaaagaaattagaagacagatcaggaacagctagaagactcttcagggcacagagaaaacacccaccacatcaccgtcttcttcaacaaaatttaccaccagagatcgcagatatttcttcattctatctctctcttttagatccgattcgatgccgtcccgtagacgtaccctcctcaaggtcatcatcctcggtgatagcggggtgggaaaaacctctttgatgaatcagtatgttaataaaaagttcagcaaccagtacaaggcaaccattggagccgacttcttgaccaaggaagtacagtttgaagatcgacttttcactttacagatctgggatacagctggacaggaaaggtttcagagccttggtgtagccttttaccgtggtgctgattgctgtgttcttgtatatgatgtcaattccatgaaatcatttgaaaatctgaacaactggagggaagaatttctgatccaggcgagtccatcagatccagagaattttccatttgttcttatcggaaacaaggttgacgtggatgatggaaacagcagagtggtttcagagaaaaaggctaaagcttggtgtgcttcaaaggggaacattccttactttgagacctctgccaaggtaggtactaatgtggaggaagctttccaatgcattgccaaggacgcattgaagagcggagaagaagaagaactatacttgccagacacaatcgatgtagggacgagcaatcaacagaggtctacagggtgtgaatgctaaggagtatcaccagaaggaaacgaggcctctcctcccattatctcttttcgcaagttatgtctacattattactatgttgtaaattttttcttttgtgtggaaaagggatgagaacaaaaaaagaaggaaccctaaaaaaaaaagagatttgtttagtgttatttgtggggattttcatttatcatgctagctaaataaatactcactttcatcttaattttaagtgatgtttcttgtttgc

SEQ ID NO: 104036 - protein, 206 aa, Arabidopsis thaliana; identical to SEQ ID NO: 38968
  peptide (1)..(206): Ceres Seq. ID no. 13614182

SEQ ID NO: 104037 - protein, 182 aa, Arabidopsis thaliana; identical to SEQ ID NO: 38969
  peptide (1)..(182): Ceres Seq. ID no. 13614183

SEQ ID NO: 104038 - protein, 114 aa, Arabidopsis thaliana; identical to SEQ ID NO: 38970
  peptide (1)..(114): Ceres Seq. ID no. 13614184

SEQ ID NO: 104039 - DNA, 1047 bp, Arabidopsis thaliana
  misc_feature (1)..(1047): Ceres Seq. ID no. 13614189
  misc_feature (1)..(1047): Ortholog of  Ceres SEQ ID NO 13595202 as cited in SEQ ID NO 56273
tgaacgcaggcagagattcttcgaacttgatatttgggaaacttgcaatccgattctgtcaccagtgttttgccttcataaatggagtttgttgttgaagaaggaaagctagtgaatgaagattgctcgactttagttctcccagcattgtcaattgggaatgtaggacagctcgctgttgatcttctagtgtcatctactggtgcagagagagttggttatcttgatgatccaaatctgcttccttgtgttggaaatgatgcttatggccctcttccttgtggcgagatcgcccttcctctcgaggtttatgagtcatcttcaattgctactacccttgctcagcaacggtctccagttgcaaagggaatgatgattaaatttgcggagaatatagccaattttgctgcttcaagtggaaagaagcacatcattgtgttatcgagtttagacttccaaaggctgcataacttggatatgtcgagaggcccacaggtgtattatctgtctaacgctgaatctgatggaagagatgatcactgtgaaaggcttgggtttggaagattgcacgagtatgattcagaaggaagatgttggaagtaccttagctctgtctttgaaaagaacagtgtagaagagctggcgttgccttcagaagatgaacttgaagacatagactactatccaagcttgccatttgcagctcttttctcagcttttaaggcaagaggcttgaagatgacatgcctgctatgttactgttctgaaggagacaacattcctgaagcatttcttctagctgaggcttcatctaagcttatgggtctgactcctgacaagttccatggggaagaaggtgggaaatggcagataccgtattcatggaagagtatgtatggagctcctccggatatgtctatgttttaagactgttgttggagctcacagtgtcagacaccgaggttgttgtagtggtacaattatgatccaatgagaagtttatgaacatttgagatggtttaatccgatagagacaccttttctttc

SEQ ID NO: 104040 - protein, 281 aa, Arabidopsis thaliana
  peptide (1)..(281): Ceres Seq. ID no. 13614190
MEFVVEEGKLVNEDCSTLVLPALSIGNVGQLAVDLLVSSTGAERVGYLDDPNLLPCVGNDAYGPLPCGEIALPLEVYESSSIATTLAQQRSPVAKGMMIKFAENIANFAASSGKKHIIVLSSLDFQRLHNLDMSRGPQVYYLSNAESDGRDDHCERLGFGRLHEYDSEGRCWKYLSSVFEKNSVEELALPSEDELEDIDYYPSLPFAALFSAFKARGLKMTCLLCYCSEGDNIPEAFLLAEASSKLMGLTPDKFHGEEGGKWQIPYSWKSMYGAPPDMSMF

SEQ ID NO: 104041 - protein, 185 aa, Arabidopsis thaliana
  peptide (1)..(185): Ceres Seq. ID no. 13614191
MMIKFAENIANFAASSGKKHIIVLSSLDFQRLHNLDMSRGPQVYYLSNAESDGRDDHCERLGFGRLHEYDSEGRCWKYLSSVFEKNSVEELALPSEDELEDIDYYPSLPFAALFSAFKARGLKMTCLLCYCSEGDNIPEAFLLAEASSKLMGLTPDKFHGEEGGKWQIPYSWKSMYGAPPDMSMF

SEQ ID NO: 104042 - protein, 184 aa, Arabidopsis thaliana
  peptide (1)..(184): Ceres Seq. ID no. 13614192
MIKFAENIANFAASSGKKHIIVLSSLDFQRLHNLDMSRGPQVYYLSNAESDGRDDHCERLGFGRLHEYDSEGRCWKYLSSVFEKNSVEELALPSEDELEDIDYYPSLPFAALFSAFKARGLKMTCLLCYCSEGDNIPEAFLLAEASSKLMGLTPDKFHGEEGGKWQIPYSWKSMYGAPPDMSMF

SEQ ID NO: 104043 - DNA, 1536 bp, Arabidopsis thaliana
  misc_feature (1)..(1536): Ceres Seq. ID no. 13614201
  misc_feature (1)..(1536): Ortholog of  Ceres SEQ ID NO 15171442 as cited in SEQ ID NO 51520
atgacaagttggttttttttttttttttttaattttttcatcttcttgggtttggttgggtcactcttcaggtcaggtgtgtaaaaaagaaagaaagaaaagagagattgttgtgttgtaacccctttgactaaaatctaatgaacttttttaacacaacaaaactccttcagatctgaaagggttcttcttctctcttagtctctttgtccttttattctccgtcgtcgtttcatgatctgactctctggtcttctcttcttcttcttcttcttctattttttcttacttcgtcactgttgtgtctgaacatgccacgccctttcttccataagttgattttctcatccactatccaagaaaaacgtctgagggtcccagataagtttgtgagtaaattcaaggatgagctttcggttgctgttgcactcacagtacctgatggtcatgtttggcgtgtaggactaaggaaagctgacaacaaaatttggtttcaagatggttggcaagagtttgttgaccgttactccattcgcattggttatcttttgatttttagatatgaaggaaactctgccttcagcgtctacattttcaatttatcccactctgagatcaattaccattccaccggtctcatggattccgctcacaaccacttcaaacgcgcccgtttgtttgaagaccttgaagatgaagatgccgaggtcatctttccttcttctgtgtacccatcaccacttcctgagtctacagtaccagccaacaaagggtatgctagttcagccatccaaaccttgttcactggaccagttaaagctgaagagccaacgccaaccccaaaaatacctaaaaagagagggaggaagaagaaaaatgctgatcctgaggaaataaactcatcagctccgcgagatgatgatccagagaaccgttcaaagttctacgagagtgcttctgcgagaaagagaaccgtgactgcagaagaaagagagagagccatcaatgcagccaaaacgttcgaaccaacaaaccctttcttcagagtggttctgcgaccatcctatctatacagaggttgcatcatgtatcttccttctgggtttgctgagaagtacctaagtgggatctccgggttcatcaaagtccagcttgcggagaaacaatggcctgttcgatgtctctacaaagccgggagagccaaattcagtcaaggatggtacgaattcactctagagaacaacttaggagaaggagacgtctgtgtgtttgagctgctcagaaccagagatttcgttttgaaagtgacagcctttcgagtcaacgagtacgtctgaacaaagcattatggtgtgatcattctggatttgcaagtacaatgtcgtgtaggagtatcttaatttaaaaacaactaaaaaactctcttctggtctgtgtcattattgcgtcagtgtctcgttttttctctcgggtttactttgtgttatcgatgtggataagttgtttttacctcattatatataacctcttgagtgg

SEQ ID NO: 104044 - protein, 341 aa, Arabidopsis thaliana; identical to SEQ ID NO: 36797
  peptide (1)..(341): Ceres Seq. ID no. 13614202

SEQ ID NO: 104045 - protein, 232 aa, Arabidopsis thaliana; identical to SEQ ID NO: 36798
  peptide (1)..(232): Ceres Seq. ID no. 13614203

SEQ ID NO: 104046 - DNA, 1255 bp, Arabidopsis thaliana
  misc_feature (1)..(1255): Ceres Seq. ID no. 13614204
  misc_feature (1)..(1255): Ortholog of  Ceres SEQ ID NO 12636774 as cited in SEQ ID NO 372
  misc_feature (1)..(1255): Ortholog of  Ceres SEQ ID NO 15174842 as cited in SEQ ID NO 53054
  misc_feature (1)..(1255): Ortholog of  Ceres SEQ ID NO 14310917 as cited in SEQ ID NO 53231
  misc_feature (1)..(1255): Ortholog of  Ceres SEQ ID NO 15170037 as cited in SEQ ID NO 55447
  misc_feature (1)..(1255): Ortholog of  Ceres SEQ ID NO 13582350 as cited in SEQ ID NO 56734
  misc_feature (1)..(1255): Ortholog of  Ceres SEQ ID NO 12476493 as cited in SEQ ID NO 58163
  misc_feature (1)..(1255): Ortholog of  Ceres SEQ ID NO 13597295 as cited in SEQ ID NO 63743
  misc_feature (1)..(1255): Ortholog of  Ceres SEQ ID NO 12617090 as cited in SEQ ID NO 64005
  misc_feature (1)..(1255): Ortholog of  Ceres SEQ ID NO 13597233 as cited in SEQ ID NO 64370
  misc_feature (1)..(1255): Ortholog of  Ceres SEQ ID NO 13599438 as cited in SEQ ID NO 0
atcgatatctccaaagcctactctaaaaaataaccacaagaatcactgccaaaactgccatgggagaactcgacgaagcttttatccaagctccagaacacagacccaacactcacctcacaaactccggtgatttcattttctccgacgagatcccgaccatcgacctctcttctctcgaagatactcatcatgacaagactgcgatcgccaaggagattgcagaggcatgcaagagatggggattttttcaagtgatcaaccatggcttgccttcagctttaaggcatcgtgtagagaagacagctgctgagtttttcaatctaacgacggaggagaagaggaaagtgaaaagagacgaagtgaatcctatgggttatcacgacgaagaacacactaagaacgttagagattggaaggaaattttcgatttcttcttacaagattccacgatcgttccggcgtcaccggagccggaagatactgagctccgaaagctcacgaaccagtggcctcaaaacccttctcatttcagagaggtatgccaagaatatgcaagagaagttgagaagttagcttttaggctattggaacttgtctccattagtttgggtctacctggtgatcggctaaccggtttcttcaatgagcaaactagttttttgcggtttaaccattaccctccttgcccgaaccccgagctagcattaggtgttggacgtcacaaagatggaggagctttaaccgtcctggcccaagatagtgtaggtggattacaagtgagtcgtagatcggatggacaatggatccccgtgaaaccgatctcggatgctttgatcattaacatgggcaattgtattcaggtgtggacaaatgatgagtattggagtgctgaacatagagtggtcgtgaatacaagcaaagagagattctcaataccattcttcttcttcccatcacatgaagccaatattgagccattggaggagcttataagtgaggaaaacccgccttgttataaaaagtacaattggggaaagttctttgtttcaagaaacagaagtgatttcaagaaactcgaggttgagaatatccagattgatcacttcaaggcttagttaatcacattataattaaaccttatgttgatttctattcgttctttttatataagttagccaagttcatatttcccaaaatgcacgcgagattttacatgtttatgtttaaaataaacggtcatcagaatgttgtg

SEQ ID NO: 104047 - protein, 352 aa, Arabidopsis thaliana; identical to SEQ ID NO: 23735
  peptide (1)..(352): Ceres Seq. ID no. 13614205

SEQ ID NO: 104048 - protein, 248 aa, Arabidopsis thaliana; identical to SEQ ID NO: 23736
  peptide (1)..(248): Ceres Seq. ID no. 13614206

SEQ ID NO: 104049 - DNA, 1173 bp, Arabidopsis thaliana
  misc_feature (1)..(1173): Ceres Seq. ID no. 13614207
  misc_feature (1)..(1173): Ortholog of  Ceres SEQ ID NO 15174842 as cited in SEQ ID NO 53054
  misc_feature (1)..(1173): Ortholog of  Ceres SEQ ID NO 14310917 as cited in SEQ ID NO 53231
  misc_feature (1)..(1173): Ortholog of  Ceres SEQ ID NO 15170037 as cited in SEQ ID NO 55447
  misc_feature (1)..(1173): Ortholog of  Ceres SEQ ID NO 12615466 as cited in SEQ ID NO 62761
  misc_feature (1)..(1173): Ortholog of  Ceres SEQ ID NO 13597295 as cited in SEQ ID NO 63743
  misc_feature (1)..(1173): Ortholog of  Ceres SEQ ID NO 12617090 as cited in SEQ ID NO 64005
  misc_feature (1)..(1173): Ortholog of  Ceres SEQ ID NO 13597439 as cited in SEQ ID NO 64081
  misc_feature (1)..(1173): Ortholog of  Ceres SEQ ID NO 13597233 as cited in SEQ ID NO 64370
  misc_feature (1)..(1173): Ortholog of  Ceres SEQ ID NO 13598327 as cited in SEQ ID NO 68040
atccaaagtccaaacacagcataaaagtagctctattgactttttttcttcctccaaactctttttacgtcaagcaatggaggatcttgatccaacctacatccaagcaccagagcatagatcagattcgaatttcatccctaaccaaccagaagaaatacccgtgattgatctctcgcgcctcgatgaccccgaagatgtccaaaacgttatctcagagatcggtgatgcttgtgaaaaatggggattttttcaggtgcttaatcatggtgtgccttctgacgcaaggcaacgtgtggagaagactgtgaagatgtttttcgatttgcctatggaagagaagataaaggtgaagagagacgatgtgaatcctgtagggtatcatgatggagaacacaccaagaacgttaaagattggaaagaagtgtttgatatttatttcaaagatccaatggtcattccttcaaccactgatcctgaagatgaaggcttaagacttgtttacaacaagtggcctcaatctccttctgatttcagggaagcatgtgaagtatatgcgagacacgctgaaaaattagcgttcaagctcttggaactgatttcgttaagcttaggcttgccaaaagagcgttttcatgactacttcaaagaacaaatgagttttttcaggataaatcgttatccaccatgtccaagacctgacctagctttaggtgttggtcaccacaaagatgccgacgttattagtctattggctcaagatgatgttggaggattacaagttagtcgtagatcggacggtgtttggtttccgattagacccgtccctaatgctcttgtcatcaatataggcaattgtatggagatatggacgaatgacaagtattggagtgctgaacatagagtggtggtgaacacaacaagagagagatactcgataccattcttcttgttgccttcacacgatgtggaagtgaagccattagaagaacttgtgagtcctgaaaaccctccaaaatacaaaggctataaatggggtaagttctacgtcagtaggaatagaagcgattttcgaaaactggaaatcgaaaacatccaaatcgatgacttcaaagttaaaacttaatatactatgtatcggctttttttttgtttaccaagctatgatattaa

SEQ ID NO: 104050 - protein, 374 aa, Arabidopsis thaliana; identical to SEQ ID NO: 37546
  peptide (1)..(374): Ceres Seq. ID no. 13614208

SEQ ID NO: 104051 - protein, 349 aa, Arabidopsis thaliana; identical to SEQ ID NO: 37547
  peptide (1)..(349): Ceres Seq. ID no. 13614209

SEQ ID NO: 104052 - protein, 270 aa, Arabidopsis thaliana; identical to SEQ ID NO: 37548
  peptide (1)..(270): Ceres Seq. ID no. 13614210

SEQ ID NO: 104053 - DNA, 1690 bp, Arabidopsis thaliana
  misc_feature (1)..(1690): Ceres Seq. ID no. 13614213
  misc_feature (1)..(1690): Ortholog of  Ceres SEQ ID NO 14303479 as cited in SEQ ID NO 54254
  misc_feature (1)..(1690): Ortholog of  Ceres SEQ ID NO 12611392 as cited in SEQ ID NO 56826
  misc_feature (1)..(1690): Ortholog of  Ceres SEQ ID NO 13660872 as cited in SEQ ID NO 60830
  misc_feature (1)..(1690): Ortholog of  Ceres SEQ ID NO 12616221 as cited in SEQ ID NO 63291
aaaagatcgacgaacataaaaacaaaaacatataatttgggtttttagagttcgaaacttgaaatctttttttttttggttgctgaggaatcgaagtagaagagtataaatgggtgttagagagaaagatccgttagcccagttgagtttgccaccaggttttagattttatccgacagatgaagagcttcttgttcagtatctatgtcggaaagttgcaggctatcatttctctctccaggtcatcggagacatcgatctctacaagttcgatccttgggatttgccaagtaaggctttgtttggagagaaggaatggtatttctttagcccaagagatcggaaatatccgaacgggtcaagacccaatagagtagccgggtcgggttattggaaagcaacgggtactgacaaaattatcacggcggatggtcgtcgtgtcgggattaaaaaagctctggtcttttacgccggaaaagctcccaaaggcactaaaaccaactggattatgcacgagtatcgcttaatagaacattctcgtagccatggaagctccaagttggatgattgggtgttgtgtcgaatttacaagaaaacatctggatctcagagacaagctgttactcctgttcaagcttgtcgtgaagagcatagcacgaatgggtcgtcatcgtcttcttcatcacagcttgacgacgttcttgattcgttcccggagataaaagaccagtcttttaatcttcctcggatgaattcgctcaggacgattcttaacgggaactttgattgggctagcttggcaggtcttaatccaattccagagctagctccgaccaatggattaccgagttacggtggttacgatgcgtttcgagcggcggaaggtgaggcggagagtgggcatgtgaatcggcagcagaactcgagcgggttgactcagagtttcgggtacagctcgagtgggtttggtgtttcgggtcaaacattcgagtttaggcaatgagagagatgtgaagttactgatgggtgaaaaaagtaaaaaaaaaacttggagatagtagagtggcaattgatgtaaataatagggatttatatggggcttttaccgattcggtgaggcttaggattccacaaaggaaaaaggctcgactggggactagtttgatccaacttgacggcccacaaatgtgtaatgtttctcaacggagagaaaaataaatggttaccaatatttttacaccggttatgtgttgataccatttgcacaaaacggtttaagttctgaattgaataacttaacacccaaaatttggtaaaaagcttaatacaaaaagttcaaaggcattttcgcttactgcgacactcggagttgcagagtactctacgtaacagactctgttcatagagtttgcggcaccggtggtgggacattcttgcggacacagtatgtacttttggaagcatcgttcctaagggttgctgcagtaaactccttgtgacttggctcgcaagaaacataacatggccgcaagaaaaaacagcattaacgaagaggtgtttgagatcttcatgtctagtttattcttcctgttttattatgtgtcgactggtgtcaaaagaaacgtgttgattgtgaatttgtagacgccactctgtaaatttatttaaaataaactattttacttcacgt

SEQ ID NO: 104054 - protein, 297 aa, Arabidopsis thaliana; identical to SEQ ID NO: 24428
  peptide (1)..(297): Ceres Seq. ID no. 13614214

SEQ ID NO: 104055 - protein, 164 aa, Arabidopsis thaliana; identical to SEQ ID NO: 24429
  peptide (1)..(164): Ceres Seq. ID no. 13614215

SEQ ID NO: 104056 - DNA, 1276 bp, Arabidopsis thaliana
  misc_feature (1)..(1276): Ceres Seq. ID no. 13614216
  misc_feature (1)..(1276): Ortholog of  Ceres SEQ ID NO 14315614 as cited in SEQ ID NO 52972
  misc_feature (1)..(1276): Ortholog of  Ceres SEQ ID NO 14302754 as cited in SEQ ID NO 61212
atcgtacaacccatctctttttttttttttaacttgtcttctctctttccttaactttgatggcactgtcccttctctcctacaacgtctccgacctctgtctcggcaaacctcctcttcgttgtctttcctcctcttcctcctccgtatccgacgccatcgctgccctcaaatcctctgaagacactttcctctccgtctggaattgcaatcacgacgatgacaataacacagagtgcgagtgcttggggaaaatatcaatggctgacgtcatctgccacttgtccaaagaccatgaccacagtctctgtgccttaaactcatccgtctctgttcttctccccaaaactcgttccattgtcctccatgttcaaccatcctgcagcttaatagaagccattgatctgataatcaaaggagcacagaatctgattgtcccgatacatacaaagccctacactaagaaaaagcagcacaacgacaacgtttcggtcaccaccaccacccactcgaacggacaacgattctgctggatcacacaagaagacatcattcagtttctcctcggattcatcgccgcattctctcctttgccagcgatgtccctctctgatctcggtgtcatcaacagcacacacacagttgttgcggtcgattaccactcctcagcgtccgcagttgtctctgccgtatccaacgctcttgccgtccaaacctctgtcgcagtggtcgacggtgagggagatgacccttttacgtctttgatcggcgaaatatccccgatgacattaacttgctgcgacgagacagcagctgcggcggtggcgacgctctccgctggagatctgatggcgtacatagacggagcaaatcctccggagagtcttgttcagatcgttaggaaccgtttggaggataaaggattgattggtttgatgtcgcttttcgattctctctcatcttattcgacgtcgtcgggttattcgtcggaggaagaagctccagtgagaacgacgtcgtatggacggtcgatgagtagctcagcaagaatggcaaggaagtcggaggcgatagtgtgtaatccaaagagctcgttaatggcagtgatgatccaagcggttgctcatcgagtgaactacgcgtgggtggttgagaaggatggttgtttcgttggcatggttacttttgttgatatcttaaaagtttttaggaaatttttggagaatgacatgtgaaaagttttttaaatatattttcttgtgttttgtcgattact

SEQ ID NO: 104057 - protein, 391 aa, Arabidopsis thaliana
  peptide (1)..(391): Ceres Seq. ID no. 13614217
MALSLLSYNVSDLCLGKPPLRCLSSSSSSVSDAIAALKSSEDTFLSVWNCNHDDDNNTECECLGKISMADVICHLSKDHDHSLCALNSSVSVLLPKTRSIVLHVQPSCSLIEAIDLIIKGAQNLIVPIHTKPYTKKKQHNDNVSVTTTTHSNGQRFCWITQEDIIQFLLGFIAAFSPLPAMSLSDLGVINSTHTVVAVDYHSSASAVVSAVSNALAVQTSVAVVDGEGDDPFTSLIGEISPMTLTCCDETAAAAVATLSAGDLMAYIDGANPPESLVQIVRNRLEDKGLIGLMSLFDSLSSYSTSSGYSSEEEAPVRTTSYGRSMSSSARMARKSEAIVCNPKSSLMAVMIQAVAHRVNYAWVVEKDGCFVGMVTFVDILKVFRKFLENDM

SEQ ID NO: 104058 - protein, 324 aa, Arabidopsis thaliana
  peptide (1)..(324): Ceres Seq. ID no. 13614218
MADVICHLSKDHDHSLCALNSSVSVLLPKTRSIVLHVQPSCSLIEAIDLIIKGAQNLIVPIHTKPYTKKKQHNDNVSVTTTTHSNGQRFCWITQEDIIQFLLGFIAAFSPLPAMSLSDLGVINSTHTVVAVDYHSSASAVVSAVSNALAVQTSVAVVDGEGDDPFTSLIGEISPMTLTCCDETAAAAVATLSAGDLMAYIDGANPPESLVQIVRNRLEDKGLIGLMSLFDSLSSYSTSSGYSSEEEAPVRTTSYGRSMSSSARMARKSEAIVCNPKSSLMAVMIQAVAHRVNYAWVVEKDGCFVGMVTFVDILKVFRKFLENDM

SEQ ID NO: 104059 - protein, 211 aa, Arabidopsis thaliana
  peptide (1)..(211): Ceres Seq. ID no. 13614219
MSLSDLGVINSTHTVVAVDYHSSASAVVSAVSNALAVQTSVAVVDGEGDDPFTSLIGEISPMTLTCCDETAAAAVATLSAGDLMAYIDGANPPESLVQIVRNRLEDKGLIGLMSLFDSLSSYSTSSGYSSEEEAPVRTTSYGRSMSSSARMARKSEAIVCNPKSSLMAVMIQAVAHRVNYAWVVEKDGCFVGMVTFVDILKVFRKFLENDM

SEQ ID NO: 104060 - DNA, 973 bp, Arabidopsis thaliana
  misc_feature (1)..(973): Ceres Seq. ID no. 13614224
  misc_feature (1)..(973): Ortholog of  Ceres SEQ ID NO 13594180 as cited in SEQ ID NO 60353
aagcaccacatgttcagattttttcctaacaagaagaaaagaagtcgcagtttcatcgtctttcttccattatcgtgcaattaaattctctcattttcaagaaaatatctgaaaaaacagaaacttaacagaagcagcttcgatcaagagatggcttcacttacttcaatagccacgccttacccatcttcatcgcaggctttgcgtctgaaatcctccggaaacactcttttctctgccggagttcgatcggcagcaatggtttccggtcacaaaacgcttaagattcaatgcacttcaaccaaacctgccaaacctgcagctgaagtcgattggagacagaagagagagcttctattggagaaaagggtgagaagtgtggacgtgaaggaagctcaacggttacaaaaagaaaacaactttgtgattcttgatgtaagaccagaggcagagtacaaggcgggtcatcctccgggagctatcaatgtggagatgtacagactcataagggaatggacggcatgggacatagctcgccgtcttggctttgctttctttggtatcttctctggcacagaagagaaccctgagtttattcaaagtgtagaagctaaacttgacaaagaggcaaagatcatagtagcttgttcatccgcgggtacaatgaagccgacacaaaatcttcccgaaggccaacaatcgaggtctctcatagctgcttatcttctggtccttaacggctataagaacgtatttcacctagaaggtggaatctacacatggggcaaggaaggtcttcctgttgaaacaattgaagaagactaaccaacttctttactctagagttgtccagttttgtatatctgtccatttcagttagttgcatttagagatttggcttttcagagagtgttttgaggtttgtaaaacttcagactttaccatgaaatccagcaaactcgaccggaatcca

SEQ ID NO: 104061 - protein, 224 aa, Arabidopsis thaliana; identical to SEQ ID NO: 29403
  peptide (1)..(224): Ceres Seq. ID no. 13614225

SEQ ID NO: 104062 - protein, 188 aa, Arabidopsis thaliana; identical to SEQ ID NO: 29404
  peptide (1)..(188): Ceres Seq. ID no. 13614226

SEQ ID NO: 104063 - DNA, 1043 bp, Arabidopsis thaliana
  misc_feature (1)..(1043): Ceres Seq. ID no. 13614227
  misc_feature (1)..(1043): Ortholog of  Ceres SEQ ID NO 15226526 as cited in SEQ ID NO 54159
gagaaaacggagcgagagagatgtatctgaagagaccgatatggagcgatggcgcgtcagcaacgccggagaatccatcagaatcggagaccggagaagaatcagacgcggcgtcgatggtagtcgaagagctggtgacttctctcaatacacagagactttacagggagctgacactatccctcaggaccggtttacgcgatgcttgcgctgaattctccttccttcgcatccgtggtcttagatctcttctcaaaactctccgaactgtcgctgattcagattcaatcattcgtctcttctctcatacccaaaccatttccgatctccaactggttccggtgctttttcaacattcattgaaagaagcggaggatgataaagtgacgagcttggatcatatattcagtgtggagccgatgaagataacaagtccttctacggatgctgaggttgctgttgctcttagagttctcgaaggatgctgccttctccatcctcagagcactgtcctggctcataagcatggtgcagtccgcgtaatgatgaatgtattatcaacacgaggagtacttgagcaaggagcctgcttggatgccttaatctcagtattgctggattcatcagcaaatcaggtggattttggagcttgcaatggcattgaagaggttgcaatgctcatgcgagacaaacaagctgatgaaaacctcaggttaagatgcggagagttcttactactgttagttggacacgtaaatgggaaggatcgatctccaatagcgagtgtaaatgaagacatcaggcgcctcttgggtgaaaaatctgcttctttaatatgggcggcgagtcaattcggttcaacaggtgatcctgaacaaagaatcacggcgcttcatatccaggctggtagagtgctcgagtctcttgacttgtactaactgtcaaactacttttgttttttccttatttacataataccaagttattattatgtgtaacaatgtaacaacactcatgaaaatagagttgtttaatgatgttcc

SEQ ID NO: 104064 - protein, 311 aa, Arabidopsis thaliana
  peptide (1)..(311): Ceres Seq. ID no. 13614228
ENGAREMYLKRPIWSDGASATPENPSESETGEESDAASMVVEELVTSLNTQRLYRELTLSLRTGLRDACAEFSFLRIRGLRSLLKTLRTVADSDSIIRLFSHTQTISDLQLVPVLFQHSLKEAEDDKVTSLDHIFSVEPMKITSPSTDAEVAVALRVLEGCCLLHPQSTVLAHKHGAVRVMMNVLSTRGVLEQGACLDALISVLLDSSANQVDFGACNGIEEVAMLMRDKQADENLRLRCGEFLLLLVGHVNGKDRSPIASVNEDIRRLLGEKSASLIWAASQFGSTGDPEQRITALHIQAGRVLESLDLY

SEQ ID NO: 104065 - protein, 305 aa, Arabidopsis thaliana
  peptide (1)..(305): Ceres Seq. ID no. 13614229
MYLKRPIWSDGASATPENPSESETGEESDAASMVVEELVTSLNTQRLYRELTLSLRTGLRDACAEFSFLRIRGLRSLLKTLRTVADSDSIIRLFSHTQTISDLQLVPVLFQHSLKEAEDDKVTSLDHIFSVEPMKITSPSTDAEVAVALRVLEGCCLLHPQSTVLAHKHGAVRVMMNVLSTRGVLEQGACLDALISVLLDSSANQVDFGACNGIEEVAMLMRDKQADENLRLRCGEFLLLLVGHVNGKDRSPIASVNEDIRRLLGEKSASLIWAASQFGSTGDPEQRITALHIQAGRVLESLDLY

SEQ ID NO: 104066 - protein, 273 aa, Arabidopsis thaliana
  peptide (1)..(273): Ceres Seq. ID no. 13614230
MVVEELVTSLNTQRLYRELTLSLRTGLRDACAEFSFLRIRGLRSLLKTLRTVADSDSIIRLFSHTQTISDLQLVPVLFQHSLKEAEDDKVTSLDHIFSVEPMKITSPSTDAEVAVALRVLEGCCLLHPQSTVLAHKHGAVRVMMNVLSTRGVLEQGACLDALISVLLDSSANQVDFGACNGIEEVAMLMRDKQADENLRLRCGEFLLLLVGHVNGKDRSPIASVNEDIRRLLGEKSASLIWAASQFGSTGDPEQRITALHIQAGRVLESLDLY

SEQ ID NO: 104067 - DNA, 1598 bp, Arabidopsis thaliana
  misc_feature (1)..(1598): Ceres Seq. ID no. 13614235
  misc_feature (1)..(1598): Ortholog of  Ceres SEQ ID NO 14311032 as cited in SEQ ID NO 54590
  misc_feature (1)..(1598): Ortholog of  Ceres SEQ ID NO 15170493 as cited in SEQ ID NO 58432
ctcttgttttctttttccctcttctccaaggaatctggaaaaaattaaaccttttttctaaatccctggaaatcagaaaacttcctattgagaaaccatagattcgatccaagcctttgattgtatcaaaatctctgcttcaccaagaatttgggttgatacagaagaaaaaagttaaatggttgaggcagagcgcgcggagaatagttggattgcttcggaaacgtctccgtcgtcgtctccggtggtaatagaaagcagtgatttttcgataactgatggaatgagagatgtgagcggatttggtatagcttctcgacctcagttggacaagggtttgtcggaaaacaatatagggttcacggaaagagttttctctgccgccggagctgcggttttgtccgccgttactctaaatcctcttgacgttgtcaagactcgattgcaagctcaagccgccggaatgtcgtactctcacccactcagtaactccattggacgcatggcattttttggcccaaacatgatgtttgcagacttgagatgttctccttcatgtgcacgcgctggtgttgaaggtactgtttctatttgcccaccggattgtttccagtacaaaggaacatttgatgtcttcaccaagatcatacgacaggagggtctgggacgcctttggagagggactaatgctggtcttgccctagctgtgcccatggttgggatatatctcccattctatgatatgttccgcaaccggttggaagaattatctcgggagaaagctcctgctatgacattttgtgtgcctactgtggcagggtctttagcgcggtccttagcttgtacagtctgctatcctattgatcttgcaagaacgcgtatgcaggcattcaaagaagcaaaagccggtgtgaagcctccgggagtttttaaaactctagttggtgttttctctgaagtcaggacagcaaataaccttgaaagtagcttgcacaactatcgtggtctctggagaggcttgggtgcacagcttgcccgtgatgttccattctcagcaatctgctggtcgaccctcgagccaataaaaaagaggctccttggagttgcgggcaatgatacaaatcttgttggtgttttcggtgcaaccttttctgctggatttatagctggaagtatcgctgctgctgctacttgtcctcttgacgttgcaagaacaagaagacagatagagaaggaccctggtagggcattgatgatgacgacacgacagacactaatagaggtttggagggatggagggatgagaggactgttcatgggaatgggtccacgagtggcacgtgcaggaccatcggtagggatagtggtttccttctacgaagtggtcaagtatgttctgcatcgccatgcttcatcatgaccctgcaaagtcactaatctcctaaacatggatctgtggatacggctttaggttgtagcttcttttttcaagttaacagaataagttaaacaggctcaatgctccagaaacccgagtttcctctgtttatgagccttaattttgtccagttattaaataccggctgtttttaatgttt

SEQ ID NO: 104068 - protein, 413 aa, Arabidopsis thaliana; identical to SEQ ID NO: 42489
  peptide (1)..(413): Ceres Seq. ID no. 13614236

SEQ ID NO: 104069 - protein, 378 aa, Arabidopsis thaliana; identical to SEQ ID NO: 42490
  peptide (1)..(378): Ceres Seq. ID no. 13614237

SEQ ID NO: 104070 - protein, 318 aa, Arabidopsis thaliana; identical to SEQ ID NO: 42491
  peptide (1)..(318): Ceres Seq. ID no. 13614238

SEQ ID NO: 104071 - DNA, 907 bp, Arabidopsis thaliana
  misc_feature (1)..(907): Ceres Seq. ID no. 13614239
  misc_feature (1)..(907): Ortholog of  Ceres SEQ ID NO 12626108 as cited in SEQ ID NO 64252
agtccgcgaaaaaatggcgtttctctgttcgtctctcccaagttcatcctctatcgccattttcggcgacccaaacacagatggatcatcacgctcgtatctttcgattccttcattgaagttacggttccgtcccgtcgctgcttcctcacacatttgtgctccagcgatcgacaagtcgactttcgtcatatccgaatcggtgtcagaagatgagctttgggctgcagcttgtctccgcgtacgaaccttcaacgaactcaatccttctgcttacaatatccaagatcatagaagatacttggcagagcgtgaattcgaggcgcttaaggagagaacttcagggaagagggaagggtttacgcgggtcgcttgcataaatgctacccttccattgtcgcaattatcaagctcttttgaggatttatgctctgcatgtaagttctctgatggcatagaagacagagttgtggtgggaagccttgatcttaaccaatgtcgttggcttcctgatgaaattgctggaacaaaaccagaggggattggtgtggattttgctagagcatacttgagcaacgtctgtgttgcaaaagagctgcatcgtaatggagttggttacaaacttattgacaagtctaagagagttgctggagaatggggcataacggatatgtacgtgcatgtgacggtagacaatgaagcagcgaagagtctatacatgaaaagtgggtttgagcaagagaccgctgagccagcgtggcaagctcgatacctcaataggccacaacggctcctcctctggctcgcccttcctacctccccaatcatgtccatgtaattgtaaattttccaatatatccaatatgtcaacctgttcttggcaatcaataaaagctttataactctc

SEQ ID NO: 104072 - protein, 278 aa, Arabidopsis thaliana; identical to SEQ ID NO: 28714
  peptide (1)..(278): Ceres Seq. ID no. 13614240

SEQ ID NO: 104073 - protein, 274 aa, Arabidopsis thaliana; identical to SEQ ID NO: 28715
  peptide (1)..(274): Ceres Seq. ID no. 13614241

SEQ ID NO: 104074 - DNA, 1211 bp, Arabidopsis thaliana
  misc_feature (1)..(1211): Ceres Seq. ID no. 13614242
  misc_feature (1)..(1211): Ortholog of  Ceres SEQ ID NO 14306671 as cited in SEQ ID NO 53809
  misc_feature (1)..(1211): Ortholog of  Ceres SEQ ID NO 15178206 as cited in SEQ ID NO 57238
  misc_feature (1)..(1211): Ortholog of  Ceres SEQ ID NO 13596735 as cited in SEQ ID NO 62904
aggctgcttttcttcgtgaatctcagaatcttaaaagactcagatttgagaaaacgtttcaatatctaaatccatttctctccctctctctttagccatttagaatgaagaaaagtctcactctactcatcctcctcctctgttctctcctcttctccaccgtcttgagcaacctactcgtcgaaccggtccaacccaacaccgtaccagccttccccgtcgaaacccaagctcaaagctgccgacttgacctctccaacgagctattcggtggcgtcaacgaagcttgcggaagaaaccttgaccggagtcgatgttgccctgttttagccgcttggctcttcgcagctcacgctcgctctgctctccagttaccagctcctgctccaacgccggaatcttctgatcccgacgaacccatgaagcctgacgactctcagaagtgcgtcaacacattgcaaagtgcgcttttgactaaacaaatcaagatccctcagcctaattctagctgtgacgcaatcttgtgcttctgtggtattcgtctccaccagattagctcactctcttgtcccgccgctttcaatgtctcctccggcttcaaaaacgcaactccgaccgccgccgtgaagaatcttgaaaaagaatgccggaactcttcttactccggttgtaccagatgcctcggtgctcttcaaaagctaaaggtaagaggaggaaacaagaagacaacaacagagagagggactaagatgatgagcaaagattgccagctcatgggactcacatggctactagctcgtaacaaaacggcatacattcccactgtttcggctgtgttaagagctattatgtatagtccacacccacctcacctcaacaagtgtagtcctgaccaagagaacatgcctttagcagttgactctctacagtttcaaaagagcttctcttcatcatctcatctttttggggttttaccgtttttacccttagtcctttgtatctttctctttctactgtgatttttttctgtattttttggtcgggaggggtaaagagagtcacgtgaagctacaagacagttatgtgtatgtaaatgctgtgctctttttttggttctgcaaactcttaaccctcattttttggttttaactgtgttttgtcccatttaacactttgtacgaggtcttgaaattttaaaaaatcatcttggc

SEQ ID NO: 104075 - protein, 304 aa, Arabidopsis thaliana
  peptide (1)..(304): Ceres Seq. ID no. 13614243
MKKSLTLLILLLCSLLFSTVLSNLLVEPVQPNTVPAFPVETQAQSCRLDLSNELFGGVNEACGRNLDRSRCCPVLAAWLFAAHARSALQLPAPAPTPESSDPDEPMKPDDSQKCVNTLQSALLTKQIKIPQPNSSCDAILCFCGIRLHQISSLSCPAAFNVSSGFKNATPTAAVKNLEKECRNSSYSGCTRCLGALQKLKVRGGNKKTTTERGTKMMSKDCQLMGLTWLLARNKTAYIPTVSAVLRAIMYSPHPPHLNKCSPDQENMPLAVDSLQFQKSFSSSSHLFGVLPFLPLVLCIFLFLL

SEQ ID NO: 104076 - protein, 199 aa, Arabidopsis thaliana; identical to SEQ ID NO: 37675
  peptide (1)..(199): Ceres Seq. ID no. 13614244

SEQ ID NO: 104077 - DNA, 1215 bp, Arabidopsis thaliana
  misc_feature (1)..(1215): Ceres Seq. ID no. 13614245
  misc_feature (1)..(1215): Ortholog of  Ceres SEQ ID NO 15227026 as cited in SEQ ID NO 52193
  misc_feature (1)..(1215): Ortholog of  Ceres SEQ ID NO 15177903 as cited in SEQ ID NO 54993
  misc_feature (1)..(1215): Ortholog of  Ceres SEQ ID NO 13595454 as cited in SEQ ID NO 56502
tttgaaacgtcagggaaagagaatcccgcaatactctctcctctctcttttttttttttttctgggtcgaagtttggttctttgttggataatgatggtttttgacagtgaatctaacctagaccgattcttacgctgcactacaccgattgtgcctgcctattccctcccaaagacacagatcaagaaccttaatcctctatggtatccgttggagagccagagcgtcgagtatttcaggttgggagatttttgggattgtttcgacgagtggagtgcttacggtgcaggtgtccccattgtatcggaaacgggcgaaacattggtccaatactatgttccttacctctctgcaatccagattttcacctctcattctgttatcaatactcttagggaggagacagaatcaggggattcagggagcgagtcgtgtagcgaggagtggagatgggaaggatgttcttcgtctgaagaagggtttgatcatcaagaacctctcgatcgcctcggttactcttacttgcagtatttcgagagatgtacaccttactctagagtccctctcatggataagatcaaagagttgggagaaagatacgtagggttgaggtcattgaggagtgttgatctgtctcctgcgagttggatggctgttgcttggtatccaatctatcacattcccatgaatagaagcataaaagacttgtctacttgcttcctcacttaccacacgctttcttcatctttccaagatgtaaaaagggaagaggagaaggagaggataagtgtgagtgcatttgggatggccacttacaagatgcaagggaggctatgggataatgatagattgctttgctttttgagcgtagcagattcttggctaaagcagctaagggtccaccaccatgacttcacctacttcaccactactactcattatctttgatatatgtagtgttttagatcattacttggttaacagtctatttagctttgttgtttaagagtagcacatatcaataatgttggattgttgttacttgggactctttgggaaggataggtactgactttttcttcacaagacttttatatcataaatttagtttggggtcagattgatgatgatgggctcaatacatttattcttttctaatgttttgtggctttctgtttgtacaaacgcacgttctcttgattttggtatccttc

SEQ ID NO: 104078 - protein, 315 aa, Arabidopsis thaliana
  peptide (1)..(315): Ceres Seq. ID no. 13614246
LKRQGKRIPQYSLLSLFFFFLGRSLVLCWIMMVFDSESNLDRFLRCTTPIVPAYSLPKTQIKNLNPLWYPLESQSVEYFRLGDFWDCFDEWSAYGAGVPIVSETGETLVQYYVPYLSAIQIFTSHSVINTLREETESGDSGSESCSEEWRWEGCSSSEEGFDHQEPLDRLGYSYLQYFERCTPYSRVPLMDKIKELGERYVGLRSLRSVDLSPASWMAVAWYPIYHIPMNRSIKDLSTCFLTYHTLSSSFQDVKREEEKERISVSAFGMATYKMQGRLWDNDRLLCFLSVADSWLKQLRVHHHDFTYFTTTTHYL

SEQ ID NO: 104079 - protein, 285 aa, Arabidopsis thaliana; identical to SEQ ID NO: 27729
  peptide (1)..(285): Ceres Seq. ID no. 13614247

SEQ ID NO: 104080 - protein, 284 aa, Arabidopsis thaliana; identical to SEQ ID NO: 27730
  peptide (1)..(284): Ceres Seq. ID no. 13614248

SEQ ID NO: 104081 - DNA, 1388 bp, Arabidopsis thaliana
  misc_feature (1)..(1388): Ceres Seq. ID no. 13614266
  misc_feature (1)..(1388): Ortholog of  Ceres SEQ ID NO 15176709 as cited in SEQ ID NO 1148
  misc_feature (1)..(1388): Ortholog of  Ceres SEQ ID NO 13658922 as cited in SEQ ID NO 66316
ctctctctctcgttaacgcttcggcgaaaaatccacgagtcagcttttactgatttgtacaaaaaatggatggatcaaagcatccatcagtctttcagaagctacatggacaatcttacttgatcaatagactttctccgagtgtgcaagctcgtggttactgtgtctctggtgcttatgtcaatggaggtttgcagagtctattgcagccaactagccatggcgttggctcgtctcttatacctcatggttcatttcctgtattagctcacgctcctagtgagaaaactggtactggtttcttgatcgatttccttatgggaggagtctcagctgctgtttcgaagacggcagccgcgcctatagagcgtgtgaagctcttgattcagaatcaagatgaaatgatcaaagctgggcgtctctctgagccatataaaggaatcagtgattgttttgctcgaacagtcaaagacgaaggaatgcttgctctttggagaggaaacactgccaatgttatcagatacttccccactcaggctttaaactttgcgttcaaagattacttcaagaggctgtttaacttcaagaaagaaaaagatggctactggaagtggtttgcagggaacctggcgtctggtggtgcagctggtgcatcatctctgctttttgtgtactctttggattacgctcgtacccgtttagccaatgatgcgaaggcggccaagaaaggtggtcagcggcagtttaatggcatggtcgacgtgtacaagaagactatagcctctgatggcattgtcgggctttaccgtggtttcaacatctcatgcgttggaattgtcgtgtaccgggggctttactttggattgtatgattccttgaagcctgtggttctagttgatggtctccaggatagcttccttgctagtttcttactgggatggggaatcaccattggagctggattggcgtcttacccaattgacacggttcgcagaagaatgatgatgacgtcaggtgaagcagtgaagtacaagagctctcttcaggccttctctcagatcgtcaagaacgaaggggccaagtcactcttcaagggtgcaggtgccaacatccttcgtgcggttgcaggcgctggtgtactggccggctatgacaagctccagctcattgtgttgggtaagaagtatggctctggtggtggctaaacgatgaggatgatgaaagaatagcccttgaggtctgtgaatgaataaagcagtgtgtccgttcgtataaatgttgcttttagaatatagagtgtctctgtcaagttgtggccctttgtcttagttctatacttctatgacttttgttgacaaaagaataaatacaaagaaaaccaataccat

SEQ ID NO: 104082 - protein, 379 aa, Arabidopsis thaliana; identical to SEQ ID NO: 37651
  peptide (1)..(379): Ceres Seq. ID no. 13614267

SEQ ID NO: 104083 - protein, 295 aa, Arabidopsis thaliana; identical to SEQ ID NO: 37652
  peptide (1)..(295): Ceres Seq. ID no. 13614268

SEQ ID NO: 104084 - protein, 267 aa, Arabidopsis thaliana; identical to SEQ ID NO: 37653
  peptide (1)..(267): Ceres Seq. ID no. 13614269

SEQ ID NO: 104085 - DNA, 1284 bp, Arabidopsis thaliana
  misc_feature (1)..(1284): Ceres Seq. ID no. 13614270
  misc_feature (1)..(1284): Ortholog of  Ceres SEQ ID NO 13582619 as cited in SEQ ID NO 56520
  misc_feature (1)..(1284): Ortholog of  Ceres SEQ ID NO 13660872 as cited in SEQ ID NO 60830
  misc_feature (1)..(1284): Ortholog of  Ceres SEQ ID NO 12616221 as cited in SEQ ID NO 63291
ttgttgatattactctcttaaatatatattttcgtacattaacacagacatatataaagctaaagatttcttcacgtaatgggtttgaaagatattgggtccaaattgccaccggggtttcgatttcatccaagtgatgaagagttggtttgtcattatctttgcaacaagattagggccaaatctgatcatggtgatgttgatgatgatgatgatgatgttgatgaagctttgaagggttctactgatcttgtggagattgacttgcatatctgtgagccatgggagcttcctgatgtggcaaagttaaacgcaaaggaatggtacttcttcagtttccgtgatcgaaagtatgctactggatatcgcacgaacagagcgacagtaagcggatactggaaagcaacaggaaaagatcgaacggtgatggatccacgtacaaggcaattggtagggatgagaaaaacactagtgttctacagaaacagagcaccaaatgggatcaaaactacttggatcatgcacgagttccgtcttgagtgtcctaacatcccacctaaggaagactgggtcttgtgcagagtgttcaacaaaggcagagactcatcgctacaagacaataattattataacaatgataatcagacgcaaaggcttgaagttaatgacgctccggatcttaattacaacaatcagttgccacctttgctatcatcccctcctcataatcatcaacatgagaagatgaaaatccaagtttgtgatcagtgggagcagctaatgaagcagccttcaaggaccaccggccacccctatcatcaccattgtcatcatcaaaccatagcatgtggttgggagcagatgatgatcggttcgctgtcatcaccttcgagtcatggccctgatcacgagtccttgctaaatttgctttacgtcgacaataacaacagtgtcaacatcagtggtgatcatcatcagaattatgagaagattttgttgtcatcactagacatgacgagtttggatcacgacaagacatgtatgggatcatcatcggatggtggtatggtctctgatcttcacatggaatgtggtggattgagttttgagaccgaaaatatcctcgctttccaatgaacataattcaaggggttcgccaatttgttgattcgtgaattatacaaacattttatctatagatttatcacattatcaaacatgtaagttgtgtggcatttgggtatagggtttgtgtgattctaggtttttaggacgatgtatgtt

SEQ ID NO: 104086 - protein, 352 aa, Arabidopsis thaliana; identical to SEQ ID NO: 23194
  peptide (1)..(352): Ceres Seq. ID no. 13614271

SEQ ID NO: 104087 - protein, 236 aa, Arabidopsis thaliana; identical to SEQ ID NO: 23195
  peptide (1)..(236): Ceres Seq. ID no. 13614272

SEQ ID NO: 104088 - protein, 226 aa, Arabidopsis thaliana; identical to SEQ ID NO: 23196
  peptide (1)..(226): Ceres Seq. ID no. 13614273

SEQ ID NO: 104089 - DNA, 2034 bp, Arabidopsis thaliana
  misc_feature (1)..(2034): Ceres Seq. ID no. 13614285
  misc_feature (1)..(2034): Ortholog of  Ceres SEQ ID NO 13591098 as cited in SEQ ID NO 64770
gactgtctctcttccctcgtaaacatcgctgtctctaaagatggcctctctctcaggcctatactcttcttctccatctctcaaacctgccaaaaaccattcctttaaagcattgccggcgcaatctcgagattccttctctttcccacatacctccaaacccaccaatctaccgttgactctctcctcggctcgttctgtggcacgcgacatttctcatgcggattcgaagaaagagcttcttaaggatccggatgcgttgtggaagcgatacctcgattggttttatcagcagaaagagcttgggttgtatctggatattagtcgggtcggatttaccgatgagtttgtggctgaaatggagccaaggtttcaagctgcgtttaaggctatggaggatcttgaaaaagggtctatagcgaatcctgatgaaggaagaatggttggacattactggcttaggaactctaagctcgcacctaagcctactttaaagaccttgatcgagaacacacttgattctatttgcgctttctccgacgacataatctctggaaagataaagccaccatcttctcctgagggtcgttttactcagatactttctgttggcattggaggctcggctcttggacctcaatttgtcgctgaggccttggctcctgataatcctccattgaagataagattcattgacaacaccgaccctgctggaattgatcatcagattgcacaacttgggccagagctggcctcgactttagtagttgtcatctcaaagagtggaggtactcctgaaactagaaatggactactggaagtgcagaaagcattccgtgaagctggtctgaatttcgcaaaacagggtgttgcaataacccaagagaactcattactggataatacggcaagaattgaaggttggctagctagatttcctatgtacgactgggtgggtggaagaacatcaataatgtctgcagttggtctgcttccagcagcactacaggggattaatgttagggagatgcttactggtgctgctttaatggatgaggctactaggacaacttcgatcaagaataaccctgcagcgctcttagctatgtgttggtactgggcttccaatggcgttggttccaaggatatggttgtccttccttacaaggatagcttattgctatttagtcggtatctgcagcagctggtcatggaatcactaggaaaggagtttgatcttgacggtaacactgttaatcaagggttaactgtgtatggaaataagggaagcacagatcagcacgcctacattcaacagctgagagatggtgtgcacaatttctttgcaaccttcatagaagtgttacgggacagaccccctggtcacgattgggagcttgagccaggtgtcacttgtggagactatctctttgggatgctacagggaactagatctgctttatatgcaaacggtagagaatccatcagtgttacaatccaggaagtgacaccaacatctgttggggctattatagctctttatgaaagagctgttggtttatatgcctcaattgtgaacataaatgcttaccaccaacccggtgtggaagctgggaaaaaggcagcagcagaagttctcgccctgcaaaagcgggtattgtcagttcttaatgaagccacttgtaaagatccggtagagccattgacactggaagagatagctgatcgttgtcatgctcctgaggaaatagaaatgatatacaagatcatagcgcacatgtctgcaaacgacagagttctgatagcagaaggaaactgtggatcgccacgaagtatcaaagtgtatttgggcgagtgcaatgtggatgacctgtacgcataacaaaacccaacactttctcaaactccaaactctcattctctccattccttatttctttctgccatgtctatgattttgaaaaagaaaaagattgcaataagagccaggaaacacttgtgtacttgttttgaaataaagataatttcagaatg

SEQ ID NO: 104090 - protein, 613 aa, Arabidopsis thaliana
  peptide (1)..(613): Ceres Seq. ID no. 13614286
MASLSGLYSSSPSLKPAKNHSFKALPAQSRDSFSFPHTSKPTNLPLTLSSARSVARDISHADSKKELLKDPDALWKRYLDWFYQQKELGLYLDISRVGFTDEFVAEMEPRFQAAFKAMEDLEKGSIANPDEGRMVGHYWLRNSKLAPKPTLKTLIENTLDSICAFSDDIISGKIKPPSSPEGRFTQILSVGIGGSALGPQFVAEALAPDNPPLKIRFIDNTDPAGIDHQIAQLGPELASTLVVVISKSGGTPETRNGLLEVQKAFREAGLNFAKQGVAITQENSLLDNTARIEGWLARFPMYDWVGGRTSIMSAVGLLPAALQGINVREMLTGAALMDEATRTTSIKNNPAALLAMCWYWASNGVGSKDMVVLPYKDSLLLFSRYLQQLVMESLGKEFDLDGNTVNQGLTVYGNKGSTDQHAYIQQLRDGVHNFFATFIEVLRDRPPGHDWELEPGVTCGDYLFGMLQGTRSALYANGRESISVTIQEVTPTSVGAIIALYERAVGLYASIVNINAYHQPGVEAGKKAAAEVLALQKRVLSVLNEATCKDPVEPLTLEEIADRCHAPEEIEMIYKIIAHMSANDRVLIAEGNCGSPRSIKVYLGECNVDDLYA

SEQ ID NO: 104091 - protein, 507 aa, Arabidopsis thaliana
  peptide (1)..(507): Ceres Seq. ID no. 13614287
MEPRFQAAFKAMEDLEKGSIANPDEGRMVGHYWLRNSKLAPKPTLKTLIENTLDSICAFSDDIISGKIKPPSSPEGRFTQILSVGIGGSALGPQFVAEALAPDNPPLKIRFIDNTDPAGIDHQIAQLGPELASTLVVVISKSGGTPETRNGLLEVQKAFREAGLNFAKQGVAITQENSLLDNTARIEGWLARFPMYDWVGGRTSIMSAVGLLPAALQGINVREMLTGAALMDEATRTTSIKNNPAALLAMCWYWASNGVGSKDMVVLPYKDSLLLFSRYLQQLVMESLGKEFDLDGNTVNQGLTVYGNKGSTDQHAYIQQLRDGVHNFFATFIEVLRDRPPGHDWELEPGVTCGDYLFGMLQGTRSALYANGRESISVTIQEVTPTSVGAIIALYERAVGLYASIVNINAYHQPGVEAGKKAAAEVLALQKRVLSVLNEATCKDPVEPLTLEEIADRCHAPEEIEMIYKIIAHMSANDRVLIAEGNCGSPRSIKVYLGECNVDDLYA

SEQ ID NO: 104092 - protein, 496 aa, Arabidopsis thaliana
  peptide (1)..(496): Ceres Seq. ID no. 13614288
MEDLEKGSIANPDEGRMVGHYWLRNSKLAPKPTLKTLIENTLDSICAFSDDIISGKIKPPSSPEGRFTQILSVGIGGSALGPQFVAEALAPDNPPLKIRFIDNTDPAGIDHQIAQLGPELASTLVVVISKSGGTPETRNGLLEVQKAFREAGLNFAKQGVAITQENSLLDNTARIEGWLARFPMYDWVGGRTSIMSAVGLLPAALQGINVREMLTGAALMDEATRTTSIKNNPAALLAMCWYWASNGVGSKDMVVLPYKDSLLLFSRYLQQLVMESLGKEFDLDGNTVNQGLTVYGNKGSTDQHAYIQQLRDGVHNFFATFIEVLRDRPPGHDWELEPGVTCGDYLFGMLQGTRSALYANGRESISVTIQEVTPTSVGAIIALYERAVGLYASIVNINAYHQPGVEAGKKAAAEVLALQKRVLSVLNEATCKDPVEPLTLEEIADRCHAPEEIEMIYKIIAHMSANDRVLIAEGNCGSPRSIKVYLGECNVDDLYA

SEQ ID NO: 104093 - DNA, 1053 bp, Arabidopsis thaliana
  misc_feature (1)..(1053): Ceres Seq. ID no. 13614292
  misc_feature (1)..(1053): Ortholog of  Ceres SEQ ID NO 14313060 as cited in SEQ ID NO 59447
  misc_feature (1)..(1053): Ortholog of  Ceres SEQ ID NO 12624676 as cited in SEQ ID NO 61197
atccaactatccatccatcatcggtcagtccccaaagtcggcggaagaagatggtgtcgccgaaaatagcaccgtcgatgctgtcatcggacttcgcaaatctagcggcggaggccaatcggatgatcgatttgggcgccaactggcttcacatggatattatggacgggcattttgtccctaatcttacgattggtgctcctgtcatcgagagtttgcgaaagcacactaatgcatatcttgattgccaccttatggtgacgaaccccatggattacgttgcacagatggctaaagctggggcttctggtttcacattccacgtcgaggtggcccaagataattggcaacaacttgtcgagaagattaagtctactgggatgagaccaggcgtggctctaaagcctggaacacctgttgaacaagtctatcctctggttgaagggacaactccggttgaaatggttcttgtgatgactgtagaacctggatttggaggccagaagtttatgcctgacatgatggacaaggtccgggcattgaggcaaaaatacccaacacttgatattcaggtggatggcggcttaggcccttcaacgatcgacacagcggctgcagcaggcgccaactgtattgttgctggaagttcagtgtttggagctccggagccaggagatgtcatctcccttctgaggaccagtgttgagaaagcccaacccaccacttgaaagctgcacgtggtggcggtggtgctgagacggcgttgtattctcatcggaagatggtacctcttcgtttctctcaaggttaaaaagctggtcctttatgttttaaaatcatctcgtgaatcgtgatacttagtcttggttccaagaactgtataacgtcattttgagttattaattccctcaccacacagattatttcataggagttgggtaccaagagtagtgtgcaatgtataattagtaatttaataaacgtattaggttcagtcattttggaatggttataattatgaatacaagtatacaacatgaacattccagtgtt

SEQ ID NO: 104094 - protein, 241 aa, Arabidopsis thaliana; identical to SEQ ID NO: 26294
  peptide (1)..(241): Ceres Seq. ID no. 13614293

SEQ ID NO: 104095 - protein, 225 aa, Arabidopsis thaliana; identical to SEQ ID NO: 26295
  peptide (1)..(225): Ceres Seq. ID no. 13614294

SEQ ID NO: 104096 - protein, 216 aa, Arabidopsis thaliana; identical to SEQ ID NO: 26296
  peptide (1)..(216): Ceres Seq. ID no. 13614295

SEQ ID NO: 104097 - DNA, 1610 bp, Arabidopsis thaliana
  misc_feature (1)..(1610): Ceres Seq. ID no. 13614307
  misc_feature (1)..(1610): Ortholog of  Ceres SEQ ID NO 13594349 as cited in SEQ ID NO 58161
  misc_feature (1)..(1610): Ortholog of  Ceres SEQ ID NO 13663419 as cited in SEQ ID NO 66561
  misc_feature (1)..(1610): Ortholog of  Ceres SEQ ID NO 15177892 as cited in SEQ ID NO 0
caatctcaaaaagtctccgacactctctagatttcctttgctccttcgttctggccatggcaatggcaaaactcgcaattttcaccactcttatggccatactcgtaatgacatctcaaggaaggattccaacagaaggaggagagaaagaagcagaggctgacagaattacgtcacttccaggtcagcctaacgtcacgttcgagcagttttccggctacgtcaccgtcgataaactctccggaagatcactcttttattggctcactgaagcttctgacctccctctctccaaacctctcgtaatttggctcaacggaggaccgggatgttcgtcggtagcgtacggtgcgtcggaggagattggaccattcaggataagcaaaggtggttccggtttgtatctcaacaagttcgcatggaactcaatctccaatctcttgttcctcgaagctcccgccggcgtcggcttctcttacactaaccgctcctccgatctcttcaacaccggtgatcgccgtaccgccaaagattcacttcagtttcttattcaatggcttcaccggtttccgagatacaaccaccgggaaatctacatcaccggcgagagttacgccggacattacgttcctcagctggccaaagagatcatgaattacaacaaacgatcaaagaatccgttaaatctcaaaggaatcatggttggaaacgcggtgacggacaatcactatgataacctaggaacggtttcgtattggtggagccacgcgatgatctctgatcggacgtatcatcagttgataagcacttgcgattttagtcgtcagaaggaatctgatgaatgcgaaaccctttattcttacgctatggagcaggagtttggtaacattgatcagtacaacatctatgcgccgccgtgtaacaagtcaagcgacggtggtggtagctacaatggttcttccggccgccggagtatgcggcttcctcaccttccccactccgtattgaggaaaatttccggttatgatccatgtaccgagagatatgcagagatctattataaccggcctgatgttcagaaagctcttcacgccaacaccaccaagattccgtataaatggacagcttgcagtgaggtgctaaaccggaattggaacgacacagattcaacggttctccctatataccgggaaatgattgccggcggaattagagtttgggttttcagtggtgacgtcgattcagttgtaccagtgacagctactagatactcactagcaagacttagtttgagtaccaaacttccttggtatccttggtatgtcaagaaacaggttggaggatggacggaagtgtatgaaggactaacgttcgtgacggttagaggagcaggtcacgaggtgccattgttcaagccacgtgctgcttttgagctttttaagtatttcttgagaggcaagccacttccaaaggcttaaaaaaattgaagtcaagagagagattgtaacatttgaaatcatgcccgagaaaaatgaaaatgtaaagtttgggttatgagatggtatttaattaaatctagtctattaatgacagcaagtatttaattattt

SEQ ID NO: 104098 - protein, 491 aa, Arabidopsis thaliana
  peptide (1)..(491): Ceres Seq. ID no. 13614308
ISKSLRHSLDFLCSFVLAMAMAKLAIFTTLMAILVMTSQGRIPTEGGEKEAEADRITSLPGQPNVTFEQFSGYVTVDKLSGRSLFYWLTEASDLPLSKPLVIWLNGGPGCSSVAYGASEEIGPFRISKGGSGLYLNKFAWNSISNLLFLEAPAGVGFSYTNRSSDLFNTGDRRTAKDSLQFLIQWLHRFPRYNHREIYITGESYAGHYVPQLAKEIMNYNKRSKNPLNLKGIMVGNAVTDNHYDNLGTVSYWWSHAMISDRTYHQLISTCDFSRQKESDECETLYSYAMEQEFGNIDQYNIYAPPCNKSSDGGGSYNGSSGRRSMRLPHLPHSVLRKISGYDPCTERYAEIYYNRPDVQKALHANTTKIPYKWTACSEVLNRNWNDTDSTVLPIYREMIAGGIRVWVFSGDVDSVVPVTATRYSLARLSLSTKLPWYPWYVKKQVGGWTEVYEGLTFVTVRGAGHEVPLFKPRAAFELFKYFLRGKPLPKA

SEQ ID NO: 104099 - protein, 473 aa, Arabidopsis thaliana; identical to SEQ ID NO: 37661
  peptide (1)..(473): Ceres Seq. ID no. 13614309

SEQ ID NO: 104100 - protein, 471 aa, Arabidopsis thaliana
  peptide (1)..(471): Ceres Seq. ID no. 13614310
MAKLAIFTTLMAILVMTSQGRIPTEGGEKEAEADRITSLPGQPNVTFEQFSGYVTVDKLSGRSLFYWLTEASDLPLSKPLVIWLNGGPGCSSVAYGASEEIGPFRISKGGSGLYLNKFAWNSISNLLFLEAPAGVGFSYTNRSSDLFNTGDRRTAKDSLQFLIQWLHRFPRYNHREIYITGESYAGHYVPQLAKEIMNYNKRSKNPLNLKGIMVGNAVTDNHYDNLGTVSYWWSHAMISDRTYHQLISTCDFSRQKESDECETLYSYAMEQEFGNIDQYNIYAPPCNKSSDGGGSYNGSSGRRSMRLPHLPHSVLRKISGYDPCTERYAEIYYNRPDVQKALHANTTKIPYKWTACSEVLNRNWNDTDSTVLPIYREMIAGGIRVWVFSGDVDSVVPVTATRYSLARLSLSTKLPWYPWYVKKQVGGWTEVYEGLTFVTVRGAGHEVPLFKPRAAFELFKYFLRGKPLPKA

SEQ ID NO: 104101 - DNA, 1360 bp, Arabidopsis thaliana
  misc_feature (1)..(1360): Ceres Seq. ID no. 13614311
  misc_feature (1)..(1360): Ortholog of  Ceres SEQ ID NO 14301830 as cited in SEQ ID NO 62310
  misc_feature (1)..(1360): Ortholog of  Ceres SEQ ID NO 15179524 as cited in SEQ ID NO 0
ctcaaatctcacaatcttttctctccaaattctcttctctctgaatcaatccaatcatggttgagccggcgaacaccgttggaattccggtgaaccacatcccattgttgaaggatgagctcgatatcgtgatccccacgatccgtaacctcgatttcctggagatgtggaggccttttcttcagccttaccatctgattatcgtccaagatggagatccatcgaagaccattgctgtccctgaagggttcgattacgaactctacaacaggaacgacatcaaccgtatccttggtcctaaagcttcctgcatttccttcaaggactctgcttgtcgttgcttcggctacatggtctccaagaagaagtacatcttcactattgatgacgattgcttcgttgctaaggatccatctggaaaagctgtgaacgctcttgagcaacacatcaagaaccttctctgcccatcaactccatttttcttcaacaccttgtacgacccataccgtgaaggtgctgacttcgtccgtggataccctttcagtctccgtgagggtgtttccaccgctgtttcccacggtctgtggctcaacatccctgattacgatgcccctacccaacttgtgaagcctaaggaaaggaacacaaggtatgtggatgctgtcatgaccatcccaaagggaactcttttccctatgtgtggtatgaacttggcctttgaccgtgagctcattggtccggctatgtactttggtctcatgggtgatggtcagcctattggtcgctacgacgatatgtgggctggatggtgtatcaaggtgatctgtgaccatttgggattgggagtgaagacaggtttgccctacatttaccacagcaaagccagcaacccgtttgtgaacttgaagaaggagtacaagggaatcttctggcaggaggatatcattcctttcttccagagcgcaaagctcacgaaagaagctgtgacagttcaacaatgctacatggagctgtccaagttggtgaaggagaagctaagccccattgatccttactttgacaagcttgcagatgctatggtcacttggattgaagcttgggatgagcttaacccacccactaaagcttgagcagcaaaaaaaccaccaccgcagttttggttattagctcaacatatcatctatcttctccgttttgtttttgttttgtcttttctcaaattttccggcgattcttcagttcgtttttaagttgccggagtttatttaaatagtgaatggtgtagttctatttatgaccgagacaatctctcttttgaggtttttcgtttttgtttcaataataaaaaatcatatccctt

SEQ ID NO: 104102 - protein, 357 aa, Arabidopsis thaliana; identical to SEQ ID NO: 22476
  peptide (1)..(357): Ceres Seq. ID no. 13614312

SEQ ID NO: 104103 - protein, 321 aa, Arabidopsis thaliana; identical to SEQ ID NO: 22477
  peptide (1)..(321): Ceres Seq. ID no. 13614313

SEQ ID NO: 104104 - protein, 259 aa, Arabidopsis thaliana; identical to SEQ ID NO: 22478
  peptide (1)..(259): Ceres Seq. ID no. 13614314

SEQ ID NO: 104105 - DNA, 2224 bp, Arabidopsis thaliana
  misc_feature (1)..(2224): Ceres Seq. ID no. 13614320
  misc_feature (1)..(2224): Ortholog of  Ceres SEQ ID NO 13657008 as cited in SEQ ID NO 69164
actaaattaaatgaatagttttatttgtatattttaggcaagatggattatatataatgattaaataaattaaggtgtgtattcttcactaaatgtttgagatctatccgtcacactccagaggttaaactcagtcatctgtctttggggaggacaagcaagaacctcaccgacgattccataccaaacaaattcccgatctggaaacaactgacctgtgaaggtgaagtgtatcgctggaaatggcggtggccttccgtggaggccggggaggcgtcggatccggccaatctaccggacttcgtagtttcttctcctaccggatctttatctccgctttgttctcttttctcttcctcgccactttctccgtcgttcttaactcctctcgtcatcagcctcatcaggatcatacattgccgagtatgggcaacgcatatatgcagaggacgtttttggctttgcaatcggatccattgaaaactaggttggatctgatacacaagcaagccattgatcatttgacactggtgaatgcgtatgctgcttacgctaggaagctaaagcttgatgcttctaagcagcttaagctcttcgaagatttggctatcaacttctcggatttgcagtcgaaacctggtttgaaatctgctgtgtctgataatggtaatgctcttgaggaggattcgtttaggcagcttgagaaagaagtgaaggataaggtgaagacagcgaggatgatgatcgttgagtctaaagagagttatgatacacagcttaaaatccagaagttgaaagatacaatctttgctgtccaagaacagttgacaaaggctaagaaaaacggtgcggttgctagcttgatttcagccaagtcggttcctaaaagtcttcattgtttggccatgaggcttgtaggagagaggatctctaatcctgagaagtacaaggatgctccacctgacccagccgcagaggatccaactctttaccactatgcgattttctctgataatgtcattgctgtgtctgttgtggtgagatcggttgtgatgaacgctgaggagccatggaagcatgtcttccatgtggtgacagatcggatgaatctcgcagccatgaaggtgtggtttaagatgcgtcctttggaccgtggtgcccatgttgagattaaatccgtggaggatttcaagttcttaaactcttcctatgcgccggtcttgaggcagcttgagtctgccaagttgcagaagttttactttgagaatcaagctgagaacgcaactaaagattcacataacctcaagttcaagaaccccaagtatctctcgatgttgaaccatctcagattttacttaccagagatgtatccgaagctgaataagattttgttcttggacgatgatgttgtggtgcagaaagacgtgactggtttatggaaaatcaacttggatggcaaggtgaatggagccgttgagacatgttttggttcttttcatcgatatggtcaatacttaaacttctctcatcctttgatcaaagagaactttaaccccagtgcctgtgcttgggcctttggaatgaacatattcgatctcaatgcctggagacgcgagaagtgcaccgatcaataccattactggcagaacctgaatgaagacagaactctctggaaattgggaactctacctccgggattgatcacattctattcaaagacgaaatcattggacaaatcatggcatgtacttgggttaggctataacccgggagtgagcatggacgaaatcagaaatgcaggagtgattcattacaatggaaacatgaaaccgtggctagacattgcgatgaaccaatacaagtctctctggactaaatatgttgataacgaaatggagtttgtgcagatgtgcaattttggtctctaaagagagaacgatgaaaacaaacaaaccggaaagaggaaaaaatagggagaagaggtaacctcggatcgatgtgtttctgtctttctcggcattctttaactgatgatacgtttatctttatatagggttacaaaaaaaaagaagcattttgcttgttatttctgtcatagttttggtctttatttttattttgtaaactcttcacagcaatatgttctcccaagctacaatgtcttgttgtctttatttcatacttgtctgccttaagaatcatatagaagaaactctaaaggttt

SEQ ID NO: 104106 - protein, 561 aa, Arabidopsis thaliana; identical to SEQ ID NO: 39881
  peptide (1)..(561): Ceres Seq. ID no. 13614321

SEQ ID NO: 104107 - protein, 500 aa, Arabidopsis thaliana; identical to SEQ ID NO: 39882
  peptide (1)..(500): Ceres Seq. ID no. 13614322

SEQ ID NO: 104108 - protein, 495 aa, Arabidopsis thaliana; identical to SEQ ID NO: 39883
  peptide (1)..(495): Ceres Seq. ID no. 13614323

SEQ ID NO: 104109 - DNA, 1308 bp, Arabidopsis thaliana
  misc_feature (1)..(1308): Ceres Seq. ID no. 13614328
  misc_feature (1)..(1308): Ortholog of  Ceres SEQ ID NO 13598488 as cited in SEQ ID NO 63862
  misc_feature (1)..(1308): Ortholog of  Ceres SEQ ID NO 13659640 as cited in SEQ ID NO 67101
aattacaatctctccttttgccaacaatcattgcttaaaaaacacataccttcttctttagttataaaaatgttgaaagaagagagtaatgagagtggtacttgggcacgagcatgtgacacttgtcgttcagccgcctgcactgtctactgtgaagccgactctgcctacttgtgcaccacctgtgatgctcgagttcacgcagccaaccgtgttgcttctcgccatgaacgtgttcgtgtctgtcagtcatgtgagtctgccccagctgcgtttttgtgtaaagcagacgctgcgtctctttgtacagcttgtgatgcagagattcattccgcaaacccactagctagacgtcatcagcgagttccgattcttccattatctgcaaactcttgcagctccatggccccaagtgagactgatgctgataacgatgaggatgatcgagaggttgcttcgtggttactccctaatccagggaaaaacatcggtaatcagaataatgggttcttgtttggtgttgagtaccttgatcttgtggattacagctccagcatggacaaccaattcgaagataatcagtacactcactaccagaggagctttggaggagatggagttgtgccgcttcaagttgaagaatcaacaagtcacctgcaacaaagccaacaaaactttcagttgggtatcaactatggattctcctcaggagctcactacaacaacaactccttaaaggacctaaaccatagcgcatccgtttcatcaatggacatcagtgttgtgccagagtcaactgcaagtgacataacagtccaacacccaagaactactaaagagacgatagaccaactatctggtcctcctactcaggtggtgcaacagcttactccaatggagagggaggctagggtcctgagatacagagagaagaagaagacaaggaaatttgacaagacaataagatatgcttcaagaaaggcatatgcagagataagaccacggatcaagggcagattcgcaaagaggatagaaactgaagctgaggctgaagaaatcttctcaacatcgctaatgtctgagactggatatggaattgtcccttccttctaaactcctatggcgaagatagactagattgcatgctgtaaattacttctagtttggatttctacaagttattactgcatatgggtccttagttttgtgacttttgtcaaactagtacgagtttaatcagatatgttcctatagctgcagttgtttaagcaacatctcgctacataattgaattggtgaaatcttatc

SEQ ID NO: 104110 - protein, 370 aa, Arabidopsis thaliana; identical to SEQ ID NO: 25872
  peptide (1)..(370): Ceres Seq. ID no. 13614329

SEQ ID NO: 104111 - protein, 347 aa, Arabidopsis thaliana; identical to SEQ ID NO: 25873
  peptide (1)..(347): Ceres Seq. ID no. 13614330

SEQ ID NO: 104112 - protein, 236 aa, Arabidopsis thaliana; identical to SEQ ID NO: 25874
  peptide (1)..(236): Ceres Seq. ID no. 13614331

SEQ ID NO: 104113 - DNA, 1593 bp, Arabidopsis thaliana
  misc_feature (1)..(1593): Ceres Seq. ID no. 13614332
  misc_feature (1)..(1593): Ortholog of  Ceres SEQ ID NO 14315993 as cited in SEQ ID NO 57788
gaaaaattcaaagattgagtcaccaccaccatagtaatatacgcgtatgagttcccagatgtgatctccatccaacgttgtatttctttcgttttggttatcttcttcggttccatcgaattccaacaattcccatcgaggaatttggttacgaatcttttgatctgactaaacctagggagcttgatcacaaggagactgaaaccaatgctaggaggagtctcttcaggttagtagaatgagtagaaaaagaacggaaaatggcagtgaatcaggaccagccacttctcatgttcctgtggatagattcgggtttctcaagcaagaacatgccaattcgcctgagcgttttagcaagtctaaaactacatcatccactgatcatgacagagaggagagaaaggtgagaaaatggaggaagatgattggggttggagggagtgattggaagcattatgttaggagaaaacctaatgttgtcagaaggcgtatacgaaaagggatccctgattgcttacgaggtcttgtttggcagttaatctcaggaagtcgagaccttttgcttatgaatcctggtgtttatgagcaattggtgatttatgaaacatctgcatcagagcttgatatcattcgagacatatcccgtactttcccatcacatgttttctttcagaagagacatggacctgggcaaagatccttgtacaatgtccttaaggcatactcagtttatgacagagatgtcggatatgttcaggggatggggtttatagccggtttgttgcttctctatatgagcgaagaagatgccttctggttattagttgcattacttaaaggagctgttcatgctccaatggaaggactgtatcatgcagggcttccccttgtacagcaatacctgtttcagttagaaagcttggtaaaagagctaattccgaagctcggagaacattttactcaagaaatgattaatccgagtatgtatgcaagtcaatggttcatcaccgtcttctcatactcatttcctttccctttggctctacggatatgggatgtgtttctctccgagggtgttaaaatcgtgttcaaagtgggcttagcattgctcaagtattgccaagatgagttggtaaagttaccgtttgagaaactaatacatgctctgaaaactttcccggaagacgcaatgaatccggataccttgcttccattggcttactctatcaaggtatcaaagcgtttggaagaactgacactggagtatcagaagactaatgccaaaccggttcaaccgtaggaaatccggttggcaataacctgaaccagaagttggattcgaattcgttttctcatcttatcttttcttgttggaatatattcttttttcatcatattgtcaagttgggtgggaatttcttatcagaagctctctgattgtttttagcaatttcgtggaaaagaagaaggcatgctccagctgatgtatagatagagagagagaccagtgttcctagagagatatcactaatgtgaaaagtaaatcatattgtttaaaggtatttttattctttaaggttcatggtaccaaac

SEQ ID NO: 104114 - protein, 353 aa, Arabidopsis thaliana; identical to SEQ ID NO: 24763
  peptide (1)..(353): Ceres Seq. ID no. 13614333

SEQ ID NO: 104115 - protein, 292 aa, Arabidopsis thaliana; identical to SEQ ID NO: 24764
  peptide (1)..(292): Ceres Seq. ID no. 13614334

SEQ ID NO: 104116 - protein, 244 aa, Arabidopsis thaliana; identical to SEQ ID NO: 24765
  peptide (1)..(244): Ceres Seq. ID no. 13614335

SEQ ID NO: 104117 - DNA, 1157 bp, Arabidopsis thaliana
  misc_feature (1)..(1157): Ceres Seq. ID no. 13614336
  misc_feature (1)..(1157): Ortholog of  Ceres SEQ ID NO 14311969 as cited in SEQ ID NO 58929
  misc_feature (1)..(1157): Ortholog of  Ceres SEQ ID NO 14309357 as cited in SEQ ID NO 0
tttcgcgtctcgaccttcgaattcgacaaatccctaattccaaaatcctctcggatctaaaagagtgtgtgataacataagatgtcgtcttctcgggaagagaatgtgtacttagccaagttagctgagcaagctgaacgttatgaggaaatggttgagttcatggagaaagttgcaaagactgttgacaccgatgagcttactgtcgaagagagaaacctcttgtctgttgcttacaagaacgtcattggtgctaggagagcttcctggaggatcatatcttccattgaacagaaggaagaaagcagaggaaacgatgatcatgtttccattatcaaggactacagaggaaagatcgaaactgaactcagcaaaatctgtgatggaatactcaatcttctggattctcaccttgttcccactgcatctttggccgagtccaaagtcttttacctcaaaatgaaaggagattaccacaggtaccttgctgagtttaagactggagctgagaggaaagaagctgctgagagcactctggttgcttacaagtcagctcaggatattgcacttgctgatttagctcctactcatccgattagactgggacttgctcttaacttctctgtcttctactacgagattctcaactcacctgatcgtgcctgcagtctcgcaaaacaggcttttgatgaggccatttctgagctggatacattaggagaagaatcatacaaagacagtacgttgataatgcaacttctccgtgacaatctgaccctttggaactctgacatcaatgatgaggcgggcggtgatgagatcaaggaggcgtcaaaacatgagccggaagaggggaaaccagctgagacagggcagtgaccagagagagagggagagacatttctaagtatgtatggtatggattttccaaaaacatatgatatgattaggggatttgtagaagcagagagaaagatctttatttgattttctccaaaaatctctgttcccttttttttttattgggttattaaagctgtttgagtctttggttcctgcttcgttgcttgttagtatttaggaagtgaagaaacaaaactttgaattattgctttccattcaactcgtcataaattatcataatcagtgtattattt

SEQ ID NO: 104118 - protein, 265 aa, Arabidopsis thaliana; identical to SEQ ID NO: 24254
  peptide (1)..(265): Ceres Seq. ID no. 13614337

SEQ ID NO: 104119 - protein, 242 aa, Arabidopsis thaliana; identical to SEQ ID NO: 24255
  peptide (1)..(242): Ceres Seq. ID no. 13614338

SEQ ID NO: 104120 - protein, 238 aa, Arabidopsis thaliana; identical to SEQ ID NO: 24256
  peptide (1)..(238): Ceres Seq. ID no. 13614339

SEQ ID NO: 104121 - DNA, 843 bp, Arabidopsis thaliana
  misc_feature (1)..(843): Ceres Seq. ID no. 13614340
  misc_feature (1)..(843): Ortholog of  Ceres SEQ ID NO 12557850 as cited in SEQ ID NO 65
  misc_feature (1)..(843): Ortholog of  Ceres SEQ ID NO 14312702 as cited in SEQ ID NO 0
ctaaatatttaaagctttccttcaccagcattgtattgcctccctggaacaccgaagctctggattaacctattttcaccttctaaggttcttcgtcgttcttattgatctgtgaagatgtattcgggtcagaacaagatccacaaggataagggtgttgcaccaacagagtttgaagagcaagttactcaggctttgtttgacttggagaacaccaaccaggagttgaaaagcgagttgaaagatctctacattaaccaagctgttcagatggatatttctggcaaccgcaaagctgttgtgatctacgttccattcaggctgaggaaagctttccgcaagattcatcttcgtctggtcagagagcttgagaagaagttcagtggaaaagatgtgatctttgttgctaccagaagaatcatgcgcccaccaaagaaaggctcagctgttcagagaccacgcaacagaactcttacttctgtccatgaagccatgctcgaggatgtcgcttaccctgctgagattgtaggaaagagaaccagataccgtcttgatggcaccaagatcatgaaggtatttttggatagtaagctaaagaacgacactgagtacaagctggagacaatggtgggtgtgtacaggaaacttacagggaaagatgtagttttcgagtacccagtcatagaagcttgaagagatgaatgtttgtttcattcttttttgtcggatagagagcttttgattctgtttgggagtaaaactctttgcaaagattttgttatttcagcatttcgcaatctcttcttcaaagttcgatttatcgatacaattcttttttcctac

SEQ ID NO: 104122 - protein, 191 aa, Arabidopsis thaliana; identical to SEQ ID NO: 21551
  peptide (1)..(191): Ceres Seq. ID no. 13614341

SEQ ID NO: 104123 - protein, 140 aa, Arabidopsis thaliana; identical to SEQ ID NO: 21552
  peptide (1)..(140): Ceres Seq. ID no. 13614342

SEQ ID NO: 104124 - DNA, 1169 bp, Arabidopsis thaliana
  misc_feature (1)..(1169): Ceres Seq. ID no. 13614343
  misc_feature (1)..(1169): Ortholog of  Ceres SEQ ID NO 13595668 as cited in SEQ ID NO 56792
gaagaagatcgatcaatcaatcatcaaactctctgtgtgccacatgcattactactgttgacttgttcaataaaggtaaagtaagatcaatccggcgaatcttctttcgttttccggcaccgatctcggtggatctccgattcacatggcggcggataatgcttatctgatgcagtttgttgacgaaacctctttttacaaccgaatcgttctgagtcatcttttgccggcgaatctatgggaacccttacctcattttctccagacatggctccgaaattacctcgccggaaccctactatacttcatctccggtttcctctggtgcttctacatctattaccttaaaatcaacgtttaccttcccaaagatgcaattcctacaataaaggctatgcgtttgcaaatgtttgtggcaatgaaggctatgccatggtacactcttcttccaactgtctccgagagtatgattgaacgtggttggaccaaatgttttgctagcataggcgaattcggctggattctgtattttgtttacatcgccatctatcttgttttcgttgagtttggtatttattggatgcacagagagcttcatgacattaagcctctctataagtatctccatgccacccatcatatctacaacaagcagaatacactctctccatttgccgggcttgcatttcacccagtagacgggatacttcaggctgtaccgcatgtgatagcgctgtttatagtgccaattcatttcacaactcatataggtcttttgttcatggaagcgatatggacggcgaacatccatgactgcatccatggcaacatctggccagtaatgggtgcaggataccatacgatacaccacacgacatacaagcataactatggtcattataccatatggatggattggatgtttggctctcttagggatcctctcttagaagaagatgacaacaaagacagcttcaagaaagcagagtgagaatgcccacttgggttttgttcttctgttttgtcttgtgttgttgttgttcaaagtttcagcctttcttgttctttttcttcttcttcttattcatgtgtctctctcaacctttccaattatattgttacaaacatttgctgtctagtttaaaacatgtaaatgtttgatgatcttt

SEQ ID NO: 104125 - protein, 281 aa, Arabidopsis thaliana
  peptide (1)..(281): Ceres Seq. ID no. 13614344
MAADNAYLMQFVDETSFYNRIVLSHLLPANLWEPLPHFLQTWLRNYLAGTLLYFISGFLWCFYIYYLKINVYLPKDAIPTIKAMRLQMFVAMKAMPWYTLLPTVSESMIERGWTKCFASIGEFGWILYFVYIAIYLVFVEFGIYWMHRELHDIKPLYKYLHATHHIYNKQNTLSPFAGLAFHPVDGILQAVPHVIALFIVPIHFTTHIGLLFMEAIWTANIHDCIHGNIWPVMGAGYHTIHHTTYKHNYGHYTIWMDWMFGSLRDPLLEEDDNKDSFKKAE

SEQ ID NO: 104126 - protein, 273 aa, Arabidopsis thaliana
  peptide (1)..(273): Ceres Seq. ID no. 13614345
MQFVDETSFYNRIVLSHLLPANLWEPLPHFLQTWLRNYLAGTLLYFISGFLWCFYIYYLKINVYLPKDAIPTIKAMRLQMFVAMKAMPWYTLLPTVSESMIERGWTKCFASIGEFGWILYFVYIAIYLVFVEFGIYWMHRELHDIKPLYKYLHATHHIYNKQNTLSPFAGLAFHPVDGILQAVPHVIALFIVPIHFTTHIGLLFMEAIWTANIHDCIHGNIWPVMGAGYHTIHHTTYKHNYGHYTIWMDWMFGSLRDPLLEEDDNKDSFKKAE

SEQ ID NO: 104127 - protein, 198 aa, Arabidopsis thaliana
  peptide (1)..(198): Ceres Seq. ID no. 13614346
MRLQMFVAMKAMPWYTLLPTVSESMIERGWTKCFASIGEFGWILYFVYIAIYLVFVEFGIYWMHRELHDIKPLYKYLHATHHIYNKQNTLSPFAGLAFHPVDGILQAVPHVIALFIVPIHFTTHIGLLFMEAIWTANIHDCIHGNIWPVMGAGYHTIHHTTYKHNYGHYTIWMDWMFGSLRDPLLEEDDNKDSFKKAE

SEQ ID NO: 104128 - DNA, 1027 bp, Arabidopsis thaliana
  misc_feature (1)..(1027): Ceres Seq. ID no. 13614351
  misc_feature (1)..(1027): Ortholog of  Ceres SEQ ID NO 14305022 as cited in SEQ ID NO 53586
  misc_feature (1)..(1027): Ortholog of  Ceres SEQ ID NO 12506279 as cited in SEQ ID NO 55440
  misc_feature (1)..(1027): Ortholog of  Ceres SEQ ID NO 13654847 as cited in SEQ ID NO 62459
  misc_feature (1)..(1027): Ortholog of  Ceres SEQ ID NO 15174357 as cited in SEQ ID NO 0
atggaactttaaaaaagttatgatgttatccaaggaagatggaaaaccctacacactaagcaaaaaataagatctttctctctctgacgacgcaatccctaatttctggttctccgttcgtcggcggagaagatgggattcctttccaataaaatctccagagacgatgtgaaaccaggcgatcacatctattcatggcgtcaagcctacatttacgctcatcacggaatctatgtaggtaatggacaagtcaaccattttactcgtggtgatggtcaagagactggaactgggactttcttggacaacatcattgttagttcatctcataatcatggagacaacccatgtcctgattgtggagatcgatccaatcttggcggtgttatatcttcctgccttgaatgtttccttgccggaggtgatctctatgtctttgagtacagtgtttcccctgctatctttcttgccaaacctcgaggcggcgtatgcactatagcatcttcagatcctccagaagaagtcatctatcgagcaaattttctcttgcaaaatggttttggtgtgtacaatgtcttcaagaacaactgtgaagattttgccatctattgcaaaacgggtttgctagtggcaaacaccgacgtgggaaggagtggtcaagctgcttcaattgttgcagctgccagtgttcttctttcttcaccactcaggtttgtagcaggttttggtggtttggctgtggctggctatggcatgtactgcaccagtcgcttagtttcagatataggcatgcgatgggatgtgagcaaggtgcctgttgagagactagttgctgatgtggcttgtatgtcggacatggaagctaaaccagaagatgagaagactacttaatccaaaactgctcacacctgtattaccatactggttgatctctgattgtaaatgttgtggcggaagtaagagaatctgcttctgctgtatcgtgttgtgcaacatttgtttatgtaattacgaaacttggcttttg

SEQ ID NO: 104129 - protein, 252 aa, Arabidopsis thaliana; identical to SEQ ID NO: 27570
  peptide (1)..(252): Ceres Seq. ID no. 13614352

SEQ ID NO: 104130 - DNA, 1117 bp, Arabidopsis thaliana
  misc_feature (1)..(1117): Ceres Seq. ID no. 13614366
  misc_feature (1)..(1117): Ortholog of  Ceres SEQ ID NO 12564952 as cited in SEQ ID NO 63211
gggtgatttcggatgcctaattgggtaattaatataatacagtataagattagatgcctcgaatattcgctctgtgcctaaccacaaaaaccgtaacttttggttttctctgaaacacatcccaaagtaaagaaagcatcactcttttcgtcttctctcgaaaatggcggacaatgattctctagatcagtttttggctgccgccattgatgccgctaaaaaagctggacagatcattcgtaaagggttttacgagactaaacatgttgaacacaaaggccaggtggatttggtgacagagactgataaaggatgtgaagaacttgtgtttaatcatctcaagcagctctttcccaatcacaagttcataggagaagaaactacagctgcatttggtgtgacagaactaactgacgaaccaacttggattgttgatcctcttgatggaacaaccaatttcgttcacgggttccctttcgtgtgtgtttccattggacttacgattggaaaagtccctgttgttggagttgtttataatcctattatggaagagctattcaccggtgtccaagggaaaggagcattcttgaatggaaagcgaatcaaagtgtcagctcaaagcgaacttttaaccgctttgctcgtgacagaggcgggtactaaacgagataaagctacattagacgatacaaccaacagaatcaacagtttgctaaccaaggtcaggtcccttaggatgagtggttcgtgtgcactggacctctgtggcgttgcgtgtggaagggttgatatcttctacgagctcggtttcggtggtccatgggacattgcagcaggaattgttatcgtgaaagaagctggtggactcatctttgatccatccggtaaagatttggacataacatcgcagaggatcgcggcttcaaacgcttctctcaaggagttattcgctgaggcgttgcggcttacaggggcatgaagtcatctgttattattttacaatatggtctcaaccttatatgatcaaactcaattcaaaaacttaacattattgaatatttcttttcggtagaaagaaaacaaactcaattgttgagaaaaaaaaaaaactattttc

SEQ ID NO: 104131 - protein, 271 aa, Arabidopsis thaliana; identical to SEQ ID NO: 43209
  peptide (1)..(271): Ceres Seq. ID no. 13614367

SEQ ID NO: 104132 - protein, 144 aa, Arabidopsis thaliana; identical to SEQ ID NO: 43210
  peptide (1)..(144): Ceres Seq. ID no. 13614368

SEQ ID NO: 104133 - DNA, 654 bp, Arabidopsis thaliana
  misc_feature (1)..(654): Ceres Seq. ID no. 13614372
  misc_feature (1)..(654): Ortholog of  Ceres SEQ ID NO 15178899 as cited in SEQ ID NO 0
aagatctgaccattttgttcatcgactttttcaactcaaaacaaaatgctcagattagcgattcctttgtttctttttgcattatgctctttcacattattttcttctgcaagatccttcatcaccacaaaacctcttccgattgattcatttattcctaaaccaaagctagagaatgcggctgcgtgttcttacacggtgatcattaagacaagctgttcctctgtgtcttacactagagataagatcagtatatcgtttggtgatgtctacggcaacgaggtgtatgtgaagagactagacgatccatcgtcgaggacgttcgaaaagtgttcatcagacacatacaagatatcgggaccgtgtatgcgcgacgtttgttatctctacctcctcaggcaaggatccgacggctggaaaccagagaatgttaagatctacggctcatccatcagatcagtcactttctactacaaccttttcttgcctaactctgtttggtacggctttaatgtctgcaatggcattggcaataccaagtcttctcaacccattagtactacctcttccgttgcagctatgtaagattgatataataattaaaaacaaggacttgtgattatcggtgaattgctatttgtatggcataacttg

SEQ ID NO: 104134 - protein, 179 aa, Arabidopsis thaliana
  peptide (1)..(179): Ceres Seq. ID no. 13614373
MLRLAIPLFLFALCSFTLFSSARSFITTKPLPIDSFIPKPKLENAAACSYTVIIKTSCSSVSYTRDKISISFGDVYGNEVYVKRLDDPSSRTFEKCSSDTYKISGPCMRDVCYLYLLRQGSDGWKPENVKIYGSSIRSVTFYYNLFLPNSVWYGFNVCNGIGNTKSSQPISTTSSVAAM

SEQ ID NO: 104135 - DNA, 1131 bp, Arabidopsis thaliana
  misc_feature (1)..(1131): Ceres Seq. ID no. 13614378
  misc_feature (1)..(1131): Ortholog of  Ceres SEQ ID NO 15172778 as cited in SEQ ID NO 59302
agaaaccgatagacctctctcattcgatcatttcttcttcttcttcgtcttcgctgcagcctgcatctgttgtttcttctagactttgcaatcacagagatagtgagtgagatagagagagtgataatggcgagtggactaagcgagatcgggagcacgaagatgttcgatggctacaacaaaagatacaaacacttcagtgagacacttggatgttccatgaccttttccatctacttccctccttctgcttcttcttcccataaatctcctgtgctttactggctttctggcctcacctgcacggacgagaacttcattatcaaatcaggagctcaacgtgctgcttctactcacggcattgctcttgttgctccagacacttctccaagaggactaaatgttgaaggggaggcagacagttacgactttggtgtaggagccggattctacctcaatgctactcaggaaaagtggaagaactggcgtatgtatgactatgttgtcaaagagttgccaaaactcctgagtgaaaacttttcccagcttgacacaacaaaagcatctatatctggacactccatgggtggacatggagctcttactatatacctgaggaacctcgataaatacaagtctgtatctgcgtttgcaccaatcacgaatcccataaattgtgcatggggacagaaggcattcaccaattatctaggtgacaacaaagctgcttgggaggaatacgatgccacttgtcttatttcaaagtacaacaatctttctgcaacaattctaattgatcagggagaaaacgaccagttctaccctgatcagttattgcccagcaagtttgaggaggcgtgcaagaaagtgaatgcaccgctcttattgcgcctccatccaggatacgaccactcctactatttcattgccaccttcatcgaagaccacattagtcaccatgctcaagcccttgagctatagctcacttcatctgcttggaaaccggctttgggtttgtccaagtattagtatctcaataaagcaagtggacttgtaatgttttatgttcaataactcccctgtgtgctcttttgtctacgataataataagaaaatcatctttgcttcata

SEQ ID NO: 104136 - protein, 284 aa, Arabidopsis thaliana; identical to SEQ ID NO: 23892
  peptide (1)..(284): Ceres Seq. ID no. 13614379

SEQ ID NO: 104137 - protein, 272 aa, Arabidopsis thaliana; identical to SEQ ID NO: 23893
  peptide (1)..(272): Ceres Seq. ID no. 13614380

SEQ ID NO: 104138 - protein, 253 aa, Arabidopsis thaliana
  peptide (1)..(253): Ceres Seq. ID no. 13614381
MTFSIYFPPSASSSHKSPVLYWLSGLTCTDENFIIKSGAQRAASTHGIALVAPDTSPRGLNVEGEADSYDFGVGAGFYLNATQEKWKNWRMYDYVVKELPKLLSENFSQLDTTKASISGHSMGGHGALTIYLRNLDKYKSVSAFAPITNPINCAWGQKAFTNYLGDNKAAWEEYDATCLISKYNNLSATILIDQGENDQFYPDQLLPSKFEEACKKVNAPLLLRLHPGYDHSYYFIATFIEDHISHHAQALEL

SEQ ID NO: 104139 - DNA, 1245 bp, Arabidopsis thaliana
  misc_feature (1)..(1245): Ceres Seq. ID no. 13614392
  misc_feature (1)..(1245): Ortholog of  Ceres SEQ ID NO 15225507 as cited in SEQ ID NO 55551
  misc_feature (1)..(1245): Ortholog of  Ceres SEQ ID NO 15225677 as cited in SEQ ID NO 0
atcatcactttggtcggccgctttcttccttccttcctcctcaaataatctacacatatataacatccctcttagtttctctgtggatccattgagacatatatcataagtaacaatggtgccataccaagaactcactcttcagagaagcttcagctacaactcaagaaagatcaatccagtgacttctccggcgcgtagctcacacgttcgttctccttcttcctccgccttaatcccaagcatacctgagcacgaactcttcctcgttccttgccggagatgctcctatgtccctctctcctcctcatcgtcggcctctcacaatatcgggaaatttcacttgaagttttctttgctcttgcgttctttcatcaacatcattaacatccccgcttgcaaaatgctctctcttccctctccgccgtcttcttcttccagcgtctctaaccaactgatctcactcgttaccggtggatcctcttctctcgggagaagagtcaccgggactctgtacggacacaaaagaggccacgtcacgttttcggtccagtacaaccaaagatccgacccggtcttgctcctcgacctggccatgtcaacggcaactctcgtcaaagagatgtcgtcggggctcgtcaggatcgcgttggagtgcgagaagcgtcatcgatcaggtacgaagcttttccaagagcccaaatggacgatgtactgcaacgggaggaagtgcggctacgctgtgtcacgtggcggcgcgtgtactgatacagattggcgcgtgttgaacacggtatctagggttactgttggagccggagttattccgacgccgaaaactattgatgacgtgtccggtgttggtagtggaacggagcttggtgagttgttgtatatgagaggcaaatttgaacgagtcgttgggagccgtgactcggaggcgttttacatgatgaacccggacaaaaacggaggtccagaactcagtatttttcttcttagaatataataaagaataaaatggtttttaaagagaatttgacttcttaaaagtttgaaaatgtctttaaatgacgtattattatgtatatgtaatatgattgcaatgttgtgtcatgagatatatgtaagcgatattgatatgaaagaaagagagaggggcctagagtatgataaggttttgtttttctagttgtttatttgatgtgtggtatttttgtatctttgttattgatcaataagaag

SEQ ID NO: 104140 - protein, 297 aa, Arabidopsis thaliana; identical to SEQ ID NO: 23097
  peptide (1)..(297): Ceres Seq. ID no. 13614393

SEQ ID NO: 104141 - protein, 201 aa, Arabidopsis thaliana; identical to SEQ ID NO: 23098
  peptide (1)..(201): Ceres Seq. ID no. 13614394

SEQ ID NO: 104142 - DNA, 1598 bp, Arabidopsis thaliana
  misc_feature (1)..(1598): Ceres Seq. ID no. 13614395
  misc_feature (1)..(1598): Ortholog of  Ceres SEQ ID NO 13597260 as cited in SEQ ID NO 63885
acttctactgtatcaagaagctccgttttgcttagccatagtgcgtctagggtttggttggtgggaagaaggttccgatcatggcgtcggtgtcgtcgtcggatcaaggacctaagacagaagcaggatgtagcggcggaggaggaggagagagctcggagacagtggcggcgagtgatcagatgttgttgtatagaggttttaagaaggcgaagaaggagagaggttgtacagctaaggagcgtattagtaaaatgcctccgtgcactgctgggaaaaggagttccatataccggggagtcaccagacatagatggacaggtcgttatgaagctcacctttgggataagagtacctggaaccaaaaccagaacaagaagggaaaacaagtttatctaggagcatatgatgatgaagaggctgctgctagagcttacgaccttgctgccttaaaatattggggtcctgggacacttataaattttccggtgactgattataccagggatttagaagaaatgcaaaatctctcaagggaagaataccttgcatctttacgtagaaaaagcagcggtttctctaggggaatagcgaaatatcgtggacttcaaagccgatgggacgcatcagccagtcgtatgcctggacctgaatacttcagtaacattcattacggggcaggtgatgatcgtggaacagaaggtgactttctaggtagcttttgtctggaaagaaagattgatctaacaggatacataaagtggtggggagccaacaagaaccgtcaaccagaatcttcatcaaaagcatcagaggatgcaaacgtcgaagatgctggtactgagcttaaaacactggaacacacatcccatgcaacagaaccatacaaggcgccaaaccttggcgtcctttgtggaactcagagaaaagaaaaagaaatatcatcaccatcaagctcttctgctttaagcatcttgtctcagtcgcctgccttcaagagcctagaggagaaagtgttgaagatccaagaaagctgcaataatgaaaacgatgagaatgcaaaccgtaacatcatcaatatggagaagaataacggcaaggcaatagagaaaccagttgtgagtcatggagttgctttaggcggtgctgctgctttgtctcttcagaaaagcatgtacccacttacctctctcttaacggctccattgctcaccaactacaatacattggatcctcttgcagaccctattctctggacaccatttcttccttcaggatcctctcttacttcagaggtgacaaagacagagaccagctgttccacgtacagctacctcccacaagagaaatgagccgttccctttagactttatgtatgtcagattctccttttttgagatgaattcgtcgacttgacatctctttgtctcttttatggagaaaaagttgggaaaagtgtgacaatggtctgaagcaggaatgtacaggttttgttagtggttgtgtttttttttttccagtgtggaatatagaatcatgatattttgtgtaaaacagaaaaaagttatcattatagtatagaagtttgctcttaatat

SEQ ID NO: 104143 - protein, 423 aa, Arabidopsis thaliana
  peptide (1)..(423): Ceres Seq. ID no. 13614396
MASVSSSDQGPKTEAGCSGGGGGESSETVAASDQMLLYRGFKKAKKERGCTAKERISKMPPCTAGKRSSIYRGVTRHRWTGRYEAHLWDKSTWNQNQNKKGKQVYLGAYDDEEAAARAYDLAALKYWGPGTLINFPVTDYTRDLEEMQNLSREEYLASLRRKSSGFSRGIAKYRGLQSRWDASASRMPGPEYFSNIHYGAGDDRGTEGDFLGSFCLERKIDLTGYIKWWGANKNRQPESSSKASEDANVEDAGTELKTLEHTSHATEPYKAPNLGVLCGTQRKEKEISSPSSSSALSILSQSPAFKSLEEKVLKIQESCNNENDENANRNIINMEKNNGKAIEKPVVSHGVALGGAAALSLQKSMYPLTSLLTAPLLTNYNTLDPLADPILWTPFLPSGSSLTSEVTKTETSCSTYSYLPQEK

SEQ ID NO: 104144 - protein, 389 aa, Arabidopsis thaliana
  peptide (1)..(389): Ceres Seq. ID no. 13614397
MLLYRGFKKAKKERGCTAKERISKMPPCTAGKRSSIYRGVTRHRWTGRYEAHLWDKSTWNQNQNKKGKQVYLGAYDDEEAAARAYDLAALKYWGPGTLINFPVTDYTRDLEEMQNLSREEYLASLRRKSSGFSRGIAKYRGLQSRWDASASRMPGPEYFSNIHYGAGDDRGTEGDFLGSFCLERKIDLTGYIKWWGANKNRQPESSSKASEDANVEDAGTELKTLEHTSHATEPYKAPNLGVLCGTQRKEKEISSPSSSSALSILSQSPAFKSLEEKVLKIQESCNNENDENANRNIINMEKNNGKAIEKPVVSHGVALGGAAALSLQKSMYPLTSLLTAPLLTNYNTLDPLADPILWTPFLPSGSSLTSEVTKTETSCSTYSYLPQEK

SEQ ID NO: 104145 - protein, 365 aa, Arabidopsis thaliana
  peptide (1)..(365): Ceres Seq. ID no. 13614398
MPPCTAGKRSSIYRGVTRHRWTGRYEAHLWDKSTWNQNQNKKGKQVYLGAYDDEEAAARAYDLAALKYWGPGTLINFPVTDYTRDLEEMQNLSREEYLASLRRKSSGFSRGIAKYRGLQSRWDASASRMPGPEYFSNIHYGAGDDRGTEGDFLGSFCLERKIDLTGYIKWWGANKNRQPESSSKASEDANVEDAGTELKTLEHTSHATEPYKAPNLGVLCGTQRKEKEISSPSSSSALSILSQSPAFKSLEEKVLKIQESCNNENDENANRNIINMEKNNGKAIEKPVVSHGVALGGAAALSLQKSMYPLTSLLTAPLLTNYNTLDPLADPILWTPFLPSGSSLTSEVTKTETSCSTYSYLPQEK

SEQ ID NO: 104146 - DNA, 1186 bp, Arabidopsis thaliana
  misc_feature (1)..(1186): Ceres Seq. ID no. 13614403
  misc_feature (1)..(1186): Ortholog of  Ceres SEQ ID NO 15179676 as cited in SEQ ID NO 52442
  misc_feature (1)..(1186): Ortholog of  Ceres SEQ ID NO 13582807 as cited in SEQ ID NO 67806
agaaaccctaaaaatccttattgtagcagctggagcaatatatatcccaatttgccgcaactagggttttctcttcctcacgcaaagcaatacatcgcagtctcccactgattcagcagctctttgaactactcttcgacaatggccgaacgtggtggagaacgtggtgttgagcgtggtggagaacgtggtgatttcggacgaggattcggaggccgtggaggtcgtggagatcgtggagggcgtggacgtggaggccgtggtggtcgtcgtggagggcgtgccagtgaagaagagaaatgggttccagtgaccaagcttggtcgtctcgtggcggctggtcatatcaagcagatagagcagatctatcttcattcactcccggttaaggagtaccagatcattgatatgctcatcggtccaacattgaaggatgaggtaatgaaaatcatgccggttcagaaacaaaccagggctggtcaaaggactagattcaaggcctttgttgtcgttggagatggtaatggtcatgttgggttgggagtgaaatgctctaaggaagttgctacggccattagaggagcgattattctcgctaagctgtctgttgttccagtgaggagaggttactggggtaacaagattgggaagccacatacggttccttgtaaggtgactgggaagtgtggatctgtgacagtgaggatggttccagctcctagaggttctggtattgtggctgctagagttcctaagaaggttcttcaattcgctggaattgatgatgttttcacttcctccaggggatccaccaaaactcttggaaacttcgtcaaggctacattcgattgccttcagaagacttacggattccttaccccagagttctggaaggagacaagattctctagatcaccataccaagagcacactgatttcctggcgtccaaggctctttcgaccagcaaacccgacccagtggttgaagaccaagcctaaacaatgcttccaccttgtgttctttttggattataatccttcatgagttaattttggttgaacctttggtagtatatgttgctggattgtgcaccttctgttttcatctcctcttccaaactactttatttttgcttatggatcttaatgttctagttttgcttttacttttgttgagaaaagttaa

SEQ ID NO: 104147 - protein, 285 aa, Arabidopsis thaliana; identical to SEQ ID NO: 30327
  peptide (1)..(285): Ceres Seq. ID no. 13614404

SEQ ID NO: 104148 - protein, 196 aa, Arabidopsis thaliana; identical to SEQ ID NO: 30328
  peptide (1)..(196): Ceres Seq. ID no. 13614405

SEQ ID NO: 104149 - protein, 185 aa, Arabidopsis thaliana; identical to SEQ ID NO: 30329
  peptide (1)..(185): Ceres Seq. ID no. 13614406

SEQ ID NO: 104150 - DNA, 1097 bp, Arabidopsis thaliana
  misc_feature (1)..(1097): Ceres Seq. ID no. 13614413
  misc_feature (1)..(1097): Ortholog of  Ceres SEQ ID NO 13595084 as cited in SEQ ID NO 56095
  misc_feature (1)..(1097): Ortholog of  Ceres SEQ ID NO 13594252 as cited in SEQ ID NO 57528
  misc_feature (1)..(1097): Ortholog of  Ceres SEQ ID NO 13594430 as cited in SEQ ID NO 60181
aaggaaaaatctttgatctttggaaaggaagagagcaggcgcaatcgagtaatccaaaggagttgcgttgttctgcgatcacgaagcggtctctcggcaaatctttcgacgcaagacatcgattcgtgtatttcatttttgctttggaactctatgcggaagaaccctaattgattcgccatgggagattccgtttcttcttcatcccgcgtttctgttcatcaatctcttggtgctggttctgttgctgatttgctgctatggagaaaccggactggtgcagtcattttgctaatctcttctactgggttttggttcttattcgagagagctggatacaatctcttgtctttcgtctccaatgttctgcttcttctcgttgcgatcttcttcttatgggccaagtctgctacagttctcaaccgaccgctacctccagttccgaatatggaaatccctgaggagtttgcaaataaggctgctgatgatcttcgggtttggatcaattatgtactgtcaattgcaagtgatatcaccatagctagaaatccgattcgtctccttcaggtttctcttgtcttgtgggctatatcctatgttgggactttaatcaactccctcactcttgtttacattggagttcttctcagtctttcttttcctattgtgtatgagaagtaccaagaccacattgatgagaaagtgaactcgacttctaaattcgttcgaaatatctcaaggaagtttccattgcccataaacaaagagaagaaacatcagtaggtgaaaaacagtccatttggtcaccagactaattacagctacaagaaggagccattactgtaatgctacaagaggatagtcaaagagcagcggaaaaaagtgaatcacagtacagattttcgttcatttctttctgtttcgcttactaggagttttcttcttgtgtgtttttgttgtgttcaagattcatgagtttctggtttttttggtcttttagtttacacgaatgctttgttgcagtattgttccagtagaaacgagaaagatgaatctaatacaacttgagaggttattcaataattaatttgttgatt

SEQ ID NO: 104151 - protein, 200 aa, Arabidopsis thaliana; identical to SEQ ID NO: 23783
  peptide (1)..(200): Ceres Seq. ID no. 13614414

SEQ ID NO: 104152 - protein, 111 aa, Arabidopsis thaliana; identical to SEQ ID NO: 23784
  peptide (1)..(111): Ceres Seq. ID no. 13614415

SEQ ID NO: 104153 - DNA, 1132 bp, Arabidopsis thaliana
  misc_feature (1)..(1132): Ceres Seq. ID no. 13614416
  misc_feature (1)..(1132): Ortholog of  Ceres SEQ ID NO 14314640 as cited in SEQ ID NO 59941
actttctctttgttttctttctaacctctttccacgaaaagtcacgatgggagataccgcagaggatcaggacgaccgagctatgatggaagctgaaggagtaacgagcttctccgaacttcttatgttctctgacggcgttctcagctcctcttccgaccaccaacctgagggtaatgtcggcgatggtggagaagacagtttaggttttgtattctccggcaaaactggctcaagaatgctctgttttagtggaggctatcaaaacgacgacgagtcactcttcctagaaccttctgttccaacctccggagtctctgatcttgacccttcatgcattaagattgattgcaggaactcaaacgacgcgtgtacggtcgataaatctactaaatcatcaaccaagaagagaaccggaacgggtaatgggcaagagtcggatcaaaatcgaaaaccgggcaagaaagggaaacgaaatcaagagaaatcatcagttggaattgcaaaggtcaggaaagaaaggttaggggaaagaattgcagcgttgcagcagttggtttctccatacggcaagacagatgcagcttctgtgttgcatgaagcgatgggttacatcaaattcttacaagatcagattcaagtcctttgctctccttatctaatcaaccattctctcgacggtggagttgtcaccggagatgtaatggcggcgatgaaagcgaaagacttgagaagcagaggattatgtctagtacctgtctcatccaccgtacacgtggaaaattccaacggtgctgatttctggtcacctgctactatgggtcacactacgtcaccgtcgttacctcaaggattttaattaaacggtcgtaggctgatatatattagtagtattttagtagccttttttcttgggttttgtttttggctgaagaactattactagtaaatgttacacccagacatttttttgggattatctgggtggtataaaaaggttggaatcttttgtgtttgtaaaattagattgtctaagttttcttaaagtttctttgatgtcactgtcacagttgcgacgagtagtgatggtacttactgaaaggctaagcttattcacgctcttaaagtgttg

SEQ ID NO: 104154 - protein, 285 aa, Arabidopsis thaliana; identical to SEQ ID NO: 39851
  peptide (1)..(285): Ceres Seq. ID no. 13614417

SEQ ID NO: 104155 - protein, 270 aa, Arabidopsis thaliana; identical to SEQ ID NO: 39852
  peptide (1)..(270): Ceres Seq. ID no. 13614418

SEQ ID NO: 104156 - protein, 258 aa, Arabidopsis thaliana; identical to SEQ ID NO: 39853
  peptide (1)..(258): Ceres Seq. ID no. 13614419

SEQ ID NO: 104157 - DNA, 1142 bp, Arabidopsis thaliana
  misc_feature (1)..(1142): Ceres Seq. ID no. 13614424
  misc_feature (1)..(1142): Ortholog of  Ceres SEQ ID NO 14305854 as cited in SEQ ID NO 52331
  misc_feature (1)..(1142): Ortholog of  Ceres SEQ ID NO 15168588 as cited in SEQ ID NO 60235
aagcacttcactctctaatttccttctctctatctctcaccatattcgcgattaaaaactctcaacttttctctcaaatttctgatcctttgatccaacagttagaagaagattcatctgatcatggccctcgaagcgatgaacactccaacttcttctttcaccagaatcgaaacgaaagaagatttgatgaacgacgccgttttcattgagccgtggcttaaacgcaaacgctccaaacgtcagcgttctcacagcccttcttcgtcttcttcctcaccgcctcgatctcgacccaaatcccagaatcaagatcttacggaagaagagtatctcgctctttgtctcctcatgctcgctaaagatcaaccgtcgcaaacgcgatttcatcaacagtcgcaatcgttaacgccgccgccagaatcaaagaaccttccgtacaagtgtaacgtctgtgaaaaagcgtttccttcctatcaggctttaggcggtcacaaagcaagtcaccgaatcaaaccaccaaccgtaatctcaacaaccgccgatgattcaacagctccgaccatctccatcgtcgccggagaaaaacatccgattgctgcctccggaaagatccacgagtgttcaatctgtcataaagtgtttccgacgggtcaagctttaggcggtcacaaacgttgtcactacgaaggcaacctcggcggcggaggaggaggaggaagcaaatcaatcagtcacagtggaagcgtgtcgagcacggtatcggaagaaaggagccaccgtggattcatcgatctaaacctaccggcgttacctgaactcagccttcatcacaatccaatcgtcgacgaagagatcttgagtccgttgaccggtaaaaaaccgcttttgttgaccgatcacgaccaagtcatcaagaaagaagatttatctttaaaaatctaatactcgactattaattcttgtgttttcattttcatttttttagttacaaatttttaattgttctgatttggattgaatattggtatattgttaggggttgatacaaaaatttgatgattgattaagtcagaatttcttatttattttggtaactaatctcttgatcagtccactctgtataaatattgcgtggcatt

SEQ ID NO: 104158 - protein, 273 aa, Arabidopsis thaliana; identical to SEQ ID NO: 37506
  peptide (1)..(273): Ceres Seq. ID no. 13614425

SEQ ID NO: 104159 - protein, 268 aa, Arabidopsis thaliana; identical to SEQ ID NO: 37507
  peptide (1)..(268): Ceres Seq. ID no. 13614426

SEQ ID NO: 104160 - protein, 251 aa, Arabidopsis thaliana; identical to SEQ ID NO: 37508
  peptide (1)..(251): Ceres Seq. ID no. 13614427

SEQ ID NO: 104161 - DNA, 1302 bp, Arabidopsis thaliana
  misc_feature (1)..(1302): Ceres Seq. ID no. 13614434
  misc_feature (1)..(1302): Ortholog of  Ceres SEQ ID NO 14315189 as cited in SEQ ID NO 57702
aactcaagtttcttgcaattacctacttacaacaaagcaactcgactcgaacaaacacatccatggctccttctgcgcaacctcttcctgtgagtgtttcggatgaaaaatatgcgaatgtcaagtgggaagagttggcattcaagtttgttcgtacggattatatgtatgttgcgaagtgcaatcatggagagagttttcaagaggggaagattcttccttttgctgatttgcaacttaacccttgcgctgctgttcttcagtatggccagggtttatatgaaggactgaaagcttacaggacagaagatggtcggattctgctattccgaccagaccaaaacggtctccgccttcaagccggagctgacagactctatatgccttatccttcggtcgatcaattcgtctccgccatcaaacaagttgctcttgccaacaagaaatggattcctcctccggggaaaggaacattgtatattaggcctatcttgtttgggagtggtccgattcttggttcatttcccattcctgagaccaccttcacagcttttgcctgtcctgttggacgttatcataaggataactctggtttgaatctgaaaatcgaagatcagtttcgtcgagcttttcctagtggaactggtggtgtgaagagcatcacaaactattgtcctgtttggataccattggcagaggcgaaaaaacaaggtttctctgatattttgtttttggatgctgcaactggcaaaaacattgaagaacttttcgcagctaatgtttttatgctcaagggcaatgttgtatcgacaccaacaattgcaggaactattttgcccggagtcactcgaaactgcgtaatggaattgtgtcgtgatttcggctaccaggtcgaggaacgtacgattcctctagtggactttctcgatgcggacgaagctttctgtactggcactgcttccattgtgactagtattgcatccgtaacctttaaagacaaaaagaccggattcaaaacaggggaagaaacattggctgcgaagctatacgagacgttaagtgatatccagacgggtcgggtcgaggataccaagggatggacggtggagattgaccgccagggctgaaagttgaaactgtaacttgatgctaaatatgtgtgtgtgtgtatacaaaacttatgtaagaaacatctgaagatgtctctgatctttgtgattgtgatgatcatgcatgtcctatcgttgcgatgtattttataaatgttcgtctgtaagttatttaataactatggctttttgc

SEQ ID NO: 104162 - protein, 374 aa, Arabidopsis thaliana
  peptide (1)..(374): Ceres Seq. ID no. 13614435
LKFLAITYLQQSNSTRTNTSMAPSAQPLPVSVSDEKYANVKWEELAFKFVRTDYMYVAKCNHGESFQEGKILPFADLQLNPCAAVLQYGQGLYEGLKAYRTEDGRILLFRPDQNGLRLQAGADRLYMPYPSVDQFVSAIKQVALANKKWIPPPGKGTLYIRPILFGSGPILGSFPIPETTFTAFACPVGRYHKDNSGLNLKIEDQFRRAFPSGTGGVKSITNYCPVWIPLAEAKKQGFSDILFLDAATGKNIEELFAANVFMLKGNVVSTPTIAGTILPGVTRNCVMELCRDFGYQVEERTIPLVDFLDADEAFCTGTASIVTSIASVTFKDKKTGFKTGEETLAAKLYETLSDIQTGRVEDTKGWTVEIDRQG

SEQ ID NO: 104163 - protein, 354 aa, Arabidopsis thaliana; identical to SEQ ID NO: 24286
  peptide (1)..(354): Ceres Seq. ID no. 13614436

SEQ ID NO: 104164 - protein, 320 aa, Arabidopsis thaliana; identical to SEQ ID NO: 24287
  peptide (1)..(320): Ceres Seq. ID no. 13614437

SEQ ID NO: 104165 - DNA, 1644 bp, Arabidopsis thaliana
  misc_feature (1)..(1644): Ceres Seq. ID no. 13614442
  misc_feature (1)..(1644): Ortholog of  Ceres SEQ ID NO 14303850 as cited in SEQ ID NO 53464
  misc_feature (1)..(1644): Ortholog of  Ceres SEQ ID NO 13656177 as cited in SEQ ID NO 64997
aagcatttgggggaaatcaatcgaaaaccctaggagagataaaaacaaaaatctagacggagatttatggcgacagcgaatcctggccgtggaggtggtagaagaggcggtggagctatggatgacgataagttggtcttcgagactaccgatggaattgagcccatcacgagcttcaatgatatgggcattaaggaagatgtgcttcgcggtgtctacgaatatggattcgagaagccttccgcgattcagcagagggctgttatgccgattcttcaaggacgtgatgttattgctcaagctcagtccggtaccgggaagacatctatgattgctctctccgtttgtcaagtcgttgatacttcttctagagaggttcaggccttgatattatccccaacaagagagctggctacacaaacagagaagacgatacaagctattggattacatgccaatattcaggcacatgcttgcatcggtgggaatagtgttggagaagacatcaggaagctggagcatggtgttcatgttgtgtctgggacacctggtcgtgtctgtgacatgataaagaggagaagtcttcgtaccagagctattaaacttctgattcttgatgaatcagatgaaatgctgagcagagggttcaaggaccagatctatgatgtttacagatatcttccaccagatcttcaggtttgcttggtttctgcaactcttcctcacgagattttggagatgacatccaagtttatgacagaaccagtgaagatacttgtgaagcgtgatgagttgactcttgaaggaatcaaacaattttttgttgctgttgagaaggaagagtggaaatttgatacactctgtgatctttatgacacgcttactatcactcaagctgttatcttctgcaatactaaacgaaaggtggattatcttagtgagaaaatgagaagtcacaacttcactgtctcatcaatgcatggagacatgcctcagaaggagagagacgccatcatgaatgagtttcggtcaggtgatagtcgtgttttgataacaacagatgtatgggcacgtgggattgatgtgcaacaagtttctcttgttatcaattatgatctccccaacaaccgtgagctctacatccatcgtattgggcggtctggtcgattcgggcgtaagggtgttgcaatcaactttgttaaaagcgacgacatcaagattctcagagacattgagcagtactacagtacccagattgatgagatgccaatgaatgtagctgatcttatctaaaagagcttgtctgagatttttgtgctttcagcggggaagtgtctggatgaaaaagtattgttgagcgcttctgtcaaattattgcactatcttaacggtgtatttcctttgatgtttctgtgggctcttttgaacaaacttaaactcgcgtgtggtaaatgtttaatgacttgagaagcgatttaggtttagggtttggaccgtttggtttttcgtttcctcgtaattgattctgggggctttgattgtggtttgtgggtcaaaactctcaactatcactacttgtaagacttttgctcgacagttgaaacggttcattgttatcttatttcgtaaagcttggatcattgc

SEQ ID NO: 104166 - protein, 408 aa, Arabidopsis thaliana; identical to SEQ ID NO: 28696
  peptide (1)..(408): Ceres Seq. ID no. 13614443

SEQ ID NO: 104167 - protein, 391 aa, Arabidopsis thaliana; identical to SEQ ID NO: 28697
  peptide (1)..(391): Ceres Seq. ID no. 13614444

SEQ ID NO: 104168 - protein, 369 aa, Arabidopsis thaliana; identical to SEQ ID NO: 28698
  peptide (1)..(369): Ceres Seq. ID no. 13614445

SEQ ID NO: 104169 - DNA, 1335 bp, Arabidopsis thaliana
  misc_feature (1)..(1335): Ceres Seq. ID no. 13614446
  misc_feature (1)..(1335): Ortholog of  Ceres SEQ ID NO 12614832 as cited in SEQ ID NO 68844
ctcagctaaagagagaaagagaagcaccatttttctttctcgtcgtgtcatcgttttctcagattcctgaataatcattcccttccgattccaaaatccccaaacctcatccactcctccatctcccggattcggattcccagaatcatgcccatggagaacgacaatggcccacacgttggcaacgtcgtcgtcaccgctgagcaagcgaccaagattaacgagactgatggacggttgccggagaatcggcagaccggtgttgtctctgacaccggaagtggtagcgagagaggagagcaaggggttggagagtcggcagttgctgtggcggtgccggtggaggagagcggatcgatttcggtgggagagctacctgctccccgatcttcctctgctagagttccgtttactaatctaagccaaattgatgcggatcttgctcttgctcgcacactccaagaacaggagcgggcgtatatgatgttgaccatgaatagtgaaatcagtgactatgggagctgggaaactggaagctatgtatacgatgaggatgagtttgatgaccccgagaatgaggatgaggatgatgatgaagatgaatatgaaacagatgatgatcctcaggaagatgggcttgatgtcaatgtgcacgccaatgaagatgatcaagaagatgacggtaactctgacattgaagaagttgcttatacagatgatgaggcctatgctagagctcttcaagaagctgaagaaagggatatggctgctagattgtctgccttatctgggttagcaaaccgggtggttgaagatctagaggatgagagtcatacttctcaggatgcctgggatgagatggatcctgatgagctttcatatgaggagttgcttgcacttggcgacattgtgggaaccgaaagtagaggattgtctgctgatacaattgcatctttgccttcaaaaagatataaagaaggagacaatcagaacggaaccaatgagtcatgtgttatatgtcgtttagactatgaggatgacgaagacctgatactgctcccatgcaaacattcttaccactcggagtgcataaacaactggttgaagataaacaaggtttgccccgtatgcagtgcagaagtttcaacttcgacctctggacaaagctgatgaggcaaaggaagaaagattcagaaagaatcataagctaagaacttcaaaaccttagctgcctgtttgtacacttcttataaacaaaataacatcatcagatttccttggatcctttaaaaaatctcaaagattggaacattctcaagcgtttttagtttttgc

SEQ ID NO: 104170 - protein, 340 aa, Arabidopsis thaliana; identical to SEQ ID NO: 39651
  peptide (1)..(340): Ceres Seq. ID no. 13614447

SEQ ID NO: 104171 - protein, 338 aa, Arabidopsis thaliana; identical to SEQ ID NO: 39652
  peptide (1)..(338): Ceres Seq. ID no. 13614448

SEQ ID NO: 104172 - protein, 229 aa, Arabidopsis thaliana; identical to SEQ ID NO: 39653
  peptide (1)..(229): Ceres Seq. ID no. 13614449

SEQ ID NO: 104173 - DNA, 1396 bp, Arabidopsis thaliana
  misc_feature (1)..(1396): Ceres Seq. ID no. 13614450
  misc_feature (1)..(1396): Ortholog of  Ceres SEQ ID NO 14312208 as cited in SEQ ID NO 54845
  misc_feature (1)..(1396): Ortholog of  Ceres SEQ ID NO 15171755 as cited in SEQ ID NO 57047
  misc_feature (1)..(1396): Ortholog of  Ceres SEQ ID NO 13597613 as cited in SEQ ID NO 65334
  misc_feature (1)..(1396): Ortholog of  Ceres SEQ ID NO 13655958 as cited in SEQ ID NO 65456
  misc_feature (1)..(1396): Ortholog of  Ceres SEQ ID NO 14303664 as cited in SEQ ID NO 65892
  misc_feature (1)..(1396): Ortholog of  Ceres SEQ ID NO 15178832 as cited in SEQ ID NO 0
atgggcttcagcccaaaatctgtaatcatcgtttctgagttggagtcggccacatatgacataactgagaattacttttctctctcctctgacggttcttttcttccttcgtcctctcgttttttttgtttcgtcgtctctctctcgcgctctgaaaaattcgcagaatccgtcatgtcttccggcgtaaattcaactggctccgccgcagcagcaccggaggttgacaagatgttcttctgctaccagtgcaatcaaacagtcacaatctcaatttcctcatccgctgatcctttttgtccaatttgtaaccaagggtttcttgaagaatacgaagaccctaaccctaatcaatccctcaatttcaaccctaactcttctgattcctttttccccatggccgatcctttctccaccttgctcccgctcatattcggctcttccgctgccgctccttccggcatggacttcatgagcttattcggtccttcgatgcaaccacaggctcgttccactcagcagaatcctcagtctgacgcgtttgatccgtttacgtttcttcagaatcatctccagactttgcgatctagcggtacgcactttgagttcgtgatcgagaatcatccttcggatccaggtaatcgtatgcctgggaatttcggtgattacttctttggtccaggtcttgagcagttgattcagcaactagctgagaatgatcctaatcgttacggaactcctcctgcttccaaatccgccattgatgctcttcctactgttaaggtaacgaaggatatgttgaaatcggagatgaaccaatgcgcggtgtgtatggatgagtttgaggatggtagcgatgttaagcagatgccttgtaagcacgtctttcatcaggactgtttgctcccttggctggagttgcataattcgtgtcctgtttgtcgattcgagttgcctacggatgatcctgattatgagaacaggagtcaaggaagtcaggggagtggtgatggacaaggatcggttgagggtcagcagacgccgaggtttagtatacaacttccttggccgttcaggagacaagatggctctggttcaggctcgggagcacctggtactggtggaggtaatcttgagaccaggggtgaagatttggattgagaatgtgttggccagtcattgcttggaaactggatcagaaggatatctatcccaagttctccaacaaaaaatgaaaaaacagttttattagggaaacaaaagtgacattgaggtcttaccatattttgtacatttaaaaaaagttatttttttcgttgttattttgggattatataacgaatgtgaaagtttttaaaaatcgcaaattttcaattgagtgttgtttatttttctc

SEQ ID NO: 104174 - protein, 386 aa, Arabidopsis thaliana
  peptide (1)..(386): Ceres Seq. ID no. 13614451
MGFSPKSVIIVSELESATYDITENYFSLSSDGSFLPSSSRFFCFVVSLSRSEKFAESVMSSGVNSTGSAAAAPEVDKMFFCYQCNQTVTISISSSADPFCPICNQGFLEEYEDPNPNQSLNFNPNSSDSFFPMADPFSTLLPLIFGSSAAAPSGMDFMSLFGPSMQPQARSTQQNPQSDAFDPFTFLQNHLQTLRSSGTHFEFVIENHPSDPGNRMPGNFGDYFFGPGLEQLIQQLAENDPNRYGTPPASKSAIDALPTVKVTKDMLKSEMNQCAVCMDEFEDGSDVKQMPCKHVFHQDCLLPWLELHNSCPVCRFELPTDDPDYENRSQGSQGSGDGQGSVEGQQTPRFSIQLPWPFRRQDGSGSGSGAPGTGGGNLETRGEDLD

SEQ ID NO: 104175 - protein, 328 aa, Arabidopsis thaliana; identical to SEQ ID NO: 22707
  peptide (1)..(328): Ceres Seq. ID no. 13614452

SEQ ID NO: 104176 - protein, 309 aa, Arabidopsis thaliana; identical to SEQ ID NO: 22708
  peptide (1)..(309): Ceres Seq. ID no. 13614453

SEQ ID NO: 104177 - DNA, 1849 bp, Arabidopsis thaliana
  misc_feature (1)..(1849): Ceres Seq. ID no. 13614454
  misc_feature (1)..(1849): Ortholog of  Ceres SEQ ID NO 13595529 as cited in SEQ ID NO 56687
ggggtcatacaataaaaattgtgtttcttttttgccctaaaccaaaaatttcatctctcttttccctcttcccgtctctatctctctgagaagcgttttttcggtggagagaaagagagatttgactctgtcaagttattagtacattgaggtcgggctgtcaaaacttgacagcccgagtttgaagcttccaggactctttttctattaatgagattggtatgctagatttggagtgtattggattagattgtggcgatcatgggttctttgtctgggatcattcaacggccacttgttgctgctgctgctgtgattacagcttctgtgtctgcagatgtctctgagaggttctcatctcttagatcactagttcgaggttctgaatcagagcagattgctccttcagtgtctggtttagttcaggaagaaaggtccttgtgggtttctcaagtctcggcctccaagcttgcagatttatcttttgtgtcgaggatttgtgttcctgtaccaaatgttgatctcctagcttctaatcctagctgtagtctcgctacttctgttacttctctgtccgctcttcgtagtgtttatcagtctgcagagttggctaaagcatcgaaaccggttgcattcacaatcggtgcctcacttgtggttcctgatatttcctacagatggcatttacctgagcctagtgcagtcgatatgtctggttcttcgagttgtgtgtctgaaaagaatagaactgttgtggttttgcttggatggcttggatcaaagcagaagcatctgaagaaatatgctgattggtacacttcaaagggttaccatgtcattacatttactcttccgatgaatgagattatgagttatcaagttggagggaaagcagagaagaacatcgagtcgctggttaatcacttggctgattggttggatgaagagcaaaagaaaaatctcgtctttcacaccttcagcaacaccgggtggttaacatatggagccattttggaaaagtttcagaagcaagattcatcattgatgggaagagttaaaggttgcatagtggactcagctcctgttgctgctgcagatcctacggtatgggcatcaggtttctcagctgcgttcttgaagaaaagcagtgtagccactaaaggatctgcgagctcatcatatgagtcaaacggtataaacatctcccagcctaaacccgctgcaacagaaacagctttgcttttggttcttgaaaagttctttgcggtgattctaaatcttcccaaagtaaacaggagacttgccgatgttcttgacacattatcaacagcacaaccaagttgtccacagttatacatttacagctctgcagacagagttataccggtggaacaagttgaatcattcattgtagagcagaggaaagcaggacatgaggtccgtgcttgcaacttcatatcttcacctcatgtagaccatttccggagtaacccagaactgtatacagctgagctcaaccatttcatgaacaactttgtcctttcttgctgccaccattcttcatagcgacttccacaagtgttgttgttgctaaccatttttggggtccttttaactcttatacaagaaagagaaaaatagttactgattgatgattctttttggtttggattggtttatagattcaaattcattattcctttgtaaattgttggatattgtacatttaggagaatgaagattcaagaaagtgacgtccttgtcctttgtagtggagatttggatcttatggttgtcttttgttatttgttcaaagagggttgttaagaacccaatcataaagtttttg

SEQ ID NO: 104178 - protein, 434 aa, Arabidopsis thaliana; identical to SEQ ID NO: 43737
  peptide (1)..(434): Ceres Seq. ID no. 13614455

SEQ ID NO: 104179 - protein, 285 aa, Arabidopsis thaliana; identical to SEQ ID NO: 43738
  peptide (1)..(285): Ceres Seq. ID no. 13614456

SEQ ID NO: 104180 - protein, 236 aa, Arabidopsis thaliana; identical to SEQ ID NO: 43739
  peptide (1)..(236): Ceres Seq. ID no. 13614457

SEQ ID NO: 104181 - DNA, 1000 bp, Arabidopsis thaliana
  misc_feature (1)..(1000): Ceres Seq. ID no. 13614462
  misc_feature (1)..(1000): Ortholog of  Ceres SEQ ID NO 15169786 as cited in SEQ ID NO 59711
aaggaagagaagagtgtccatatcatagattaaaaatcattcgttaatcaaaccacaaaatctaacttccacacacaaaacacacatacacaagaaaataaaaataaaaatggaattagttgaagagaccattccaaaagaagggaaaaagatgggagaaagaattgtggtcgacaaagcttatctttaccaagaagacaaaccactcaccgtctgcaagacttctctcttctacaccggcgatggcttcgccgcctatgactgccgtggtgatatcatcttcagggttgattcttatggacctgacacaagagataacgatgagattgtcctcatggacgcgaccgggaagtgtctccttaccgttaaacgaaagagaccaactctacaccaaagatgggaaggttttctcggcgagagatcggaaggtcagaaaccgatattcagcgtccgtagatcgtcgataatcggacggtgtacgatggaagtagaagtttacgacggaacaggagaagagtacattatcgatggagacttctcgcaacgaagctgtctcatatacgacacgaagaaatgtactgtggctgagatcaaacgcaaagtagacgcgtcaacgaacgtgatgcttggtcgagatgtgttcactctagagattaaaccgggttttgatggcgctttcgcgatgggtttggtcgttgtgcttgaccagatcaacggtgatgatccagttgagattggtgatgaacaggtacacccttttgtagaggattagtgtcggtctctctctcacctctctcagcggtcttcacgttaacatatcgaatctaatctttagtttttcaatctttggatttggaccatatgggattatggagatctgtttgtatcattctgtgttaagtcatttaagttgctacgttacataatatttatagactatagtctgtctcgggaaattcgttgactatacgtttgatgttacaaaattatttgtgcgttc

SEQ ID NO: 104182 - protein, 220 aa, Arabidopsis thaliana; identical to SEQ ID NO: 26322
  peptide (1)..(220): Ceres Seq. ID no. 13614463

SEQ ID NO: 104183 - protein, 206 aa, Arabidopsis thaliana; identical to SEQ ID NO: 26323
  peptide (1)..(206): Ceres Seq. ID no. 13614464

SEQ ID NO: 104184 - protein, 145 aa, Arabidopsis thaliana; identical to SEQ ID NO: 26324
  peptide (1)..(145): Ceres Seq. ID no. 13614465

SEQ ID NO: 104185 - DNA, 1197 bp, Arabidopsis thaliana
  misc_feature (1)..(1197): Ceres Seq. ID no. 13614466
  misc_feature (1)..(1197): Ortholog of  Ceres SEQ ID NO 12465955 as cited in SEQ ID NO 147
aaatttaatgtcgctctcaaaactcatttttttcatatgaattttctaacacaaacaattttccttggaaatctccgccttgtatctcttatataactcatctctctatactccgaacatgtccctctccgttaaccttaacggccatgtcagccgccgcagctgaaaccgacgtctctctccgtcgcagatctaactctcttaacggaaaccacactaacggcgtcgccattgacggaaccctagacaacaacaaccgtcgcgtcggagatacaaacactcacatggatatatctgctaagaaaactgacaacggctacgccaatggtgtcggaggaggaggatggagaagcaaagcgtcgttcacgacgtggacggcgcgtgatatcgtctacgtggtgagataccattggataccgtgcatgttcgctgccggacttctgttcttcatgggcgtggagtacacgcttcagatgattcccgcgagatctgagccgttcgatcttgggtttgtggtcacgcgctctttgaatcgcgtattagcatcttcaccggatcttaacactgttttagccgcactaaacacggtgttcgtagggatgcaaacaacgtatattgtatggacatggttagtggaaggacgagcacgagccaccatcgcggctttattcatgttcacttgtcgcggcattctcggctactctactcagcttcctctccctcaggactttctaggatcaggggttgattttccggtgggaaatgtctctttcttcctcttcttctctggccatgtcgccggctcgatgatcgcatcattggacatgagaagaatgcagaggttgagacttgcaatggtctttgacatcctcaatgtattacagtcgatcagactgctcggtacaagaggacattacacaatcgaccttgcggttggagttggcgctgggattctcttcgactcattggccggaaagtacgaagagatgatgagcaagagacatttaggcactggttttagtttgatttcgaaagactctctagtcaattaaatttgttttctatcagaatgtttagttgagttgaatctagcgtaatgaatttttttgtttttctttgaaatggttctacttgactaccgttatttgaacctaactaagtgtgatcaatcttatgttaaggggtattacatagtct

SEQ ID NO: 104186 - protein, 301 aa, Arabidopsis thaliana
  peptide (1)..(301): Ceres Seq. ID no. 13614467
MSAAAAETDVSLRRRSNSLNGNHTNGVAIDGTLDNNNRRVGDTNTHMDISAKKTDNGYANGVGGGGWRSKASFTTWTARDIVYVVRYHWIPCMFAAGLLFFMGVEYTLQMIPARSEPFDLGFVVTRSLNRVLASSPDLNTVLAALNTVFVGMQTTYIVWTWLVEGRARATIAALFMFTCRGILGYSTQLPLPQDFLGSGVDFPVGNVSFFLFFSGHVAGSMIASLDMRRMQRLRLAMVFDILNVLQSIRLLGTRGHYTIDLAVGVGAGILFDSLAGKYEEMMSKRHLGTGFSLISKDSLVN

SEQ ID NO: 104187 - protein, 255 aa, Arabidopsis thaliana; identical to SEQ ID NO: 35201
  peptide (1)..(255): Ceres Seq. ID no. 13614468

SEQ ID NO: 104188 - protein, 209 aa, Arabidopsis thaliana; identical to SEQ ID NO: 35202
  peptide (1)..(209): Ceres Seq. ID no. 13614469

SEQ ID NO: 104189 - DNA, 1014 bp, Arabidopsis thaliana
  misc_feature (1)..(1014): Ceres Seq. ID no. 13614470
  misc_feature (1)..(1014): Ortholog of  Ceres SEQ ID NO 12465955 as cited in SEQ ID NO 147
gtcactctccgttaattctaacggtcatgtcagacgccgtaaccaaaaccgtcgcccctctccgtcgtaaagctaatcctattaacggaaaacacactaacggcgtcaccatcgacggaatcttcgacgaccacaatcgccaaataggaccaataaatagccaaatggaagatattgctcagaaaactgatgacggtggaggaggagaatggacaagcaaagcgtcgtttatgacgtggacgatgcatgacataatttacgtggcgagacaccattggataccgtgtttattcgcggccggagttatgttttttacggttgtggagtacacgttccagatgactcctgcgagttctcagccgtttgatctaggatttgtggccacacgttatctgcatagcatcttggcatcttcacccaatcttaacaccgttttagccgctttaaacacgattttggtagggatgcaaacaacgtatattggatgtacatgggcagtggaaggacgaccacgggcaaccatcgcggctttattcatgttcacttgtcgtggcattctcggctactctactcagctccctcgccctcaggaatttttaggatcaggagtagattatccggtcggaaacgtgtcgttcttcctcttctactcaggtcacgtcgccggatcgatgatcgcatcgttggacatgaagagaatgcagaggtttaggctggcgatggtttttgacattctcaatgtattgcaatccatcaggctgcttggtacgagaggacactacacgattgatattgcggttggagttggcgctgggattctctttgactcattggccgggaagtacgaagagatgagcaagagacatttacggaatactcgttgtagtttgatttcaaaagactctctagtcacttaaatctattttttttttccggcaaaataattgtatattacactaaatctatttcttcttaaaacgtttagaaacacatttagttgaagtttaatgattt

SEQ ID NO: 104190 - protein, 304 aa, Arabidopsis thaliana
  peptide (1)..(304): Ceres Seq. ID no. 13614471
HSPLILTVMSDAVTKTVAPLRRKANPINGKHTNGVTIDGIFDDHNRQIGPINSQMEDIAQKTDDGGGGEWTSKASFMTWTMHDIIYVARHHWIPCLFAAGVMFFTVVEYTFQMTPASSQPFDLGFVATRYLHSILASSPNLNTVLAALNTILVGMQTTYIGCTWAVEGRPRATIAALFMFTCRGILGYSTQLPRPQEFLGSGVDYPVGNVSFFLFYSGHVAGSMIASLDMKRMQRFRLAMVFDILNVLQSIRLLGTRGHYTIDIAVGVGAGILFDSLAGKYEEMSKRHLRNTRCSLISKDSLVT

SEQ ID NO: 104191 - protein, 296 aa, Arabidopsis thaliana
  peptide (1)..(296): Ceres Seq. ID no. 13614472
MSDAVTKTVAPLRRKANPINGKHTNGVTIDGIFDDHNRQIGPINSQMEDIAQKTDDGGGGEWTSKASFMTWTMHDIIYVARHHWIPCLFAAGVMFFTVVEYTFQMTPASSQPFDLGFVATRYLHSILASSPNLNTVLAALNTILVGMQTTYIGCTWAVEGRPRATIAALFMFTCRGILGYSTQLPRPQEFLGSGVDYPVGNVSFFLFYSGHVAGSMIASLDMKRMQRFRLAMVFDILNVLQSIRLLGTRGHYTIDIAVGVGAGILFDSLAGKYEEMSKRHLRNTRCSLISKDSLVT

SEQ ID NO: 104192 - protein, 250 aa, Arabidopsis thaliana
  peptide (1)..(250): Ceres Seq. ID no. 13614473
MEDIAQKTDDGGGGEWTSKASFMTWTMHDIIYVARHHWIPCLFAAGVMFFTVVEYTFQMTPASSQPFDLGFVATRYLHSILASSPNLNTVLAALNTILVGMQTTYIGCTWAVEGRPRATIAALFMFTCRGILGYSTQLPRPQEFLGSGVDYPVGNVSFFLFYSGHVAGSMIASLDMKRMQRFRLAMVFDILNVLQSIRLLGTRGHYTIDIAVGVGAGILFDSLAGKYEEMSKRHLRNTRCSLISKDSLVT

SEQ ID NO: 104193 - DNA, 1388 bp, Arabidopsis thaliana
  misc_feature (1)..(1388): Ceres Seq. ID no. 13614482
  misc_feature (1)..(1388): Ortholog of  Ceres SEQ ID NO 13598351 as cited in SEQ ID NO 68715
  misc_feature (1)..(1388): Ortholog of  Ceres SEQ ID NO 13584744 as cited in SEQ ID NO 69137
gtttatcaatctcacatcgagacgaaattagagctactcagacttgttctattaaactgttaccttctccagacaaagcgttacctttttttttggtccgtacgaggaaaaatctaggagacagagctatttgttcgaaagatgcaacttttaaatagctgttgtggaaaaggatttgatgggaagaagaaagaaaaggaagagccatcttggagggtattttcactgaaggaacttcatgcagccaccaacagtttcaattacgataacaaactcggtgaaggtcgatttggtagtgtctattggggtcagctatgggatggctcacaaattgcagtcaagaggttgaaggaatggagtaatagagaagagatagattttgctgtggaagtcgagattcttgctcgtattcgtcacaagaatttgttgagtgttcgtggctactgtgctgaaggacaagaacgtcttcttgtgtacgagtacatgcagaatttgagcttggtttcacatcttcatggccagcattcagctgaatgtcttctagattggaccaagcgaatgaagatcgccataagctctgctcaggccattgcctacctacacgaccacgcaaccccacatatagtccatggagatgtgagagctagcaatgtgttgttagactctgaatttgaagctcgcgttacagattttggttatggtaagctgatgccagatgatgatactggagatggagctaccaaagccaaaagtaataatggatatatctcaccagaatgtgatgcatcaggaaaagaatcagaaactagcgatgtgtacagttttggtatccttttgatggtactggttagtggcaagagaccactcgagaggctaaatccaacaacaacgcggtgtataacagagtgggttttaccacttgtttatgaaagaaattttggtgaaatcgttgataagaggctgagcgaggagcatgtggcagagaaactgaagaaagtagtcttggtggggcttatgtgtgctcagacagatccagacaagagaccaacaatgtctgaagtggtggagatgctggtgaatgaatcaaaggagaaaatatctgaacttgaagctaatcccctcttcaagaatccatatagcagcaacgaaaacaatagagagcatgttgcagaggaaagctcagatgtgatcttagaagataaagatcatcaacaacaacaagaatagcaatggttaggcacagtaattcgtttggcagattatttttagaggtcttgcttattttttttagtgtgtttcttggttcataaaattgatttgatcattactgatactggagtttgtaaggtgtggtattggcacatataagattgaaacttttattctgg

SEQ ID NO: 104194 - protein, 361 aa, Arabidopsis thaliana
  peptide (1)..(361): Ceres Seq. ID no. 13614483
MQLLNSCCGKGFDGKKKEKEEPSWRVFSLKELHAATNSFNYDNKLGEGRFGSVYWGQLWDGSQIAVKRLKEWSNREEIDFAVEVEILARIRHKNLLSVRGYCAEGQERLLVYEYMQNLSLVSHLHGQHSAECLLDWTKRMKIAISSAQAIAYLHDHATPHIVHGDVRASNVLLDSEFEARVTDFGYGKLMPDDDTGDGATKAKSNNGYISPECDASGKESETSDVYSFGILLMVLVSGKRPLERLNPTTTRCITEWVLPLVYERNFGEIVDKRLSEEHVAEKLKKVVLVGLMCAQTDPDKRPTMSEVVEMLVNESKEKISELEANPLFKNPYSSNENNREHVAEESSDVILEDKDHQQQQE

SEQ ID NO: 104195 - protein, 247 aa, Arabidopsis thaliana
  peptide (1)..(247): Ceres Seq. ID no. 13614484
MQNLSLVSHLHGQHSAECLLDWTKRMKIAISSAQAIAYLHDHATPHIVHGDVRASNVLLDSEFEARVTDFGYGKLMPDDDTGDGATKAKSNNGYISPECDASGKESETSDVYSFGILLMVLVSGKRPLERLNPTTTRCITEWVLPLVYERNFGEIVDKRLSEEHVAEKLKKVVLVGLMCAQTDPDKRPTMSEVVEMLVNESKEKISELEANPLFKNPYSSNENNREHVAEESSDVILEDKDHQQQQE

SEQ ID NO: 104196 - protein, 222 aa, Arabidopsis thaliana
  peptide (1)..(222): Ceres Seq. ID no. 13614485
MKIAISSAQAIAYLHDHATPHIVHGDVRASNVLLDSEFEARVTDFGYGKLMPDDDTGDGATKAKSNNGYISPECDASGKESETSDVYSFGILLMVLVSGKRPLERLNPTTTRCITEWVLPLVYERNFGEIVDKRLSEEHVAEKLKKVVLVGLMCAQTDPDKRPTMSEVVEMLVNESKEKISELEANPLFKNPYSSNENNREHVAEESSDVILEDKDHQQQQE

SEQ ID NO: 104197 - DNA, 892 bp, Arabidopsis thaliana
  misc_feature (1)..(892): Ceres Seq. ID no. 13614496
  misc_feature (1)..(892): Ortholog of  Ceres SEQ ID NO 13660094 as cited in SEQ ID NO 60820
aatcgtttagtatttttgtaaatcgcctctccaccttgcccctggagaaccatcaccaaaaaacagagccaaacaaaaaaaaaaatctaaaagcatcaatggcttctcggcggcgagtgcttctgaaggttataattctcggagacagtggggttgggaagacgtccttgatgaatcagtttgtgaatcgaaaattcagtaatcagtataaagctaccattggagctgatttcttgaccaaagaggtccaaattgatgacagaatcttcactttgcagatttgggatactgcagggcaagagaggttccaaagtttgggtgttgctttctaccgaggagcggactgttgtgttcttgtgaatgatgtcaatgttatgaaatcctttgaaaatcttaacaactggagggaagagttcctgatccaggctagtccttcagatcctgaaaacttccccttcgttgtcttggggaacaagacagatgttgacggtggaaagagtcgagtggttactgagaagaaagcaaaatcttggtgtgcatccaagggaaacattccttacttcgagacttcggccaaagatggagtcaatgttgatgcagctttcgaatgcattgccaaaaatgctctcaagaatgaacctgaagaagaagtgtaccttccggacaccattgatgtagctggggctcggcaacaaagatcaactgggtgcgaatgctaaccaactttgttgcatggtttattagaaagaacatgtgttttaaggagagacctttttagtttctttggcattattgtgatgtgtatcaattagcatacgcacctttgttttggattacagaatcaaaaacgaattttggtcacctgttcattcttaatctcttcagcttgtcg

SEQ ID NO: 104198 - protein, 238 aa, Arabidopsis thaliana
  peptide (1)..(238): Ceres Seq. ID no. 13614497
SFSIFVNRLSTLPLENHHQKTEPNKKKNLKASMASRRRVLLKVIILGDSGVGKTSLMNQFVNRKFSNQYKATIGADFLTKEVQIDDRIFTLQIWDTAGQERFQSLGVAFYRGADCCVLVNDVNVMKSFENLNNWREEFLIQASPSDPENFPFVVLGNKTDVDGGKSRVVTEKKAKSWCASKGNIPYFETSAKDGVNVDAAFECIAKNALKNEPEEEVYLPDTIDVAGARQQRSTGCEC

SEQ ID NO: 104199 - protein, 206 aa, Arabidopsis thaliana; identical to SEQ ID NO: 40608
  peptide (1)..(206): Ceres Seq. ID no. 13614498

SEQ ID NO: 104200 - protein, 182 aa, Arabidopsis thaliana; identical to SEQ ID NO: 40609
  peptide (1)..(182): Ceres Seq. ID no. 13614499

SEQ ID NO: 104201 - DNA, 1927 bp, Arabidopsis thaliana
  misc_feature (1)..(1927): Ceres Seq. ID no. 13614504
  misc_feature (1)..(1927): Ortholog of  Ceres SEQ ID NO 12613725 as cited in SEQ ID NO 68196
  misc_feature (1)..(1927): Ortholog of  Ceres SEQ ID NO 14301486 as cited in SEQ ID NO 69222
gtcgcagaaaacagagattcctcgctgtctgaactgaaaaataagatcgcattaactcaaaactctcacaaagacaaagatcttctcctccttctcttctctttttcacttttctctcttcccctctctcgaagcttgaaaggtaacaacaatggagaaccctccggatcaaacagagtcaaaggagactcttcaacaacccattacaagaagaagaacaaagggtggtcttctcactatgcccttcatcattgcaaacgaggggttcgagaaagtggcgagctatggattattacagaacatgattctttatctgatgagtgattacagattgggacttgttaaaggacaaactgtcttgttcatgtgggttgctgctactaatttcatgcctctcgttggagcttttctctcagattcatatttgggtcgctttctcaccattgtcattgcttctctctccagtctcctggggatggtggttctatggctaacggcgatgttgccgcaagtaaaaccatcaccgtgtgtagcaacagccggaaccaactgcagttccgcgacatcttctcaattggctctcttgtataccgcattcgcattaatatcgattggatcaggaggaatcaggccatgttctttagcctttggtgctgatcaattggacaacaaagagaatcctaagaacgagagagttcttgagagtttctttggttggtactacgcttcttcatcagttgctgtcttgatcgctttcaccgtcattgtttacattcaagatcatctaggatggaaaatcgggtttggaatacccgcgattctcatgctgctcgcgggtttcttgtttgttttcgcgtctcctctctacgttaagcgcgatgtgagcaagagtctgttcactggtttagctcaagtggttgctgcagcttacgtgaagagaaacttaactttgccggatcatcatgactccagagattgttattaccgtttgaaagattctgaactcaaagctccaagtgacaaattgaggtttttaaacaaagcttgtgccataagtaaccgcgatgaagaccttggttctgatggtttggccttaaaccagtggaggctatgcacaacggaccaagttgagaaactcaaggcgttggtcaaggtgataccggtatggtccacggggataatgatgtcgataaacgttagccagaactcttttcagttgcttcaagctaaatcaatggacagacgtttaagcagcaattcgaccttccaaatcccagctggatcgtttggtatgttcacaatcatagccttaatctcatgggttgttctgtacgaccgcgcaattctccctttagcttcaaagatccgaggcagaccagttagagtcaatgtcaagattcgaatgggattagggctattcatatcattcttagcaatggcggtttccgcaactgttgaacattacagaaggaaaaccgcgataagccaaggactcgcaaacgatgccaactcaacagtgagcatctcagcaatgtggcttgtaccacagtatgtactacacggtttagcagaggccttgaccgggataggacagaccgagtttttctataccgagtttcctaaaagcatgtcgagtatcgcagcttcgttgttcggtctaggaatggcagtggctaatatcttggctagtgtgatcctaaatgcggtaaagaatagctcaaagcagggcaatgtgagctggattgaagataacatcaacaagggtcactatgactattactattgggttttagcgatcttgagcttcgttaatgtcatctactacgttgtgtgtagctggtcctatggtcctacggtggatcaggtgaggaatgataaggttaatggtatgagaaaagaagaagaggaagttattaaattaaactaa

SEQ ID NO: 104202 - protein, 591 aa, Arabidopsis thaliana; identical to SEQ ID NO: 23568
  peptide (1)..(591): Ceres Seq. ID no. 13614505

SEQ ID NO: 104203 - protein, 562 aa, Arabidopsis thaliana; identical to SEQ ID NO: 23569
  peptide (1)..(562): Ceres Seq. ID no. 13614506

SEQ ID NO: 104204 - protein, 541 aa, Arabidopsis thaliana; identical to SEQ ID NO: 23570
  peptide (1)..(541): Ceres Seq. ID no. 13614507

SEQ ID NO: 104205 - DNA, 1536 bp, Arabidopsis thaliana
  misc_feature (1)..(1536): Ceres Seq. ID no. 13614515
  misc_feature (1)..(1536): Ortholog of  Ceres SEQ ID NO 14314636 as cited in SEQ ID NO 56924
  misc_feature (1)..(1536): Ortholog of  Ceres SEQ ID NO 13594345 as cited in SEQ ID NO 58043
  misc_feature (1)..(1536): Ortholog of  Ceres SEQ ID NO 15168421 as cited in SEQ ID NO 60131
  misc_feature (1)..(1536): Ortholog of  Ceres SEQ ID NO 13597574 as cited in SEQ ID NO 64677
  misc_feature (1)..(1536): Ortholog of  Ceres SEQ ID NO 13597843 as cited in SEQ ID NO 64850
  misc_feature (1)..(1536): Ortholog of  Ceres SEQ ID NO 13597678 as cited in SEQ ID NO 65375
  misc_feature (1)..(1536): Ortholog of  Ceres SEQ ID NO 15176787 as cited in SEQ ID NO 66468
  misc_feature (1)..(1536): Ortholog of  Ceres SEQ ID NO 13596180 as cited in SEQ ID NO 67941
  misc_feature (1)..(1536): Ortholog of  Ceres SEQ ID NO 13591190 as cited in SEQ ID NO 68044
  misc_feature (1)..(1536): Ortholog of  Ceres SEQ ID NO 13595961 as cited in SEQ ID NO 68223
caaaccttaggaagagccatgggtgaagaagctatagttctgtatcctgcaccaccaataggtcacttagtgtccatggttgagttaggtaaaaccatcctctccaaaaacccatctctctccatccacattatcttagttccaccgccttatcagccggaatcaaccgccacttacatctcctccgtctcctcctccttcccttcaataaccttccaccatcttcccgccgtcacaccgtactcctcctcctccacctctcgccaccaccacgaatctctcctcctagagatcctctgttttagcaacccaagtgtccaccgaactcttttctcactctctcggaatttcaatgtccgagcaatgatcatcgatttcttctgcaccgccgttttagacatcaccgctgacttcacgttcccggtttacttcttctacacctctggagccgcatgtctcgccttttccttctatctcccgaccatcgacgaaacaacccccggaaaaaacctcaaagacattcctacagttcatatccccggcgttcctccgatgaagggctccgatatgcctaaggcggtgctcgaacgagacgatgaggtctacgatgtttttataatgttcggtaaacagctctcgaagtcgtcagggattattatcaatacgtttgatgctttagaaaacagagccatcaaggccataacagaggagctctgttttcgcaatatttatccaattggaccgctcattgtaaacggaagaatcgaagatagaaacgacaacaaggcagtttcttgtctcaattggctggattcgcagccggaaaagagtgttgtgtttctctgttttggaagcttaggtttgttctcaaaagaacaggtgatagagattgctgttggtttagagaaaagtgggcagagattcttgtgggtggtccgtaatccacccgagttagaaaagacagaactggatttgaaatcactcttaccagaaggattcttaagccgaaccgaagacaaagggatggtcgtgaaatcatgggctccgcaagttccggttctgaatcataaagcagtcgggggattcgtcactcattgcggttggaattcaattcttgaagctgtttgtgctggtgtgccgatggtggcttggccgttgtacgctgagcagaggtttaatagagtgatgattgtggatgagatcaagattgcgatttcgatgaatgaatcagagacgggtttcgtgagctctacagaggtggagaaacgagtccaagagataattggggagtgtccggttagggagcgaaccatggctatgaagaacgcagccgaattagccttgacagaaactggttcgtctcataccgcattaactactttactccagtcgtggagcccaaagtgatctttgaaattaagtcttgcatcaattaataactttgtagtctctcagaatcatgtctttgggggttattcgttttactagttcaaagttatgtctctgagaccgcagatggaaagaacaatttatatc

SEQ ID NO: 104206 - protein, 468 aa, Arabidopsis thaliana
  peptide (1)..(468): Ceres Seq. ID no. 13614516
QTLGRAMGEEAIVLYPAPPIGHLVSMVELGKTILSKNPSLSIHIILVPPPYQPESTATYISSVSSSFPSITFHHLPAVTPYSSSSTSRHHHESLLLEILCFSNPSVHRTLFSLSRNFNVRAMIIDFFCTAVLDITADFTFPVYFFYTSGAACLAFSFYLPTIDETTPGKNLKDIPTVHIPGVPPMKGSDMPKAVLERDDEVYDVFIMFGKQLSKSSGIIINTFDALENRAIKAITEELCFRNIYPIGPLIVNGRIEDRNDNKAVSCLNWLDSQPEKSVVFLCFGSLGLFSKEQVIEIAVGLEKSGQRFLWVVRNPPELEKTELDLKSLLPEGFLSRTEDKGMVVKSWAPQVPVLNHKAVGGFVTHCGWNSILEAVCAGVPMVAWPLYAEQRFNRVMIVDEIKIAISMNESETGFVSSTEVEKRVQEIIGECPVRERTMAMKNAAELALTETGSSHTALTTLLQSWSPK

SEQ ID NO: 104207 - protein, 462 aa, Arabidopsis thaliana; identical to SEQ ID NO: 37909
  peptide (1)..(462): Ceres Seq. ID no. 13614517

SEQ ID NO: 104208 - protein, 443 aa, Arabidopsis thaliana; identical to SEQ ID NO: 37910
  peptide (1)..(443): Ceres Seq. ID no. 13614518

SEQ ID NO: 104209 - DNA, 1390 bp, Arabidopsis thaliana
  misc_feature (1)..(1390): Ceres Seq. ID no. 13614527
  misc_feature (1)..(1390): Ortholog of  Ceres SEQ ID NO 13639246 as cited in SEQ ID NO 56576
aataataattagacttctgcactttctcacgaacctctctgtctcgtccattacttaaaaaccaaatctttcatcatcttccttcaccagttgactctctttcaatctatctctgaatctctcactctcctacccgaaaaccatgaactccaacgaccaggatccgattccgttcagacccgaagacaacaacttctccggttccaaaacctacgccatgagcggcaaaatcatgctaagtgcaatagtaatcctcttcttcgtcgtcattttaatggtcttcctccatctttacgctcgttggtatctcctccgtgctcgtagacgtcatctccgtcgtcgtagccgtaaccgtcgcgctacgatggttttcttcaccgctgatccttccaccgccgcaacttccgtcgtcgcttcacgtggacttgatccaaacgttattaaatctcttcctgttttcactttctccgacgagactcataaagatccgatcgaatgcgccgtttgtttatcggaattcgaagagagcgagacgggtcgggttttgcccaattgtcaacatacttttcatgttgattgtattgatatgtggtttcattctcattccacttgtcctctttgtcgatctctcgttgagtctctcgccgggattgaatcaacggcggcggcgagggagagggaagttgtgattgcggttgattctgatccggttttggtaattgaaccgagttctagctctggattgacggatgaaccacatggatctggatcttctcagatgctgagggaagattccgggagaaaaccggcggcgattgaggttccgaggaggacttttagcgagtttgaagatgagttgactcggagagactcgccggcgagtcagtcgtttaggtctccgatgagtcggatgttatctttcactcggatgttgagtagagatagaagaagcgcttcgtctcctatcgccggagctccgccgctatcgccgacgttaagctgccggatacagatgaccgagtcagatatcgaacggggaggagaagagagtaggtgacttgtcacgtgttggtgtctgattggtttaatgttaaccgggagtaaaaaaaggaattactacaagtcaacaggcttttgtctaggtgttgatttcggcgcccaaggacacgtggcgtaaactgagcttccaggaatcaatattcaccgtctattatgattagataggttagatagatttgtgtaacgatgtacaaagtcatctacaatattgaatctatttccatttattttaccatattctttttttttttataattttcgaagttctacaaactcttttatgtaaaacacaatccaatggtcataattgtgataaagactttgcataatt

SEQ ID NO: 104210 - protein, 304 aa, Arabidopsis thaliana; identical to SEQ ID NO: 26941
  peptide (1)..(304): Ceres Seq. ID no. 13614528

SEQ ID NO: 104211 - protein, 279 aa, Arabidopsis thaliana; identical to SEQ ID NO: 26942
  peptide (1)..(279): Ceres Seq. ID no. 13614529

SEQ ID NO: 104212 - protein, 274 aa, Arabidopsis thaliana; identical to SEQ ID NO: 26943
  peptide (1)..(274): Ceres Seq. ID no. 13614530

SEQ ID NO: 104213 - DNA, 828 bp, Arabidopsis thaliana
  misc_feature (1)..(828): Ceres Seq. ID no. 13614535
  misc_feature (1)..(828): Ortholog of  Ceres SEQ ID NO 15177927 as cited in SEQ ID NO 1170
  misc_feature (1)..(828): Ortholog of  Ceres SEQ ID NO 13596295 as cited in SEQ ID NO 68019
aacaaaaaagccctaaacggagagaggcggagaggagaaggaagacggcgtgaagcaatggtgtcgctgaagatccagaagcggctcgccgcatccgtaatgaaatgcgggaaaggaaaagtttggctcgaccccaatgaatcgggcgatatctctatggccaattccaggcagaacattaggaagcttgtgaaggatggtttcattatcaggaagcctactaagatccactcacgttctcgggctagggctttgaacgaggccaagcgaaagggtcgtcactctggatacggtaagagaaagggtacaagagaggcaaggctaccaaccaagattctttggatgaggagaatgagggtgttgaggcgtttcttgagcaagtaccgtgagtcaaagaagattgataggcacatgtaccatgacatgtacatgaaagtgaagggtaatgttttcaagaacaagcgtgtgcttatggagagcatccacaagatgaaggctgagaaggctagagagaagactctcgctgaccagtttgaggccaagcgtattaagaacaaggctagcagggagagaaagtttgccagaagagaggagagattagctcagggacctggaggtggagagacaacgactcctgctggcgcacctcaacaaccagaggtaaccaagaagaagtcgaagaagtgatttggtgttgaacttttttgcaattgaatctttgagtttacctgtagaagaagcgtcttttttttatcttttatatgattttgtcggagattcttttcttcaaaaatatttcttatgttatggatctcattgcttattatg

SEQ ID NO: 104214 - protein, 228 aa, Arabidopsis thaliana; identical to SEQ ID NO: 20979
  peptide (1)..(228): Ceres Seq. ID no. 13614536

SEQ ID NO: 104215 - protein, 209 aa, Arabidopsis thaliana; identical to SEQ ID NO: 20980
  peptide (1)..(209): Ceres Seq. ID no. 13614537

SEQ ID NO: 104216 - protein, 195 aa, Arabidopsis thaliana; identical to SEQ ID NO: 20981
  peptide (1)..(195): Ceres Seq. ID no. 13614538

SEQ ID NO: 104217 - DNA, 1222 bp, Arabidopsis thaliana
  misc_feature (1)..(1222): Ceres Seq. ID no. 13614547
  misc_feature (1)..(1222): Ortholog of  Ceres SEQ ID NO 14307280 as cited in SEQ ID NO 59443
  misc_feature (1)..(1222): Ortholog of  Ceres SEQ ID NO 14316536 as cited in SEQ ID NO 60272
  misc_feature (1)..(1222): Ortholog of  Ceres SEQ ID NO 13598570 as cited in SEQ ID NO 65434
  misc_feature (1)..(1222): Ortholog of  Ceres SEQ ID NO 13660333 as cited in SEQ ID NO 67464
  misc_feature (1)..(1222): Ortholog of  Ceres SEQ ID NO 13596238 as cited in SEQ ID NO 68834
acaatggtcacattgatagacgaagaaaaagacaaaaaaaaatcaaccatggtttcgaaaccgctattctccctattgcttctcacggttgcattggttgtgtttcaaaccggaacccttgtcaacgctgaagattccgagccttcgagttcaacgagaaagcctctggtgaagattgtgaaaggtaaaaaattatgcgacaaaggatgggaatgcaaaggatggtccgagtattgttgcaaccatacaatctccgatttttttgagacatatcaattcgagaatctattctctaagcgtaacagtccagtggctcacgccgtcggcttttgggattaccgatcattcattactgcggctgccgagtaccagcctcttggtttcggtactgctggtgagaaacttcaagggatgaaggaagtcgctgcgtttcttggccacgttgggagcaaaacctcatgcgggtacggggttgcaacaggcggaccattagcttggggattgtgttacaacaaggagatgagtcctgatcagctttattgcgatgattactacaaattgacatatccttgtactcctggtgtctcgtaccacggtcgaggagctttaccggtttactggaattacaattatggtcaaaccggggaggctttgaaagtggatctactgagtcatccagagtatctcgagaacaatgctacgttagcgtttcaagcggcgatttggcggtggatgacgccaccgaagaagcatttaccgtcggcgcacgatgttttcgtcggaaaatggaagccaacaaagaatgacactgctgcaaaacgaactccggggtttggagccaccataaacgttctttacggcgatcaaatctgcaacagcggattcgataacgatgagatgaacaacattgtttctcattatttgtattatcttgatctgataggtgttggacgagaagaagctggtcctcacgagaagctgtcatgcgcagatcaagaacctttttcttcttcctcctctgctcctccgagttctggttcctcttcttgagtgaaagttttataacctctggttcggtgacttttgaaaaagaaagttgactttggtgtatatgtgttttgcatgggcttggttttaatattttgtaaaaatatacgtacgaacgattgcaatattttccacaccattttcttttcaaaaaatataaatatatattgcatgc

SEQ ID NO: 104218 - protein, 349 aa, Arabidopsis thaliana; identical to SEQ ID NO: 42183
  peptide (1)..(349): Ceres Seq. ID no. 13614548

SEQ ID NO: 104219 - protein, 348 aa, Arabidopsis thaliana; identical to SEQ ID NO: 42184
  peptide (1)..(348): Ceres Seq. ID no. 13614549

SEQ ID NO: 104220 - protein, 333 aa, Arabidopsis thaliana; identical to SEQ ID NO: 42185
  peptide (1)..(333): Ceres Seq. ID no. 13614550

SEQ ID NO: 104221 - DNA, 1591 bp, Arabidopsis thaliana
  misc_feature (1)..(1591): Ceres Seq. ID no. 13614572
  misc_feature (1)..(1591): Ortholog of  Ceres SEQ ID NO 13595142 as cited in SEQ ID NO 56671
  misc_feature (1)..(1591): Ortholog of  Ceres SEQ ID NO 15168569 as cited in SEQ ID NO 58123
  misc_feature (1)..(1591): Ortholog of  Ceres SEQ ID NO 13598460 as cited in SEQ ID NO 63382
ataacctatcaattagataccatttagattagcagcgaatttcaaacggagatgtcagaatcagtgattcagggatcgaatccggatcgggttttatctccgacgagctcgaaatcagtgacgcagacggtgaacgggtcgcatcaattcgtgattcaaggatacagcttagcgaaagggatgggtatagggaagcacatagcgagtgataatttctccgtcggaggttatcagtgggggatcttcttctacccggacggtaagaatccggaggataattcgtcgtacgtctctgtttttatcgcattggccagtgaaggaaccgaagttagggcgcttttcgagctagctcttgttgaccaaagtggaaaggggaaacataaggttcatagccattttgagcggtcactcgatggtggcccttatacactcaaatacagaggaagcatgtggggatacaagcgtttcttcagacgttccattcttgagacatctgactacctgaaagacgattgcttgataatcaattgtacggttggagttgtggtttcagaaatactctgcccacagttacactctgttcacgtccctgattcagaacttggatcacattttggagttctactggatagcatggaaggttctgatataacttttaacattgctggcgagaagtttctagctcataaactagtactggctgctcgatctccatttttcaagtctaagtttttcagtgagtttgaagcaaacaatacagaggttactattaacgatttggaacctaaggtttttaaggctttgctacaattcatgtacaaagattctcttccggaagatgtggagcctgcaacagctcatacatttgagcgcttaaagctgtcagaaatatacgaaacattgattgtaaaagttttagcagcagccgacaagtacgacctgattaggctcaggttgttgtgtgaatcccacatctgcaaaggcgtatcagtcaaatccgtcgcgaagatcttagcgttggctgacagatataatgctaaggaactaaaaggcgtttgccttaagtttactgccgagaacctagcagctgtcctggagacagacgcttaccaacagatgaaggatgaatgtgtgaccctccagtccgagcttctgaaggcggtggctggtcacgaggaaggtagtaacagtactggaggagcaaagtctcagagcgtgtgggcccaactttctgacggcgggggcgataccaccagccgacatgttagacaacgaaccacctagagcctcaaaatatgcatcatttcctcaggttaatagtagccatagagagggtaaatagctgtttttttctgtattcaaaaaaaaatatatgatcccaagtcctaactctatgataggtaaactctttcacttatcacttcagtaacagctttggattattcttcttttcgtgtttatgtattttaaatcccagaacatgtggttgtttcttttactctaaaacattttgatttttacggatccagaagtataccagtgtacatatcaaacagatgcatatttttccatcgagtgagttgattttatg

SEQ ID NO: 104222 - protein, 410 aa, Arabidopsis thaliana
  peptide (1)..(410): Ceres Seq. ID no. 13614573
MSESVIQGSNPDRVLSPTSSKSVTQTVNGSHQFVIQGYSLAKGMGIGKHIASDNFSVGGYQWGIFFYPDGKNPEDNSSYVSVFIALASEGTEVRALFELALVDQSGKGKHKVHSHFERSLDGGPYTLKYRGSMWGYKRFFRRSILETSDYLKDDCLIINCTVGVVVSEILCPQLHSVHVPDSELGSHFGVLLDSMEGSDITFNIAGEKFLAHKLVLAARSPFFKSKFFSEFEANNTEVTINDLEPKVFKALLQFMYKDSLPEDVEPATAHTFERLKLSEIYETLIVKVLAAADKYDLIRLRLLCESHICKGVSVKSVAKILALADRYNAKELKGVCLKFTAENLAAVLETDAYQQMKDECVTLQSELLKAVAGHEEGSNSTGGAKSQSVWAQLSDGGGDTTSRHVRQRTT

SEQ ID NO: 104223 - protein, 367 aa, Arabidopsis thaliana
  peptide (1)..(367): Ceres Seq. ID no. 13614574
MGIGKHIASDNFSVGGYQWGIFFYPDGKNPEDNSSYVSVFIALASEGTEVRALFELALVDQSGKGKHKVHSHFERSLDGGPYTLKYRGSMWGYKRFFRRSILETSDYLKDDCLIINCTVGVVVSEILCPQLHSVHVPDSELGSHFGVLLDSMEGSDITFNIAGEKFLAHKLVLAARSPFFKSKFFSEFEANNTEVTINDLEPKVFKALLQFMYKDSLPEDVEPATAHTFERLKLSEIYETLIVKVLAAADKYDLIRLRLLCESHICKGVSVKSVAKILALADRYNAKELKGVCLKFTAENLAAVLETDAYQQMKDECVTLQSELLKAVAGHEEGSNSTGGAKSQSVWAQLSDGGGDTTSRHVRQRTT

SEQ ID NO: 104224 - protein, 278 aa, Arabidopsis thaliana
  peptide (1)..(278): Ceres Seq. ID no. 13614575
MWGYKRFFRRSILETSDYLKDDCLIINCTVGVVVSEILCPQLHSVHVPDSELGSHFGVLLDSMEGSDITFNIAGEKFLAHKLVLAARSPFFKSKFFSEFEANNTEVTINDLEPKVFKALLQFMYKDSLPEDVEPATAHTFERLKLSEIYETLIVKVLAAADKYDLIRLRLLCESHICKGVSVKSVAKILALADRYNAKELKGVCLKFTAENLAAVLETDAYQQMKDECVTLQSELLKAVAGHEEGSNSTGGAKSQSVWAQLSDGGGDTTSRHVRQRTT

SEQ ID NO: 104225 - DNA, 1154 bp, Arabidopsis thaliana
  misc_feature (1)..(1154): Ceres Seq. ID no. 13614576
  misc_feature (1)..(1154): Ortholog of  Ceres SEQ ID NO 15178809 as cited in SEQ ID NO 401
  misc_feature (1)..(1154): Ortholog of  Ceres SEQ ID NO 15177055 as cited in SEQ ID NO 57450
  misc_feature (1)..(1154): Ortholog of  Ceres SEQ ID NO 12615854 as cited in SEQ ID NO 62880
acctaactcatttccatcatcttcgtcttcgtttgttcccctgagatagagataagagaatttcgagagattcgagagaagagacgatgagtttccaagatctcgaagctggtactcgatctccggcgccgaatcgttttaccggtgggagacaacagagaccttcgtctcgtggggatccatctcaggaggtcgccgccgggattttcaggatcagcacggctgtcaattccttcttccgcctcgttaattcgatcggaacacctaaagatactcttgaattacgagataagctgcaaaagacaaggttacagatatccgaattggtgaagaatacttcagctaaacttaaggaagctagcgaagccgaccttcatggatcagctagtcaaattaagaagatagctgatgctaaactggcaaaagatttccaatcagttctcaaagagtttcagaaagctcagagacttgcagctgaaagagaaataacatatactcctgtggtcacaaaagaaatacctaccagttataatgcacctgaactggatactgaatctttaaggatctcccagcagcaagctcttcttctacaatcaagaaggcaagaagtggtgtttttagataacgagataacattcaatgaagcaattattgaggaaagagagcaagggattcgagaaattgaagaccagattcgtgatgtgaatggcatgttcaaagatctagctcttatggtgaaccatcaaggaaatattgtcgatgacatcagctctaaccttgacaactcacatgctgcaactacacaagccactgttcaactcagaaaagcagctaaaactcaaagatcaaactcctctttgacatgcctacttattctcatttttgggattgttctactcattgtcatcatcgttgtcttggtctaagcatcaaacatataactccaagcttcaatcttcaagcatcaagcgaatctatggaaactatacaaagacccattaaagatatatatctaatgtacagattctttatactccatcttccccattcaaccaaattgatcttaacttctcatcgtgtgaatgtttaatcaatgtattactccatcataaggatcttcatgatcaaaagaaataaacataagaaaataatct

SEQ ID NO: 104226 - protein, 279 aa, Arabidopsis thaliana; identical to SEQ ID NO: 28018
  peptide (1)..(279): Ceres Seq. ID no. 13614577

SEQ ID NO: 104227 - DNA, 729 bp, Arabidopsis thaliana
  misc_feature (1)..(729): Ceres Seq. ID no. 13614582
  misc_feature (1)..(729): Ortholog of  Ceres SEQ ID NO 15179121 as cited in SEQ ID NO 0
atcatcggagccgtttctctctctcgaactcgatttaagtatttgaatcttgccaatggatttgacgtggttaagtgccctaattgttggagctgcacttggatactgcattggcactcgccgttccaaacctgttgttgctgctgttgataaggatatcaaaactcaatcctccaaaagtccactcgagattgagaaactcgctgatattctcgatgatttcaagatggttttggtggtgagaaatgatcttaaaatgggtaaaggaaagattgcagctcaatgcagtcatgcaactttaggattatacaagaagcttgttcgtcgagcgccaaaagcattggactgctgggaggaatgtgcacagccaaaagttgttgtgaaaatcgaggacgaggacgagatgctagaattgcaagaaagagctaaatcccttaaactgcctacccatatcaccattgatgctggaagaacacagattgccccaaattcaaggacggttatggctattcttggaccagtcgaagttgttgatgaagtaacaggtggactaaagcttctttagcagattcgaatttcgatatgacatttcttcaacctgatctctcagatggaccaagcagaaaggagagacatgaactccaccttctctgttcgcccgaggttacctgtgagaaatctgtagttgttacgtatactcgttcctgatgatgacgaaatattcatttt

SEQ ID NO: 104228 - protein, 169 aa, Arabidopsis thaliana
  peptide (1)..(169): Ceres Seq. ID no. 13614583
MDLTWLSALIVGAALGYCIGTRRSKPVVAAVDKDIKTQSSKSPLEIEKLADILDDFKMVLVVRNDLKMGKGKIAAQCSHATLGLYKKLVRRAPKALDCWEECAQPKVVVKIEDEDEMLELQERAKSLKLPTHITIDAGRTQIAPNSRTVMAILGPVEVVDEVTGGLKLL

SEQ ID NO: 104229 - protein, 112 aa, Arabidopsis thaliana; identical to SEQ ID NO: 25693
  peptide (1)..(112): Ceres Seq. ID no. 13614584

SEQ ID NO: 104230 - protein, 102 aa, Arabidopsis thaliana; identical to SEQ ID NO: 25694
  peptide (1)..(102): Ceres Seq. ID no. 13614585

SEQ ID NO: 104231 - DNA, 1323 bp, Arabidopsis thaliana
  misc_feature (1)..(1323): Ceres Seq. ID no. 13614590
  misc_feature (1)..(1323): Ortholog of  Ceres SEQ ID NO 13596891 as cited in SEQ ID NO 62868
  misc_feature (1)..(1323): Ortholog of  Ceres SEQ ID NO 12617235 as cited in SEQ ID NO 63990
  misc_feature (1)..(1323): Ortholog of  Ceres SEQ ID NO 13655371 as cited in SEQ ID NO 68945
aaccaaaaacaaacattttctaaaaaatggcgacaacgatcaacaagcaagtcgtgttacttgattacgtaaccggtttcgccaaggaatccgaccttgtaatcacctccaccaccatcgatcttagggtgctaaagggatctatgacggcgttggtgaagaatctctacttgtcttgtgatccttacatgcgaaatcgtatgaggaaacctgatcctctgagccctgctactgctcagtccttcactcccggcaagcctatctcagggtttggagtgtctaaagtgatagattctggacactcagattacgaagaaggtgacttaatttggggagcagtaggatgggaagagtacagtgttattacaccaattcctaatcttcacttcaagatccatcataccaattttcctttatcttactacacaggacttcttggtatgcctggtatgaccgcgtatgttgggttttacgagatatgtactccaaagaaaggagatactgtgtttgtgtcggctgcatctggcgcggttggtcagcttgtaggacaatttgctaagttgatgggttgttatgttgttggaagcgctgggagtaaagaaaaggttgatctcctcaagaacaagtttggattcgatgatgccttcaactacaaggaagaacacaatcttattggtgccctaaaaaggtgtttccctgaaggcattgacatatactttgagaacgtaggaggcaagatgctggatgcagtgatcttaaacatgagaccacacggccgtatcgcggcatgtgggatgatctcacagtacaatctgaagaatccggaaggtatatacggcctctcgctcattacatacaaacgaatccgtattgaagggttcaactgtttcgattacttccacaaatactcggagttcttggagtttgtggttccgtatataaaagaagggaagataaagtatgtggaagatgttgctgatggactcgagagtgctcctgctgctctcgttggactctttcacggtaaaaacgtcgggaaacaacttgtcgtggtttcgccatcataagtgataaaatgagatcagtacgtacttgttcggtaagtgatgtttcggaagttggatatgtctccgtacaagatatgaaattgttgaaaagtatatgtatttggtgaagtttgcagaggacgttagtgttgagtcctttaatttggttcataatgttttagtttcttcagcaacaatacaagagatcagggttcggttttgtcaataatgtaataatttgtctaaattatgaaataaataaatttattattagcct

SEQ ID NO: 104232 - protein, 346 aa, Arabidopsis thaliana
  peptide (1)..(346): Ceres Seq. ID no. 13614591
MATTINKQVVLLDYVTGFAKESDLVITSTTIDLRVLKGSMTALVKNLYLSCDPYMRNRMRKPDPLSPATAQSFTPGKPISGFGVSKVIDSGHSDYEEGDLIWGAVGWEEYSVITPIPNLHFKIHHTNFPLSYYTGLLGMPGMTAYVGFYEICTPKKGDTVFVSAASGAVGQLVGQFAKLMGCYVVGSAGSKEKVDLLKNKFGFDDAFNYKEEHNLIGALKRCFPEGIDIYFENVGGKMLDAVILNMRPHGRIAACGMISQYNLKNPEGIYGLSLITYKRIRIEGFNCFDYFHKYSEFLEFVVPYIKEGKIKYVEDVADGLESAPAALVGLFHGKNVGKQLVVVSPS

SEQ ID NO: 104233 - protein, 307 aa, Arabidopsis thaliana
  peptide (1)..(307): Ceres Seq. ID no. 13614592
MTALVKNLYLSCDPYMRNRMRKPDPLSPATAQSFTPGKPISGFGVSKVIDSGHSDYEEGDLIWGAVGWEEYSVITPIPNLHFKIHHTNFPLSYYTGLLGMPGMTAYVGFYEICTPKKGDTVFVSAASGAVGQLVGQFAKLMGCYVVGSAGSKEKVDLLKNKFGFDDAFNYKEEHNLIGALKRCFPEGIDIYFENVGGKMLDAVILNMRPHGRIAACGMISQYNLKNPEGIYGLSLITYKRIRIEGFNCFDYFHKYSEFLEFVVPYIKEGKIKYVEDVADGLESAPAALVGLFHGKNVGKQLVVVSPS

SEQ ID NO: 104234 - protein, 292 aa, Arabidopsis thaliana
  peptide (1)..(292): Ceres Seq. ID no. 13614593
MRNRMRKPDPLSPATAQSFTPGKPISGFGVSKVIDSGHSDYEEGDLIWGAVGWEEYSVITPIPNLHFKIHHTNFPLSYYTGLLGMPGMTAYVGFYEICTPKKGDTVFVSAASGAVGQLVGQFAKLMGCYVVGSAGSKEKVDLLKNKFGFDDAFNYKEEHNLIGALKRCFPEGIDIYFENVGGKMLDAVILNMRPHGRIAACGMISQYNLKNPEGIYGLSLITYKRIRIEGFNCFDYFHKYSEFLEFVVPYIKEGKIKYVEDVADGLESAPAALVGLFHGKNVGKQLVVVSPS

SEQ ID NO: 104235 - DNA, 1334 bp, Arabidopsis thaliana
  misc_feature (1)..(1334): Ceres Seq. ID no. 13614594
  misc_feature (1)..(1334): Ortholog of  Ceres SEQ ID NO 13596891 as cited in SEQ ID NO 62868
  misc_feature (1)..(1334): Ortholog of  Ceres SEQ ID NO 12617235 as cited in SEQ ID NO 63990
  misc_feature (1)..(1334): Ortholog of  Ceres SEQ ID NO 13655371 as cited in SEQ ID NO 68945
attgtgatgaatcatcatgagcagtgacttcatacttgatattacgagtgagaggccactataaaaagcaggcgcgtcctcgaagaagaagaagaagaagtaacaaattggtggaaatcagaagttgaatcggagaataacaacgatgacgacgaacaagcaggtcatattcaaagaccacgtgagtggtttccctaaggaatccgatttcaatttcaccaccaccaccgtcgaacttagggttccggaaggttctaaatcggttcttgtgaagaatctctacctgtcatgcgatccttatatgcggtctcgcatggggaaacctgatccctcctctgctcttgctcaagcttacgctcccggcaagccaatctatgggtatggagtgtctagagtgatagaatctgggcatccagattacaagaaaggtgatttactctggggaatagttggatgggaggagtatagtgttattacaccaatggctcacatgcatttcaagatccaacatacagatgttccattatcctactatactggacttctcggtatgcctggtatgactgcctatgctgggttttatgaagtttgttctccaaagaaaggagagacagtttatgtgtcagctgcatctggtgcggttggtcagcttgtgggacaatttgctaagatgatgggctgttatgttgttggaagcgctggaagtaaagaaaaggttgatctcctgaagaccaagtttgggtttgatgatgcatttaactacaaggaagaatctgaccttagtgctgccctcaaaaggtgttttcccaagggcatcgacatgtactttgagaacgtaggaggcaaaatgctagatgcagtgctcttaaacatgaacccacacgggcgtatcgctgtctgtggaatgatctcacagtacaatcttgaaaatcaagaaggtgtacacaacctatccaatatcatctacaaacgaatacgcattcaaggctttgtagtggctgatttctacgacaaatacccaaagttcttggagttggtgcttccgcgcattaaagaagggaagataacgtatgtggaagatgtagctgatgggctcgagaaagctcctgaagctcttgtggggcttttccatggtaagaacgttgggaaacaagttgttgttattgctcgtgagtgaagaatacttatttgggagtaatgtcttattgcgcgtgagtgaagaatacttatttgggagaaatgttatatttatccaacaagagttggtatgtctgttgaacccaaccgtgagtttttggtttatgaataatactagtaactataatatatagtaa

SEQ ID NO: 104236 - protein, 343 aa, Arabidopsis thaliana; identical to SEQ ID NO: 43475
  peptide (1)..(343): Ceres Seq. ID no. 13614595

SEQ ID NO: 104237 - protein, 291 aa, Arabidopsis thaliana; identical to SEQ ID NO: 43476
  peptide (1)..(291): Ceres Seq. ID no. 13614596

SEQ ID NO: 104238 - protein, 287 aa, Arabidopsis thaliana; identical to SEQ ID NO: 43477
  peptide (1)..(287): Ceres Seq. ID no. 13614597

SEQ ID NO: 104239 - DNA, 1210 bp, Arabidopsis thaliana
  misc_feature (1)..(1210): Ceres Seq. ID no. 13614616
  misc_feature (1)..(1210): Ortholog of  Ceres SEQ ID NO 13659643 as cited in SEQ ID NO 67106
ataacgaagcggttggaagaagatgaaactgttcgacgcgcactgtcaccttcaagacccgaggattatcaccaaagctcctcagataatctcctccgccgttgcttccggcgtctctgctttcgccgtcaatggagtctccgagaaagattggagtttggtcaaagagatgggagctaaatacccttctgttgttccttgctttgggatccatccatggtatgtagcagagaggagtcctcaatggtttgagacattaaagagtttctttgagaccactcctactgctgctgttggagaaattggtttggacaaagggtctaagggaagggagattgatttctcagaacaggttaccgtctttcgtcaacagcttgaacttgcaaaggaattgaagaaacctgcgtcagttcattgtgttcgtgcatttggggatctactcgagatattaaaatctgtagggccttttccttctggggtcatgcttcactcgtatttgggttctgctgagatggttcctgaatttgctaagctcggtgcatatttctccttctccggtttccttatgtccatgagtgagaaaaaagccaagaagatgttgaaagcagttccatctgataggatcttattggagacggattcaccagatgcactaccaaaggcagagtcaggttgtctctactttgtagacggagatccttctctacccgaagaaggaaattcagctcaggatcttgattctgcttcatatgataagcctaatgtgtctagtgactcgatgaagttaacaaaggaaacacttaatcacccggctaatattcatatcgtactcggatatgtagcgcagttgttggatatgaagaatgaagaactcgcggaactaagttatcaaaatgctgttcggttattctcttacgaaggttcaaagatacttcttgacagaggtactggtgatgtctctggtcacactcaaaaccagtcaacaacacatgtatcatgagttcttacttcttaagaaatcgtagtgtttctcatcactctattacgagtctttgaatttggactctctcttttttttttctttttttttttgaatgtttgaatttggaattattgtactagtgttatagacaatcacacttttctatgtacaaactacaaaggttctgattttgtgtgaaaattaattcagttaatgatgtgattagag

SEQ ID NO: 104240 - protein, 325 aa, Arabidopsis thaliana
  peptide (1)..(325): Ceres Seq. ID no. 13614617
MKLFDAHCHLQDPRIITKAPQIISSAVASGVSAFAVNGVSEKDWSLVKEMGAKYPSVVPCFGIHPWYVAERSPQWFETLKSFFETTPTAAVGEIGLDKGSKGREIDFSEQVTVFRQQLELAKELKKPASVHCVRAFGDLLEILKSVGPFPSGVMLHSYLGSAEMVPEFAKLGAYFSFSGFLMSMSEKKAKKMLKAVPSDRILLETDSPDALPKAESGCLYFVDGDPSLPEEGNSAQDLDSASYDKPNVSSDSMKLTKETLNHPANIHIVLGYVAQLLDMKNEELAELSYQNAVRLFSYEGSKILLDRGTGDVSGHTQNQSTTHVS

SEQ ID NO: 104241 - protein, 276 aa, Arabidopsis thaliana
  peptide (1)..(276): Ceres Seq. ID no. 13614618
MGAKYPSVVPCFGIHPWYVAERSPQWFETLKSFFETTPTAAVGEIGLDKGSKGREIDFSEQVTVFRQQLELAKELKKPASVHCVRAFGDLLEILKSVGPFPSGVMLHSYLGSAEMVPEFAKLGAYFSFSGFLMSMSEKKAKKMLKAVPSDRILLETDSPDALPKAESGCLYFVDGDPSLPEEGNSAQDLDSASYDKPNVSSDSMKLTKETLNHPANIHIVLGYVAQLLDMKNEELAELSYQNAVRLFSYEGSKILLDRGTGDVSGHTQNQSTTHVS

SEQ ID NO: 104242 - protein, 172 aa, Arabidopsis thaliana; identical to SEQ ID NO: 27558
  peptide (1)..(172): Ceres Seq. ID no. 13614619

SEQ ID NO: 104243 - DNA, 1394 bp, Arabidopsis thaliana
  misc_feature (1)..(1394): Ceres Seq. ID no. 13614628
  misc_feature (1)..(1394): Ortholog of  Ceres SEQ ID NO 13661015 as cited in SEQ ID NO 60921
  misc_feature (1)..(1394): Ortholog of  Ceres SEQ ID NO 13596304 as cited in SEQ ID NO 69269
aaaaactttttcatggatctgagattttctccaaatctatatttgtgattgtttcgtgtagtttttctcttaaagttgtgttctttaagctctctcgtgctcaatcttacgtttccctttggtttgatttcgtgtttttgttattcgatttcacctttaacttttatctaatctcttgtttttgattttgtaaattgtaaaaagtttctggtgattctcttagcgaatttgggaaactttatctgtatttttctgtttcgccgtagatttaggatccttaattaatgaatttgtgggtttcaatattcctcgtctctgcaatagctggatcatgcttaccttctgggtttgcttacgttgacgtttgcaatcacgaattcgaggtgttccgatccgtgatcgagcaaaaatgtcctcgttctttgtatccaagccctcctatcgaggtagatggagacttgctagacaaactcatggatgcaaaccatggaaatgcctatatatccatactattttatacctcacggtgcccgttttcacgtgcagtacgcccaaagtttgatgttctgagttcaatgtttcctcacataacgcacctgattgttgagcaatctcaggctttaccatctgtgttttctaggtatggtatccatagcttgccttcaatcctgatggtgaatcaaacaatgaagatgcgataccatggtccaaaggatcttgcatccctgattcagttttacaaggaaacaacaggtcttaaacctgtccagtatatggatgaaggtgaaccaacaagcttggacactgatggaaacctgatcacatggctacacaacgggtcatctatcagagaaatagcagaaagagagccatatatggtacttgcactaatgtttctgtctttgaaactggcaattttgatcttccccatcatgggatcacggttgaaaacgttatgggcattgtatgttccgcatctgagcttgggaatacttggtgagactagccaactgtttggccgtgccctacacatgatcgatgtgaggagactatggataaaactgagactcaccaaaacaaggaacttccaagaaagagcaaagaacgcacttgcatcagtctcactaggaaaatcttcatcacaatcagcctaaaagggtgatttagaaatccttcactgtcaatgagcttagtttagattactttactttactgtctgtgagagatcctttgactgacatgtttctatacctttggagttccactgtctctgtatgtaaatcctgttttgcttcttttgtgaatattttttcttcttcttttgaatattcatgttcttggtccacttcgttgtgcttacgttttgtctatattgattatggatggtttggttt

SEQ ID NO: 104244 - protein, 289 aa, Arabidopsis thaliana; identical to SEQ ID NO: 39290
  peptide (1)..(289): Ceres Seq. ID no. 13614629

SEQ ID NO: 104245 - protein, 226 aa, Arabidopsis thaliana; identical to SEQ ID NO: 39291
  peptide (1)..(226): Ceres Seq. ID no. 13614630

SEQ ID NO: 104246 - protein, 192 aa, Arabidopsis thaliana; identical to SEQ ID NO: 39292
  peptide (1)..(192): Ceres Seq. ID no. 13614631

SEQ ID NO: 104247 - DNA, 1430 bp, Arabidopsis thaliana
  misc_feature (1)..(1430): Ceres Seq. ID no. 13614640
  misc_feature (1)..(1430): Ortholog of  Ceres SEQ ID NO 15168965 as cited in SEQ ID NO 20607
  misc_feature (1)..(1430): Ortholog of  Ceres SEQ ID NO 13597454 as cited in SEQ ID NO 64121
  misc_feature (1)..(1430): Ortholog of  Ceres SEQ ID NO 13623385 as cited in SEQ ID NO 0
aaaccattcacaatcagacaatgacatctctccatacgttactcttctcttctcttcttttcttcatcgtctttccaaccttcacgttttcctccaccttattgtttcagagtttcaattgggagtcatggaagaaagaaggaggattctacaattctctccacaactccattgacgacatagccaacgctggaatcactcatctttggcttcctcctccttctcaatccgttgctcctgaaggttacttaccgggaaagctatacgatctaaacagctccaaatacggttcagaggcggaactgaaatcgttaatcaaagcgttgaatcaaaaaggaataaaagctttggctgatatagtgattaaccacagaacagctgagaggaaagacgataaatgtggatactgttatttcgaaggtgggacttccgatgatcgtcttgattgggatccttcctttgtctgccgcaatgaccctaaatttcccggtaccggaaacctcgacaccggaggagattttgatggagcgcccgacatcgaccaccttaaccctagagttcagaaagagttgtccgaatggatgaattggcttaaaactgaaatcggattccatggttggagatttgattatgttcgaggttatgcatcttccatcaccaaattatacgttcagaatacatcaccggattttgcggtgggtgagaaatgggacgatatgaagtacggaggagacgggaaactagactatgatcagaacgagcatcggtcgggtctcaaacagtggatcgaggaagcgggtggtggtgtgttgacagcttttgatttcaccaccaaagggatcttacagtctgctgtcaaaggtgagctttggagactaaaggactcgcagggaaaaccgcctggtatgataggaatcatgcccggaaacgctgtcacattcatagataaccatgatacattcagaacgtgggttttcccttctgataaagtcttgcttggatacgtttatatacttactcatccaggaactccttgcattttttataatcattacatagaatggggactaaaagagagcatctcaaagctggtggctatcaggaacaaaaatgggattggtagcacaagctctgtaacgataaaagcggcagaggcggatctctacttggctatgattgatgataaagttatcatgaagattggaccaaagcaagatgtgggaacacttgttccttctaattttgctttagcttattcaggccttgactttgctgtctgggagaagaagtaacgcataactcgaatcataagaaaagtaatcgaatgtatcttcttcctttttaataaaacattttggcagtatctaaagatatgtataatgaaatataaaatgataaagaatacctaaataaaaagagcactagtggtg

SEQ ID NO: 104248 - protein, 429 aa, Arabidopsis thaliana; identical to SEQ ID NO: 26568
  peptide (1)..(429): Ceres Seq. ID no. 13614641

SEQ ID NO: 104249 - protein, 423 aa, Arabidopsis thaliana; identical to SEQ ID NO: 26569
  peptide (1)..(423): Ceres Seq. ID no. 13614642

SEQ ID NO: 104250 - protein, 236 aa, Arabidopsis thaliana; identical to SEQ ID NO: 26570
  peptide (1)..(236): Ceres Seq. ID no. 13614643

SEQ ID NO: 104251 - DNA, 1161 bp, Arabidopsis thaliana
  misc_feature (1)..(1161): Ceres Seq. ID no. 13614644
  misc_feature (1)..(1161): Ortholog of  Ceres SEQ ID NO 12608620 as cited in SEQ ID NO 60192
  misc_feature (1)..(1161): Ortholog of  Ceres SEQ ID NO 13662898 as cited in SEQ ID NO 66199
  misc_feature (1)..(1161): Ortholog of  Ceres SEQ ID NO 14313358 as cited in SEQ ID NO 67347
  misc_feature (1)..(1161): Ortholog of  Ceres SEQ ID NO 13654314 as cited in SEQ ID NO 67914
attagttttctccgacactcccattcaaaagtagaaagatactgaagagctcgctcattcacaaaataaccaaaatggttctcactcacaacgtattggcagttacatttggagtcctgggtaacatcatatcgttcatcgttttcttggcaccagtgccaacttttgtaagaatctgcaagaaaaaatcgatagaaggttttgaatcacttccctacgtgtcagccctctttagcgcgatgctatggatttactatgctctgcaaaaagatggagcaggcttccttctcattaccataaacgctgtgggatgcttcatcgaaaccatctacatcatcctcttcatcacctatgctaacaagaaagctagaatatcaactttgaaggttcttgggctcttgaatttcttgggttttgctgctattattctcgtctgcgagctcctaaccaaaggatcgaaccgtgagaaagtccttggagggatttgcgtcggattttctgtttgtgttttcgcagctcctttgagcatcatgagagtggtgatacgaacaaagagtgtggagtttatgcctttctctctatcattgtttcttacaatcagcgccattacgtggctcttctacggtcttgctattaaagacttctacgttgcgcttccaaatatattgggtgcgtttctcggagcagtccaaatgattctatacgtcatattcaagtactacaaaactccactagtggttgatgagacagagaagcccaaaacggtgtcggatcattccatcaacatggtcaagctttcatctactccggcttctggtgatcttacggttcagccgcagactaatcctgacgtgagtcatcctattaaaactcatggtggtgacttagaggaccagatggacaagaaaatgccaaactaagtcaagatttagttttcaattatgaattagtgattgactttaatgttgaactgttgagtctggtttcctaatttgtcttttattttctcatcatcttctttcgaaatatctcgaaattgtactatccttcaaaaatttatgtgcgtcgtttagaattttgtaaaatagtttttgatgcctctgttctcagtaatacttaaaagtttattagtccggctaattaaaaaggaaatgaaaattc

SEQ ID NO: 104252 - protein, 281 aa, Arabidopsis thaliana
  peptide (1)..(281): Ceres Seq. ID no. 13614645
MVLTHNVLAVTFGVLGNIISFIVFLAPVPTFVRICKKKSIEGFESLPYVSALFSAMLWIYYALQKDGAGFLLITINAVGCFIETIYIILFITYANKKARISTLKVLGLLNFLGFAAIILVCELLTKGSNREKVLGGICVGFSVCVFAAPLSIMRVVIRTKSVEFMPFSLSLFLTISAITWLFYGLAIKDFYVALPNILGAFLGAVQMILYVIFKYYKTPLVVDETEKPKTVSDHSINMVKLSSTPASGDLTVQPQTNPDVSHPIKTHGGDLEDQMDKKMPN

SEQ ID NO: 104253 - protein, 226 aa, Arabidopsis thaliana
  peptide (1)..(226): Ceres Seq. ID no. 13614646
MLWIYYALQKDGAGFLLITINAVGCFIETIYIILFITYANKKARISTLKVLGLLNFLGFAAIILVCELLTKGSNREKVLGGICVGFSVCVFAAPLSIMRVVIRTKSVEFMPFSLSLFLTISAITWLFYGLAIKDFYVALPNILGAFLGAVQMILYVIFKYYKTPLVVDETEKPKTVSDHSINMVKLSSTPASGDLTVQPQTNPDVSHPIKTHGGDLEDQMDKKMPN

SEQ ID NO: 104254 - DNA, 1049 bp, Arabidopsis thaliana
  misc_feature (1)..(1049): Ceres Seq. ID no. 13614651
  misc_feature (1)..(1049): Ortholog of  Ceres SEQ ID NO 13638658 as cited in SEQ ID NO 51921
  misc_feature (1)..(1049): Ortholog of  Ceres SEQ ID NO 14306522 as cited in SEQ ID NO 53365
  misc_feature (1)..(1049): Ortholog of  Ceres SEQ ID NO 15175175 as cited in SEQ ID NO 0
ggatacaaataataaatctatctgcctcttaaaagttccaaatttcaccacgtcactgctttgataatgcaggtcctcgtcgtctctcctccgctcatcgccgccgcatctctctctaaacctctcaattctctctctaaagccgcactctctttctccagagccaaacccatttgtcctttccctcaaacctctcgacgaccaatctccgtatacaaatccccaatgaacaaccttttcaacagactcggattcgggtctcgtcctcaagcccaagctgacccatcttccgccgcaatcgcccaaggacccgacgatgatgttccgtcttcaggtcagcaattcgcgcaatttggcgccggttgtttctggggagtggagctagcttaccagagagttcctggtgtgaccaagaccgaggttgggtatagccatggcatcgtgcacaatccgagttacgaggatgtctgtactggcactacgggacataacgaggttgttagagttcagtatgatcccaaagagtgtagctttgagagcttgcttgatgttttctggaatcgtcatgatccaaccaccttgaatcgtcagggtggggatgtgggaacgcagtatcgatcaggtatatactactacacagacgagcaagagcgcatagctcgtgaagctgttgagaaacagcagaagatattgaacaagaggattgtcacagagatacttcccgctacgaaattctacagagcagaaaattaccaccagcaatacctggcaaaagggggtcgcatgggtttaagacaatcagctgagaaaggttgcaaggatccaatccgatgctatggctaagaaactaagtcagtcttccctcaagcacataaaaagaagtgagttgtctcatgaaaaatacaataatctgtagatcacatttgtttcttgtctttgttatgcaaccaatggttatgatgcatcctatgcttatatgaatcaaggctttgtccaaatcaatttcaatttgatactacagtactggtaatacaatttgggaagttctc

SEQ ID NO: 104255 - protein, 258 aa, Arabidopsis thaliana
  peptide (1)..(258): Ceres Seq. ID no. 13614652
MQVLVVSPPLIAAASLSKPLNSLSKAALSFSRAKPICPFPQTSRRPISVYKSPMNNLFNRLGFGSRPQAQADPSSAAIAQGPDDDVPSSGQQFAQFGAGCFWGVELAYQRVPGVTKTEVGYSHGIVHNPSYEDVCTGTTGHNEVVRVQYDPKECSFESLLDVFWNRHDPTTLNRQGGDVGTQYRSGIYYYTDEQERIAREAVEKQQKILNKRIVTEILPATKFYRAENYHQQYLAKGGRMGLRQSAEKGCKDPIRCYG

SEQ ID NO: 104256 - protein, 205 aa, Arabidopsis thaliana
  peptide (1)..(205): Ceres Seq. ID no. 13614653
MNNLFNRLGFGSRPQAQADPSSAAIAQGPDDDVPSSGQQFAQFGAGCFWGVELAYQRVPGVTKTEVGYSHGIVHNPSYEDVCTGTTGHNEVVRVQYDPKECSFESLLDVFWNRHDPTTLNRQGGDVGTQYRSGIYYYTDEQERIAREAVEKQQKILNKRIVTEILPATKFYRAENYHQQYLAKGGRMGLRQSAEKGCKDPIRCYG

SEQ ID NO: 104257 - DNA, 2088 bp, Arabidopsis thaliana
  misc_feature (1)..(2088): Ceres Seq. ID no. 13614658
  misc_feature (1)..(2088): Ortholog of  Ceres SEQ ID NO 13659033 as cited in SEQ ID NO 66372
  misc_feature (1)..(2088): Ortholog of  Ceres SEQ ID NO 13655724 as cited in SEQ ID NO 68973
gatttcgcgtcttcactgttgtggatttcttctgaatcttctgagctcgcttcacctacaagaagacaacaaggatcattttctctagattccagatcctgaagaaggtgaaatcttatctgtgatccagtggaagattgaatcaagtaacagattcacttagttcacttgcgtattgcatgcccctgaagataacattttgaataatgttgatattgaattatcacctataagctctggttcttgttgcttgtattggttctgggtatctactagtgaagaaaccatggcttttggttctcctaggaataattctatattagctgcggctggatttcctcggaaagtgtctacagttgcaattgctattggtggtttggcatcattctttgttttcggattgttgcttcgtctttcgtatccgaatagttcttcagttggtggcatattttatgggatagggaatcctgaacaagttcatgtccctttatctttgagcaaccatactgtcaatatccttcagaagagtagtgacatcaatgcgtttgataaaaatctgacttctgattctagctctggcttacctgttgttgttagcaaaagtataccacctccagatttcagtagtgataggaagttggagacacctttgacacaagaaaaagaggatttggtttcttcggatataactgaaaagactgatgttcaatcaggtgaacgtgaaaccaatgtttccaaggctgaagacactccaagtgcatcatctcctccagatgatgtctctgaaactgcttcagcagaaccagagtgtgatttgtatcaaggtagttggttttatgatcctgggggacctctctacacgaacaactcttgccctgtcctgacgcagatgcagaattgccagggaaatggaagacctgacaagggatatgagaactggagatggaaaccgtctcagtgtgagcttcctcggtttgatgccagaaaatttcttgaacttatgaaaggcaagacactggcctttataggagattcagtagctcgtaatcagatggagtccatgttgtgccttctttggcaggttgaaacaccagtcaatcgtgggagccgaaagatgcagagatggtattttaagcaatcatcagtaatgattgcccgtatttggtcatcttggcttgttcatcagttcaacgaaaaattcgattatgctcctgaaggtgtcacaaaactaaagctggatcttcctgatgagcgcataatggaagctatcccgaaattcgacgtggttgtcctctcatcagggcactggtttgcaaagcagtctgtctacatattgaaagaagagatcgtgggaggccaattatggtggccagacaaatcaaaacccatgaaagtcaataacgtggatgcatttggaatatcagttgaaacaatccttaagtccatggctacacacccgaactacagcggtttgaccattgtgagaacattctcacctgatcattacgaaggtggtgcttggaacacaggtggatcatgcacggggaaagaagaacccatccttccagggaagctagtgaaaaacggattcacagagataatgcatgagaagcaagcgacaggatataaccaagccgtcgataaagtcgcggagaatttgaagctaaaactaaagctgatggatatcacagaggcatttggatatcgccatgatggtcatcctggtccattcagaagtcctgaccctaacaagatcactaaacggggaccagacggacggcctccacctcaggactgcttgcactggtgcatgccaggaccagtcgatacatggaacgaaatggtcttggagctcataaggagagacaggaaaagctcatcaacttgacttggtttgaaactcaaaggatgagagagcatattacacgacttatactattaatctgattcttggttactgataaactcaaagataaactcacttgtagatttgtgctaggcacggtgagttaggattagaatttgttccactatacttgttggttcgtttgtcctgagattgaaatttaagatttgggagttatgagt

SEQ ID NO: 104258 - protein, 533 aa, Arabidopsis thaliana; identical to SEQ ID NO: 24504
  peptide (1)..(533): Ceres Seq. ID no. 13614659

SEQ ID NO: 104259 - protein, 332 aa, Arabidopsis thaliana; identical to SEQ ID NO: 24505
  peptide (1)..(332): Ceres Seq. ID no. 13614660

SEQ ID NO: 104260 - protein, 295 aa, Arabidopsis thaliana; identical to SEQ ID NO: 24506
  peptide (1)..(295): Ceres Seq. ID no. 13614661

SEQ ID NO: 104261 - DNA, 998 bp, Arabidopsis thaliana
  misc_feature (1)..(998): Ceres Seq. ID no. 13614662
  misc_feature (1)..(998): Ortholog of  Ceres SEQ ID NO 14301996 as cited in SEQ ID NO 56657
gattcgtctcagaggccgaggttgaagattaatcggacaaaggagattagaagagtagaaaaaacgacaagaagaaagaaacacagttgcaggagagaaagagatatggctgtccggataaacgcgatggcggtgacgtttgtggcgcacgcgctggcggtaatagcggcgattatggtactggtttggagtatcagttacagaggtggattggcctgggaagctactaacaagaatctcatcttcaatctgcatcctgttctgatgctcatcggatttataatcttgggaggagaagccatcataagttacaaatcgcttccgctggagaaaccagtgaagaagttgatccaccttatactccatgccattgctctggctcttgggatatttggcatctgtgcagcctttaagaaccacaatgaaagccatatccctaatctctacagtctccattcctggattggtattggagtcatttctctttatggcttccagtgggtgtacagcttcatagtgttcttcttcccaggaggatcaacaaatttgaaaagcggattgcttccgtggcacgcaatgcttggcctgtttgtttacatacttgctgtcgggaatgcagctttagggtttctggaaaagctgactttcttggagaatggagggcttgacaagtatggatccgaagcatttcttatcaacttcacggccattatcactattctctttggtgcctttgtggtactcactgcttctgctgagtctccttctccttctccttccgtctccaatgatgatagtgttgacttcagttattctgctatataaaacactttctacattccacgttacatctgtatcgccccttgtactctcaaaactccatttatgtatgatgcatttgtagcgaaaagctttgtgtgttacggctttgctacttctggtgtgtaaaatcttcaatgatattgatgaatcttttaaatcattttcttttcttttct

SEQ ID NO: 104262 - protein, 274 aa, Arabidopsis thaliana
  peptide (1)..(274): Ceres Seq. ID no. 13614663
DSSQRPRLKINRTKEIRRVEKTTRRKKHSCRRERDMAVRINAMAVTFVAHALAVIAAIMVLVWSISYRGGLAWEATNKNLIFNLHPVLMLIGFIILGGEAIISYKSLPLEKPVKKLIHLILHAIALALGIFGICAAFKNHNESHIPNLYSLHSWIGIGVISLYGFQWVYSFIVFFFPGGSTNLKSGLLPWHAMLGLFVYILAVGNAALGFLEKLTFLENGGLDKYGSEAFLINFTAIITILFGAFVVLTASAESPSPSPSVSNDDSVDFSYSAI

SEQ ID NO: 104263 - protein, 239 aa, Arabidopsis thaliana; identical to SEQ ID NO: 29951
  peptide (1)..(239): Ceres Seq. ID no. 13614664

SEQ ID NO: 104264 - protein, 232 aa, Arabidopsis thaliana; identical to SEQ ID NO: 29952
  peptide (1)..(232): Ceres Seq. ID no. 13614665

SEQ ID NO: 104265 - DNA, 1166 bp, Arabidopsis thaliana
  misc_feature (1)..(1166): Ceres Seq. ID no. 13614666
  misc_feature (1)..(1166): Ortholog of  Ceres SEQ ID NO 12583421 as cited in SEQ ID NO 56410
  misc_feature (1)..(1166): Ortholog of  Ceres SEQ ID NO 13596876 as cited in SEQ ID NO 62696
ctttctgttcctcgtttcagcgatgtagcagtagtacccagtggagtggagcaatggcttgccttagccgaatcttccttattctgatgattactatgtcttcttcgtctcctcctttctgttccggtggaagtcggaaggagctccgagataaagaaattacgagtaagagtgatgatacacaggcgagttatgttttaggatctaaatttgtggacccgacacgtgttcttcaactttcatggctaccaagggtctttctataccgcgggttcttgtcggaggaagagtgtgatcatctgatatctctgagaaaggagactacagaggtttactcagtggatgctgatggaaagacgcaacttgatccagtagttgctgggattgaagaaaaagtttctgcgtggactttcctcccaggagaaaatggcggctctatcaaggtaagaagttacacttctgagaagtcaggaaagaagttggattattttggagaggaacctagctccgtattgcatgaatctttgctggcaaccgtcgttctctacctctcaaacacaactcaaggaggagagcttctcttcccaaattcagagatgaaacccaaaaacagttgcttggagggcggtaacattttaagaccagtaaaaggaaacgcaattctgttcttcaccaggctcttgaatgcatctttggatgggaaaagcactcatttgaggtgccctgtggtgaaaggagaactgttagtggcaacaaaactgatctatgcgaagaaacaagcaagaattgaggagagtggggaatgcagtgatgaagacgaaaactgtggacgatgggctaagcttggggagtgcaagaaaaaccctgtctatatgattggctctcctgattactacggtacctgcagaaagagttgtaacgcttgttgattcttcaatcttatcgcaaataattgaacattttcatactcaagtacttgagctgtttttggtctataagatagaataaatagtgaatagttaagggtcgtggtggtaattaattcctcttggccataggagaaaagaatatactcacttagatcttctttgatataactagaagtctttgtctatgttgttatctatgtttctctcgaatcataaatttgcatcttgctgtttctc

SEQ ID NO: 104266 - protein, 308 aa, Arabidopsis thaliana
  peptide (1)..(308): Ceres Seq. ID no. 13614667
FCSSFQRCSSSTQWSGAMACLSRIFLILMITMSSSSPPFCSGGSRKELRDKEITSKSDDTQASYVLGSKFVDPTRVLQLSWLPRVFLYRGFLSEEECDHLISLRKETTEVYSVDADGKTQLDPVVAGIEEKVSAWTFLPGENGGSIKVRSYTSEKSGKKLDYFGEEPSSVLHESLLATVVLYLSNTTQGGELLFPNSEMKPKNSCLEGGNILRPVKGNAILFFTRLLNASLDGKSTHLRCPVVKGELLVATKLIYAKKQARIEESGECSDEDENCGRWAKLGECKKNPVYMIGSPDYYGTCRKSCNAC

SEQ ID NO: 104267 - protein, 291 aa, Arabidopsis thaliana
  peptide (1)..(291): Ceres Seq. ID no. 13614668
MACLSRIFLILMITMSSSSPPFCSGGSRKELRDKEITSKSDDTQASYVLGSKFVDPTRVLQLSWLPRVFLYRGFLSEEECDHLISLRKETTEVYSVDADGKTQLDPVVAGIEEKVSAWTFLPGENGGSIKVRSYTSEKSGKKLDYFGEEPSSVLHESLLATVVLYLSNTTQGGELLFPNSEMKPKNSCLEGGNILRPVKGNAILFFTRLLNASLDGKSTHLRCPVVKGELLVATKLIYAKKQARIEESGECSDEDENCGRWAKLGECKKNPVYMIGSPDYYGTCRKSCNAC

SEQ ID NO: 104268 - protein, 280 aa, Arabidopsis thaliana
  peptide (1)..(280): Ceres Seq. ID no. 13614669
MITMSSSSPPFCSGGSRKELRDKEITSKSDDTQASYVLGSKFVDPTRVLQLSWLPRVFLYRGFLSEEECDHLISLRKETTEVYSVDADGKTQLDPVVAGIEEKVSAWTFLPGENGGSIKVRSYTSEKSGKKLDYFGEEPSSVLHESLLATVVLYLSNTTQGGELLFPNSEMKPKNSCLEGGNILRPVKGNAILFFTRLLNASLDGKSTHLRCPVVKGELLVATKLIYAKKQARIEESGECSDEDENCGRWAKLGECKKNPVYMIGSPDYYGTCRKSCNAC

SEQ ID NO: 104269 - DNA, 844 bp, Arabidopsis thaliana
  misc_feature (1)..(844): Ceres Seq. ID no. 13614670
  misc_feature (1)..(844): Ortholog of  Ceres SEQ ID NO 12635789 as cited in SEQ ID NO 0
atggtcttcacctcctctggaaaaccatatcagtttatacattattgttctaaatgtatgtacaaatataaaattaaagaaaaccctattgctcccctttgctcaagctcagtgcctctttgcagcgaaagctcaaccaacaagacgatgattatctcagagaacaatcgcagagagatctgcaaataccttttcaaagagggagtatgctttgctaagaaggatttcaatctcccaaagcatccgttgattgatgtaccaaacctgcaagtgattaagctcatgcagagtttcaagtccaaggagtacgttagggagacatttgcgtggatgcattattattggtttctgactaatgaaggaattgagttcttgagaacttatcttaaccttccttccgatgttgtccctgctactttgaagaagtctgctaagcccggtggtcgtccctttggtggcccacctggtgatcgccaaagaggaccacctcgctctgatggagaccgtcccagatttggtgaccgtgatggataccgtggaggcccacgtggtggtgatgagaagggtggagctccagctgatttccagccgtctttccaaggaggtggtggtaggcctggttttggccgtggtgcaggcggttacagtgcagcagcaccatctggttcagggttcccttgaaaaatttgttgtcatattgcgacgatggaaggacagttttgttttttgttctagttctgtttgtgtaatgcaaatctggaatctataatctatctattaccttcaccttggtttaaacgaacaaatcctgtagtttcaggattagtgtcaaaattcatgtttc

SEQ ID NO: 104270 - protein, 226 aa, Arabidopsis thaliana
  peptide (1)..(226): Ceres Seq. ID no. 13614671
MVFTSSGKPYQFIHYCSKCMYKYKIKENPIAPLCSSSVPLCSESSTNKTMIISENNRREICKYLFKEGVCFAKKDFNLPKHPLIDVPNLQVIKLMQSFKSKEYVRETFAWMHYYWFLTNEGIEFLRTYLNLPSDVVPATLKKSAKPGGRPFGGPPGDRQRGPPRSDGDRPRFGDRDGYRGGPRGGDEKGGAPADFQPSFQGGGGRPGFGRGAGGYSAAAPSGSGFP

SEQ ID NO: 104271 - protein, 207 aa, Arabidopsis thaliana
  peptide (1)..(207): Ceres Seq. ID no. 13614672
MYKYKIKENPIAPLCSSSVPLCSESSTNKTMIISENNRREICKYLFKEGVCFAKKDFNLPKHPLIDVPNLQVIKLMQSFKSKEYVRETFAWMHYYWFLTNEGIEFLRTYLNLPSDVVPATLKKSAKPGGRPFGGPPGDRQRGPPRSDGDRPRFGDRDGYRGGPRGGDEKGGAPADFQPSFQGGGGRPGFGRGAGGYSAAAPSGSGFP

SEQ ID NO: 104272 - protein, 177 aa, Arabidopsis thaliana; identical to SEQ ID NO: 28487
  peptide (1)..(177): Ceres Seq. ID no. 13614673

SEQ ID NO: 104273 - DNA, 906 bp, Arabidopsis thaliana
  misc_feature (1)..(906): Ceres Seq. ID no. 13614682
  misc_feature (1)..(906): Ortholog of  Ceres SEQ ID NO 12609037 as cited in SEQ ID NO 51306
  misc_feature (1)..(906): Ortholog of  Ceres SEQ ID NO 12610391 as cited in SEQ ID NO 55942
  misc_feature (1)..(906): Ortholog of  Ceres SEQ ID NO 14309068 as cited in SEQ ID NO 0
actcttactctgttctcgctacagaatctcctgggaaaaaaaaaaaagaaacttgatccacccgaattccccaaatcttcacaatttctggaaactctctcgatcgtgaagcagaaaagtgaggttccaaatgggttctgtttcgggtcaaacccgaattacaacgatgaacctctcgctctcaacagcagagaagaaccctaatttccgctcgtcgcttctcaattctaagaacgcaatttcagatactttaggggtctcttccaaatgcagtacattcctcaggggtcaatttcaaagaatacatttttcttggctacaacacactcgacctttgagaaaacgaacagtatttggtcacgtgagctgcgtcatgccgttaacggaagagaatgtggagagagtgttagacgaagtacgaccatctctaatggccgacggaggaaacgtggcgttgcacgaaatcgacggacttgtggtggttttaaagctacaaggagcttgtggttcgtgtcctagctcatcaatgacgttgaagatgggaatcgagagtcgtcttcgagacaagattccagagatcatgtccgttgagcagtttcttgaatccgagacaggaggtttagagctgaacgatgagaacattgagaaggttctctctgagttaaggccgtacctatccggtactggaggtggggggcttgagttagttgagattgatggttacgtggtcaaggttcgactcactggaccagctgctggagtcatgactgttcgtgtcgcgttgactcaaaaactgagggaaacaattccttctataggtgcagtccagcttctagagtgacattaacctttttattttgtaacttatatacaaggcctatttttgattcaatatattttatttcc

SEQ ID NO: 104274 - protein, 236 aa, Arabidopsis thaliana; identical to SEQ ID NO: 36829
  peptide (1)..(236): Ceres Seq. ID no. 13614683

SEQ ID NO: 104275 - protein, 224 aa, Arabidopsis thaliana; identical to SEQ ID NO: 36830
  peptide (1)..(224): Ceres Seq. ID no. 13614684

SEQ ID NO: 104276 - protein, 155 aa, Arabidopsis thaliana; identical to SEQ ID NO: 36831
  peptide (1)..(155): Ceres Seq. ID no. 13614685

SEQ ID NO: 104277 - DNA, 1811 bp, Arabidopsis thaliana
  misc_feature (1)..(1811): Ceres Seq. ID no. 13614686
  misc_feature (1)..(1811): Ortholog of  Ceres SEQ ID NO 15176223 as cited in SEQ ID NO 51535
  misc_feature (1)..(1811): Ortholog of  Ceres SEQ ID NO 15171193 as cited in SEQ ID NO 59370
  misc_feature (1)..(1811): Ortholog of  Ceres SEQ ID NO 13597198 as cited in SEQ ID NO 63665
ctctttagctatcttttttgtgttaccggttcaaatggccgccgtcgcagattccgttgagaacaacggttccataaacctccctgagaatgaaaaccttataccggcgggattcagtgccgccgcattgcttgacgaaaactctggcgctttccctgaattgaatcagcccgatagcttagctgctgctgagactaccttccccgatacgaacgattccgcggaggagaggtggccaggttggcctggtgattgcgtgtttcgtatgatcgttccggtgactaaagtcggagctattattggacgcaaaggtgactttataaagaagatgtgtgaggagactcgtgctcgtatcaaagtccttgatggtcctgttaatactcccgatcgcatcgtgttaatatctggtaaggaagaaccagaggcctacatgtcaccggcaatggacgcagtgttgagggtgtttagacgtgtttcagggttgcctgataatgatgatgatgatgttcaaaacgctggaagtgtcttctcttcagtgcgtttattagttgcttcaacgcaggcgattaatttgattggaaaacaaggatctttgattaagtctatagtagagaactctggtgcatcagttcgtattttatcagaagaggaaacaccgttttatgctgcacaggatgagaggatagtggatttgcaaggggaagctttaaagattcttaaagcattagaagccattgttggacaccttaggagatttttagttgaccatactgttgtccctctcttcgagaagcaatatctagctagggtctctcaaactcgccaggaagaaccgttagctgaaagcaagtcatctctgcatactatttcgtcaaatctaatggagcctgatttctccctcttagcacggagggaacctttgtttctggagcgcgattctcgggtggactcacgtgttcagccttcgggagtttctatctacagtcaggatcctgtactgtctgccagacactccccaggtcttgctcgggtttcttctgcttttgtgacacaggtatctcaaacgatgcaaataccattctcctatgcagaggatattattggtgtagaaggagctaatatagcctatatccgtcgaagaagcggagctaccataaccattaaagagagtccgcatcctgatcaaatcacagtggaaatcaaaggcacaacttctcaagtacaaactgctgagcaactaattcaagagttcatcatcaatcacaaggaaccagtttcggtatcagggggatatgccagaatcgactctggatatgtacctgcatatcctcctcagctaagtaaccgtcaagagccgctcccgagcacctacatgggcacagagccggtgcagtacagaccaacagcatactctcagctggggggtccttctacctacacaccgaccctgactgggcaaacttatggttcggaatatagaccagcttctgatgttggtggctacagcagttataatctttgaattggttgctgtgtttaagtttatttgcagattaatttctctttagagaaaggctcatttataatataatagagagggaaaaggaacaagttctagagagccaatgtagttgttggaatgtgtaatgtaaatctaggtgccctttttttttttttttttcatacctcgatatatgtcacactacgtttctggtcaaataagaacatgttttttctttcttttttgtatgaatttgtttatcagaagtcagaatgattcagttttaagaaatttttagttaacgttttac

SEQ ID NO: 104278 - protein, 506 aa, Arabidopsis thaliana; identical to SEQ ID NO: 22426
  peptide (1)..(506): Ceres Seq. ID no. 13614687

SEQ ID NO: 104279 - protein, 495 aa, Arabidopsis thaliana; identical to SEQ ID NO: 22427
  peptide (1)..(495): Ceres Seq. ID no. 13614688

SEQ ID NO: 104280 - protein, 418 aa, Arabidopsis thaliana; identical to SEQ ID NO: 22428
  peptide (1)..(418): Ceres Seq. ID no. 13614689

SEQ ID NO: 104281 - DNA, 847 bp, Arabidopsis thaliana
  misc_feature (1)..(847): Ceres Seq. ID no. 13614690
  misc_feature (1)..(847): Ortholog of  Ceres SEQ ID NO 13581670 as cited in SEQ ID NO 57766
atcacgctgacgaagttgaaacaagcagcacaagaagaagacgaagcacgacgactctctcgcttccagatttcttgatccgatatttatattccctctgcccttgaaatcaaatctcttctcgaatttgtgctctagaaattataatctggcaatttgaagatcttgtgggtcacgacacaaacttataagcaagagcttagcattttcatcatctgctgaagaacgtatgggagaaactgttaaagagcgtggtgatggaagtgcagagctggttaaatccgtagctgataagcatgccggtctcgtgagaccagttgctaaatattactctgcagttaaagatgctatggtgtgtgggaaaggaagatatacgcttgtaaaagacgtagacgaggtggaaaatggagtgtatgacaagcctcttccatgctttggttgtggaatcggatggttctcctttctcttgggttttgtgttccctttcttatggtactatgcaacacttttatatttcgggaactactaccgcaaggatcctagagaaagagccggccttgctgcttccgcaatcactgcgatgggattctccctcttgctactagtgattgttgttttctggtggctctaatgggttctctgacttatacgccataatcttgagatatatatgatggaaagtctcatccttgtcaaaggaaaaaggaggggacttagatatatatataaaccctatatacacagattatagttagacctctctcaagctctgtatcattttcttctcaaaaatctgcagtgtgtacaaagaacagaaaatacaataataaatgagtaaatggttgtt

SEQ ID NO: 104282 - protein, 133 aa, Arabidopsis thaliana
  peptide (1)..(133): Ceres Seq. ID no. 13614691
MGETVKERGDGSAELVKSVADKHAGLVRPVAKYYSAVKDAMVCGKGRYTLVKDVDEVENGVYDKPLPCFGCGIGWFSFLLGFVFPFLWYYATLLYFGNYYRKDPRERAGLAASAITAMGFSLLLLVIVVFWWL

SEQ ID NO: 104283 - protein, 93 aa, Arabidopsis thaliana
  peptide (1)..(93): Ceres Seq. ID no. 13614692
MVCGKGRYTLVKDVDEVENGVYDKPLPCFGCGIGWFSFLLGFVFPFLWYYATLLYFGNYYRKDPRERAGLAASAITAMGFSLLLLVIVVFWWL

SEQ ID NO: 104284 - protein, 66 aa, Arabidopsis thaliana
  peptide (1)..(66): Ceres Seq. ID no. 13614693
MECMTSLFHALVVESDGSPFSWVLCSLSYGTMQHFYISGTTTARILEKEPALLLPQSLRWDSPSCY

SEQ ID NO: 104285 - DNA, 815 bp, Arabidopsis thaliana
  misc_feature (1)..(815): Ceres Seq. ID no. 13614698
  misc_feature (1)..(815): Ortholog of  Ceres SEQ ID NO 14307801 as cited in SEQ ID NO 59512
  misc_feature (1)..(815): Ortholog of  Ceres SEQ ID NO 14309110 as cited in SEQ ID NO 0
agaacaaaacaaacaaaaagtcatgtctccgacgacgacatcgttacgatccctaagcttctcgctttacgcttcttctaattctactccgatttctacaccaattgaggcccgacagttactgagttcatgcaatagattctacggtctgtcctcttcgagctcttcttcctcccttactacttcatctttgatcggaaatcttgttttctcatcaaggaatcagtctctctccgtaaaggtccaagcgttagctgctgaaaccgaacagccaaaatggtgggagaggaaagcagggccaaacatgattgacattacctcagctgagcagtttctcaacgcgttaaaagatgcgggagatagattagttatcgtagatttttacggaacttggtgtggttcttgccgtgcaatgttcccaaagctctgcaaaacggcgaaagaacaccctaacatcttgttccttaaagtaaactttgacgagaacaagtctctctgcaaaagcttaaacgtcaaggtgttaccgtatttccacttctaccgcggtgctgatggccaagtcgaatccttctcatgctctcttgccaagttccagaaactgagagaggcgatagagagacacaatgtaggaagtatcagtaacatctcttcttcagcttctgagaaagttgaagattcaagtgaataatcaatgcctggttcagattgatcacagattattttgttaaatcgcttccctgtatatatgttgactgcattttccatgtggtgcatcataatttttgtacataaataaatgagtctgacttcgagtt

SEQ ID NO: 104286 - protein, 228 aa, Arabidopsis thaliana
  peptide (1)..(228): Ceres Seq. ID no. 13614699
EQNKQKVMSPTTTSLRSLSFSLYASSNSTPISTPIEARQLLSSCNRFYGLSSSSSSSSLTTSSLIGNLVFSSRNQSLSVKVQALAAETEQPKWWERKAGPNMIDITSAEQFLNALKDAGDRLVIVDFYGTWCGSCRAMFPKLCKTAKEHPNILFLKVNFDENKSLCKSLNVKVLPYFHFYRGADGQVESFSCSLAKFQKLREAIERHNVGSISNISSSASEKVEDSSE

SEQ ID NO: 104287 - protein, 221 aa, Arabidopsis thaliana
  peptide (1)..(221): Ceres Seq. ID no. 13614700
MSPTTTSLRSLSFSLYASSNSTPISTPIEARQLLSSCNRFYGLSSSSSSSSLTTSSLIGNLVFSSRNQSLSVKVQALAAETEQPKWWERKAGPNMIDITSAEQFLNALKDAGDRLVIVDFYGTWCGSCRAMFPKLCKTAKEHPNILFLKVNFDENKSLCKSLNVKVLPYFHFYRGADGQVESFSCSLAKFQKLREAIERHNVGSISNISSSASEKVEDSSE

SEQ ID NO: 104288 - protein, 127 aa, Arabidopsis thaliana; identical to SEQ ID NO: 76250
  peptide (1)..(127): Ceres Seq. ID no. 13614701

SEQ ID NO: 104289 - DNA, 1356 bp, Arabidopsis thaliana
  misc_feature (1)..(1356): Ceres Seq. ID no. 13614702
  misc_feature (1)..(1356): Ortholog of  Ceres SEQ ID NO 14304245 as cited in SEQ ID NO 53346
tttttttcaattttacggatatcgttatctgcttctcacactaacacggcgaagcagaaaaagagctcgaaacaaaaatggagggaaccttctcgccgctttgcttacgttcttcttcgaacctctgttacttctccagtaatgtttcaccagattctcaccgttctataggatttacattggttgattcgctccggccaacgaacttggtttccctgcgaacgggaaataaacgttcgtcatcgtcttcactacggctatttctctctccgactagaagcgctctccgtacgccgactatttccgcggaggaggtgaaagatgtcccgatgccgaagattgataagagcggccgattaagcagtcctcgagccgcacgcgagctcgctcttgtaatactttatgccgcatgcttagaaggctctgacccaattcgtctctttgagaagagaataaacgcaagaagagagcctggatacgagtttgacaagagttctttgttggaatacaaccacatgagctttggaggacccccagttaaaacagaaacaaaagaagaagaagatgagcttgtgcgccatgatgaaaaagaatcgaaaatcgaagccgaagtgctttcagctcccccaaagctggtgtacagcaaacttgttttacggtttgcaaagaaactcttggctgcggtagttgataaatgggatagtcatgtcgttatcatcgagaaaatttccccgccagattggaagagtgcaccagctggaagaatattggagttttcgattcttcacttggcaatgtctgaagtggcagtccttgaaacccgacacccgattgtcattaacgaggctgttgatcttgcaaaacggttctgcgatggatcagcaccacgcataatcaacggatgcctaaggacatttgtcaaggatagagcaacaacatcaacacctcaagctttagaattgaagcaagaagtgtcggtttaaattagaacaaaacccgcatcttcgttaggaggcaggcaacctcaagatgttggtcgtcggaagtcgctagtaggcaaagtgttgatccgatgatcttatatattcgacaaagtcgctctctgtcttgacagaccgcttctggtccgaagcttttgatacctgagactgaatctatccattgcaggtcaacatgattattgctaagaacacagcatactcatgtctgtattaatatattgcccataagatagtattaatttatgtagtagttttcatgtttctgtctttgtatcctcctccttcacttgtgtcccatatttgagaacaaacaaagctgtataatcaggtttttcgtatagatgtttttttccgc

SEQ ID NO: 104290 - protein, 301 aa, Arabidopsis thaliana; identical to SEQ ID NO: 25868
  peptide (1)..(301): Ceres Seq. ID no. 13614703

SEQ ID NO: 104291 - protein, 217 aa, Arabidopsis thaliana; identical to SEQ ID NO: 25869
  peptide (1)..(217): Ceres Seq. ID no. 13614704

SEQ ID NO: 104292 - protein, 155 aa, Arabidopsis thaliana; identical to SEQ ID NO: 25870
  peptide (1)..(155): Ceres Seq. ID no. 13614705

SEQ ID NO: 104293 - DNA, 2007 bp, Arabidopsis thaliana
  misc_feature (1)..(2007): Ceres Seq. ID no. 13614709
  misc_feature (1)..(2007): Ortholog of  Ceres SEQ ID NO 14315045 as cited in SEQ ID NO 52345
  misc_feature (1)..(2007): Ortholog of  Ceres SEQ ID NO 15170171 as cited in SEQ ID NO 67284
aaagcataatgacggaagagctcatcgaccaatcaccaccacctgacccagacccgattcaaaattcgaatttaataatccacccaagacgtgttcctttcgagcacggccttcttccgatccagaagctcgtttttaccgacccgattcaaactctagctccgatcaagcaaaagttagcttctttggcgacgaatcatcgcgtcggatctgctgccatttccgatgcactctcgatctccgatgaccatgcgcgcctcgttctcgaaactctctcttcggtgctccattgcgagactgacccattggttttggccaaacctgaggaagttgattccgtgggagctgatttgagggatctgatattgtttctctacattcaatcgtataagaagttattgcctaggacgcataaagactctgcttctgtggctgatgtttggccttcgacttctgcttttgatggatacttgtcggcattatctccaattcagcttgttcgtagcaacagccgtcggtttatgccatcaccgacagatgaagaagctcatcaattatcgtatctgcaaaagcacattgcaaatattatttctctccttgcagagcctgtggagggacaaggagatgattctttggtcctgtctatggagagtttggagcacattgggtttcttgttcattatggtgataagggatttgatgtaccttctttaagccaagctactcctttttttgcgaattctgatcctgatatgcccgctgtccccgttcctgcttcccaagtgaatgattggcttctcaaagacatagcttccgccttagaaagcatttctaacagaatctctgggaaagaaaatggggcatctaatgcctctgatcagaatgctgcaatggctgattctagtgtagctcttaataaagtttcatctaacgacagaggtccatgtattattgagggagtctctaagacctcacttttcaagcaggcttctgatcttaagggtagatcagtgaaggttgccaattgccatgattctgttatttatctgttagcgccattgagatatgcaactgtgtatgggtgttctgattctactatcgttctgggagctgctggcaaggcagtaaaagttgagcattgtgagagagttcatgtgattgtagctaccaaacgaatttgcatcgccaattgccgtgaatgtgtgttctttttgggagtcaatcagcgacctcttatagttggtgataaccacaaactacaggttgctccatataatacattttactcacacttggaggagcacataaccgaggtaggaattcagccaactatcaacaaatggaacgaatccttggcgctcggagcaattgatccgcatgactcactatcacatccgactggtgcctctgataaacaagctgaaccggcttcttgtgtggaccctgaccagttcactacctttttgatcccaaactggtttgcgggtgaggcgattggttccacgaaagacaatccatttccattgccagatgcatataaggcagtgcagcagacaaaccttaagaacttagaggaaacaagacaatccttgagagaaacacctctcgaagaaaaccgaaaacgagaactcactacagcgttccacatgtatttcaaagactggctatacgcgacgggaaatattcggcaactttactgcctacaaggcgattaagaccaatggcgattgaaaatgtcagagtcactgtagagttctcttgatccgttccttctcagagatttgctagcacgtttgacatcagaatttaactgcacagcacgctctctaactcctaaagctctgtttttttgtgtgtaggtttctctctgcttttatcgtatttattagtcttaaatatccacgtttttgtccttgaaaaacattaagccatcttgtcttgttgttgatttctttcaattgttataacaacttttctcaataccatatatataaatcttttagtaac

SEQ ID NO: 104294 - protein, 570 aa, Arabidopsis thaliana
  peptide (1)..(570): Ceres Seq. ID no. 13614710
SIMTEELIDQSPPPDPDPIQNSNLIIHPRRVPFEHGLLPIQKLVFTDPIQTLAPIKQKLASLATNHRVGSAAISDALSISDDHARLVLETLSSVLHCETDPLVLAKPEEVDSVGADLRDLILFLYIQSYKKLLPRTHKDSASVADVWPSTSAFDGYLSALSPIQLVRSNSRRFMPSPTDEEAHQLSYLQKHIANIISLLAEPVEGQGDDSLVLSMESLEHIGFLVHYGDKGFDVPSLSQATPFFANSDPDMPAVPVPASQVNDWLLKDIASALESISNRISGKENGASNASDQNAAMADSSVALNKVSSNDRGPCIIEGVSKTSLFKQASDLKGRSVKVANCHDSVIYLLAPLRYATVYGCSDSTIVLGAAGKAVKVEHCERVHVIVATKRICIANCRECVFFLGVNQRPLIVGDNHKLQVAPYNTFYSHLEEHITEVGIQPTINKWNESLALGAIDPHDSLSHPTGASDKQAEPASCVDPDQFTTFLIPNWFAGEAIGSTKDNPFPLPDAYKAVQQTNLKNLEETRQSLRETPLEENRKRELTTAFHMYFKDWLYATGNIRQLYCLQGD

SEQ ID NO: 104295 - protein, 568 aa, Arabidopsis thaliana
  peptide (1)..(568): Ceres Seq. ID no. 13614711
MTEELIDQSPPPDPDPIQNSNLIIHPRRVPFEHGLLPIQKLVFTDPIQTLAPIKQKLASLATNHRVGSAAISDALSISDDHARLVLETLSSVLHCETDPLVLAKPEEVDSVGADLRDLILFLYIQSYKKLLPRTHKDSASVADVWPSTSAFDGYLSALSPIQLVRSNSRRFMPSPTDEEAHQLSYLQKHIANIISLLAEPVEGQGDDSLVLSMESLEHIGFLVHYGDKGFDVPSLSQATPFFANSDPDMPAVPVPASQVNDWLLKDIASALESISNRISGKENGASNASDQNAAMADSSVALNKVSSNDRGPCIIEGVSKTSLFKQASDLKGRSVKVANCHDSVIYLLAPLRYATVYGCSDSTIVLGAAGKAVKVEHCERVHVIVATKRICIANCRECVFFLGVNQRPLIVGDNHKLQVAPYNTFYSHLEEHITEVGIQPTINKWNESLALGAIDPHDSLSHPTGASDKQAEPASCVDPDQFTTFLIPNWFAGEAIGSTKDNPFPLPDAYKAVQQTNLKNLEETRQSLRETPLEENRKRELTTAFHMYFKDWLYATGNIRQLYCLQGD

SEQ ID NO: 104296 - protein, 397 aa, Arabidopsis thaliana
  peptide (1)..(397): Ceres Seq. ID no. 13614712
MPSPTDEEAHQLSYLQKHIANIISLLAEPVEGQGDDSLVLSMESLEHIGFLVHYGDKGFDVPSLSQATPFFANSDPDMPAVPVPASQVNDWLLKDIASALESISNRISGKENGASNASDQNAAMADSSVALNKVSSNDRGPCIIEGVSKTSLFKQASDLKGRSVKVANCHDSVIYLLAPLRYATVYGCSDSTIVLGAAGKAVKVEHCERVHVIVATKRICIANCRECVFFLGVNQRPLIVGDNHKLQVAPYNTFYSHLEEHITEVGIQPTINKWNESLALGAIDPHDSLSHPTGASDKQAEPASCVDPDQFTTFLIPNWFAGEAIGSTKDNPFPLPDAYKAVQQTNLKNLEETRQSLRETPLEENRKRELTTAFHMYFKDWLYATGNIRQLYCLQGD

SEQ ID NO: 104297 - DNA, 1234 bp, Arabidopsis thaliana
  misc_feature (1)..(1234): Ceres Seq. ID no. 13614725
  misc_feature (1)..(1234): Ortholog of  Ceres SEQ ID NO 15171556 as cited in SEQ ID NO 59687
  misc_feature (1)..(1234): Ortholog of  Ceres SEQ ID NO 15177935 as cited in SEQ ID NO 60258
  misc_feature (1)..(1234): Ortholog of  Ceres SEQ ID NO 13659033 as cited in SEQ ID NO 66372
  misc_feature (1)..(1234): Ortholog of  Ceres SEQ ID NO 12625899 as cited in SEQ ID NO 69079
  misc_feature (1)..(1234): Ortholog of  Ceres SEQ ID NO 15180051 as cited in SEQ ID NO 0
acaccaatctcgctctcaccacaaaacagagaatctcagatcgaagaagcaaagaaagagagaatgggtttcacttcccgaggaaacccttcttttctcttcttcttcttcttcttcctctgtctctccacagtctctgcttacatcaacagcacaagcagcaataatgatgaagtaagaagagagctagcttctgggagatgtaattggtttagagggaattgggtttatgatgtaaagtacccactttatgatccttataaatgtccattcatagatccacagtttaactgtaagaagtatggtcgtcctgacaatgcttaccttaagtatcgatggcaaccatcttcttgctctctccccagattcaatgggttgtatttcttgaggaggatgagagggaagaagataatgttcgttggagattcactaagcacaaacatgtggcaatctcttgcttgtctaattcactcttgggttcctaacactcgttacactcttattcgccaaaagggtcttgcttcacttacctttgaggaatacggagtgacgttgttgctatacagaacacagttcttggtagatttgaatgtggagaaagttgggagagtgcttaagcttgattccattaagcaagggaatatgtggagaggcatggacgttttgattttcaactcgtggcattggtggacacacaccgaacacattcagccgtgggattacatggaagatgggaataggttgtacaaagacatgaaccggctcgttgctttctacaaaggaatgaccacttgggctcgatgggttaatgcttacgtcgatccttctaagactaaagtcttcttcaacggcgtgtctcctactcattacgagggaaaggattggggagagccaatgaactcatgtaggagtcaaacgcagccattttacggaaggaagtatccaggagggacaccaatggcttgggtgattctaaacaaagtgatgaggagattgaagaaaccggtccattggctcgatataaccggtctgtctcagcttcgtaaagatgctcatccttctgctttcagtgggaaccatcctggtaatgactgtagccattggtgtctccctggtttgcctgatacttggaacttgctcttttactctactcttttctcttcttaattaattcctttctcatcaatgtataagttaacttaaaacaacaatcaattatttttagttatctttc

SEQ ID NO: 104298 - protein, 388 aa, Arabidopsis thaliana
  peptide (1)..(388): Ceres Seq. ID no. 13614726
TPISLSPQNRESQIEEAKKERMGFTSRGNPSFLFFFFFFLCLSTVSAYINSTSSNNDEVRRELASGRCNWFRGNWVYDVKYPLYDPYKCPFIDPQFNCKKYGRPDNAYLKYRWQPSSCSLPRFNGLYFLRRMRGKKIMFVGDSLSTNMWQSLACLIHSWVPNTRYTLIRQKGLASLTFEEYGVTLLLYRTQFLVDLNVEKVGRVLKLDSIKQGNMWRGMDVLIFNSWHWWTHTEHIQPWDYMEDGNRLYKDMNRLVAFYKGMTTWARWVNAYVDPSKTKVFFNGVSPTHYEGKDWGEPMNSCRSQTQPFYGRKYPGGTPMAWVILNKVMRRLKKPVHWLDITGLSQLRKDAHPSAFSGNHPGNDCSHWCLPGLPDTWNLLFYSTLFSS

SEQ ID NO: 104299 - protein, 367 aa, Arabidopsis thaliana
  peptide (1)..(367): Ceres Seq. ID no. 13614727
MGFTSRGNPSFLFFFFFFLCLSTVSAYINSTSSNNDEVRRELASGRCNWFRGNWVYDVKYPLYDPYKCPFIDPQFNCKKYGRPDNAYLKYRWQPSSCSLPRFNGLYFLRRMRGKKIMFVGDSLSTNMWQSLACLIHSWVPNTRYTLIRQKGLASLTFEEYGVTLLLYRTQFLVDLNVEKVGRVLKLDSIKQGNMWRGMDVLIFNSWHWWTHTEHIQPWDYMEDGNRLYKDMNRLVAFYKGMTTWARWVNAYVDPSKTKVFFNGVSPTHYEGKDWGEPMNSCRSQTQPFYGRKYPGGTPMAWVILNKVMRRLKKPVHWLDITGLSQLRKDAHPSAFSGNHPGNDCSHWCLPGLPDTWNLLFYSTLFSS

SEQ ID NO: 104300 - protein, 257 aa, Arabidopsis thaliana
  peptide (1)..(257): Ceres Seq. ID no. 13614728
MRGKKIMFVGDSLSTNMWQSLACLIHSWVPNTRYTLIRQKGLASLTFEEYGVTLLLYRTQFLVDLNVEKVGRVLKLDSIKQGNMWRGMDVLIFNSWHWWTHTEHIQPWDYMEDGNRLYKDMNRLVAFYKGMTTWARWVNAYVDPSKTKVFFNGVSPTHYEGKDWGEPMNSCRSQTQPFYGRKYPGGTPMAWVILNKVMRRLKKPVHWLDITGLSQLRKDAHPSAFSGNHPGNDCSHWCLPGLPDTWNLLFYSTLFSS

SEQ ID NO: 104301 - DNA, 1132 bp, Arabidopsis thaliana
  misc_feature (1)..(1132): Ceres Seq. ID no. 13614729
  misc_feature (1)..(1132): Ortholog of  Ceres SEQ ID NO 13504028 as cited in SEQ ID NO 56107
ttctttcttcgtcttcaacttcttctaccgagattgattctatttcttccggatcttacgcaaccattactctcacctcaggcagaaatgtttctatgttgaagaagaaggaaatggttataagtcttggaagttttagtatcatcagttgtgtcttagaaaactgggaacggctcttttcctctgttaccatagctgagttagcttgagaaacttttgaattggattcagatcatgccttactttgctcagaggctttacaatacttgcaaggcgtctttctcttcagacggaccaataacagaagatgctctggagaaggttcgcaatgtcttggagaaaatcaagccatctgatgttggaattgagcaggatgctcaattggcacggtccaggtctggtcctctcaatgaacgcaatggaagtaatcagtctcccccagcaataaagtatcttcatttgcatgagtgtgacagtttctctataggaatcttctgtatgccaccttcttctatgatacctcttcataaccatccgggcatgaccgtgctaagcaagctcgtttatggttcaatgcatgtgaagtcatatgattggctagagcctcaactgaccgaaccagaggatccatcacaagcaagacctgctaaactggtgaaggatactgagatgacggctcaaagcccagtaacaacattatatccgaaaagtggtggcaacattcactgtttcaaagccatcacccattgtgctattcttgacatcttagctccaccttactcttcagagcatgatcggcattgcacttacttccggaaatccagaagagaagacttaccaggtgaattagaagtggatggagaagtggtcacagacgtgacatggcttgaggaatttcaaccgcctgatgactttgtgatacgacgaattccgtacagaggtcctgtcattagaacttgatgatgatctaatctttacttgtcacataatttgggcggcttcgggtttttattttttatttatattcctttcggaaataatttggggggtctttttatattgcaaacgggattgtacatactaatttgtgatacaccgtgtgtctccgtttcattatattgcaaaagacttc

SEQ ID NO: 104302 - protein, 241 aa, Arabidopsis thaliana [sequence omitted]

SEQ ID NO: 104303 - protein, 153 aa, Arabidopsis thaliana; identical to SEQ ID NO: 40249
  peptide (1)..(153): Ceres Seq. ID no. 13614731

SEQ ID NO: 104304 - protein, 148 aa, Arabidopsis thaliana; identical to SEQ ID NO: 40250
  peptide (1)..(148): Ceres Seq. ID no. 13614732

SEQ ID NO: 104305 - DNA, 1523 bp, Arabidopsis thaliana
  misc_feature (1)..(1523): Ceres Seq. ID no. 13614733
  misc_feature (1)..(1523): Ortholog of  Ceres SEQ ID NO 15176835 as cited in SEQ ID NO 1046
  misc_feature (1)..(1523): Ortholog of  Ceres SEQ ID NO 14315403 as cited in SEQ ID NO 59259
aaaatcacatttcacacgaaaaacctcgagtgagtgaagaaacaatggcagctatgaagctcctactctctcaagctcgccgccaaggtctaatcaaacccttttcgtctccatttcaacaaatcccaagactcttctcttcatcttcatcttcatcttcatcttcatcttcatcatccgattcgaatccatctcccgattcaaacgaatctcgcaaaaaggctgttacaatcgagccagtatcgtacgcggccaaacccaaggatcagaaatctgaaccgaaaaatgttgaatcgacggagaaccttcagtctccagaatcagcgaactggactcgtgaagaaatccgatatgtgaaagactctccttcgatcaatccggtttcttacgctcagcgtgtggctccacttccggaggatcgtgtcgccggtgagaatgaaggagatagaactccagaggagatggagagggagaggaagaggattgaattagagaatcgagctagaagaaggtttttaagagctaatgctgttgaagaagatacttcttcacttcctttgccaactttgcttaaaccagagttgaagcatggaaagaaacctattttcgatctcatggaggccattagagagattaagggcaatgccaaggcgaaatttgatgaaactcttgaggcgcatgtgagattgggcattgaaaaaggaagatctgagctgatagttcgtggtactttggctctaccccactctgttaagaaggatgtgaaagtggctttctttgccgagggagctgatgcagaggatgcaaaagctgcaggagctgatgtcgttggtggtcttgagcttattgaagagatcttgaaaagtggcaagattgactttgatagatgtcttgcaactccaaaaatgatgccccgtgtttacaagatatcaagaattcttaacaatcatggtttgatgccaaaccccaaacaaggtagtgtgaccaaggatgttacgaaagcagtcaaagacgcaaaagctggacataccaaatttagaatggataaaacgtctattcttcatgtgccacttggaaagatgagcttttctgaagaggctttacgagagaatgttggtgcgtttatgaacgcccttttgctagcgaagcctgctggattgaaaaagacttcaaaatatgctggttatgtgaatgcattccacttatgcagtacgatgggaaagggttatccagtatcgatacagtcgttatccagagcagcggacctccataccaaattgcagctcaagtgagctagtggagtccaaaagattaatcttaatcatcccgtaaaagttttttttactgttttccaaatgctgaatctttgaaaacattatgatttgttgtctcttaggtagtctattgctcaattgatcgaattggcttctgtccttttctcctttgtttttgttgtttgagagcttatcatccactttccatagaggcccttcacttgaataaaacatcataaatttttgtcc

SEQ ID NO: 104306 - protein, 429 aa, Arabidopsis thaliana; identical to SEQ ID NO: 26234
  peptide (1)..(429): Ceres Seq. ID no. 13614734

SEQ ID NO: 104307 - protein, 415 aa, Arabidopsis thaliana; identical to SEQ ID NO: 26235
  peptide (1)..(415): Ceres Seq. ID no. 13614735

SEQ ID NO: 104308 - protein, 412 aa, Arabidopsis thaliana; identical to SEQ ID NO: 26236
  peptide (1)..(412): Ceres Seq. ID no. 13614736

SEQ ID NO: 104309 - DNA, 850 bp, Arabidopsis thaliana
  misc_feature (1)..(850): Ceres Seq. ID no. 13614744
  misc_feature (1)..(850): Ortholog of  Ceres SEQ ID NO 15169858 as cited in SEQ ID NO 55543
atcttctaacaaacaccaaaaaaacagagaaaacaaactttaaacaatggctggagaggagttgttgaaactgttcgagcaaaactggtcagagaggccaatcttcaagaaagacaaagagaatctgaatggaaaaagtagagagaagcgtggagaaaaagagattctagaggaacgacgagaagaagaagcactgaagaattttccggtgagctttcttgtagagagggctatgagtgacgagacgatgatgacgacgagttccaagacaagtttgtttagttcttcatcagatgatttgttcttgtctcctagatcggtcttacccgttaaaccaacgccgatgaagcttcagacgatcctctccggaaaagaagtcaacgcgttcacgattgcggaaagagagagactactttcagagaaggaagagcagaggaagaagaagaagaagaagagtaatgtgagaacaagaaagggaaagagtatgtcggatttggagtacgaggagcttaaagggtttatggatctaggttttgtcttttccgaggatgaccataaagactccgatctagtttcgattcttcctgggttacagagattggtgaagaaagatgatggagtaacaaaagaagaagaagaagaagaagaagaagacaaaatcggtggaaacagagcagcgagaccgtatttgtcggaagcgtgggatcattgtggaggaagaaaaggaaaaaaacaaatcacgccggagattaagtggagagttccggcgccggcggcggctagcgaagttgacttaaaagataatctaaggctttgggctcatgctgtggcctcgactattcgaagttaa

SEQ ID NO: 104310 - protein, 267 aa, Arabidopsis thaliana
  peptide (1)..(267): Ceres Seq. ID no. 13614745
MAGEELLKLFEQNWSERPIFKKDKENLNGKSREKRGEKEILEERREEEALKNFPVSFLVERAMSDETMMTTSSKTSLFSSSSDDLFLSPRSVLPVKPTPMKLQTILSGKEVNAFTIAERERLLSEKEEQRKKKKKKSNVRTRKGKSMSDLEYEELKGFMDLGFVFSEDDHKDSDLVSILPGLQRLVKKDDGVTKEEEEEEEEDKIGGNRAARPYLSEAWDHCGGRKGKKQITPEIKWRVPAPAAASEVDLKDNLRLWAHAVASTIRS

SEQ ID NO: 104311 - protein, 205 aa, Arabidopsis thaliana
  peptide (1)..(205): Ceres Seq. ID no. 13614746
MSDETMMTTSSKTSLFSSSSDDLFLSPRSVLPVKPTPMKLQTILSGKEVNAFTIAERERLLSEKEEQRKKKKKKSNVRTRKGKSMSDLEYEELKGFMDLGFVFSEDDHKDSDLVSILPGLQRLVKKDDGVTKEEEEEEEEDKIGGNRAARPYLSEAWDHCGGRKGKKQITPEIKWRVPAPAAASEVDLKDNLRLWAHAVASTIRS

SEQ ID NO: 104312 - protein, 200 aa, Arabidopsis thaliana
  peptide (1)..(200): Ceres Seq. ID no. 13614747
MMTTSSKTSLFSSSSDDLFLSPRSVLPVKPTPMKLQTILSGKEVNAFTIAERERLLSEKEEQRKKKKKKSNVRTRKGKSMSDLEYEELKGFMDLGFVFSEDDHKDSDLVSILPGLQRLVKKDDGVTKEEEEEEEEDKIGGNRAARPYLSEAWDHCGGRKGKKQITPEIKWRVPAPAAASEVDLKDNLRLWAHAVASTIRS

SEQ ID NO: 104313 - DNA, 802 bp, Arabidopsis thaliana
  misc_feature (1)..(802): Ceres Seq. ID no. 13614752
  misc_feature (1)..(802): Ortholog of  Ceres SEQ ID NO 13584646 as cited in SEQ ID NO 60715
agttgaacatataacaacattcataacaatggctggaggtacagctctaactccaacctctgtaggatccaagtctgttccaatgaggaaccatgaagcaacagagagaggcaacaccaacaacaacctgagagcattacccaaagccgtccaaccggtttcatcaatcgaaggagagatggctaagaggccacgtggcagacccgctggctccaagaacaaacccaaaccaccaatcattgtgactcacgacagtccaaattccctcagagctaacgccgttgagatcagctcaggttgtgacatctgtgagactttatcggattttgcaagaaggaaacagagaggtctctgcattctcagtgccaatggttgtgtcaccaatgtgacattaaggcaaccagcttcatcaggagcaattgtcacattacacggacgttacgagatcctctcattgcttggatcaatcttgcctccaccagcaccacttggaataactggtctgaccatttacttagccggacctcaaggacaggttgttggtggaggagtggttggtgggctaatcgcatctggtcctgttgttctcatggctgcatctttcatgaatgctgtttttgatcgtcttcctatggatgatgatgaagctgcctctatgcagaaccagcagtactaccagaatggaagatcccgtcctttagatgacattcatggactgcctcaaaatctgctcactaatggaaactcggcttctgatatctactcttgggggcctgcgcagcgtgtcatgtcgaaaccttaa

SEQ ID NO: 104314 - protein, 266 aa, Arabidopsis thaliana
  peptide (1)..(266): Ceres Seq. ID no. 13614753
VEHITTFITMAGGTALTPTSVGSKSVPMRNHEATERGNTNNNLRALPKAVQPVSSIEGEMAKRPRGRPAGSKNKPKPPIIVTHDSPNSLRANAVEISSGCDICETLSDFARRKQRGLCILSANGCVTNVTLRQPASSGAIVTLHGRYEILSLLGSILPPPAPLGITGLTIYLAGPQGQVVGGGVVGGLIASGPVVLMAASFMNAVFDRLPMDDDEAASMQNQQYYQNGRSRPLDDIHGLPQNLLTNGNSASDIYSWGPAQRVMSKP

SEQ ID NO: 104315 - protein, 257 aa, Arabidopsis thaliana
  peptide (1)..(257): Ceres Seq. ID no. 13614754
MAGGTALTPTSVGSKSVPMRNHEATERGNTNNNLRALPKAVQPVSSIEGEMAKRPRGRPAGSKNKPKPPIIVTHDSPNSLRANAVEISSGCDICETLSDFARRKQRGLCILSANGCVTNVTLRQPASSGAIVTLHGRYEILSLLGSILPPPAPLGITGLTIYLAGPQGQVVGGGVVGGLIASGPVVLMAASFMNAVFDRLPMDDDEAASMQNQQYYQNGRSRPLDDIHGLPQNLLTNGNSASDIYSWGPAQRVMSKP

SEQ ID NO: 104316 - protein, 239 aa, Arabidopsis thaliana
  peptide (1)..(239): Ceres Seq. ID no. 13614755
MRNHEATERGNTNNNLRALPKAVQPVSSIEGEMAKRPRGRPAGSKNKPKPPIIVTHDSPNSLRANAVEISSGCDICETLSDFARRKQRGLCILSANGCVTNVTLRQPASSGAIVTLHGRYEILSLLGSILPPPAPLGITGLTIYLAGPQGQVVGGGVVGGLIASGPVVLMAASFMNAVFDRLPMDDDEAASMQNQQYYQNGRSRPLDDIHGLPQNLLTNGNSASDIYSWGPAQRVMSKP

SEQ ID NO: 104317 - DNA, 940 bp, Arabidopsis thaliana
  misc_feature (1)..(940): Ceres Seq. ID no. 13614760
  misc_feature (1)..(940): Ortholog of  Ceres SEQ ID NO 13654054 as cited in SEQ ID NO 67735
  misc_feature (1)..(940): Ortholog of  Ceres SEQ ID NO 15180245 as cited in SEQ ID NO 0
ctcagagtttcttctcctctgtgaatctccgacaatggcgatagctatggcggttgtttctttcccatctctgctcaacaaaacaaccttatcctcttcactcttcactcccactttcctcccggcgaaatcctcttcacttctcatcaaatcatcaccaaaaaccagattcgtggtttcatcatccatggaagctggaatcggagtaatggggtcaaaactcgggatgatgagtttcttcgaagaagacggcacagtagttccagtaacagtcgtcggattccgcgaaggtaacatcgtaacccaaatcaaaaccctagccacagacggttacgacgcggttcaaatcggttaccgtcgtgtacgcgacaaaaagctaactaaaccggaaaccggtcatctccaaaaagccggtacaatcccaatgagacatctccaagagttcagattaacaaacatcgaaggattcgaaccgaaccagaagcttgtgttcgatgagatattcaaagaaggtgatctcgttgatgtagctggaaccacaattggtaaagggtttcaaggaggaatcaaaaggcatcatttcaagagaggtcagatgactcatggttccaagagtcatcgagctttgggttcgattggtgctggtactactccgggaagagtttataaagggaagaagatgcctggaagaatgggagggacgaggacaaagattaggaagcttaagattgttaaagttgataaggagcttaatgttgtcatgatcaaaggtgctttgcctggtaagcctgggaatcttcttcgtattactcccgctaaaatcgtcggagttaacattcccaagaactagtagagaagagactctgttttgttttgtaatgttgacttgtgtttatccattccttgaaaatttgtatcgaattgctaaatcacagtttct

SEQ ID NO: 104318 - protein, 282 aa, Arabidopsis thaliana
  peptide (1)..(282): Ceres Seq. ID no. 13614761
SEFLLLCESPTMAIAMAVVSFPSLLNKTTLSSSLFTPTFLPAKSSSLLIKSSPKTRFVVSSSMEAGIGVMGSKLGMMSFFEEDGTVVPVTVVGFREGNIVTQIKTLATDGYDAVQIGYRRVRDKKLTKPETGHLQKAGTIPMRHLQEFRLTNIEGFEPNQKLVFDEIFKEGDLVDVAGTTIGKGFQGGIKRHHFKRGQMTHGSKSHRALGSIGAGTTPGRVYKGKKMPGRMGGTRTKIRKLKIVKVDKELNVVMIKGALPGKPGNLLRITPAKIVGVNIPKN

SEQ ID NO: 104319 - protein, 271 aa, Arabidopsis thaliana
  peptide (1)..(271): Ceres Seq. ID no. 13614762
MAIAMAVVSFPSLLNKTTLSSSLFTPTFLPAKSSSLLIKSSPKTRFVVSSSMEAGIGVMGSKLGMMSFFEEDGTVVPVTVVGFREGNIVTQIKTLATDGYDAVQIGYRRVRDKKLTKPETGHLQKAGTIPMRHLQEFRLTNIEGFEPNQKLVFDEIFKEGDLVDVAGTTIGKGFQGGIKRHHFKRGQMTHGSKSHRALGSIGAGTTPGRVYKGKKMPGRMGGTRTKIRKLKIVKVDKELNVVMIKGALPGKPGNLLRITPAKIVGVNIPKN

SEQ ID NO: 104320 - protein, 267 aa, Arabidopsis thaliana
  peptide (1)..(267): Ceres Seq. ID no. 13614763
MAVVSFPSLLNKTTLSSSLFTPTFLPAKSSSLLIKSSPKTRFVVSSSMEAGIGVMGSKLGMMSFFEEDGTVVPVTVVGFREGNIVTQIKTLATDGYDAVQIGYRRVRDKKLTKPETGHLQKAGTIPMRHLQEFRLTNIEGFEPNQKLVFDEIFKEGDLVDVAGTTIGKGFQGGIKRHHFKRGQMTHGSKSHRALGSIGAGTTPGRVYKGKKMPGRMGGTRTKIRKLKIVKVDKELNVVMIKGALPGKPGNLLRITPAKIVGVNIPKN

SEQ ID NO: 104321 - DNA, 891 bp, Arabidopsis thaliana
  misc_feature (1)..(891): Ceres Seq. ID no. 13614767
  misc_feature (1)..(891): Ortholog of  Ceres SEQ ID NO 12619999 as cited in SEQ ID NO 66123
  misc_feature (1)..(891): Ortholog of  Ceres SEQ ID NO 13656436 as cited in SEQ ID NO 69154
gaaatgtcagacgacgacgagagaggcgaagagtacctcttcaagattgttatcatcggtgattccgccgtcggcaaatccaatctcctcactcgctacgcccgtaacgagttcaatcccaattccaaagccactatcggcgtcgagtttcagactcagagcatgctcatcgacggcaaagaggtcaaagctcagatttgggataccgccggtcaggaacgcttccgcgccgttacatctgcttattaccgtggcgccgttggagccctcgtcgtctacgatatcactcgtagctccactttcgaaaacgtcggtcgctggctcgatgagctcaacactcattctgatacaacagtagcaaaaatgcttattgggaacaaatgtgatctcgagagcataagagcggtgagtgttgaggaaggcaagagtcttgctgagtctgaaggtttgtttttcatggagacctctgcgttggactcgaccaatgtaaagacggctttcgagatggttattcgggagatctatagcaacattagtcgaaagcaattgaactctgattcttacaaagaggagctgactgtgaatcgtgttagcttggttaagaacgagaacgaagggacaaagacattctcttgctgttcgaggtaacatctttgtaacggtttctctttgtcctgaggattggtttcgggttgaattgtgttcctggtaaacttatagaaaggcagagatatattcttatagttctcagttaaagtaaaagaagaagagagaaagatgttttgagtttctttgttacgcatacagaaaaagtttggttagtgtataagttatgttctcatttgtaacttttgtaaacttatgattgttaaatcaattttgatattttcc

SEQ ID NO: 104322 - protein, 215 aa, Arabidopsis thaliana
  peptide (1)..(215): Ceres Seq. ID no. 13614768
EMSDDDERGEEYLFKIVIIGDSAVGKSNLLTRYARNEFNPNSKATIGVEFQTQSMLIDGKEVKAQIWDTAGQERFRAVTSAYYRGAVGALVVYDITRSSTFENVGRWLDELNTHSDTTVAKMLIGNKCDLESIRAVSVEEGKSLAESEGLFFMETSALDSTNVKTAFEMVIREIYSNISRKQLNSDSYKEELTVNRVSLVKNENEGTKTFSCCSR

SEQ ID NO: 104323 - protein, 214 aa, Arabidopsis thaliana; identical to SEQ ID NO: 24892
  peptide (1)..(214): Ceres Seq. ID no. 13614769

SEQ ID NO: 104324 - protein, 161 aa, Arabidopsis thaliana; identical to SEQ ID NO: 24893
  peptide (1)..(161): Ceres Seq. ID no. 13614770

SEQ ID NO: 104325 - DNA, 1721 bp, Arabidopsis thaliana
  misc_feature (1)..(1721): Ceres Seq. ID no. 13614771
  misc_feature (1)..(1721): Ortholog of  Ceres SEQ ID NO 15170659 as cited in SEQ ID NO 67270
  misc_feature (1)..(1721): Ortholog of  Ceres SEQ ID NO 15177722 as cited in SEQ ID NO 0
ataccctcttcttcctcatctctctctgcttagtttctgaatgtgaagcttgaggagagttctatatccttttgaattgctgtaatttggatcttacatagacgagagcagtccttctggatctacgcggtttaggcgggaggaggttttggtattgggaatgcgtttttgagctgatcttatacgtctattcaggtttagctcagtctagaattggttggcttgggaaaggtcgatgaagaacgggatggctgagtgcagcgtatgtcgttcaaggttggtttctcccagtagcaaagctatttcaagggcttatgacaactacaactacaagattagagtatcctcaaaacaacgagctctcaatgtctttttggtagtcggtgactgcatgctagttggtctacagcccgtcttagtgtacatgtctaaagtggatggaaagttcaactttagtcctattagcgtcaacttcttgacagaaatcgcgaaagttattttcgcgatggtcatgctattattccaggccaggcaccaaaaagttggagagaaacctctactatctctttccacgtttgtccaggcagctcggaacaatatgcttctcgctgttccagcagggttgtatgccattaataactatcttaagttcacaatgcagctatatttcaatcctgctactgtgaagatgctcagcaatctaaaagttctggtgattgctgtactactgaagatgataatgaagcgtcggttttccatcatacagtgggaagcacttgctttgttgctgatagggattagtataaatcagctgcgttctcttcctgaaggagctacaactgtggctgttccaattgctacgggtgcatacatatgtacctttatctttgttactgtcccatctttggcatctgtctacaacgagtatgctctaaagagtcagtatgacacaagcatttatctccagaacttatttctttatggttatggtgcgatattcaacttcctcggaatactaggaactgttatatataaaggtcctggcagttttgacatcctacaaggacattctagggctactatgtttctgatactgaacaacgcagcacaagggattctatcctcctttttcttcaaatatgcagatacaatcttgaagaaatattcgtccacagtagccacaatatttactggcatagcatctgcagcactctttggacatatattaacaatgaattttcttctgggaatttctatagttttcatttcaatgcatcagttcttttcacccctttcaaaagcaaaagacgaacaacaaaacggaaacatagagttagttgacgcaaaggatggccatagggctaaagactcattcatcaacatggcagcaggagcaactgaagaggctagtcaccgcattgaatcagatgacagagtgccacttcttcccagataaaaactttctcagcgatttagcttcaaaagaattcttttggccaaagattatttttagagatcagggaatttcgatcttatactacccgtacccgccggattcagcgcaataaacttcgtgagattgggtccttctctcaaagagtcagttaagttcgttaagaaacatctttaaagcctaaaacctgtattctttttcagatagaacaaaacaactctacacattacatgtaattttaaaataaatatatgtcacttaaaagcct

SEQ ID NO: 104326 - protein, 406 aa, Arabidopsis thaliana
  peptide (1)..(406): Ceres Seq. ID no. 13614772
MKNGMAECSVCRSRLVSPSSKAISRAYDNYNYKIRVSSKQRALNVFLVVGDCMLVGLQPVLVYMSKVDGKFNFSPISVNFLTEIAKVIFAMVMLLFQARHQKVGEKPLLSLSTFVQAARNNMLLAVPAGLYAINNYLKFTMQLYFNPATVKMLSNLKVLVIAVLLKMIMKRRFSIIQWEALALLLIGISINQLRSLPEGATTVAVPIATGAYICTFIFVTVPSLASVYNEYALKSQYDTSIYLQNLFLYGYGAIFNFLGILGTVIYKGPGSFDILQGHSRATMFLILNNAAQGILSSFFFKYADTILKKYSSTVATIFTGIASAALFGHILTMNFLLGISIVFISMHQFFSPLSKAKDEQQNGNIELVDAKDGHRAKDSFINMAAGATEEASHRIESDDRVPLLPR

SEQ ID NO: 104327 - protein, 402 aa, Arabidopsis thaliana
  peptide (1)..(402): Ceres Seq. ID no. 13614773
MAECSVCRSRLVSPSSKAISRAYDNYNYKIRVSSKQRALNVFLVVGDCMLVGLQPVLVYMSKVDGKFNFSPISVNFLTEIAKVIFAMVMLLFQARHQKVGEKPLLSLSTFVQAARNNMLLAVPAGLYAINNYLKFTMQLYFNPATVKMLSNLKVLVIAVLLKMIMKRRFSIIQWEALALLLIGISINQLRSLPEGATTVAVPIATGAYICTFIFVTVPSLASVYNEYALKSQYDTSIYLQNLFLYGYGAIFNFLGILGTVIYKGPGSFDILQGHSRATMFLILNNAAQGILSSFFFKYADTILKKYSSTVATIFTGIASAALFGHILTMNFLLGISIVFISMHQFFSPLSKAKDEQQNGNIELVDAKDGHRAKDSFINMAAGATEEASHRIESDDRVPLLPR

SEQ ID NO: 104328 - protein, 354 aa, Arabidopsis thaliana
  peptide (1)..(354): Ceres Seq. ID no. 13614774
MLVGLQPVLVYMSKVDGKFNFSPISVNFLTEIAKVIFAMVMLLFQARHQKVGEKPLLSLSTFVQAARNNMLLAVPAGLYAINNYLKFTMQLYFNPATVKMLSNLKVLVIAVLLKMIMKRRFSIIQWEALALLLIGISINQLRSLPEGATTVAVPIATGAYICTFIFVTVPSLASVYNEYALKSQYDTSIYLQNLFLYGYGAIFNFLGILGTVIYKGPGSFDILQGHSRATMFLILNNAAQGILSSFFFKYADTILKKYSSTVATIFTGIASAALFGHILTMNFLLGISIVFISMHQFFSPLSKAKDEQQNGNIELVDAKDGHRAKDSFINMAAGATEEASHRIESDDRVPLLPR

SEQ ID NO: 104329 - DNA, 1357 bp, Arabidopsis thaliana
  misc_feature (1)..(1357): Ceres Seq. ID no. 13614779
  misc_feature (1)..(1357): Ortholog of  Ceres SEQ ID NO 13598443 as cited in SEQ ID NO 69024
gaaaagctctagcacaaaccaaacaccaaatctcatttcttcttcttcttctttttccacattttctgattagcagatcaaatgatgcttgttcgatctgtatttcgatctcagttgcgaccctctgtctcgggtggtctgcaatctgcttcttgctattcttcattatctgctgcttcagctgaagctgagaggactatcagagaaggtcccagaaacgattggagtagagatgaaatcaagtctgtttatgattctcctcttcttgacctcctcttccatggagctcaggttcatagacatgttcataacttcagggaggtacaacaatgtaccctcctctccataaagactggtggctgtagtgaagactgttcatattgtcctcagtcttcgagatatagcactggagttaaggcacaaagactcatgtctaaggacgctgtcattgatgctgctaagaaggcaaaagaagctgggagcacacgtttttgcatgggtgctgcttggcgagatacaattggacggaaaaccaacttcagccagattcttgaatacatcaaagaaataagaggcatggggatggaagtttgctgcaccttaggcatgattgagaaacaacaagcactagagctaaagaaggctggcctcactgcttataaccacaatcttgatacttcaagagagtactacccaaacgtcatcactactagaagttatgacgatcgccttgaaactcttagccatgttcgtgatgctggaatcaacgtttgttcaggaggaatcatagggcttggtgaggcagaggaagacagaataggtttattacacacgctggcaacacttccttctcaccctgagagtgttcccattaatgctctacttgcagtgaaaggcactcctcttgaagaccagaagccagttgagatatgggagatgatcaggatgattggaaccgcacgtattgtaatgccaaaagcgatggtgagactgtctgctggtagagtccggttctcaatgtccgaacaagctctctgtttccttgctggtgcaaactctatcttcaccggagagaagcttttaaccacaccaaacaatgattttgacgctgaccagctcatgttcaagacattaggcctcattcctaaaccgccaagtttctctgaagatgattctgaatcagaaaactgcgagaaagttgcttccgcttctcactaatatcattatccactttttttttttgtttggagtcgggacactatagagcagtcccttttactatgtagcatggtttgacgattttgtgatatcatttttcgttaatcgttattcgaagatgtctagatttctcatctga

SEQ ID NO: 104330 - protein, 378 aa, Arabidopsis thaliana; identical to SEQ ID NO: 37655
  peptide (1)..(378): Ceres Seq. ID no. 13614780

SEQ ID NO: 104331 - protein, 377 aa, Arabidopsis thaliana; identical to SEQ ID NO: 37656
  peptide (1)..(377): Ceres Seq. ID no. 13614781

SEQ ID NO: 104332 - protein, 262 aa, Arabidopsis thaliana; identical to SEQ ID NO: 37657
  peptide (1)..(262): Ceres Seq. ID no. 13614782

SEQ ID NO: 104333 - DNA, 1302 bp, Arabidopsis thaliana
  misc_feature (1)..(1302): Ceres Seq. ID no. 13614793
  misc_feature (1)..(1302): Ortholog of  Ceres SEQ ID NO 13597033 as cited in SEQ ID NO 63479
aaaggaagtatacgtttgtttctttgctctgaggtatcttcgtttgatacaaggcgaaatcgatcttcttcttcttcttcttcatccccttgcgttttccatctccatcgtctgctgaaaccatttgatcgatctctcaggttacttagaatggcacaagaagccgatgggatcagattggaccaaagacatgggaaggctcgagtgagagttggaagagtttggcgtcatgctcatgatggatctcatcactttgttgaatggaatgttagcatcagtcttctctctcactgtctctcttcttaccgtcttgatgataactctgatattgtcgccacagataccattaaaaacactgtttatgtgaaagccaaggaatgtggagatcggctctcggtggaggaatttgccatacttattgggaaacacttttgctcattttatccacaggtatttactgctatcgtgaatatcattgagaagccctgggagcgtgtctccatcgatggaaaaccacatttacatggttttaagcttgggtcagagaaccatactacagaggcaagagtagaaaagtctggtgcattaaacttaacttccggtattggaggactagctctactgaagacaacccagtcaggatttgagaggtttgtcagagacaaatacaccattctgcctgaaactcgtgagcgaatgctggccacagaggttaatgcatcttggaggtactcgtatgagtcagttgcaagcattccaacaaaaggactctactttagcgagaagttcatggacgttaagaaagttctgatggatactttctttggtccaccagaaactggtgtgtatagcccttctgtccaacgcactctctacctcatgggaagcgccgtactgaaaaggttcgctgatgtatcatcgattcacctaaaaatgccaaatattcattttctaccagtaaatctttcaacgaaggaaaacccttcaatggtgaagtttaaagatgatgtgtacctgccaaccgatgaacctcatggatctatagaagcaactctaagccgtataacctcgaaactatgaggttttaagacaatacatcatacatggaaatatcaaacacaatttcacaggttctgcaacttttggcgtttgcctcgtttatgaaataacaatttaaatgaagtgtgtaaggtcaacttttggcttttgttgcaagaataatactgtaactgcaaacagtttcacataaaaatgtagcttacatatattatcactgattcgcagtcatgttacatttttacc

SEQ ID NO: 104334 - protein, 359 aa, Arabidopsis thaliana; identical to SEQ ID NO: 24323
  peptide (1)..(359): Ceres Seq. ID no. 13614794

SEQ ID NO: 104335 - protein, 309 aa, Arabidopsis thaliana; identical to SEQ ID NO: 24324
  peptide (1)..(309): Ceres Seq. ID no. 13614795

SEQ ID NO: 104336 - DNA, 1351 bp, Arabidopsis thaliana
  misc_feature (1)..(1351): Ceres Seq. ID no. 13614806
  misc_feature (1)..(1351): Ortholog of  Ceres SEQ ID NO 13594037 as cited in SEQ ID NO 55666
  misc_feature (1)..(1351): Ortholog of  Ceres SEQ ID NO 13657707 as cited in SEQ ID NO 66407
aaaagaaaagtagaaaccccaagaaaaaataaaaaaaataatgggtcatcgaacaagaatgatccttgtcctaaccctagttgtaatgtccatatggggttcggacgcatcagcaatgcaaaagacgaaattcgacgccccacttttgactgaaaaaatcgcgacaaatagatcgataattgtagatatcgaaggcaaaggagactacacttcggttcagaaagccatcgatgctgtccctgttggtaactctaattggattattgtccatgtccgtaaaggaatctacaaggagagagtgcacattccggagaacaagccgttcatattcatgaggggtaatggaaaaggaaaaacggtgatcgaatcttcgcaaagttcggtcgacaatgttgcttcagctactttcaaagtcgaggctaatcactttgtcgcttttggtatcagcatccgaaatgatgcacctgtcggaatggcattcacatctgagaaccaatcggtggcagcgtttgtggctgctgacaaagtagcgttttaccattgtgcgttctacagcttacacaacactttgtttgataacaaaggtagacattactaccatgagtgttacatccaaggctccatagacttcatcttcggtcgcgcaacttccattttcaacaattgtgagatatttgtgatatcagacaagagggtgaaaccgtatgggtcaatcacagcacaccatagggaaagcgcagaggaaaaaacgggttacgtgttcataagaggcaaagtgtacggaattgatgaggtttacttgggccgagccaaaggaccttattctcgagtcatctttgccaagacttacttgtccaagaccgttgtgcctgatggttggacaaactggagttaccatggctcgacccagaatctataccatggggagtataaatgtcatggaccaggagctgagaggcaaaagagatctgactgggccaaagatcttaccaaacaagaagttgagtctttcttgtccattgattttattgatggcacttcttggctccctgtttggcttcaggaaaagttttagagttccttatgctgtcgcgtttggcttttgacatttcgcgttttggtgtggcttggaaaaaaaacatatgaagaaagaagagtacttcatcctttcttcgacggtatactatacgaaatagttttctctcttttttttttgtgtacttctactctaaaatgttcttagagtgattggaaactcttatgttgtttgcaaacattatataagattgtttccatcttaataatatatgtaacctaaatttaaatcctataaatttaaaatattttcccg

SEQ ID NO: 104337 - protein, 344 aa, Arabidopsis thaliana; identical to SEQ ID NO: 29383
  peptide (1)..(344): Ceres Seq. ID no. 13614807

SEQ ID NO: 104338 - protein, 338 aa, Arabidopsis thaliana; identical to SEQ ID NO: 29384
  peptide (1)..(338): Ceres Seq. ID no. 13614808

SEQ ID NO: 104339 - protein, 329 aa, Arabidopsis thaliana; identical to SEQ ID NO: 29385
  peptide (1)..(329): Ceres Seq. ID no. 13614809

SEQ ID NO: 104340 - DNA, 1141 bp, Arabidopsis thaliana
  misc_feature (1)..(1141): Ceres Seq. ID no. 13614810
  misc_feature (1)..(1141): Ortholog of  Ceres SEQ ID NO 13594727 as cited in SEQ ID NO 52169
  misc_feature (1)..(1141): Ortholog of  Ceres SEQ ID NO 13596474 as cited in SEQ ID NO 62169
  misc_feature (1)..(1141): Ortholog of  Ceres SEQ ID NO 13598714 as cited in SEQ ID NO 62656
  misc_feature (1)..(1141): Ortholog of  Ceres SEQ ID NO 13596969 as cited in SEQ ID NO 63375
  misc_feature (1)..(1141): Ortholog of  Ceres SEQ ID NO 13597519 as cited in SEQ ID NO 64759
  misc_feature (1)..(1141): Ortholog of  Ceres SEQ ID NO 13597870 as cited in SEQ ID NO 64982
  misc_feature (1)..(1141): Ortholog of  Ceres SEQ ID NO 13595926 as cited in SEQ ID NO 67778
  misc_feature (1)..(1141): Ortholog of  Ceres SEQ ID NO 12567001 as cited in SEQ ID NO 0
aagtcatcttctctctctttttttagtgtgtgcaaagtcatcttctcttttaatatttacctaaaattccaaacaaaagagaaagttatgaaaccaaagagcaaagttgcagaatctacagctgcatcatgttttctcgtcatgagcttgttatgcagctgcattattggtgaccaaatggagactaataatgaaggcttgtcttacagttactacgagaaaacttgtcccaaagtcgaagagatagtgagatcttcactttcatcaatgtttatacttgatcctacttctcctgcagccttgctaaggcttatgtttcatgactgccaagttcagggatgtgacgcatcaatcctactcgagccaattagagaccaacagttcaccgagcttgattcagccaagaacttcggaatcagaaagagggacctggttggctctatcaaaacctcactagagcttgagtgtcccaagcaagtctcatgctctgacgtcatcatcctcgccgccagagacgccgtggctctcacgggaggcccactcatctccgtgccattaggacgaaaagactccctctccactccaagcaaacacgtggcagactctgagcttcctccctccactgctgacgttgacactaccttaagcctattcgctaacaaaggcatgaccatcgaagagtccgtggccatcatgggtgcacatacgataggagtcacacattgcaacaacgtattatcgcgtttcgataacgcaaacgcgacaagcgagaacatggatccacgttttcaaacgttcttgcgtgttgcttgtccagagttttctccaacttctcaagctgcggaagccacatttgtccccaacgatcaaacttcggtgatcttcgatacagcttattacgatgatgccatcgcgggacgtggcaatcttaggattgactcggagattggagctgatccacgtacacgtccatttgtggaagcgtttgcagctgatcaagaccgtttcttcaacgccttctcttccgcgtttgtaaaattgtcgtcttacaaagtgttaaccgggaatgaaggagtaattagaagcgtgtgtgacaaggttgattgatgtatatttataattatcaaatgttaaaaatatt

SEQ ID NO: 104341 - protein, 368 aa, Arabidopsis thaliana
  peptide (1)..(368): Ceres Seq. ID no. 13614811
KSSSLSFFSVCKVIFSFNIYLKFQTKEKVMKPKSKVAESTAASCFLVMSLLCSCIIGDQMETNNEGLSYSYYEKTCPKVEEIVRSSLSSMFILDPTSPAALLRLMFHDCQVQGCDASILLEPIRDQQFTELDSAKNFGIRKRDLVGSIKTSLELECPKQVSCSDVIILAARDAVALTGGPLISVPLGRKDSLSTPSKHVADSELPPSTADVDTTLSLFANKGMTIEESVAIMGAHTIGVTHCNNVLSRFDNANATSENMDPRFQTFLRVACPEFSPTSQAAEATFVPNDQTSVIFDTAYYDDAIAGRGNLRIDSEIGADPRTRPFVEAFAADQDRFFNAFSSAFVKLSSYKVLTGNEGVIRSVCDKVD

SEQ ID NO: 104342 - protein, 339 aa, Arabidopsis thaliana; identical to SEQ ID NO: 43049
  peptide (1)..(339): Ceres Seq. ID no. 13614812

SEQ ID NO: 104343 - protein, 321 aa, Arabidopsis thaliana; identical to SEQ ID NO: 43050
  peptide (1)..(321): Ceres Seq. ID no. 13614813

SEQ ID NO: 104344 - DNA, 1422 bp, Arabidopsis thaliana
  misc_feature (1)..(1422): Ceres Seq. ID no. 13614818
  misc_feature (1)..(1422): Ortholog of  Ceres SEQ ID NO 14314480 as cited in SEQ ID NO 52362
  misc_feature (1)..(1422): Ortholog of  Ceres SEQ ID NO 13593854 as cited in SEQ ID NO 53403
  misc_feature (1)..(1422): Ortholog of  Ceres SEQ ID NO 12581680 as cited in SEQ ID NO 55019
  misc_feature (1)..(1422): Ortholog of  Ceres SEQ ID NO 15172112 as cited in SEQ ID NO 59632
atcatcccttccattaagacctagggttttctctctctcccatcattctcttctcccgatctcatttccattacccaatcccgctccttttctctgattttgaatcgaacccttaatacccagaaatctcacggttccgaggagtgggtttttgggggttagggttttcgagagatgttgaatgtcaggttcattgatgaatctgttttctctctgcttcaagccattcgggcacgtctgtgataattccgaagctggatcgggtggtggtggtggcgtttctggtggaaccggcggtgaaggcaaagacggattgctttggttccgtgatctcggtaaatattgcggcggagatttctccatggctgtgattcaagccaatcaggttcttgaagatcagagccaggtcgaatccggtaattttgggacttttgttggtgtttacgatggtcatggtggtcctgaagctgctcgttatgtctgtgatcatctctttaaccattttcgagaaatatcagcggaaacacaaggagttgtgacgagagagacgatagaaagagcctttcatgcgacagaagaaggattcgcttccattgtgtcagagctgtggcaagaaataccaaatttggcaactgttggcacttgttgtttggttggagtgatatatcaaaatactctttttgtggcaagtcttggagattcacgggttgttcttggaaagaaaggcaactgtggcggactctctgctattcagctgtcgactgaacacaatgctaacaatgaagatattcgttgggaactcaaggacttacatcctgatgacccgcagatcgttgtgttcaggcatggagtttggagagttaagggcatcattcaggtatcgaggtctataggagacatgtacatgaaacggcccgaatttaacaaggagccaatcagtcaaaagttcagaattgcagagccaatgaaaagacccttgatgtctgcaacaccaacaatactctctcatcctctgcaccctaatgattcgtttctcatttttgcatctgatggtctttgggagcatttgactaacgaaaaagcagttgagattgttcataaccatccccgtgctggaagcgcaaagagactgataaaggcggctcttcacgaggcagcgaggaaacgtgagatgagatattcagatctaaggaagattgacaagaaagtgagacgacattttcatgatgacatcacggttatagtggtgttcttgaaccatgacctcatatcgagaggccacatcaactcaacccaagacacaacagtctctatacggagtgctcttgaacactgagaatcccaaacattttacaacaatgtttcttcttacttgattatatgacttttgcctagaatgaataaaaaaaaggcaacatatgg

SEQ ID NO: 104345 - protein, 384 aa, Arabidopsis thaliana
  peptide (1)..(384): Ceres Seq. ID no. 13614819
MSGSLMNLFSLCFKPFGHVCDNSEAGSGGGGGVSGGTGGEGKDGLLWFRDLGKYCGGDFSMAVIQANQVLEDQSQVESGNFGTFVGVYDGHGGPEAARYVCDHLFNHFREISAETQGVVTRETIERAFHATEEGFASIVSELWQEIPNLATVGTCCLVGVIYQNTLFVASLGDSRVVLGKKGNCGGLSAIQLSTEHNANNEDIRWELKDLHPDDPQIVVFRHGVWRVKGIIQVSRSIGDMYMKRPEFNKEPISQKFRIAEPMKRPLMSATPTILSHPLHPNDSFLIFASDGLWEHLTNEKAVEIVHNHPRAGSAKRLIKAALHEAARKREMRYSDLRKIDKKVRRHFHDDITVIVVFLNHDLISRGHINSTQDTTVSIRSALEH

SEQ ID NO: 104346 - protein, 379 aa, Arabidopsis thaliana
  peptide (1)..(379): Ceres Seq. ID no. 13614820
MNLFSLCFKPFGHVCDNSEAGSGGGGGVSGGTGGEGKDGLLWFRDLGKYCGGDFSMAVIQANQVLEDQSQVESGNFGTFVGVYDGHGGPEAARYVCDHLFNHFREISAETQGVVTRETIERAFHATEEGFASIVSELWQEIPNLATVGTCCLVGVIYQNTLFVASLGDSRVVLGKKGNCGGLSAIQLSTEHNANNEDIRWELKDLHPDDPQIVVFRHGVWRVKGIIQVSRSIGDMYMKRPEFNKEPISQKFRIAEPMKRPLMSATPTILSHPLHPNDSFLIFASDGLWEHLTNEKAVEIVHNHPRAGSAKRLIKAALHEAARKREMRYSDLRKIDKKVRRHFHDDITVIVVFLNHDLISRGHINSTQDTTVSIRSALEH

SEQ ID NO: 104347 - protein, 324 aa, Arabidopsis thaliana; identical to SEQ ID NO: 29304
  peptide (1)..(324): Ceres Seq. ID no. 13614821

SEQ ID NO: 104348 - DNA, 2304 bp, Arabidopsis thaliana
  misc_feature (1)..(2304): Ceres Seq. ID no. 13614833
  misc_feature (1)..(2304): Ortholog of  Ceres SEQ ID NO 14308455 as cited in SEQ ID NO 55108
cttcttcgtttctctctacctcactcatcgaagtgttagggtttcttcgatttggcagaatattatttcaactatctctgctgaactcgctttcctaacttctctctctgtcactctaactctttgtcggtaccaaattcttcttcactcgaagaactgtttaggtcaagtatgacttaattctgccaaatttcnggggtttattcaaagtncaaagtcaattgaacaaaactttttatcagataaactgaagcaatgtataccgagggagcctctgattttgtcattgaccagagcatgtattatcccgcttattactcttcaggttatgattcatctgtgggtcttcagggtgggcaaaatgaaaatgctccctatatctgctatacaccaagttatggatatgcacagtctccctacaatccctacaatccttacataccaggagcttcaataggcgttgattcttcttttgttggattccaacaatattactcagaccctccgtatgaaagtgctgcgtcttcgcctacttatgttccatatgttattcagcctgatatggtctcgaatagttcaacagactctttggtagcgaatggtggtcaatctgatggaagaggatccatgcagagaaatggttcagcaattgccggactcccaaaagatgctccaaagtctaccactactggccagtataaacagccaggaatccccaagaatgtttccacaacagcttctgcacattctctccagggaaaaactgcttacgcgaacacactcttgccttatgggaaatcagacattgctaatggggtctcatcaattgcttcatatagttataaaccttgttccaagatttatgatgccagaggtgataacaacacaactggaagtacatatacgagtgaacaaaatcgaggatcgagaacgagaagatcaagaaatcaactaattgtcaaagcatatacaaccaaagctggaaatgctgatgcggaaggaaatattgtgataaatcctgatcgatataataaagaagatttcagtattgaatacagcgatgccaggttttttgtgattaagtcgtatagtgaagatgatgttcacaagagcatcaaatatggtgtctggtcatctacattgaatgggaacaagaaattgcagagtgtatatgaagatgctcagagaatagccactgagaagtctcgtgaatgtcctattttcttattcttttctgtcaattccagtggtctgttctgtggcgtggctgagatgaccggtccagtttccttcgaccgagacatggatttttggcagcaagacaaatggagtggaagctttcctgtcaagtggcacattattaaagatgttcctaatagctatttcaggcacattattttacataataacgagaataagccagtgaccaacagccgagacacacaagagataatactgaaacaaggactcgaggtgctaaaactattcaaacatcatgcggaaaagacttcactattagatgattttatgtactacgaagaccgccagagactcatgcaggaagagagagctagacttccatttaggacctttcgcaggccatttcccgtgctcaatctagatttttctgacagaagcaagaaaagctccaaggatgtcgttaagaagccttcagtgacctctgcagaaacaaaggttgtgcagttaaaaaactcagatggggatgaaaagagcaatacacaggaagcaacagacgattctactccttccactctgaagtttggctctctcgccattaaaccaactgctggtaccacctttaacccaacccaacccaagcctaaaccgaccccatctctcggctctgaccacaagtcagactcttctgaagaggttactgggtctctggctgatgacattgtcagtgtaggatcgttgcccataaaagtaaagggatctaaagaattatcctcgaagatcgcagcggtgggtacaagtcctctctcaactcaagatcagttcagaagtaaaccagggttttgacattgtctttgtctaacttgtttatgcataatagaaagcatggtcgatatggttcgagaaagagaaagagattgagtatgtatagattgggtggttttaccttttaaatggtctgattggtcgtttgagaatccttgtttatcgtctcagtttggacaaatgattgttgccagtggttgcgttttggtttgttgggtttgattaaacagttggttccgtcttttgatcgaaatttatgtgtttgtcatgctatattaatgt

SEQ ID NO: 104349 - protein, 595 aa, Arabidopsis thaliana
  peptide (1)..(595): Ceres Seq. ID no. 13614834
MYTEGASDFVIDQSMYYPAYYSSGYDSSVGLQGGQNENAPYICYTPSYGYAQSPYNPYNPYIPGASIGVDSSFVGFQQYYSDPPYESAASSPTYVPYVIQPDMVSNSSTDSLVANGGQSDGRGSMQRNGSAIAGLPKDAPKSTTTGQYKQPGIPKNVSTTASAHSLQGKTAYANTLLPYGKSDIANGVSSIASYSYKPCSKIYDARGDNNTTGSTYTSEQNRGSRTRRSRNQLIVKAYTTKAGNADAEGNIVINPDRYNKEDFSIEYSDARFFVIKSYSEDDVHKSIKYGVWSSTLNGNKKLQSVYEDAQRIATEKSRECPIFLFFSVNSSGLFCGVAEMTGPVSFDRDMDFWQQDKWSGSFPVKWHIIKDVPNSYFRHIILHNNENKPVTNSRDTQEIILKQGLEVLKLFKHHAEKTSLLDDFMYYEDRQRLMQEERARLPFRTFRRPFPVLNLDFSDRSKKSSKDVVKKPSVTSAETKVVQLKNSDGDEKSNTQEATDDSTPSTLKFGSLAIKPTAGTTFNPTQPKPKPTPSLGSDHKSDSSEEVTGSLADDIVSVGSLPIKVKGSKELSSKIAAVGTSPLSTQDQFRSKPGF

SEQ ID NO: 104350 - protein, 581 aa, Arabidopsis thaliana
  peptide (1)..(581): Ceres Seq. ID no. 13614835
MYYPAYYSSGYDSSVGLQGGQNENAPYICYTPSYGYAQSPYNPYNPYIPGASIGVDSSFVGFQQYYSDPPYESAASSPTYVPYVIQPDMVSNSSTDSLVANGGQSDGRGSMQRNGSAIAGLPKDAPKSTTTGQYKQPGIPKNVSTTASAHSLQGKTAYANTLLPYGKSDIANGVSSIASYSYKPCSKIYDARGDNNTTGSTYTSEQNRGSRTRRSRNQLIVKAYTTKAGNADAEGNIVINPDRYNKEDFSIEYSDARFFVIKSYSEDDVHKSIKYGVWSSTLNGNKKLQSVYEDAQRIATEKSRECPIFLFFSVNSSGLFCGVAEMTGPVSFDRDMDFWQQDKWSGSFPVKWHIIKDVPNSYFRHIILHNNENKPVTNSRDTQEIILKQGLEVLKLFKHHAEKTSLLDDFMYYEDRQRLMQEERARLPFRTFRRPFPVLNLDFSDRSKKSSKDVVKKPSVTSAETKVVQLKNSDGDEKSNTQEATDDSTPSTLKFGSLAIKPTAGTTFNPTQPKPKPTPSLGSDHKSDSSEEVTGSLADDIVSVGSLPIKVKGSKELSSKIAAVGTSPLSTQDQFRSKPGF

SEQ ID NO: 104351 - protein, 493 aa, Arabidopsis thaliana
  peptide (1)..(493): Ceres Seq. ID no. 13614836
MVSNSSTDSLVANGGQSDGRGSMQRNGSAIAGLPKDAPKSTTTGQYKQPGIPKNVSTTASAHSLQGKTAYANTLLPYGKSDIANGVSSIASYSYKPCSKIYDARGDNNTTGSTYTSEQNRGSRTRRSRNQLIVKAYTTKAGNADAEGNIVINPDRYNKEDFSIEYSDARFFVIKSYSEDDVHKSIKYGVWSSTLNGNKKLQSVYEDAQRIATEKSRECPIFLFFSVNSSGLFCGVAEMTGPVSFDRDMDFWQQDKWSGSFPVKWHIIKDVPNSYFRHIILHNNENKPVTNSRDTQEIILKQGLEVLKLFKHHAEKTSLLDDFMYYEDRQRLMQEERARLPFRTFRRPFPVLNLDFSDRSKKSSKDVVKKPSVTSAETKVVQLKNSDGDEKSNTQEATDDSTPSTLKFGSLAIKPTAGTTFNPTQPKPKPTPSLGSDHKSDSSEEVTGSLADDIVSVGSLPIKVKGSKELSSKIAAVGTSPLSTQDQFRSKPGF

SEQ ID NO: 104352 - DNA, 1232 bp, Arabidopsis thaliana
  misc_feature (1)..(1232): Ceres Seq. ID no. 13614845
  misc_feature (1)..(1232): Ortholog of  Ceres SEQ ID NO 13654054 as cited in SEQ ID NO 67735
gagagttctggtttctgcatctctctccttcttcgtttagactttagccattgaaggtcgcttcgattcgaaatcatggcggccgtaccgagaggcctcctttctcgaatcaatcagtttctatcaatacggtctataactccttcatcctctgaatctcttcctcattgtagtagcttctttctcatccgacgattcagctccgatactgggttgatggacggtggtggatctgatattatcggggctcagacccgaatcattgaggcgaaacaaggtgagatgtctagtagatccaagaggactgggatcatcgcggttaagtgtgggatgactgcgctctgggacaaatggggaaagaggattccgatttctattctttgggttgatgataatatcgtctctcaggttaaaactgttgagaaagaaggcatttttgcgttacagatcggatgtgggcaaaagaaaccgaagcatttgtcaaaagctgtggtggggcatttcagagcacaaggtgtgccgttaaagaggaagttgagggaatttcctgtgactgaagacgctcttcttcctgttggtacttcactcggtgtccgccattttgttccgggacagtacgttgatgtcactgggatcactcgaggaaaaggttttcagggatgcatgaaaagacatggtttcagtggaatgccggcatcacatggtgcttcattgtcccatcgaagcgggggttccacagggcaaagagatgctcctggaaaggtgttcaagggcagaaagatggctgggagaatgggtgcagatcagaggacagtaaagaacgtttgggtctacaagatcgatcctgcgaggaacctcatgtgggtgagaggacaagttcctggtgcagaaggaaactttgtgttcataaaagatgcatggtgcaagaaaccagacatctcaaagcttccgtttccaacttacttagctccagaagatgaagatccatcagaattagaaccgttggttgcagatcttggagaagttgacccatttatgttggcagagtgatgaaaacagcatgatcttgatctttatttgggcttttacaatgattagagaccagaaagaagctgtggaagtgaaggaatcacagagctaaagctttttgcagatgaatttgtctttttcttattttagttgtttggatgtatgatttgaaaacgattaaatagaggaatttaggcttgctc

SEQ ID NO: 104353 - protein, 324 aa, Arabidopsis thaliana
  peptide (1)..(324): Ceres Seq. ID no. 13614846
MAAVPRGLLSRINQFLSIRSITPSSSESLPHCSSFFLIRRFSSDTGLMDGGGSDIIGAQTRIIEAKQGEMSSRSKRTGIIAVKCGMTALWDKWGKRIPISILWVDDNIVSQVKTVEKEGIFALQIGCGQKKPKHLSKAVVGHFRAQGVPLKRKLREFPVTEDALLPVGTSLGVRHFVPGQYVDVTGITRGKGFQGCMKRHGFSGMPASHGASLSHRSGGSTGQRDAPGKVFKGRKMAGRMGADQRTVKNVWVYKIDPARNLMWVRGQVPGAEGNFVFIKDAWCKKPDISKLPFPTYLAPEDEDPSELEPLVADLGEVDPFMLAE

SEQ ID NO: 104354 - protein, 277 aa, Arabidopsis thaliana; identical to SEQ ID NO: 36068
  peptide (1)..(277): Ceres Seq. ID no. 13614847

SEQ ID NO: 104355 - protein, 255 aa, Arabidopsis thaliana; identical to SEQ ID NO: 36069
  peptide (1)..(255): Ceres Seq. ID no. 13614848

SEQ ID NO: 104356 - DNA, 1376 bp, Arabidopsis thaliana
  misc_feature (1)..(1376): Ceres Seq. ID no. 13614859
  misc_feature (1)..(1376): Ortholog of  Ceres SEQ ID NO 13594740 as cited in SEQ ID NO 51721
  misc_feature (1)..(1376): Ortholog of  Ceres SEQ ID NO 14316497 as cited in SEQ ID NO 58285
  misc_feature (1)..(1376): Ortholog of  Ceres SEQ ID NO 13595944 as cited in SEQ ID NO 68153
ccttatctctctctctctttctctcttatataaagagagaaatatacaaaacctccaagtacgtttcatcgatcctacctaattcatcaaaaaattgtgtgaggcttatttgatcaataattatgaattctggtcgtcgatcgttaatgtccgccacggcgagtctgagtttgctgttgtgtatcttcaccaccttcgtcgtggtgtcgaacggtgagcttcagagatttatagagccggctaaaagcgacggttccgttagttttatagtcatcggagattggggtcgtcgtggctccttcaatcagtctctcgttgcttatcagatgggaaaaattggagagaagattgacttagatttcgtggtgtctacgggagataacttctacgacaatggattgtttagtgaacatgatccaaacttcgaacaatctttctctaacatctacactgctccaagtcttcagaaacagtggtacagtgttttgggaaaccatgactatagaggtgacgcagaagctcagctgagttctgttctccgggaaatcgacagccgttggatttgtcttcgatcatttgtcgttgatgcagagttggtagagatgttctttgttgacacgactcctttcgtgaaagaatactacacagaagcagatggtcactcatatgattggcgcgcagttccatctcgcaactcttatgtcaaagctcttctccgtgatcttgaagtttccttaaagagttctaaagcaagatggaagattgttgttggtcaccatgcaatgagaagcattggacatcatggagatactaaagagctcaacgaagagcttcttccgattcttaaagagaacggtgttgatctctacatgaatggacatgatcattgtcttcaacatatgagtgatgaagacagtcctattcagtttctaactagtggtgctggatccaaggcttggagaggagatattaacccagtgaccatcaatcccaagctactgaaattctattatgatggtcaaggattcatgtctgctcggttcactcactcggacgcagagatcgtcttctacgatgtctttggtgagattttgcacaaatgggtcacttctaaacaacttcttcattcctctgtttgaagataaaaagccttaataaatttggcttcctttgtaattttgtaacatacatttaagattcttaagtcctattgcaggctaggtaggcttcctgcttagtttagcatccctatcatttttagcaatagcttattccatcacaataacatatataatgtacgatcttttcctcaaatttttgatacaagtgtaatgatacccttaatgggtatcttcttaatgctacataagttagtc

SEQ ID NO: 104357 - protein, 338 aa, Arabidopsis thaliana; identical to SEQ ID NO: 40283
  peptide (1)..(338): Ceres Seq. ID no. 13614860

SEQ ID NO: 104358 - protein, 330 aa, Arabidopsis thaliana; identical to SEQ ID NO: 40284
  peptide (1)..(330): Ceres Seq. ID no. 13614861

SEQ ID NO: 104359 - protein, 270 aa, Arabidopsis thaliana; identical to SEQ ID NO: 40285
  peptide (1)..(270): Ceres Seq. ID no. 13614862

SEQ ID NO: 104360 - DNA, 1550 bp, Arabidopsis thaliana
  misc_feature (1)..(1550): Ceres Seq. ID no. 13614863
  misc_feature (1)..(1550): Ortholog of  Ceres SEQ ID NO 15171275 as cited in SEQ ID NO 51428
  misc_feature (1)..(1550): Ortholog of  Ceres SEQ ID NO 14307678 as cited in SEQ ID NO 59456
  misc_feature (1)..(1550): Ortholog of  Ceres SEQ ID NO 13586716 as cited in SEQ ID NO 0
ctcaggaaaactaaaccaaagtctgtttaccagtaatatcaatcgatcgccattctcgacatttctctctctcaagctagtctaaagtttcttcttatctccttcctccgaccaaaacttcgacttctctcttattttcaccctcagagagtaaccatggatgccttgacctcgagtttggttcgatctcccatcgtaccatcgagaacttccgacaacggttctggatctatgttccttaccgccagtggccctggattcacgcgttctggttcttcaagacttcaacttcgtttaagggtatgtcccaaatctcttcaaaacgcgtctgctagatcctcaagatcattacagagcttaacaacgactgctaaaactcggagaagttttgtggttagagcttcttcagcgtctaatgatgcttcatctggttcttcccccaaaccgatcgctccgctccagctgcaatcgcctgctggtcagtttctgtctcagattttggtgagccatcctcatcttgtgcctgcagctgttgaacagcagcttgagcagcttcaaactgatcgggactctcagggacagaacaaagattcagcgtctgtacctggaaccgacatcgttctctacaggagaattgcggagttgaaggaaaacgagagaagaagaacattggaagagattttgtatgcattggtggttcaaaagttcatggaagctaacgtatcacttgtaccttcagtaagcccatcttcagatccgtctggtcgggttgatacttggccgaccaaagtggagaaactcgagcggcttcactcgcccgagatgtacgagatgattcacaaccatcttgccttgattcttggaagcagaatgggtgatctgaactctgttgcacagataagcaagctcagagttggccaagtttacgctgcttctgtgatgtatggatatttcttgaagagggtggaccaaaggtttcagcttgagaagacgatgaagattcttccgggtgggtcggatgaaagtaaaacaagcgttgagcaagccgaggggacggcaacatatcaggcggctgtatcgtctcacccagaggttggtgcatttgcgggcggagttagtgctaagggcttcggcagcgagattaaaccatcccgattaaggtcatatgtgatgtcatttgatgcggagacgctgcagagatacgccactataagatcaagagaagcagttggaatcatcgagaagcacacagaggcattgtttggtaagcctgagattgtaataacaccggagggcacagtcgattcatcgaaggacgaacagataaagatcagcttcggtggaatgaagaggctcgtcttggaggcagttactttcgggtcgttcctttgggatgttgagagccatgtagatgcgaggtaccactttgtattgaactaaaaacatggtctgtaatgcagttgactaacttatgtagcattaagaagatacccattaagggtatcattacacttgtatcaaaaatttgaggaaaagatcgtacattatat

SEQ ID NO: 104361 - protein, 427 aa, Arabidopsis thaliana
  peptide (1)..(427): Ceres Seq. ID no. 13614864
MDALTSSLVRSPIVPSRTSDNGSGSMFLTASGPGFTRSGSSRLQLRLRVCPKSLQNASARSSRSLQSLTTTAKTRRSFVVRASSASNDASSGSSPKPIAPLQLQSPAGQFLSQILVSHPHLVPAAVEQQLEQLQTDRDSQGQNKDSASVPGTDIVLYRRIAELKENERRRTLEEILYALVVQKFMEANVSLVPSVSPSSDPSGRVDTWPTKVEKLERLHSPEMYEMIHNHLALILGSRMGDLNSVAQISKLRVGQVYAASVMYGYFLKRVDQRFQLEKTMKILPGGSDESKTSVEQAEGTATYQAAVSSHPEVGAFAGGVSAKGFGSEIKPSRLRSYVMSFDAETLQRYATIRSREAVGIIEKHTEALFGKPEIVITPEGTVDSSKDEQIKISFGGMKRLVLEAVTFGSFLWDVESHVDARYHFVLN

SEQ ID NO: 104362 - protein, 402 aa, Arabidopsis thaliana
  peptide (1)..(402): Ceres Seq. ID no. 13614865
MFLTASGPGFTRSGSSRLQLRLRVCPKSLQNASARSSRSLQSLTTTAKTRRSFVVRASSASNDASSGSSPKPIAPLQLQSPAGQFLSQILVSHPHLVPAAVEQQLEQLQTDRDSQGQNKDSASVPGTDIVLYRRIAELKENERRRTLEEILYALVVQKFMEANVSLVPSVSPSSDPSGRVDTWPTKVEKLERLHSPEMYEMIHNHLALILGSRMGDLNSVAQISKLRVGQVYAASVMYGYFLKRVDQRFQLEKTMKILPGGSDESKTSVEQAEGTATYQAAVSSHPEVGAFAGGVSAKGFGSEIKPSRLRSYVMSFDAETLQRYATIRSREAVGIIEKHTEALFGKPEIVITPEGTVDSSKDEQIKISFGGMKRLVLEAVTFGSFLWDVESHVDARYHFVLN

SEQ ID NO: 104363 - protein, 243 aa, Arabidopsis thaliana; identical to SEQ ID NO: 39464
  peptide (1)..(243): Ceres Seq. ID no. 13614866

SEQ ID NO: 104364 - DNA, 1310 bp, Arabidopsis thaliana
  misc_feature (1)..(1310): Ceres Seq. ID no. 13614867
  misc_feature (1)..(1310): Ortholog of  Ceres SEQ ID NO 14310524 as cited in SEQ ID NO 58840
  misc_feature (1)..(1310): Ortholog of  Ceres SEQ ID NO 15169541 as cited in SEQ ID NO 67500
ctctataaacacacactctcaggagagaagttgtattgatcgtcttctctttccctaaacacactgattattttctctccgacgccgccatgtctctgctctcagatctcgttaacctcaacctcaccgatgccaccgggaaaatcatcgccgaatacatatggatcggtggatctggaatggatatcagaagcaaagccaggacactaccaggaccagtgactgatccatcaaagcttcccaagtggaactacgacggatccagcaccggtcaggctgctggagaagacagtgaagtcattctataccctcaggcaatattcaaggatcccttcaggaaaggcaacaacatcctggtgatgtgtgatgcttacacaccagctggtgatcctattccaaccaacaagaggcacaacgctgctaagatcttcagccaccccgacgttgccaaggaggagccttggtatgggattgagcaagaatacactttgatgcaaaaggatgtgaactggccaattggttggcctgttggtggctaccctggccctcagggaccttactactgtggtgtgggagctgacaaagccattggtcgtgacattgtggatgctcactacaaggcctgtctttacgccggtattggtatttctggtatcaatggagaagtcatgccaggccagtgggagttccaagtcggccctgttgagggtattagttctggtgatcaagtctgggttgctcgataccttctcgagaggatcactgagatctctggtgtaattgtcagcttcgacccgaaaccagtcccgggtgactggaatggagctggagctcactgcaactacagcactaagacaatgagaaacgatggaggattagaagtgatcaagaaagcgatagggaagcttcagctgaaacacaaagaacacattgctgcttacggtgaaggaaacgagcgtcgtctcactggaaagcacgaaaccgcagacatcaacacattctcttggggagtcgcgaaccgtggagcgtcagtgagagtgggacgtgacacagagaaggaaggtaaagggtacttcgaagacagaaggccagcttctaacatggatccttacgttgtcacctccatgatcgctgagacgaccatactcggttgatgacacatttcatgatttgatttctctccaatttggttttttttttttcccttttgattgcacttttcgataataaaaaaataattcttattatgggcgtattgttgtgacattttgtgttttgtttcgaataattaaataagcgcttcttaaggt

SEQ ID NO: 104365 - protein, 354 aa, Arabidopsis thaliana
  peptide (1)..(354): Ceres Seq. ID no. 13614868
MSLLSDLVNLNLTDATGKIIAEYIWIGGSGMDIRSKARTLPGPVTDPSKLPKWNYDGSSTGQAAGEDSEVILYPQAIFKDPFRKGNNILVMCDAYTPAGDPIPTNKRHNAAKIFSHPDVAKEEPWYGIEQEYTLMQKDVNWPIGWPVGGYPGPQGPYYCGVGADKAIGRDIVDAHYKACLYAGIGISGINGEVMPGQWEFQVGPVEGISSGDQVWVARYLLERITEISGVIVSFDPKPVPGDWNGAGAHCNYSTKTMRNDGGLEVIKKAIGKLQLKHKEHIAAYGEGNERRLTGKHETADINTFSWGVANRGASVRVGRDTEKEGKGYFEDRRPASNMDPYVVTSMIAETTILG

SEQ ID NO: 104366 - protein, 324 aa, Arabidopsis thaliana
  peptide (1)..(324): Ceres Seq. ID no. 13614869
MDIRSKARTLPGPVTDPSKLPKWNYDGSSTGQAAGEDSEVILYPQAIFKDPFRKGNNILVMCDAYTPAGDPIPTNKRHNAAKIFSHPDVAKEEPWYGIEQEYTLMQKDVNWPIGWPVGGYPGPQGPYYCGVGADKAIGRDIVDAHYKACLYAGIGISGINGEVMPGQWEFQVGPVEGISSGDQVWVARYLLERITEISGVIVSFDPKPVPGDWNGAGAHCNYSTKTMRNDGGLEVIKKAIGKLQLKHKEHIAAYGEGNERRLTGKHETADINTFSWGVANRGASVRVGRDTEKEGKGYFEDRRPASNMDPYVVTSMIAETTILG

SEQ ID NO: 104367 - protein, 264 aa, Arabidopsis thaliana
  peptide (1)..(264): Ceres Seq. ID no. 13614870
MCDAYTPAGDPIPTNKRHNAAKIFSHPDVAKEEPWYGIEQEYTLMQKDVNWPIGWPVGGYPGPQGPYYCGVGADKAIGRDIVDAHYKACLYAGIGISGINGEVMPGQWEFQVGPVEGISSGDQVWVARYLLERITEISGVIVSFDPKPVPGDWNGAGAHCNYSTKTMRNDGGLEVIKKAIGKLQLKHKEHIAAYGEGNERRLTGKHETADINTFSWGVANRGASVRVGRDTEKEGKGYFEDRRPASNMDPYVVTSMIAETTILG

SEQ ID NO: 104368 - DNA, 921 bp, Arabidopsis thaliana
  misc_feature (1)..(921): Ceres Seq. ID no. 13614879
  misc_feature (1)..(921): Ortholog of  Ceres SEQ ID NO 14302082 as cited in SEQ ID NO 64529
aagaaatctttcagatttgcgcatatcgacaattttccgagcggccagtttacgtattttgtttgtagttaacgtgtttcaaggactttgacaatggctgaggaagcgcataaggtaacattgaatgtctatgatttaagccaaggcttggcacgccagctctcacaatcactcctgggaaaggttattgaaggtgtatggcatacaggaatagttgtctatgggaatgagtacttttttggaggagggatacaacatttaccagttggaagaactccatatggaacaccaattcgaacgatagagttgggtctatcacatgtgcctaaagatgtattcgagatgtacttggaagaaatcagtcctcgttacactgctgaatcctacaatttacttactcacaactgcaacaacttcagcaacgaggtcgctcagtttttggtgggtaaagggattcctgactacattctccagcttcctaatgatgttctaaacagtcccatgggtggtcttataatgcctatgttgcaaggcctcgaaacaactctaaaggctggtgctgttcctcaagttccacagtttaggccacagccacaaccttttggagcttttagtaaagatgatggcccacaaattgtgatagctcctaagctcgaggcagcagaaacctcaactgcaactgagaaagtgccacctgttattcaaccatcagctagtaaagagaaggtcaaggacgacccgttgggtgatgctagggccaagattcaggaagagattacaagcgaatttgcagctctaatggcacaaggcacattacgagcaagtgaagcagctgctatggcgacaaaaagagtcatgcaaaagtacggacatctcaatgtaaacgcttagtgcaataacagagagatgaaacattttatt

SEQ ID NO: 104369 - protein, 265 aa, Arabidopsis thaliana; identical to SEQ ID NO: 38015
  peptide (1)..(265): Ceres Seq. ID no. 13614880

SEQ ID NO: 104370 - protein, 182 aa, Arabidopsis thaliana; identical to SEQ ID NO: 38016
  peptide (1)..(182): Ceres Seq. ID no. 13614881

SEQ ID NO: 104371 - DNA, 1445 bp, Arabidopsis thaliana
  misc_feature (1)..(1445): Ceres Seq. ID no. 13614890
  misc_feature (1)..(1445): Ortholog of  Ceres SEQ ID NO 15171275 as cited in SEQ ID NO 51428
aatccgctaaatcattcttcttcatctctctctcattcacaattcccgaaattctctcaaatcacagatccttttagggtttttccactgtttctaggttttttttattgctcaaatctgatcaatggatagttgtctctctaatcaaacggcgcttcagtttctcccgtcgcgttccaggagacagagcggcgatggaggcggtggttttgttattccggcgaagaggaagatccagtatagttcgatggttgtggttgcggcggcgggacagagtcggtgtgagcctggaagcagtctaaacgcgccgcttgagccacgatcggcgcaggggaggtttctgagaagcgtgttgctaaacaaacggcagctatttcattacgccgccgctgatgagctaaagcaactggctgatgatagggaagctgctttagctcgtatgtctctcagctctggttccgatgaggcttctctccacagaaggatagctgaactcaaggaacgctactgtaaaactgcagtccaagacataatgtacatgttaatcttttacaaatactccgagataagagtccctcttgttccaaagctatccagatgcatctataatggaagactcgagatctggccttcaaaagactgggagttagagtcaatttacagctgcgatacccttgagatcatcaaagaacacgttagcgcagtcatcggattacgggtcaactcatgtgtgactgacaattgggcaacaacgcagatacagaaactgcatctcaggaaagtatatgctgcctcgatcttgtacggttacttcttgaaatcagcttccctaaggcaccagcttgagtgttccttatcagatattcatggaagcggatatctgaaaagtcccatctttggatgctcattcacaacgggcactgcacagatctccaacaagcagcagctgagacattacatctcagactttgatcccgagacattgcagagatgcgcaaaaccaaggacagaggaggcaaggaatctgatagagaagcaaagtttggctctttttggcacggaagagagtgatgagaccatagtgacatcgttttcgagtctgaagcggttggttctcgaggctgtggcgtttgggacattcctgtgggacacggaattgtatgtagatggtgcatataagctgaaggagaatgggaatgcagaagaacaagaaggaaagaaaagcatatgatgaacaagtctggttagaagaaaagcttcatgatcttctggtagtgtatatatagagaaatgtttctgccgaatctctcaggcagttgttcagttcaatgtatagatcttgcttagaaatattttgatttctgaataagaatgtggtgtggttataaggaataagagatactgtagttgggttcaattttatgttatgtgttaagtttccttgt

SEQ ID NO: 104372 - protein, 368 aa, Arabidopsis thaliana; identical to SEQ ID NO: 23835
  peptide (1)..(368): Ceres Seq. ID no. 13614891

SEQ ID NO: 104373 - protein, 327 aa, Arabidopsis thaliana; identical to SEQ ID NO: 23836
  peptide (1)..(327): Ceres Seq. ID no. 13614892

SEQ ID NO: 104374 - protein, 263 aa, Arabidopsis thaliana; identical to SEQ ID NO: 23837
  peptide (1)..(263): Ceres Seq. ID no. 13614893

SEQ ID NO: 104375 - DNA, 1712 bp, Arabidopsis thaliana
  misc_feature (1)..(1712): Ceres Seq. ID no. 13614894
  misc_feature (1)..(1712): Ortholog of  Ceres SEQ ID NO 13596816 as cited in SEQ ID NO 62287
aaattactcaatccatctccctctcttcttctccttctccaaacaacaaaccaaagcttctctcttttcttgcttcagagagacctagaagagttatcaacatgagtcttcttctacatctctttgctctgtctctgctcatctctgtttcaggagcaaagttctccggccggccaggaatcaactatggccagctcggaaacaacctcccgtcaccgtccgactcagtcaacctcatcaagtccctaaacgcgaaacgcgtcaaactctacgacgctaacccaaaaatcctcgccgcgttaaacggcaccgacattaccgtctccgtcatggtcccaaacgagctcctcgtcaacatctccaaatccgcatcactctccgacgactggatccgatccaacatcctcccgttttacccaaccaccaagatccgttacctcctcgtcggcaacgagatcctctctttaccagactctgagctcaaatcttcactcgttcccgcaatgcgcaagatccaacgctccttaaagtctctcggcgttaaaaaagtcaaagtcggtactacactcgccaccgacgttctccaatcttcgtttcctccgtctagcggcgagtttcgggaggatatctccggtttaattatgaaaccgatgctccaattcttaaaccggaccaaatctttcctattcgttgatgtttacccgtatttcgcgtgggcacaagatccgacccatgtggatctcgattacgcgattttcgaatctaccaacgtcaccgtcacggatccggtttcgaatctgacataccacaacctattcgatcagatgattgacgctttcgtcttcgccatgaaacgagtcgggtatccggatattcggatctgggtcgcggaaacgggttggcccaataacggtgactacgaccaaattggagcgaatatttacaacgccgctacttacaatcgcaatgttgtcaagaaactcgccgctgacccgcccgtaggtacgcccgcccgacccggaaaggttctaccggcgtttgtattcgcactttacaacgaaaatcagaaaacgggtccgggtacggagcggcatttcggacttttacatccgaatgggactcaggtttacgggattgatttgtcggggaagacggagtacaaggaatcattgccggcgccggagaataacgacctgtacaaagggaagatttggtgcgtggtggctaaaggagcgaattggactcagctaggtgatgctctatcgtacgcttgctcacaggggaataatacctgtgacccgattcaacgcggaggcccatgtcagaaacctgatttgaccgttttgcacgccagttacgcctttagctcttattgggcccaatttcgtaagatcgggggaacttgctccttcaacggcttagctacacaaaccatcaaagatccaagttacggacgatgtgagtttccgagcgtgacattgtgaagacttacgagttacgaaaatgcatggtcgagaagagacgcacgagggaaaaccgcacgatgttacggctttcattaatggaaacagcacgtgactctctgtacgatgttacgtagcttgattatttagaaacggcacgtgattagtgtttaacttgctgtttatttattttatttttcttttcccgcgaataatgaaaactcatgaaataattaattcgttttcggg

SEQ ID NO: 104376 - protein, 493 aa, Arabidopsis thaliana
  peptide (1)..(493): Ceres Seq. ID no. 13614895
ITQSISLSSSPSPNNKPKLLSFLASERPRRVINMSLLLHLFALSLLISVSGAKFSGRPGINYGQLGNNLPSPSDSVNLIKSLNAKRVKLYDANPKILAALNGTDITVSVMVPNELLVNISKSASLSDDWIRSNILPFYPTTKIRYLLVGNEILSLPDSELKSSLVPAMRKIQRSLKSLGVKKVKVGTTLATDVLQSSFPPSSGEFREDISGLIMKPMLQFLNRTKSFLFVDVYPYFAWAQDPTHVDLDYAIFESTNVTVTDPVSNLTYHNLFDQMIDAFVFAMKRVGYPDIRIWVAETGWPNNGDYDQIGANIYNAATYNRNVVKKLAADPPVGTPARPGKVLPAFVFALYNENQKTGPGTERHFGLLHPNGTQVYGIDLSGKTEYKESLPAPENNDLYKGKIWCVVAKGANWTQLGDALSYACSQGNNTCDPIQRGGPCQKPDLTVLHASYAFSSYWAQFRKIGGTCSFNGLATQTIKDPSYGRCEFPSVTL

SEQ ID NO: 104377 - protein, 460 aa, Arabidopsis thaliana; identical to SEQ ID NO: 23286
  peptide (1)..(460): Ceres Seq. ID no. 13614896

SEQ ID NO: 104378 - protein, 384 aa, Arabidopsis thaliana; identical to SEQ ID NO: 23287
  peptide (1)..(384): Ceres Seq. ID no. 13614897

SEQ ID NO: 104379 - DNA, 1127 bp, Arabidopsis thaliana
  misc_feature (1)..(1127): Ceres Seq. ID no. 13614898
  misc_feature (1)..(1127): Ortholog of  Ceres SEQ ID NO 14303047 as cited in SEQ ID NO 66871
gagcccaactcctctctcttcacgcatttctcgttgtcaaagacaaagttctctccttttataaacacccatctccacctcctctctcttattcaaacttctttgagaaaattcgagctaagtgtttttataatatatacattctctgatatgggtttctctagagcaaaacgtgtcactgatccacttgcagaagaggttagggctcgtctcgttggatgcagctttagcagcggcagcgaacataccggcgacggaattgaagactacgaagacgacgactcgccttgtctctctgatctagtacaagggttcttggaagatgaagttgatacagttgatgatgagtcatgctggtgtgatcaagattctggttccgactcggattctgactcggaacttggcgagctccctgactttgccgacgatatcgccaagcttctgaggaactctctcagggaagattcatacggacgaacggtgctggtacatgtggcgagagcgatggaaatgttgtcgtctctcggatctcagcccgaacagcgtgccgttttccagcgtaaggtcatgtctcttcttagagaactcggccacaatgcggccatctgcaaaactaaatggaaatcctccggcggactcaccgccggtaaccatgagttcatcgacgtcgtgtatacaccttccgcctcgtctcagtccgtccgtttcatcgtcgatttagatttctcgtcgcggtttcaaatcgcgaggccaacttcacagtacgcgcgtgtgcttcaatcgcttccggcggttttcgtcggaaagggggatgatctgaagcggatcttgcgtctcgtgtgtgacgccgcgaggatttctcttaggaaccgcgggctgacgcttccgccgtggaggaagaatcgttatatgcagacgcggtggcttggtccttacaaacgcaccaccaacttaacgccgtcaacttccggtgtagacaccgtcatgtgtcgtgccatcggtttcgataatgccgtcggaggccgtctatttgtgcgaacacgataaaaactagaccaaaaagaccacgtgtcatttttaacttgattttttccatatacgttctagagaataataattcattattt

SEQ ID NO: 104380 - protein, 348 aa, Arabidopsis thaliana; identical to SEQ ID NO: 36536
  peptide (1)..(348): Ceres Seq. ID no. 13614899

SEQ ID NO: 104381 - protein, 298 aa, Arabidopsis thaliana; identical to SEQ ID NO: 36537
  peptide (1)..(298): Ceres Seq. ID no. 13614900

SEQ ID NO: 104382 - protein, 180 aa, Arabidopsis thaliana; identical to SEQ ID NO: 36538
  peptide (1)..(180): Ceres Seq. ID no. 13614901

SEQ ID NO: 104383 - DNA, 709 bp, Arabidopsis thaliana
  misc_feature (1)..(709): Ceres Seq. ID no. 13614906
  misc_feature (1)..(709): Ortholog of  Ceres SEQ ID NO 14304090 as cited in SEQ ID NO 53446
  misc_feature (1)..(709): Ortholog of  Ceres SEQ ID NO 14311355 as cited in SEQ ID NO 54082
atgtttgtgtgttgtgttgtggcagtggaagggaactctttacccgaagaagatgtagagatgatggagaattcagatgtaatgaagacagtcacagatgaagcttctccaatggtggagccgttcattggtatggagtttgaatcagaagaggctgcaaagtctttctatgacaattacgctacatgcatgggtttcgttatgcgagtggatgctttcaggaggtcaatgcgagatgggactgtggtgtggcgcagactcgtgtgtaataaagaaggatttcgtaggtcgagacctcggagaagcgagagtagaaagcctcgggctataacaagagaagggtgtaaagctctgattgttgtgaaaagagagaaatccggaacatggcttgttactaaatttgagaaagagcataatcatcctctcttgcctctctcccctaatgttcgccggaattttcagctccctcaaacaccggacgagaaagacgcaaagattagggagctgagtgcagagctgagccgagagagaaggcgttgtactgctttgcaacagcagcttgatatggtccttaaggagatggaagaacattccaaccatctcaccattaacatcaatagtgttatccaaagtgttagagacattgagtccaatactttcaccaaacaacaaacataatgcttcatttctgttcataaaagcttaacat

SEQ ID NO: 104384 - protein, 225 aa, Arabidopsis thaliana
  peptide (1)..(225): Ceres Seq. ID no. 13614907
MFVCCVVAVEGNSLPEEDVEMMENSDVMKTVTDEASPMVEPFIGMEFESEEAAKSFYDNYATCMGFVMRVDAFRRSMRDGTVVWRRLVCNKEGFRRSRPRRSESRKPRAITREGCKALIVVKREKSGTWLVTKFEKEHNHPLLPLSPNVRRNFQLPQTPDEKDAKIRELSAELSRERRRCTALQQQLDMVLKEMEEHSNHLTININSVIQSVRDIESNTFTKQQT

SEQ ID NO: 104385 - protein, 205 aa, Arabidopsis thaliana
  peptide (1)..(205): Ceres Seq. ID no. 13614908
MMENSDVMKTVTDEASPMVEPFIGMEFESEEAAKSFYDNYATCMGFVMRVDAFRRSMRDGTVVWRRLVCNKEGFRRSRPRRSESRKPRAITREGCKALIVVKREKSGTWLVTKFEKEHNHPLLPLSPNVRRNFQLPQTPDEKDAKIRELSAELSRERRRCTALQQQLDMVLKEMEEHSNHLTININSVIQSVRDIESNTFTKQQT

SEQ ID NO: 104386 - protein, 204 aa, Arabidopsis thaliana
  peptide (1)..(204): Ceres Seq. ID no. 13614909
MENSDVMKTVTDEASPMVEPFIGMEFESEEAAKSFYDNYATCMGFVMRVDAFRRSMRDGTVVWRRLVCNKEGFRRSRPRRSESRKPRAITREGCKALIVVKREKSGTWLVTKFEKEHNHPLLPLSPNVRRNFQLPQTPDEKDAKIRELSAELSRERRRCTALQQQLDMVLKEMEEHSNHLTININSVIQSVRDIESNTFTKQQT

SEQ ID NO: 104387 - DNA, 1500 bp, Arabidopsis thaliana
  misc_feature (1)..(1500): Ceres Seq. ID no. 13614918
  misc_feature (1)..(1500): Ortholog of  Ceres SEQ ID NO 13502943 as cited in SEQ ID NO 65097
aaaacaacatcaatggcaatgcacactgttcgattgtcgccggcgactcaacttcacggcggtatctctagcaatctgtcaccacccaatcgaaaacctaataattccatcgtccgatacggatgcggatcttcgaagcgtttccgtatcgtaacggtcttggcgtcactccgggaaaacgatgcaaacggaagggataactccgtgagagctatggaagtgaagaagatctttgaagactcgcctctgcttcctaagccgttatcatcgaaccagctcacggaatctgtctctaatggctcccgcgttcgtgttgcgtatcagggagtacgaggtgcatacagcgaatcagctgctgagaaggcttatccaaactgtgaagctgttccatgcgaagagtttgacactgcttttgaggcggttgagcggtggcttgttgacagagctgttttaccgattgagaactctttaggtggaagcatccatagaaattatgatcttctgctgcgacacaatttgcatattgtaggcgaagtcaagctagctgttcggcactgtttgttggctaaccacggtgtaaatattgaagatttgagaagggtgcttagccatccacaggctcttgcccaatgtgaaaacacgttaaccaaattggggttggtcagagaagcagtagatgatactgctggcgctgcgaagcaaattgcattcgaaaatttaaatgatgcagctgcagttgccagtgaaaaagctgcaaagatatatggtttgaacatagtcgctaaagatatccaggatgactgtgataatgttacaaggtttctaatgctcgcaagagaacccattatccctggaactaacagactctttaagacaagtatagttttctcgttagaggaagggcctggagtacttttcaaagcgcttgctgtgtttgcccttcggcaaatcaacctcacaaagattgaaagccgccctttaaggaaacatcctctccgagcatctggaggactaaaatactttgactatcttttctatgtggactttgaagcatctatggctgatgaagttgctcaaaacgcacttaggcatctcgaggagtttgctacctttttgcgggtactgggaagctacccagtggacactacaatgctctaaacatttcaaacatcttcttgtttgtgacagagatccgcttgatgatatcataatcctggtataaggagctatatccctgaggtgaggtctgagaggagtcaccaccttacaagacattccgctcttgttacaaattctgtttagttttccaaaaaagatcatctttgtttttagtaagaatgtagtcactaagtcagatatcaatgacaaataccaaagaactagtgttttttcgtgtttcatccatacatagatacttatcctgtgtcttttttagaaatttctttttgtatgacgtttcaaaattttgattgactattgttagtggtatatctttgagtt

SEQ ID NO: 104388 - protein, 385 aa, Arabidopsis thaliana; identical to SEQ ID NO: 41164
  peptide (1)..(385): Ceres Seq. ID no. 13614919

SEQ ID NO: 104389 - protein, 381 aa, Arabidopsis thaliana; identical to SEQ ID NO: 41165
  peptide (1)..(381): Ceres Seq. ID no. 13614920

SEQ ID NO: 104390 - protein, 379 aa, Arabidopsis thaliana; identical to SEQ ID NO: 41166
  peptide (1)..(379): Ceres Seq. ID no. 13614921

SEQ ID NO: 104391 - DNA, 2427 bp, Arabidopsis thaliana
  misc_feature (1)..(2427): Ceres Seq. ID no. 13614928
  misc_feature (1)..(2427): Ortholog of  Ceres SEQ ID NO 13598023 as cited in SEQ ID NO 66487
agtcataaggacgacaccattacgcaacttagtcctcttacctctctctctctcgactctgttccaagaaattcctctacttaatacagctgattctacagattcctgctacgaaatttctgggtctgggttgatctttgtctcaccagtcaacccaattcaggactttgataaaggtggaaatggcggctttattagcttctcagagctgctgctatggcggtgagaccgcaagagtcaccaaagctattggtttcagtagctctttggagaatcatttcactggggaagccactcagtgttatggcagcaagtctaagagatttcgtattgagatgagacagtcggaattgccctctaaggttggaatcaatggacgttcagtcaaaatggttcctgcgagtgaggtggtgaagaggaaagatggtgtgaatggatcggctgggaaaggtgttaatggagcgagtttggttagtagtagaaacattaatggtgcggcgtcaactttggttaaggcaccaaagaaaacaacagaatcgtaccttcctccaccggttgaaggagttagggttcttccttctgatgaaggttttagctgggctgatgagaattatagctcacttcaacgcagtattgatgtttggtcatttgttatttccctgaggattcgtatcttgttcgataattcgaaatgggcttatgttggaggattcacagaagaaaaacagaaaagcagaagaagagaaacagcttcatggttgagagagagtgtattgcagcttggtccaacgtttatcaaactgggacagttgtcttcaactaggtcagacttgtttccgcgcgaattcgtggatgagctttccaagttgcaggacagagtccccgctttttctccagagaaagcaaagcgcttcattgaggctgaacttggggctcctattagtgtaatgtataaagaatttgaagagcaacccatagctgcagctagccttggtcaggtacacagagctgttttgcacaatggcgagaaagtggtagtaaaagtacaaagacccggactaaagaaacttttcgatattgatctacgaaatctgaagctgattgccgagtatttccagaaaagtgaatcatttggtacaaacgattgggttggtatctatgaagaatgtgccttaattttgtatcaagagattgactacataaacgaagctaagaacgctgacagattccggagagacttccggaatataaactgggtccgcgtacctttggtttattgggattactctgccatgaaggtcttgactttggagtatgtaccaggtgttaagatcaacaacttggacgccttagctgcacggggttttaaccgttctagaatcgcatcacgggccattgaagcttatcttatacagatactcaaaaccggcttctttcatgcggatccgcacccaggaaaccttgcaattgatgtagatgaatcaatcatctactatgacttcggcatgatgggagagatcaaaacatttactcggaagagattacttgatctcttctattctgtttatgaaaaagatgcaaaaaaggtcatgcaaaaccttatagaccttgaagcacttcaacccactggagatctttcatcggtaaggagatctgttcagtttttcttggacaacctattaagccaatcaccagatcagcaacagactttggcagctattggagaggatctgtttgcaatttcccaggatcagccattccgtttcccatcaactttcacctttgtcatccgagcattttccacacttgagggtattggttacatccttgatccagaattttcctttgtgaaggttgcggctccttatgcgcaggaactcctggatctaaaacaaaggcaacgctcgggaactcagcttgtccaagaaataagaaagcaggctgatgatgccaggtcttctactctgtctatgccatatcgagtgcagcgaatagaagagtttgtgaaagaactcgattcaggcgatctgaaactccgtgttcgggttcttgagtcggaaagagcagcccggaaagcgacaatactgcagatggcgacgatgtatacagttcttggaggaactctacttaatattggggttacatttagcaaccaaggaagtcagcttgttgccaatggatccttcattggagcagggatattcatgttattggtactgaggtctatgcaaagggtaaataagcttgataaatttgagaagatgatatgatgatgactggtggtctggtggatagtttattcttttaaagctccaaatatcagatatagaatttgtgatgtataggtatagcatgtatctttagctcccatacacaatatttataaattgtataaaaactgtttctaaggaaaggaaagtcaaagat

SEQ ID NO: 104392 - protein, 695 aa, Arabidopsis thaliana; identical to SEQ ID NO: 77178
  peptide (1)..(695): Ceres Seq. ID no. 13614929

SEQ ID NO: 104393 - protein, 644 aa, Arabidopsis thaliana; identical to SEQ ID NO: 38197
  peptide (1)..(644): Ceres Seq. ID no. 13614930

SEQ ID NO: 104394 - protein, 626 aa, Arabidopsis thaliana; identical to SEQ ID NO: 38198
  peptide (1)..(626): Ceres Seq. ID no. 13614931

SEQ ID NO: 104395 - DNA, 2604 bp, Arabidopsis thaliana
  misc_feature (1)..(2604): Ceres Seq. ID no. 13614932
  misc_feature (1)..(2604): Ortholog of  Ceres SEQ ID NO 12364737 as cited in SEQ ID NO 51089
  misc_feature (1)..(2604): Ortholog of  Ceres SEQ ID NO 14316263 as cited in SEQ ID NO 55294
  misc_feature (1)..(2604): Ortholog of  Ceres SEQ ID NO 15176751 as cited in SEQ ID NO 59719
  misc_feature (1)..(2604): Ortholog of  Ceres SEQ ID NO 13597380 as cited in SEQ ID NO 64054
  misc_feature (1)..(2604): Ortholog of  Ceres SEQ ID NO 12625474 as cited in SEQ ID NO 64169
  misc_feature (1)..(2604): Ortholog of  Ceres SEQ ID NO 13597502 as cited in SEQ ID NO 64681
  misc_feature (1)..(2604): Ortholog of  Ceres SEQ ID NO 13597532 as cited in SEQ ID NO 64873
atgacgatatcaacggttatagcattcatgtccatgttcctagtatttgttatgtctggtccgatagtggtggagggacgtgcttttttcgtgttcggtgactcgctcgtcgacagtggcaacaacaactatctggtgacaactgcacgtgccgactctccaccgtatggaatcgattttccaactcggagaccaaccggccggttttccaacggtcttaacattccagatcttatcagtgaggcaatcggtaacgaagagccaccgttaccttaccttagtccagagctaaggggccggagtcttcttaacggtgctaatttcgcctccgctggtatcggaattctcaatgataccggatttcaattcatcaacattataagaatgtaccaacaactcgattacttccaacaataccaacaacgtgtgagtcgcttgattgggaaaccgcaaactcagcggctcgtgagtcaagcgcttgtattaatcacggtcggtggaaacgattttgtgaacaactatttcttgtttccatattccgctagatcacgccaattcactctaccggattacgtccgactcctaatttctgaatacaaaaaaatactattgaggttaaattcacttggagtgggtcgagttctagtgacaggagctggaccactaggatgtgcaccggccgaactggcgagatcaggtacgtcgaatggaagatgctcggccgagctacaacgagctgcatctctatatgatcctcagctacttcaaatgataaatgaacttaacaaaaaaattgggagaaatgtgtttattgctgctaacactaaccaaatgcaagaggattttctaagcactccacgaagatatggatttgtaacatcgaaggttgcttgttgcggacaagggccgtacaatgggatgggtttgtgtacggttctatcaaacttgtgtccgaaccgtgagttatacgtcttttgggatgcgtttcatccgactgagaaagcaaaccgcatgatagtccgacatatcttgaccggtaccaccaagtatatgaaccccatgaaccttaagcatgaaactttgaaaacaaaatccctacagagagatagattgggaattgaatttgggaatccaggtttagggatgaatcgatcaacgatgatgattatgaggattgaagagtcggcgattgttttgtctctgctcaaatcggatctccggccgatggaagacgttttatcggaattcgactctaagttcgaaagcgctcgttacctcagtgtctgcaattctctttccatgatgttgcaggatcagcagatgtttaagaatactgaacgtctaattgcatttggtatcatataccagtgttattcttcacagaagccatctttcaacccgtttttatctgaaatgataagtgctgcttgtaatgaacagctggaaaagtctgaaagggcatttcttctccacctgttacaatggaatagttacaacaacgtgaaagagattctcaaactctcagctgttgattatatcagatcgtttgatccttcaactcatgattttccggaactaggagagctgcaacgagagtatggcgacaaagccgatcctggaccatctagtcacatttttgcagactattccctgaaaaagctattgcatgatcctgatgttcctcgtgggtgtgatcctaactctccagagtttgatgtgcaagctggagtgaatcccagaattggatctggtgatagggatgaggcactatctggattcttaggaaatttgacaatggggggattaggtcctaggtggatccgtccatgtccaccaaggtacccagttcatcagagcgagttgctttggattgaccctgataacaagcatgagcttgtttgggacgataaaatgtgtgctgatactagcagtggtgcaacagttagagacttgcttgttaagggtttaaaggtgacactttcacctacggagcaagaggacatcattacagaattggcaaatgacccaaagcttgtctttcactgcggaataactccacggaagctgccgcaattagtagagcacaatcctcagatagcagttgaaattctcaccaagttgaataactccacagagattaatgactattatgaagctctaggaaatatggacatgagcctgcactcaatggaagttgtgaataggctcacaactgcagttgaacttcccaaggacttcatacggatgtacatcactaattgcatatcgtcttgtgagaacgctaagcaagacaaatacatgcagaataggcttgtacggcttgtttgcgtcttcttgcaaagcttaattcgtaacaagatcatcaacgtgaaggatctattcatagaagttcaagctttctgcattgagttttctcgggttcgagaagcagctggtctcttcaggcttttgaaacaattggatgaataatttactctttcttcttcttcttcttcttctaatcatcttcgtctccattttattgtattccctatttttgtagctaaagaaagtactttattttgaatccaagacagttttcgctttttctagagtttcattctc

SEQ ID NO: 104396 - protein, 822 aa, Arabidopsis thaliana
  peptide (1)..(822): Ceres Seq. ID no. 13614933
MTISTVIAFMSMFLVFVMSGPIVVEGRAFFVFGDSLVDSGNNNYLVTTARADSPPYGIDFPTRRPTGRFSNGLNIPDLISEAIGNEEPPLPYLSPELRGRSLLNGANFASAGIGILNDTGFQFINIIRMYQQLDYFQQYQQRVSRLIGKPQTQRLVSQALVLITVGGNDFVNNYFLFPYSARSRQFTLPDYVRLLISEYKKILLRLNSLGVGRVLVTGAGPLGCAPAELARSGTSNGRCSAELQRAASLYDPQLLQMINELNKKIGRNVFIAANTNQMQEDFLSTPRRYGFVTSKVACCGQGPYNGMGLCTVLSNLCPNRELYVFWDAFHPTEKANRMIVRHILTGTTKYMNPMNLKHETLKTKSLQRDRLGIEFGNPGLGMNRSTMMIMRIEESAIVLSLLKSDLRPMEDVLSEFDSKFESARYLSVCNSLSMMLQDQQMFKNTERLIAFGIIYQCYSSQKPSFNPFLSEMISAACNEQLEKSERAFLLHLLQWNSYNNVKEILKLSAVDYIRSFDPSTHDFPELGELQREYGDKADPGPSSHIFADYSLKKLLHDPDVPRGCDPNSPEFDVQAGVNPRIGSGDRDEALSGFLGNLTMGGLGPRWIRPCPPRYPVHQSELLWIDPDNKHELVWDDKMCADTSSGATVRDLLVKGLKVTLSPTEQEDIITELANDPKLVFHCGITPRKLPQLVEHNPQIAVEILTKLNNSTEINDYYEALGNMDMSLHSMEVVNRLTTAVELPKDFIRMYITNCISSCENAKQDKYMQNRLVRLVCVFLQSLIRNKIINVKDLFIEVQAFCIEFSRVREAAGLFRLLKQLDE

SEQ ID NO: 104397 - protein, 813 aa, Arabidopsis thaliana
  peptide (1)..(813): Ceres Seq. ID no. 13614934
MSMFLVFVMSGPIVVEGRAFFVFGDSLVDSGNNNYLVTTARADSPPYGIDFPTRRPTGRFSNGLNIPDLISEAIGNEEPPLPYLSPELRGRSLLNGANFASAGIGILNDTGFQFINIIRMYQQLDYFQQYQQRVSRLIGKPQTQRLVSQALVLITVGGNDFVNNYFLFPYSARSRQFTLPDYVRLLISEYKKILLRLNSLGVGRVLVTGAGPLGCAPAELARSGTSNGRCSAELQRAASLYDPQLLQMINELNKKIGRNVFIAANTNQMQEDFLSTPRRYGFVTSKVACCGQGPYNGMGLCTVLSNLCPNRELYVFWDAFHPTEKANRMIVRHILTGTTKYMNPMNLKHETLKTKSLQRDRLGIEFGNPGLGMNRSTMMIMRIEESAIVLSLLKSDLRPMEDVLSEFDSKFESARYLSVCNSLSMMLQDQQMFKNTERLIAFGIIYQCYSSQKPSFNPFLSEMISAACNEQLEKSERAFLLHLLQWNSYNNVKEILKLSAVDYIRSFDPSTHDFPELGELQREYGDKADPGPSSHIFADYSLKKLLHDPDVPRGCDPNSPEFDVQAGVNPRIGSGDRDEALSGFLGNLTMGGLGPRWIRPCPPRYPVHQSELLWIDPDNKHELVWDDKMCADTSSGATVRDLLVKGLKVTLSPTEQEDIITELANDPKLVFHCGITPRKLPQLVEHNPQIAVEILTKLNNSTEINDYYEALGNMDMSLHSMEVVNRLTTAVELPKDFIRMYITNCISSCENAKQDKYMQNRLVRLVCVFLQSLIRNKIINVKDLFIEVQAFCIEFSRVREAAGLFRLLKQLDE

SEQ ID NO: 104398 - protein, 811 aa, Arabidopsis thaliana
  peptide (1)..(811): Ceres Seq. ID no. 13614935
MFLVFVMSGPIVVEGRAFFVFGDSLVDSGNNNYLVTTARADSPPYGIDFPTRRPTGRFSNGLNIPDLISEAIGNEEPPLPYLSPELRGRSLLNGANFASAGIGILNDTGFQFINIIRMYQQLDYFQQYQQRVSRLIGKPQTQRLVSQALVLITVGGNDFVNNYFLFPYSARSRQFTLPDYVRLLISEYKKILLRLNSLGVGRVLVTGAGPLGCAPAELARSGTSNGRCSAELQRAASLYDPQLLQMINELNKKIGRNVFIAANTNQMQEDFLSTPRRYGFVTSKVACCGQGPYNGMGLCTVLSNLCPNRELYVFWDAFHPTEKANRMIVRHILTGTTKYMNPMNLKHETLKTKSLQRDRLGIEFGNPGLGMNRSTMMIMRIEESAIVLSLLKSDLRPMEDVLSEFDSKFESARYLSVCNSLSMMLQDQQMFKNTERLIAFGIIYQCYSSQKPSFNPFLSEMISAACNEQLEKSERAFLLHLLQWNSYNNVKEILKLSAVDYIRSFDPSTHDFPELGELQREYGDKADPGPSSHIFADYSLKKLLHDPDVPRGCDPNSPEFDVQAGVNPRIGSGDRDEALSGFLGNLTMGGLGPRWIRPCPPRYPVHQSELLWIDPDNKHELVWDDKMCADTSSGATVRDLLVKGLKVTLSPTEQEDIITELANDPKLVFHCGITPRKLPQLVEHNPQIAVEILTKLNNSTEINDYYEALGNMDMSLHSMEVVNRLTTAVELPKDFIRMYITNCISSCENAKQDKYMQNRLVRLVCVFLQSLIRNKIINVKDLFIEVQAFCIEFSRVREAAGLFRLLKQLDE

SEQ ID NO: 104399 - DNA, 1668 bp, Arabidopsis thaliana
  misc_feature (1)..(1668): Ceres Seq. ID no. 13614936
  misc_feature (1)..(1668): Ortholog of  Ceres SEQ ID NO 14311862 as cited in SEQ ID NO 51654
  misc_feature (1)..(1668): Ortholog of  Ceres SEQ ID NO 13597334 as cited in SEQ ID NO 64244
  misc_feature (1)..(1668): Ortholog of  Ceres SEQ ID NO 14303165 as cited in SEQ ID NO 65181
  misc_feature (1)..(1668): Ortholog of  Ceres SEQ ID NO 15224550 as cited in SEQ ID NO 0
tttctaatatctctttccatttcttgaaatggtcctcctctcaccttaactttataagaatctgaccacctctcaggtttccagtttcttcactttctcgttctctggacactgaatgtgatacatatatagaagaagaaagctataagagattgatcgatggaggtgaatgttcttgcatccaagagaagtcttctcctttttcttcttattgtaagtctctctttgagccagaaggtcagacatatctctgcctttaacgacaccaaaccatacagacaagtcagtagcttgagacttgcgaggatccaaaagcacttgaacaagatcaacaagtctcctgtcttcaccattcagagtccagatggtgatgtaatagattgtgtacccaaaagaaagcagccagctttggatcatccactcttaaagcatcacaagattcagaaagcaccgaagaaaatgccgaagatgaagggaaaagatgatgatgttaaagaagcagagaatgtattggaaggtgcatggcaaatgtggcacgtgaacggcacgaggtgccctaaggggaccgttcccatacgacgcaacacaatgaacgatgtgctcagagccaagtctttgtttgactttggcaaaaagcgacggagtatttaccttgatcaacggacagaaaagcctgatgcccttggtaccaatggacatgagcatgcgatcgcttatacagaatcatcgtcggagatatatggagcaaaggcgactataaacgtttgggatccaaagatagaagaagtgaatgagtttagtctctctcagatttggattctctctggatctttcgtaggtcctgatctcaatagtattgaagctggctggcaggtcagtccggagctgtatggtgacaacagaccaagattgttcacttattggacgagtgattcatatcaagcaacaggatgttacaatcttctatgttcgggatttatccaaacaaataacaagattgccattggagcagccatatctcctctttctacgttcaaaggaaaccagtttgatatcacaatactcatttggaaggatccgaaaatggggaattggtggatgggtttaggggatagcacactagtcgggtattggccagccgagctattcacgcacttggccgaccacgcgactaccgtggaatggggcggtgaagtcgtcaacacacgtgcttcaggcaggcacacgacgacccaaatgggctctggtcattttccagacgaagggtttgggaaagcaagttattttcggaatttggaagttgtggattcggacaacagtctcgtaccggtgcatgatgtcaagatactagccgagaacaccgaatgttacgacattaagagttcgtatagtaatgaatggggaacttatttttactatggtgggccggggtttaatcctaggtgtaattgaaattaaagtgtacatagttcgggttggaggagtggaggaaaaaaaagagggggtcgaaatatgtaatttttttcaagtatgggtagtgaaagattgaatattggcttattgtttttgatttgtcatattgttggttgaaatctagtaatttattgccctcataggaaaaagaagtgtgtatgcaataatgaaagtatgagacaaatttttctttgc

SEQ ID NO: 104400 - protein, 430 aa, Arabidopsis thaliana; identical to SEQ ID NO: 41204
  peptide (1)..(430): Ceres Seq. ID no. 13614937

SEQ ID NO: 104401 - protein, 330 aa, Arabidopsis thaliana; identical to SEQ ID NO: 41205
  peptide (1)..(330): Ceres Seq. ID no. 13614938

SEQ ID NO: 104402 - protein, 327 aa, Arabidopsis thaliana; identical to SEQ ID NO: 41206
  peptide (1)..(327): Ceres Seq. ID no. 13614939

SEQ ID NO: 104403 - DNA, 2004 bp, Arabidopsis thaliana
  misc_feature (1)..(2004): Ceres Seq. ID no. 13614943
  misc_feature (1)..(2004): Ortholog of  Ceres SEQ ID NO 14309934 as cited in SEQ ID NO 20583
  misc_feature (1)..(2004): Ortholog of  Ceres SEQ ID NO 13654989 as cited in SEQ ID NO 63117
  misc_feature (1)..(2004): Ortholog of  Ceres SEQ ID NO 13584744 as cited in SEQ ID NO 69137
acattcattttctctggtctttgattgcttttcttttcactgcttaggttctttgtctgttaggtttagagagatcctttccaaagatccaaagctggaaactttctagtcaatgctgcttaagatctgactttttcccttcaatgtcgctctgaaatcccctaaatttttgggcccatcaggtgaataaagcggaggtcagaagatgggttctggtttaaatgacacattatctcggaactacaatggtttggagctatgggagataatagtgattgttctctccgcgatattcgttgtagttttagctatatcgctatggcttactttcagaagaaaaacctctagatcttcttctaatctaatccctgttagtcgccagattcctcctagtgttcctgaagagattaaagagattagagtcgacgaggtttcttcaagcaatggtgggaatggatacccctctattagtgagaaatttggcgataaagaacccgaaaaagggataaaagcagagtcagaaaatggcgatagtagccggtcaggctcgtttaatcacttggagaaaaaagacggatcgagcgtatcttctgctaatcctttgacagctccatctcctttgtctggtcttcctgagttttctcaccttggatggggacattggttcactcttagagatcttcagatggctactaatcagttttcaagggataatatcatcggtgatggtggatatggagttgtttaccgcggtaaccttgttaatggtactcctgttgctgttaaaaagttgctcaacaatttaggacaagctgataaagacttcagagttgaagttgaagctataggtcacgttcgacataaaaacttggtccgccttctcggatattgtatggaaggaacgcagaggatgctggtgtatgagtatgttaacaatggaaatttggagcaatggctccgtggagacaatcaaaatcatgagtatcttacatgggaggcacgagtgaaaattcttattgggacagccaaagcgctcgcgtaccttcacgaggcgattgagccaaaagtggtgcacagagacattaagtctagtaacattctgattgatgacaaattcaattctaaaatttctgactttggacttgctaaactacttggtgctgataagagttttataactactagagttatgggtaccttcggttacgtagctccagagtatgcgaattccggtcttctgaatgagaaaagcgatgtctacagcttcggggttgtactcttggaagctataactggtagatatccggtagactatgctcgtccaccacccgaggtacatttggtggagtggctgaagatgatggtccaacaaagacgatcagaagaagtggttgatccaaaccttgaaacaaaaccatctacaagtgctttgaaaagaacactattgactgctttgagatgtgttgatccaatgtctgagaaaagaccgaggatgagccaagttgcacgtatgcttgaatccgaagaatacccaattgctagagaggataggagaagacgaaggagtcagaacgggacaacaagagattcagatcctccgaggaacagcacagacactgacaagagtgagtaccatgacctaaagcctgaaggtggatagccattggaaataatggaggtgtaaattgtcgtaaagtctcgagctttatgggaagtttcaagtccttagttcttctccagatcttctgcgttatttgatgtttcttttcttttgtaataaggagagagagagagagtgaatgagttagtgagtgttcatcgttcgtttgttgcttgtatagtatttgtttgttgtattatcgtttgcttctccacgttttgcaatgtaggttgtttttggactaagtaaacgctatttgcaggttttgtagggtatgtaagtctttgagagaaacgacgtgtaatttgcaatttgcttgtggaagatattgttatttgagagag

SEQ ID NO: 104404 - protein, 484 aa, Arabidopsis thaliana; identical to SEQ ID NO: 29831
  peptide (1)..(484): Ceres Seq. ID no. 13614944

SEQ ID NO: 104405 - protein, 324 aa, Arabidopsis thaliana; identical to SEQ ID NO: 29832
  peptide (1)..(324): Ceres Seq. ID no. 13614945

SEQ ID NO: 104406 - protein, 255 aa, Arabidopsis thaliana; identical to SEQ ID NO: 29833
  peptide (1)..(255): Ceres Seq. ID no. 13614946

SEQ ID NO: 104407 - DNA, 1562 bp, Arabidopsis thaliana
  misc_feature (1)..(1562): Ceres Seq. ID no. 13614947
  misc_feature (1)..(1562): Ortholog of  Ceres SEQ ID NO 14311989 as cited in SEQ ID NO 54997
acttgaatagagatcattcgtatttcatcgacgtttctaattcgcaatcacaattgttttcttcaaggaattggtttgcttgctttgatcctcagttttgtcaaaggtcttttttttttttcctggacttgctaaaatctcttgtggcttttgctctgatacttgttagtttgggtttcgtgagtctcgctttataaaggatatgggacaaaagagatggttcttcttgttggcaatttttgtttgtcttgtttcatcttcatgtggtagagttctcaagtttaagagcgatgatggtcgacctgtgtacaatcatacgcttgccatcacacttgtggagtatacttctgcggtctatatgtctgatttgtcagaactcttcacttggacatgcgaaagatgcaatggtttgacaaagggttttgaggtaatagagataatagttgacgttgagcactgcttacaggcatatgttggggtggctaaggatttgaatgctatcattattgcatttcggggaactcaagaacaccatacaaaattgggtctcagacttgttctggaaacagctcgatctaaattaccctgatatgccagatgcaatggtgcaccatggcttttatagtgcttatcacaatacaactgtacggcctgcagttttggatgcagtaaaacgagcaaaggaatcctatggggccaacctcaacatcatggtgactggtcattcaatgggaggagccatggcttccttttgtgcgctagacctagttgttaatgaaggagaagaaaacgtacaagttatgacatttgggcaacctcgtgttgggaatgctgcttttgcatcttatttcaatttgcttgtgcctaataccttccggatcatacatgaccgtgacatagttcctcatctgcctccttactatcatcttttccctcaaaaaacatatcaccacttccccacagaggtgtggttgacagaactaagtattttgaatattgttatccgtggtgtggaaaaagtttgtgacaacaccggtgaagatcctacatgcagcagatcggtaatgggaaatagcatatctgaccatttaacgtactttggagtggagttgatgggtgagacttggaggcaatgtaacatagtgatgggccatgagatggagagttacagtaggaaagattcaaagggtaacatattcctttcgcggacagttccttccacggaggtaatcaaaacaaaaagtatatccaaaaccggaatctcaagtctataggagttggttgattcgagactcgaacaagaatgcttgcttgaaagggaggttgggagattcaaatgtgcaggaagaagaagggttctttcattctttgtggtcgtcaaagaaagtgaaacaaatgacaatcaagacattgtaaataagtcgtaggttgataccataataccatgtagcaaaaacaatacactgttcatttgttattcccttaatttaaatccatgatcacatatgtattggattcaaccttgtaaatatgtgaatgaatatccaattgctgtggatggt

SEQ ID NO: 104408 - protein, 259 aa, Arabidopsis thaliana
  peptide (1)..(259): Ceres Seq. ID no. 13614948
MLSLLHFGELKNTIQNWVSDLFWKQLDLNYPDMPDAMVHHGFYSAYHNTTVRPAVLDAVKRAKESYGANLNIMVTGHSMGGAMASFCALDLVVNEGEENVQVMTFGQPRVGNAAFASYFNLLVPNTFRIIHDRDIVPHLPPYYHLFPQKTYHHFPTEVWLTELSILNIVIRGVEKVCDNTGEDPTCSRSVMGNSISDHLTYFGVELMGETWRQCNIVMGHEMESYSRKDSKGNIFLSRTVPSTEVIKTKSISKTGISSL

SEQ ID NO: 104409 - protein, 227 aa, Arabidopsis thaliana
  peptide (1)..(227): Ceres Seq. ID no. 13614949
MPDAMVHHGFYSAYHNTTVRPAVLDAVKRAKESYGANLNIMVTGHSMGGAMASFCALDLVVNEGEENVQVMTFGQPRVGNAAFASYFNLLVPNTFRIIHDRDIVPHLPPYYHLFPQKTYHHFPTEVWLTELSILNIVIRGVEKVCDNTGEDPTCSRSVMGNSISDHLTYFGVELMGETWRQCNIVMGHEMESYSRKDSKGNIFLSRTVPSTEVIKTKSISKTGISSL

SEQ ID NO: 104410 - protein, 223 aa, Arabidopsis thaliana
  peptide (1)..(223): Ceres Seq. ID no. 13614950
MVHHGFYSAYHNTTVRPAVLDAVKRAKESYGANLNIMVTGHSMGGAMASFCALDLVVNEGEENVQVMTFGQPRVGNAAFASYFNLLVPNTFRIIHDRDIVPHLPPYYHLFPQKTYHHFPTEVWLTELSILNIVIRGVEKVCDNTGEDPTCSRSVMGNSISDHLTYFGVELMGETWRQCNIVMGHEMESYSRKDSKGNIFLSRTVPSTEVIKTKSISKTGISSL

SEQ ID NO: 104411 - DNA, 1439 bp, Arabidopsis thaliana
  misc_feature (1)..(1439): Ceres Seq. ID no. 13614951
  misc_feature (1)..(1439): Ortholog of  Ceres SEQ ID NO 15175775 as cited in SEQ ID NO 57075
aaacgagttgctacaatggcctcacactaggatcttcactttctcgcactttccctctcattttcccgatcatagaaacagcattgtacagagatttcaaagaatgtcactttgctcttccttcaacgtattcgcttcctactcaccaaaacccaaaaccatcttcaaagattccaaattcatttcacaatttcaggtaaagtcgtctcctttagcttcaacattccacacaaatgaatcctcaacgagtcttaagtataagagagcgagactcaaaccaatttcatctctagactcgggaatttcagaaatcgctacatcaccttcattcaggaacaaaagccctaaagatataaacgttttagtggttggttcaactgggtacataggtagatttgtagtgaaagagatgatcaaaagagggttcaatgtgattgctgttgcgagagagaagagtgggattagaggcaaaaacgacaaggaagagactttgaagcaattacaaggcgccaatgtgtgtttctctgatgttactgagttagatgttcttgagaaatctattgagaatctaggatttggtgttgatgttgttgtttcctgtctcgctagtcgtaatggagggattaaagattcgtggaagattgattatgaagctaccaaaaacagtcttgtagctgggaagaagtttggtgctaagcattttgttttgctctctgcgatttgtgtgcagaagcctttactggagtttcagagagcgaaactgaagttcgaagcagagttgatggatttggctgagcaacaagactctagctttacatacagcattgtgagaccaacggcttttttcaagagcttaggtggtcaagttgagattgtgaaagatgggaaaccttacgtgatgtttggagatggtaagctatgcgcttgtaaaccgatcagcgaacaagatttagcagcgtttatagcggattgcgtgttggaagagaacaagatcaatcaagttttgccaattggtggaccaggcaaggcattaacgccattagagcaaggagagattctgtttaagattcttgggagagagcctaagttcttgaaagtacctatcgagattatggattttgtgattggtgttctcgattctattgcaaagatctttccttcggttggagaggctgccgaatttgggaagattggaaggtattacgccgcagagagtatgttgattcttgatccagagactggagagtatagcgaggagaagacaccgagttacgggaaagacacgcttgaggatttctttgcgaaagtgatcagagaaggcatggcgggtcaagaactcggtgaacagttcttctagtatgaattgtttttgtgcgaaatgagtttgctgtgtagtttgtaactgatgagattataaatataaaacctgtgaatttgag

SEQ ID NO: 104412 - protein, 451 aa, Arabidopsis thaliana
  peptide (1)..(451): Ceres Seq. ID no. 13614952
NELLQWPHTRIFTFSHFPSHFPDHRNSIVQRFQRMSLCSSFNVFASYSPKPKTIFKDSKFISQFQVKSSPLASTFHTNESSTSLKYKRARLKPISSLDSGISEIATSPSFRNKSPKDINVLVVGSTGYIGRFVVKEMIKRGFNVIAVAREKSGIRGKNDKEETLKQLQGANVCFSDVTELDVLEKSIENLGFGVDVVVSCLASRNGGIKDSWKIDYEATKNSLVAGKKFGAKHFVLLSAICVQKPLLEFQRAKLKFEAELMDLAEQQDSSFTYSIVRPTAFFKSLGGQVEIVKDGKPYVMFGDGKLCACKPISEQDLAAFIADCVLEENKINQVLPIGGPGKALTPLEQGEILFKILGREPKFLKVPIEIMDFVIGVLDSIAKIFPSVGEAAEFGKIGRYYAAESMLILDPETGEYSEEKTPSYGKDTLEDFFAKVIREGMAGQELGEQFF

SEQ ID NO: 104413 - protein, 417 aa, Arabidopsis thaliana
  peptide (1)..(417): Ceres Seq. ID no. 13614953
MSLCSSFNVFASYSPKPKTIFKDSKFISQFQVKSSPLASTFHTNESSTSLKYKRARLKPISSLDSGISEIATSPSFRNKSPKDINVLVVGSTGYIGRFVVKEMIKRGFNVIAVAREKSGIRGKNDKEETLKQLQGANVCFSDVTELDVLEKSIENLGFGVDVVVSCLASRNGGIKDSWKIDYEATKNSLVAGKKFGAKHFVLLSAICVQKPLLEFQRAKLKFEAELMDLAEQQDSSFTYSIVRPTAFFKSLGGQVEIVKDGKPYVMFGDGKLCACKPISEQDLAAFIADCVLEENKINQVLPIGGPGKALTPLEQGEILFKILGREPKFLKVPIEIMDFVIGVLDSIAKIFPSVGEAAEFGKIGRYYAAESMLILDPETGEYSEEKTPSYGKDTLEDFFAKVIREGMAGQELGEQFF

SEQ ID NO: 104414 - protein, 315 aa, Arabidopsis thaliana
  peptide (1)..(315): Ceres Seq. ID no. 13614954
MIKRGFNVIAVAREKSGIRGKNDKEETLKQLQGANVCFSDVTELDVLEKSIENLGFGVDVVVSCLASRNGGIKDSWKIDYEATKNSLVAGKKFGAKHFVLLSAICVQKPLLEFQRAKLKFEAELMDLAEQQDSSFTYSIVRPTAFFKSLGGQVEIVKDGKPYVMFGDGKLCACKPISEQDLAAFIADCVLEENKINQVLPIGGPGKALTPLEQGEILFKILGREPKFLKVPIEIMDFVIGVLDSIAKIFPSVGEAAEFGKIGRYYAAESMLILDPETGEYSEEKTPSYGKDTLEDFFAKVIREGMAGQELGEQFF

SEQ ID NO: 104415 - DNA, 1294 bp, Arabidopsis thaliana
  misc_feature (1)..(1294): Ceres Seq. ID no. 13614955
  misc_feature (1)..(1294): Ortholog of  Ceres SEQ ID NO 15175690 as cited in SEQ ID NO 55466
  misc_feature (1)..(1294): Ortholog of  Ceres SEQ ID NO 14306381 as cited in SEQ ID NO 58812
ataatcatctaaagactcagcctttaagtatccccagaagtcgtatgaccttacgtagcttaatccttgagatgcgttcgagaccgcatcgtgtggtccacgaccttgccgccgccgcagctgccgattccacttctgtgtcatcgcaagattatcgctggtcagagattcctgaagagcttcttagggagattctgattcgtgttgaagcggcggacggtggcggatggccgtcacgacgcagcgtggtggcttgtgccggcgtttgtcgtggctggcggctacttatgaacgaaaccgtcgttgtccctgagatctcttctaagttgactttccccatctctctcaagcagcctggtccaagggattcactggttcaatgctttatcaaacgtaatcgaattacgcaatcatatcatctctatctcggattaaccaactctttaacggatgatgggaagtttttgcttgctgcgtgtaagttgaagcacacaacttgtacggattacattatctctttacgttctgatgatatgtcgagaagaagccaagcttatgttggcaaagtgagatcgaacttcctaggaacgaaattcactgtctttgatggaaatctgctgccttcaacgggagccgcaaagttgagaaagagccgatcttataatcccgcaaaagtttcagcaaaagttcctcttggaagttatcctgtcgctcatatcacatatgagctgaatgtcttaggatcccggggaccaagaaagatgcaatgtcttatggacacaatacctacaagcacaatggagcctcaaggagtagcttcagaaccatcagagtttcccttactcggtactcggtcaaccttatccaggtctcagtcaaaaccattacgcagtagctcaagccacctgaaagaaacaccattagtgctgagcaacaagacaccacggtggcacgagcagctacgctgctggtgcttgaatttccatggccgtgtcacagtagcgtcagtgaagaactttcagctcgtggcagcaggagctagctgtggcagtggcacgggaatgtcaccggagaggcagagcgagcggattatattgcagtttgggaaagtcgggaaagatatgttcacgatggattatggatacccgatctcagctttccaggcttttgccatttgcttgagcagctttgagactagaatcgcttgtgaatgatttacaagactttgttaagatatcgctatatctatcttgtaaagagcaatttgtagccttttgtaaattgtgttcttttt

SEQ ID NO: 104416 - protein, 403 aa, Arabidopsis thaliana
  peptide (1)..(403): Ceres Seq. ID no. 13614956
NHLKTQPLSIPRSRMTLRSLILEMRSRPHRVVHDLAAAAAADSTSVSSQDYRWSEIPEELLREILIRVEAADGGGWPSRRSVVACAGVCRGWRLLMNETVVVPEISSKLTFPISLKQPGPRDSLVQCFIKRNRITQSYHLYLGLTNSLTDDGKFLLAACKLKHTTCTDYIISLRSDDMSRRSQAYVGKVRSNFLGTKFTVFDGNLLPSTGAAKLRKSRSYNPAKVSAKVPLGSYPVAHITYELNVLGSRGPRKMQCLMDTIPTSTMEPQGVASEPSEFPLLGTRSTLSRSQSKPLRSSSSHLKETPLVLSNKTPRWHEQLRCWCLNFHGRVTVASVKNFQLVAAGASCGSGTGMSPERQSERIILQFGKVGKDMFTMDYGYPISAFQAFAICLSSFETRIACE

SEQ ID NO: 104417 - protein, 389 aa, Arabidopsis thaliana
  peptide (1)..(389): Ceres Seq. ID no. 13614957
MTLRSLILEMRSRPHRVVHDLAAAAAADSTSVSSQDYRWSEIPEELLREILIRVEAADGGGWPSRRSVVACAGVCRGWRLLMNETVVVPEISSKLTFPISLKQPGPRDSLVQCFIKRNRITQSYHLYLGLTNSLTDDGKFLLAACKLKHTTCTDYIISLRSDDMSRRSQAYVGKVRSNFLGTKFTVFDGNLLPSTGAAKLRKSRSYNPAKVSAKVPLGSYPVAHITYELNVLGSRGPRKMQCLMDTIPTSTMEPQGVASEPSEFPLLGTRSTLSRSQSKPLRSSSSHLKETPLVLSNKTPRWHEQLRCWCLNFHGRVTVASVKNFQLVAAGASCGSGTGMSPERQSERIILQFGKVGKDMFTMDYGYPISAFQAFAICLSSFETRIACE

SEQ ID NO: 104418 - protein, 380 aa, Arabidopsis thaliana
  peptide (1)..(380): Ceres Seq. ID no. 13614958
MRSRPHRVVHDLAAAAAADSTSVSSQDYRWSEIPEELLREILIRVEAADGGGWPSRRSVVACAGVCRGWRLLMNETVVVPEISSKLTFPISLKQPGPRDSLVQCFIKRNRITQSYHLYLGLTNSLTDDGKFLLAACKLKHTTCTDYIISLRSDDMSRRSQAYVGKVRSNFLGTKFTVFDGNLLPSTGAAKLRKSRSYNPAKVSAKVPLGSYPVAHITYELNVLGSRGPRKMQCLMDTIPTSTMEPQGVASEPSEFPLLGTRSTLSRSQSKPLRSSSSHLKETPLVLSNKTPRWHEQLRCWCLNFHGRVTVASVKNFQLVAAGASCGSGTGMSPERQSERIILQFGKVGKDMFTMDYGYPISAFQAFAICLSSFETRIACE

SEQ ID NO: 104419 - DNA, 1498 bp, Arabidopsis thaliana
  misc_feature (1)..(1498): Ceres Seq. ID no. 13614959
  misc_feature (1)..(1498): Ortholog of  Ceres SEQ ID NO 14314536 as cited in SEQ ID NO 52436
gtcgatcaaacttgatttcttcaaaattgttttggtttctattggttcgattatgatggaaggctcttcaattcaaccgcccagaaattttgttctcgctaaagattcttctactggttcttcttcttcttcttcttcttctcaggttaaagaacaatctgttgaagatgtatccagatctcagccaagtggaagccaattggatgtttctatccaaataccaccaaaaccgacgcctagtttaggaattttgagaaatctgagtctgaaaaggaaagcttctctaccaaactatgagagaagattgctactaagtcctagtgtttcagaaaccagtgaaaagcctcttgttgcaagtccgatcacatcgccttactggaaaaggtgtttgtcacttccttctagtaattctgctaaactgtctctggttgtatctacaacgcctgtttccgctgtggtgcatagtgaacagcctaagtctaataaagatggtcttcatgcatctgtttcaagatccttgtccatgaacagagtgattgtacgagctgtctcttttgacgacaacaaaaatcacatttcaaatgaagcaaatggcgatcaaatcactccagttcctgcagaagaaacagaagaagaaattcctgaagaagaagcagtatgcaggatttgtcttgatgtgtgcgaagaaggtaacacactgaaaatggaatgcagttgcaaaggtgacctcagacttgttcacgagcattgtgccattaagtggtttagtacaaaaggaacacgaatctgcgatgtatgcagacaagaagtccggaacttaccagtgatactcctccgtgtcccaacaattaatcaacttaccaatagacgggaactcactcagcagagttcagagccacaaagcatcagtgttgggcaagagtttgtagtgcttgtactcatcagcaccgtctgctacttcttcttccttgaacatttactgattcgtgacttgaattcacaggcaatatttgttgcagcgccattttcattcacccttgcactcttagcctcaacttttgccgtcatcctcgcgatcagagaatacatatggacatacgcagctcttgagtttgcactagtggcattgcttgttcatctattatatgctacacttcgtgtgccggttatctatgcaatgctttttgcagggatactgggtttcgggatggcaatgtgcttaaacttgttgtgcatttgttattcctctcggcctgtgcggtttccgcggaatacaaacttagtataaagatagtctcttctgttcttaaagttcggatttgaaagggtaaattgctgcatagatagatgggttctcttacaacattgagacctgtagatatacaagttctttgtagtttgtacttttgtatgaaaataacttttgtggaattacagtgagaatgtgtgatttgtgtacatcaagtgaaagagctgttgtgaatgagattctaggttc

SEQ ID NO: 104420 - protein, 428 aa, Arabidopsis thaliana
  peptide (1)..(428): Ceres Seq. ID no. 13614960
SIKLDFFKIVLVSIGSIMMEGSSIQPPRNFVLAKDSSTGSSSSSSSSQVKEQSVEDVSRSQPSGSQLDVSIQIPPKPTPSLGILRNLSLKRKASLPNYERRLLLSPSVSETSEKPLVASPITSPYWKRCLSLPSSNSAKLSLVVSTTPVSAVVHSEQPKSNKDGLHASVSRSLSMNRVIVRAVSFDDNKNHISNEANGDQITPVPAEETEEEIPEEEAVCRICLDVCEEGNTLKMECSCKGDLRLVHEHCAIKWFSTKGTRICDVCRQEVRNLPVILLRVPTINQLTNRRELTQQSSEPQSISVGQEFVVLVLISTVCYFFFLEHLLIRDLNSQAIFVAAPFSFTLALLASTFAVILAIREYIWTYAALEFALVALLVHLLYATLRVPVIYAMLFAGILGFGMAMCLNLLCICYSSRPVRFPRNTNLV

SEQ ID NO: 104421 - protein, 411 aa, Arabidopsis thaliana
  peptide (1)..(411): Ceres Seq. ID no. 13614961
MMEGSSIQPPRNFVLAKDSSTGSSSSSSSSQVKEQSVEDVSRSQPSGSQLDVSIQIPPKPTPSLGILRNLSLKRKASLPNYERRLLLSPSVSETSEKPLVASPITSPYWKRCLSLPSSNSAKLSLVVSTTPVSAVVHSEQPKSNKDGLHASVSRSLSMNRVIVRAVSFDDNKNHISNEANGDQITPVPAEETEEEIPEEEAVCRICLDVCEEGNTLKMECSCKGDLRLVHEHCAIKWFSTKGTRICDVCRQEVRNLPVILLRVPTINQLTNRRELTQQSSEPQSISVGQEFVVLVLISTVCYFFFLEHLLIRDLNSQAIFVAAPFSFTLALLASTFAVILAIREYIWTYAALEFALVALLVHLLYATLRVPVIYAMLFAGILGFGMAMCLNLLCICYSSRPVRFPRNTNLV

SEQ ID NO: 104422 - protein, 410 aa, Arabidopsis thaliana
  peptide (1)..(410): Ceres Seq. ID no. 13614962
MEGSSIQPPRNFVLAKDSSTGSSSSSSSSQVKEQSVEDVSRSQPSGSQLDVSIQIPPKPTPSLGILRNLSLKRKASLPNYERRLLLSPSVSETSEKPLVASPITSPYWKRCLSLPSSNSAKLSLVVSTTPVSAVVHSEQPKSNKDGLHASVSRSLSMNRVIVRAVSFDDNKNHISNEANGDQITPVPAEETEEEIPEEEAVCRICLDVCEEGNTLKMECSCKGDLRLVHEHCAIKWFSTKGTRICDVCRQEVRNLPVILLRVPTINQLTNRRELTQQSSEPQSISVGQEFVVLVLISTVCYFFFLEHLLIRDLNSQAIFVAAPFSFTLALLASTFAVILAIREYIWTYAALEFALVALLVHLLYATLRVPVIYAMLFAGILGFGMAMCLNLLCICYSSRPVRFPRNTNLV

SEQ ID NO: 104423 - DNA, 710 bp, Arabidopsis thaliana
  misc_feature (1)..(710): Ceres Seq. ID no. 13614963
  misc_feature (1)..(710): Ortholog of  Ceres SEQ ID NO 12422485 as cited in SEQ ID NO 20557
atggcaaaagctactctcacctggttttgttgttctcttttctctctctcttttctctctctcttttctatttccgtcggactcagtggagaagaagaagaagatccaaatcgatccgttgaaaaggaatttcgaatttgctgtgcgatgtcgagtgcggtggacgctacgggaaacccgatccctacttcggcggttttaacggcgtcagcgaagcatataggtatgaggtgtatgccggagaatgttgcgttcctcaaatgcaagaagaatgatccaaacccagagaagtgtctcgacaaaggtcgtgacgtcactcgctgcgtgcttggcttgctgaaggatcttcaccagaagtgccaaaaggagatggatgattatgttgggtgtatgtattactacacaaacgagtttgatctgtgtaggaaagagcaagaagccttcgagaaagtgtgtcccttgaaatgagaatcacaagttcttgtcatgttttgatttgtatctcataataaagcaaaatgttcatttttgaatgagctttactctctccatctcttgtttgttgtcatcccatttatttcctctcagatgctttcgtagtgagttccaaagacaactaaatgactcagttttattgttcgatggttcactaatcagcacagaatggaacaattgtttttatctgcttatattctaccatacttgacagt

SEQ ID NO: 104424 - protein, 155 aa, Arabidopsis thaliana
  peptide (1)..(155): Ceres Seq. ID no. 13614964
MAKATLTWFCCSLFSLSFLSLFSISVGLSGEEEEDPNRSVEKEFRICCAMSSAVDATGNPIPTSAVLTASAKHIGMRCMPENVAFLKCKKNDPNPEKCLDKGRDVTRCVLGLLKDLHQKCQKEMDDYVGCMYYYTNEFDLCRKEQEAFEKVCPLK

SEQ ID NO: 104425 - protein, 106 aa, Arabidopsis thaliana; identical to SEQ ID NO: 28463
  peptide (1)..(106): Ceres Seq. ID no. 13614965

SEQ ID NO: 104426 - protein, 80 aa, Arabidopsis thaliana; identical to SEQ ID NO: 28464
  peptide (1)..(80): Ceres Seq. ID no. 13614966

SEQ ID NO: 104427 - DNA, 1747 bp, Arabidopsis thaliana
  misc_feature (1)..(1747): Ceres Seq. ID no. 13614967
  misc_feature (1)..(1747): Ortholog of  Ceres SEQ ID NO 13597407 as cited in SEQ ID NO 64106
acatctatctctttctctctctttccttgcaaattttcagctctcaaagagttaagagttagagagagagaggatggccattagggaaatcaaagatgtagagaggggtgaaatagtgaataaggtagaagatcttgggaaaccatttttgactcatgaagatgatgaaaaagagagtgagaataatgaatcatatttgatggttctcttcagtacttttgttgctgtctgtggctcctttgagtttggctcttgtgttggatactcagcgcctactcagtcatctataagacaagatctcaatctctcccttgcagagttctccatgtttggatccatcttaactatcggtgcaatgcttggtgctgttatgagtgggaaaatttcagatttctccggccgaaaaggggcaatgaggacatcagcttgcttctgcattacaggttggctcgctgtcttcttcaccaagggggcattgttacttgatgtaggaaggttctttacaggatatggaattggagttttttcttatgtggtccctgtgtacattgctgagatatctcccaagaatctccgaggtggactcacaacactgaaccaactcatgattgtgatcggctcatcggtttctttcttgatcggatctctcatttcttggaaaactcttgccctaaccggacttgctccctgcattgttttgctctttggcttgtgcttcatacccgaatctcctcgatggctggcaaaagcaggccatgagaaagagtttcgcgtagccctgcaaaagctgcgaggaaaagatgcagatatcacaaatgaagcagacggtattcaagtctcgattcaagctctagagattcttccaaaagcaagaatccaagaccttgtgtccaagaaatatggtcgatctgtcatcattggtgtttccctgatggtattccaacagtttgttggaatcaatgggatcggattctacgcaagtgaaacgtttgtaaaagccggatttacctctgggaaactaggaacaatcgctatcgcttgtgttcaggtgccaataactgttcttggaacaatcttgatagataaatctggacgaaggccactaattatgatttcagctggtggtatcttcttgggatgcatactcacaggcacatctttcttactcaagggacagagcttgttgcttgaatgggtcccttccttagccgttggaggtgtacttatctatgtagctgctttctccatcggaatgggacctgttccttgggtgataatgtctgagatatttccgataaacgtaaagggaatcgcaggaagcttagtggtactagtgaattggtctggtgcttgggctgtttcttacactttcaacttcctcatgagctggagctctccaggtacattctatttgtactcggcttttgcagctgcgacgataatatttgtggcgaagatggtgccagagacgaaagggaagacactggaagagatccaagcttgtattcgaagagaaacataagaagaaagatacaatcaatgttatgggaatgttatcaaatgaaaagactcgaactattcccgttggtgagctcaaagtggagtagagtaaaaattatcgccgggagataacgttgaaagtccgatgatgaggcataagggttttgcatgaatgttatgagaataggtttacttttatgtatttgttcacgttttaagttttcatcaaataggtttttgattggta

SEQ ID NO: 104428 - protein, 482 aa, Arabidopsis thaliana; identical to SEQ ID NO: 26636
  peptide (1)..(482): Ceres Seq. ID no. 13614968

SEQ ID NO: 104429 - protein, 440 aa, Arabidopsis thaliana; identical to SEQ ID NO: 26637
  peptide (1)..(440): Ceres Seq. ID no. 13614969

SEQ ID NO: 104430 - protein, 398 aa, Arabidopsis thaliana; identical to SEQ ID NO: 26638
  peptide (1)..(398): Ceres Seq. ID no. 13614970

SEQ ID NO: 104431 - DNA, 2265 bp, Arabidopsis thaliana
  misc_feature (1)..(2265): Ceres Seq. ID no. 13614971
  misc_feature (1)..(2265): Ortholog of  Ceres SEQ ID NO 14310784 as cited in SEQ ID NO 58503
atggatgttaaggagcatagaaacaaccctagtccttgccacagaggatcacagctaaccaaatattcccttgcacgtaaaatccgacactggtctatttcgtcgtcttcgacctcgagggaatctactgtagctctcacactatccactcttcatcggcagctagatttccgggtcctcagtatcgggtcagatctagatccggatccggagacgctgagaatgaaacacttcagaactgagcgagtccgtgcgactccgaagctcttcacctacgttctcgtcggtttcatcgctctactcggcttgacttgcctctactacggctcttcgttcgctcccggatccagaaagtccgatgagttcgatggatctaataaccgcgttcgcaccggaatcggatccttgaggaatcgagatattgtgcttgcagtgagccgtttcgaagttcctaaaagtgttccgatatgtgattcgagacactcggagttgataccgtgtttggatcggaaccttcattaccagttgaaattgaaactcaatttatcgttaatggagcactatgagcatcattgtcctccatcagaacggcgtttcaattgccttgttccgcctcctgttggttataagatcccgttaaggtggcctgtgagtagagacgaggtgtggaaggcgaatatcccgcacacacaccttgctcaagagaagtctgatcagaattggatggttgttaatggtgataagatcaattttcctggtggaggaacacatttccacaacggagctgacaaatacattgtttccctggctcagatgctgaaattccctggtgacaaactcaacaatgggggaagcattcggaatgttcttgacgttggttgtggggtagctagcttcggagcctatcttctttcacatgacatcatagccatgtctcttgcccctaatgatgtccaccagaaccagatccagtttgctctagaacgagggattccatcaacacttggtgttcttgggacaaagcggcttccatacccaagcagatcatttgaacttgctcactgctctagatgtcggatagattggcttcaaagagatgggatcttgttactggaacttgataggttgctcagacctggtggctactttgtatactcgtcgcctgaagcttatgcacacgacccagagaacagaaagattgggaatgcaatgcatgatctctttaagagaatgtgttggaaggtcgtggccaaacgagaccaatctgttatatggggaaaaccgatatccaacagctgttacttgaagagggatccgggtgtcctgcctccgctttgtccttctggagatgacccagatgcaacttggaatgtctcaatgaaggcttgcatatcaccttactcagtgaggatgcacaaagaaagatggagtggactcgttccctggccacggaggctgacagctcctccaccacgtcttgaagaaattggtgtcactcctgagcaattccgtgaagatacggaaacatggcggcttagagtgatagaatactggaaactgctgaaaccaatggtgcaaaagaactccataagaaacgtgatggacatgagctcaaaccttggcggtttcgcagctgctctaaacgataaagatgtatgggtaatgaatgtcatgcccgttcaatcctctccaagaatgaagatcatttacgaccgtggccttatcggagccactcatgattggtgtgaagcctttgacacatacccacgaacgtttgatcttatccacgcatggaacaccttcacagaaacccaagcacgtggatgcagctttgaagatctgcttatcgagatggatcggatactacgcccagaaggatttgtcataattcgtgacacaactgacaatattagctatatcaagaagtatctgacattattgaaatgggataaatggtccacagagacaactccaaaaggtgatcctctgtcgaccaaagacgagatagttttgatcgccagaaagaaactttggagcttgcccgccatttcagtgtcctgaaatctaacagtcaacaggcgaatgaatgagatttacagcatcagaggcgcgtagctgaggaaaatactcagcaatggagaagtgtaaattacacgacattcatacatagttgttaacttgttatgcatttgttgtaggaaactgcaaaatcttcttattttgcgattttcatgttcctctttataattaaaatctgcttttgtg

SEQ ID NO: 104432 - protein, 686 aa, Arabidopsis thaliana
  peptide (1)..(686): Ceres Seq. ID no. 13614972
MDVKEHRNNPSPCHRGSQLTKYSLARKIRHWSISSSSTSRESTVALTLSTLHRQLDFRVLSIGSDLDPDPETLRMKHFRTERVRATPKLFTYVLVGFIALLGLTCLYYGSSFAPGSRKSDEFDGSNNRVRTGIGSLRNRDIVLAVSRFEVPKSVPICDSRHSELIPCLDRNLHYQLKLKLNLSLMEHYEHHCPPSERRFNCLVPPPVGYKIPLRWPVSRDEVWKANIPHTHLAQEKSDQNWMVVNGDKINFPGGGTHFHNGADKYIVSLAQMLKFPGDKLNNGGSIRNVLDVGCGVASFGAYLLSHDIIAMSLAPNDVHQNQIQFALERGIPSTLGVLGTKRLPYPSRSFELAHCSRCRIDWLQRDGILLLELDRLLRPGGYFVYSSPEAYAHDPENRKIGNAMHDLFKRMCWKVVAKRDQSVIWGKPISNSCYLKRDPGVLPPLCPSGDDPDATWNVSMKACISPYSVRMHKERWSGLVPWPRRLTAPPPRLEEIGVTPEQFREDTETWRLRVIEYWKLLKPMVQKNSIRNVMDMSSNLGGFAAALNDKDVWVMNVMPVQSSPRMKIIYDRGLIGATHDWCEAFDTYPRTFDLIHAWNTFTETQARGCSFEDLLIEMDRILRPEGFVIIRDTTDNISYIKKYLTLLKWDKWSTETTPKGDPLSTKDEIVLIARKKLWSLPAISVS

SEQ ID NO: 104433 - protein, 612 aa, Arabidopsis thaliana; identical to SEQ ID NO: 40965
  peptide (1)..(612): Ceres Seq. ID no. 13614973

SEQ ID NO: 104434 - protein, 502 aa, Arabidopsis thaliana; identical to SEQ ID NO: 40966
  peptide (1)..(502): Ceres Seq. ID no. 13614974

SEQ ID NO: 104435 - DNA, 1326 bp, Arabidopsis thaliana
  misc_feature (1)..(1326): Ceres Seq. ID no. 13614975
  misc_feature (1)..(1326): Ortholog of  Ceres SEQ ID NO 13662984 as cited in SEQ ID NO 64419
atcaagctccggactcaaaacccaaatctctgagaaagaatcaaagccaatattcgatcaatcaagctggagtggaagaaagggaaagtgaacccattcgtgaggggaataagatcgaggttaattaggcccaaatcgatgcctttaaatgtagtcaatgatcgtgatggctcttctcgcattcttttgaccgaccctgccggatcaactgctgaggtgcttttgtatggagggcaagtggtttcttggaaaaacgaaaggagagagaagttgctttatatgagcaccaaggcgcaattgaagccaccaaaggcgatcaggggagggttacctatcagctttccacagtttggaaattttggtgcacttgagcgacatggatttgcccgtaacagattctggtcacttgataatgatccttcacctctgcctccggctaaccagcaatcaactgttgatttagtattgaagtctactgaagatgatttgaagatatggcctcatagctttgaacttcgtgttcgcatatctatcagtcctggaaaacttacaataatcccgcgtgtgaggaacactgacacaaaggcattttcctttatgttttcacttcgtaactacttatatgtatccgatataagtgaagttcgggttgagggtctggagacgcttgattatctggacaacttgatgcgtagagaaagattcacggagcaggcagatgcaattacctttgacggcgaggttgataaagtgtacttgaacacgccgacaaagattgccatcatagatcatgagaggaaaagaactatcgagttgcgaaaggaaggcatgccaaatgcagctgtgtggaacccttgggacaagaaggccaagagtattgcagatatgggagatgaggattacacaacaatgctgtgtgtagattctggtgctatagaaagcccaattgtgttgaagccacatgaagagtggaaaggaagacaagaactctctatcgtctcctcaagctactgcagcggtcagctcgatccacgtaaggttctttatggggattactgataatatatatgaaatcaaacttggaaacatcatcagtcttatattttgatcgtcttcatggataaagcgattgatgcccaaacaaatctgatatgatatgattttgtttggagctattgccctttgtgagtttctgacaggcacacagaaagataggcaaatgtagtattttgtaacgttgccttctgtgtggcggtcagggacttattaatatgtattatggttcacccggaaacatgagtcttatattgaatcgtcttcttcatg

SEQ ID NO: 104436 - protein, 306 aa, Arabidopsis thaliana
  peptide (1)..(306): Ceres Seq. ID no. 13614976
MPLNVVNDRDGSSRILLTDPAGSTAEVLLYGGQVVSWKNERREKLLYMSTKAQLKPPKAIRGGLPISFPQFGNFGALERHGFARNRFWSLDNDPSPLPPANQQSTVDLVLKSTEDDLKIWPHSFELRVRISISPGKLTIIPRVRNTDTKAFSFMFSLRNYLYVSDISEVRVEGLETLDYLDNLMRRERFTEQADAITFDGEVDKVYLNTPTKIAIIDHERKRTIELRKEGMPNAAVWNPWDKKAKSIADMGDEDYTTMLCVDSGAIESPIVLKPHEEWKGRQELSIVSSSYCSGQLDPRKVLYGDY

SEQ ID NO: 104437 - protein, 259 aa, Arabidopsis thaliana
  peptide (1)..(259): Ceres Seq. ID no. 13614977
MSTKAQLKPPKAIRGGLPISFPQFGNFGALERHGFARNRFWSLDNDPSPLPPANQQSTVDLVLKSTEDDLKIWPHSFELRVRISISPGKLTIIPRVRNTDTKAFSFMFSLRNYLYVSDISEVRVEGLETLDYLDNLMRRERFTEQADAITFDGEVDKVYLNTPTKIAIIDHERKRTIELRKEGMPNAAVWNPWDKKAKSIADMGDEDYTTMLCVDSGAIESPIVLKPHEEWKGRQELSIVSSSYCSGQLDPRKVLYGDY

SEQ ID NO: 104438 - protein, 153 aa, Arabidopsis thaliana
  peptide (1)..(153): Ceres Seq. ID no. 13614978
MFSLRNYLYVSDISEVRVEGLETLDYLDNLMRRERFTEQADAITFDGEVDKVYLNTPTKIAIIDHERKRTIELRKEGMPNAAVWNPWDKKAKSIADMGDEDYTTMLCVDSGAIESPIVLKPHEEWKGRQELSIVSSSYCSGQLDPRKVLYGDY

SEQ ID NO: 104439 - DNA, 1162 bp, Arabidopsis thaliana
  misc_feature (1)..(1162): Ceres Seq. ID no. 13614979
  misc_feature (1)..(1162): Ortholog of  Ceres SEQ ID NO 14314331 as cited in SEQ ID NO 57390
ccagcttgacgatgtcgttgacggagctagacgacggactggttcgcaggatggccatgggcgcagtcttctctgattttggagggaagatacattcggtgggtttccataggactgatgatctattggtcacatccagcgaagatgattcacttcgcctcttcgatatcgccaacgctaaacagctgaagattacataccataagaaacatggcaccgatcgtgtatgctttacccatcatcctagctctctaatttgctcttctcgatacaatttggagtccactggtgaatccttgagatatctctcaatgtatgataatcggatcctacgctactttaaagggcataaagacagggttgtatcactttgtatgtctcctataaatgatagcttcatgtctggttctctcgaccgaagtgttagactctgggatcttcgtgtaaatgcctgccagggaattctacatctacgtggtagacctgcagttgcgtatgaccaacaaggccttgtgtttgcaattgcaatggaaggaggtgctgttaaattatttgattccaggtgttatgacaagggtccctttgacacatttctggtgggtggggatactgctgaggttaacgatataaaattcagcaacgatgggaaatccatgctcctaacgactacaaataacaatatctacgttcttgatgcatatcgtggagagaagaaatgtggttttagtttggagccttcacagggtacacccatagaggccaccttcacaccagatggcaagtatgttctgtcaggttcaggtgatggaaccttacatgcgtggaacatcgagaacccatctgaggtggcgaggtgggagaacaacataggagtagtgtcgtgtctgaaatgggcaccacgtagagccatgttcgttgctgcttctacggttctcacattctggatcccaaacgacggtgaatcaccagcccccgccgatcctcctaccgatcaacaacagtgacgacatatatgtttccattatgcacttgtgtatcgttttttaatgttgacaattagaaaaatttggaagcagtagtatgttaatcaaatttagagtttatgaatttgagtctagatggttacaatatgttttctttaatgactatttactcttatttt

SEQ ID NO: 104440 - protein, 333 aa, Arabidopsis thaliana
  peptide (1)..(333): Ceres Seq. ID no. 13614980
SLTMSLTELDDGLVRRMAMGAVFSDFGGKIHSVGFHRTDDLLVTSSEDDSLRLFDIANAKQLKITYHKKHGTDRVCFTHHPSSLICSSRYNLESTGESLRYLSMYDNRILRYFKGHKDRVVSLCMSPINDSFMSGSLDRSVRLWDLRVNACQGILHLRGRPAVAYDQQGLVFAIAMEGGAVKLFDSRCYDKGPFDTFLVGGDTAEVNDIKFSNDGKSMLLTTTNNNIYVLDAYRGEKKCGFSLEPSQGTPIEATFTPDGKYVLSGSGDGTLHAWNIENPSEVARWENNIGVVSCLKWAPRRAMFVAASTVLTFWIPNDGESPAPADPPTDQQQ

SEQ ID NO: 104441 - protein, 330 aa, Arabidopsis thaliana
  peptide (1)..(330): Ceres Seq. ID no. 13614981
MSLTELDDGLVRRMAMGAVFSDFGGKIHSVGFHRTDDLLVTSSEDDSLRLFDIANAKQLKITYHKKHGTDRVCFTHHPSSLICSSRYNLESTGESLRYLSMYDNRILRYFKGHKDRVVSLCMSPINDSFMSGSLDRSVRLWDLRVNACQGILHLRGRPAVAYDQQGLVFAIAMEGGAVKLFDSRCYDKGPFDTFLVGGDTAEVNDIKFSNDGKSMLLTTTNNNIYVLDAYRGEKKCGFSLEPSQGTPIEATFTPDGKYVLSGSGDGTLHAWNIENPSEVARWENNIGVVSCLKWAPRRAMFVAASTVLTFWIPNDGESPAPADPPTDQQQ

SEQ ID NO: 104442 - protein, 317 aa, Arabidopsis thaliana
  peptide (1)..(317): Ceres Seq. ID no. 13614982
MAMGAVFSDFGGKIHSVGFHRTDDLLVTSSEDDSLRLFDIANAKQLKITYHKKHGTDRVCFTHHPSSLICSSRYNLESTGESLRYLSMYDNRILRYFKGHKDRVVSLCMSPINDSFMSGSLDRSVRLWDLRVNACQGILHLRGRPAVAYDQQGLVFAIAMEGGAVKLFDSRCYDKGPFDTFLVGGDTAEVNDIKFSNDGKSMLLTTTNNNIYVLDAYRGEKKCGFSLEPSQGTPIEATFTPDGKYVLSGSGDGTLHAWNIENPSEVARWENNIGVVSCLKWAPRRAMFVAASTVLTFWIPNDGESPAPADPPTDQQQ

SEQ ID NO: 104443 - DNA, 1838 bp, Arabidopsis thaliana
  misc_feature (1)..(1838): Ceres Seq. ID no. 13614987
  misc_feature (1)..(1838): Ortholog of  Ceres SEQ ID NO 15173355 as cited in SEQ ID NO 61844
accagctctactcattgattttacacactcaccagcacctctatttctttctcactctccaagtctcctctgtgaaagctgaaagctcatcttcttccacgtgatttgtcttcccgatcaccaaacctttccggtaattactctcccttgcgttcgacgccatcttccttggagttctcttcaatcaaccggtaaatcttccactgattttgaagaagattcttccatgttcgatctggttcgtctccagagatcgagagttgaattgcctcgaaacagctctagtttcaccagagacgcgcgaccgatagaaataaagagactcgaagctgcgtgtaccggagacgaatggcgggaaaattgacttgagcgcgattttctgtgtggatccaaaatgaagaagaaggtgtctcagcagaagttactgtacagatggaagaggaaggtatacgccacgttgatgttcgctttctgctttgggactttcgtatttatacaagctcgtttcgcatctatacaagctcgtttcaatcgaatctctgcgtctctcgattcgcttaaaaagcctcgtctagatcagagaccacagattgccttcctcttcattgcccggaatcgactccctctcgagtttgtctgggatgctttctttaagggtgaggatggaaagttctcaatatatgttcattctagacctggatttgttctcaacgaggctacaacgcgatccaagtactttttggatcggcaacttaatgacagtatacaggtagattggggtgaatcaaccatgattgaagcagaacgtgtattgcttagacatgcacttagagattcatttaatcaccgctttgtttttctttctgatagctgcatacctctgtacagtttcagctacacgtataactacatcatgtcaacaccaactagtttcgttgatagctttgcagatacaaaagatagccgttataatcctagaatgaatcccattattcctgttcgtaactggagaaaaggatcacagtgggtcgttctgaatagaaaacacgcagaaattgtggtgaatgatacctctgtctttcctatgtttcagcagcattgcaggagaaaatcacttccagagttttggcgagatcgtcctgtaccagctgaaggttggaaggaacacaactgtatacctgatgagcactatgttcagacattgctatctcaaaagggtgtagatagcgaactcacacgaagatcactgacacactcagcttgggacctttcatcctcgaaaagtaatgaacgtcgtggatggcatcctatgacttacaagttttctgatgctactcctgatcttatacagtccattaagggaatcgacaatatcaactacgagactgaataccggcgagaatggtgtagcagtaaagggaaaccatcaccgtgcttcctcttcgccaggaagttcactcgtcccgccgctctccgcctactccgtgaaactatcttgttagagggcaaagagcatgacaataagtagatccttcaccatttaaagcatatattacacataggtacgtaagataaccaagagttactatgtttgtacaattgtactactgtgatttcatctgtaatacttacgatgacgaatttacatagaaacttacaccatttggtaaatgagtaaaagccagccttgataaaagatggacggtagagaaagagctcagcaggggtgacctgagaacacatgaaaacgagagctgtaacaatgacgtagcgtcattacagccgttgattactcgtgtgttctcatatcaaccctgtcgagatccactaccttcatg

SEQ ID NO: 104444 - protein, 377 aa, Arabidopsis thaliana
  peptide (1)..(377): Ceres Seq. ID no. 13614988
MKKKVSQQKLLYRWKRKVYATLMFAFCFGTFVFIQARFASIQARFNRISASLDSLKKPRLDQRPQIAFLFIARNRLPLEFVWDAFFKGEDGKFSIYVHSRPGFVLNEATTRSKYFLDRQLNDSIQVDWGESTMIEAERVLLRHALRDSFNHRFVFLSDSCIPLYSFSYTYNYIMSTPTSFVDSFADTKDSRYNPRMNPIIPVRNWRKGSQWVVLNRKHAEIVVNDTSVFPMFQQHCRRKSLPEFWRDRPVPAEGWKEHNCIPDEHYVQTLLSQKGVDSELTRRSLTHSAWDLSSSKSNERRGWHPMTYKFSDATPDLIQSIKGIDNINYETEYRREWCSSKGKPSPCFLFARKFTRPAALRLLRETILLEGKEHDNK

SEQ ID NO: 104445 - protein, 355 aa, Arabidopsis thaliana
  peptide (1)..(355): Ceres Seq. ID no. 13614989
MFAFCFGTFVFIQARFASIQARFNRISASLDSLKKPRLDQRPQIAFLFIARNRLPLEFVWDAFFKGEDGKFSIYVHSRPGFVLNEATTRSKYFLDRQLNDSIQVDWGESTMIEAERVLLRHALRDSFNHRFVFLSDSCIPLYSFSYTYNYIMSTPTSFVDSFADTKDSRYNPRMNPIIPVRNWRKGSQWVVLNRKHAEIVVNDTSVFPMFQQHCRRKSLPEFWRDRPVPAEGWKEHNCIPDEHYVQTLLSQKGVDSELTRRSLTHSAWDLSSSKSNERRGWHPMTYKFSDATPDLIQSIKGIDNINYETEYRREWCSSKGKPSPCFLFARKFTRPAALRLLRETILLEGKEHDNK

SEQ ID NO: 104446 - protein, 245 aa, Arabidopsis thaliana; identical to SEQ ID NO: 31081
  peptide (1)..(245): Ceres Seq. ID no. 13614990

SEQ ID NO: 104447 - DNA, 1162 bp, Arabidopsis thaliana
  misc_feature (1)..(1162): Ceres Seq. ID no. 13614995
  misc_feature (1)..(1162): Ortholog of  Ceres SEQ ID NO 15178884 as cited in SEQ ID NO 0
acgcatttaaattaatatttatggataatatggttaataaataaggaacttctatttatatcacaaaaggtcactggtcttcttcgtgtgacttcaccactttctcatctcccacaaaaatggctctctcacttctttcagtctttatctttttccatgtctttaccaatgttgtttttgctgcttcaaatgaggaatccaacgccttagtttctttaccaacgccaacacttccatcgccatctccggctaccaaaccgccgtcgccagctctcaaaccgccgacgccgtcgtacaagccacccacgctgccaactactcctattaaaccacccaccacaaaacctccggtcaaacctccaactattccggttacaccagtaaaacctccggtttcaactcctccgatcaaactaccgccggtacaaccacctacgtacaaacccccaacgccaacagttaaaccaccgtccgtccaaccacctacgtacaaacccccaactccaacggttaaaccacccactacatcaccggttaaaccacccactacgccaccagttcaatcaccgccggtccaaccacctacgtacaaacccccaacgtcaccggttaaaccacccaccacaactccaccggttaaaccccccaccacgacgccaccggtccaaccacctacgtacaatcccccaactacaccggttaaaccacctacagcgccgcctgtcaaacctccaacaccacctcccgtaagaactcggatagattgcgtgcctttatgtgggacgaggtgtgggcaacactcgaggaagaacgtatgtatgagagcgtgcgtcacgtgctgctaccgctgcaagtgtgttcccccaggcacctacggtaataaggagaagtgtggatcttgttacgccaacatgaagacacgtggtggaaaatccaaatgtccttgaacctttatatgacgatggttgttaaacgaaataatttaaatcaatggagtttttataagtttgtaatgcgtttgtttttgttatagtaatattgagttggatctttgtttacgggacgtagaatactaaataatgaaaaaaaccttctcgatgaattaagggttttatgaatttgttttgtattgaataatatagggatggataaagttttatta

SEQ ID NO: 104448 - protein, 275 aa, Arabidopsis thaliana; identical to SEQ ID NO: 40593
  peptide (1)..(275): Ceres Seq. ID no. 13614996

SEQ ID NO: 104449 - DNA, 1260 bp, Arabidopsis thaliana
  misc_feature (1)..(1260): Ceres Seq. ID no. 13614997
  misc_feature (1)..(1260): Ortholog of  Ceres SEQ ID NO 13597325 as cited in SEQ ID NO 63935
aacgcatattacgcagccaccacacagcggagagagagagagaagaaacagaaacagaaacagagctcgagctcgagacgctcaatattaatggcggccgcatcagcacgagctttcttcatgctctctcgtgtaactgacctttcaaagaaaaagctaatccttcaccaaccaccaccgtcgtcatctcctcaccggctaccttatgctccgaatcgtgcggtgtcttcctccgctgtaatcagctgtctcagcggtggtggtgtttcctccgacgattcgtatgtatctactcgtcggtctaagttagatcgaggtttcgctgtgatcgcgaatttggtgaatcggatccagccgcttgatacgtctgttatctctaaaggcttatctgattcagctaaggattcgatgaaacagacgatttcttctatgcttggtcttcttccttccgatcaattttccgtttccgttactatctccgaacagcctctttatcgtctccttatttcttccatcatcaccgggtatacattgtggaatgcggagtatcgtgtatcactgaggaggaattttgatataccgattgatcctagaaaggaggaggaggatcaatcttcgaaagacaatgttagatttggttcagagaagggaatgagtgaggatttagggaattgtgttgaggaatttgagagactgagtcctcaggtgtttggagacttgtcacctgaagcgttgagttatattcagcttttgcagtctgagctatcttccatgaaagaggagctagattcacaaaagaagaaagctttgaggatagaatgtgagaaaggaaacaggaatgatttgttggattatttgcgttctttagatcccgagatggtgactgagttatctcaactgtcttcaccggaagtggaagagattgtgaaccagcttgtccaaaacgtattagagaggctcttcgaagaccagactacttcaaatttcatgcaaaatcctggcataaggactacagaaggtggtgatggaactggtagaaaggtggacacatccagggattaccttgcaaagctccttttctggtgcatgctattgggacatcatttaagaggtttggagaatagattacatctcagctgtgttgttgggttgctgtaatatcagagaatcataaaaaggagacaagataaaaaagaaacacaaatgtatattcttctcccccattttgatttctttaatctaagcgttaagttattatct

SEQ ID NO: 104450 - protein, 385 aa, Arabidopsis thaliana
  peptide (1)..(385): Ceres Seq. ID no. 13614998
NAYYAATTQRREREKKQKQKQSSSSRRSILMAAASARAFFMLSRVTDLSKKKLILHQPPPSSSPHRLPYAPNRAVSSSAVISCLSGGGVSSDDSYVSTRRSKLDRGFAVIANLVNRIQPLDTSVISKGLSDSAKDSMKQTISSMLGLLPSDQFSVSVTISEQPLYRLLISSIITGYTLWNAEYRVSLRRNFDIPIDPRKEEEDQSSKDNVRFGSEKGMSEDLGNCVEEFERLSPQVFGDLSPEALSYIQLLQSELSSMKEELDSQKKKALRIECEKGNRNDLLDYLRSLDPEMVTELSQLSSPEVEEIVNQLVQNVLERLFEDQTTSNFMQNPGIRTTEGGDGTGRKVDTSRDYLAKLLFWCMLLGHHLRGLENRLHLSCVVGLL

SEQ ID NO: 104451 - protein, 355 aa, Arabidopsis thaliana; identical to SEQ ID NO: 39386
  peptide (1)..(355): Ceres Seq. ID no. 13614999

SEQ ID NO: 104452 - protein, 345 aa, Arabidopsis thaliana; identical to SEQ ID NO: 39387
  peptide (1)..(345): Ceres Seq. ID no. 13615000

SEQ ID NO: 104453 - DNA, 1630 bp, Arabidopsis thaliana
  misc_feature (1)..(1630): Ceres Seq. ID no. 13615001
  misc_feature (1)..(1630): Ortholog of  Ceres SEQ ID NO 14310419 as cited in SEQ ID NO 55050
  misc_feature (1)..(1630): Ortholog of  Ceres SEQ ID NO 13657789 as cited in SEQ ID NO 66154
aacaaacaaacaaaaacacaccaattccttcattcatcttctccatttcgtaattcgtacacttcactctcaagtctctctaagccacaaaccactgaagaagaatccatctaagagctgttaaaaattgatgaagcttcgaatatgaagaaattgaaaagctattacatgcaagttcgtaaccagcaacaatctcttgaccgaaaatggattcttccattagcaatcggatccatttgttctctctttctcttgttgctaacgaacttagcttcttcttctggtcaaactcgtttgattccattttcagtttacggatttagatcctccgtcttcgtcgaatccaagataaatccagtatccgtctcactcaccgtctccgtctctcctcctccgccgccacgtctcgcttatctaatctccggctcctctggtgacggtcagatgctgaaacgaactctaatggcgctttatcatcccaacaaccagtacgttgttcatctcgatcgggaatcttcaccggaggaacgattggatctcagtggttttgtggcgaatcatactctgtttcagagatttcaaaatgttcggatgattgttaaggctaatttcgttacgtatcgtggtccaactatggtggctaatacacttcacgctgcagcgattttgcttcgtgaaggtggtgattgggattggttcatcaatctcagtgcctctgattatcctctcgtaacacaagatgatctgttgcatacgttttcgtatcttcctcgagatctcaatttcatcgatcatacaagcaacattggctggaaagagtctcatagagcaaagcctataattattgatcctggtttgtatatgtcaaagaaagctgatgttttctgggtttcacagaagagaagtatgcctacagctttcaaactcttcacaggatctgcgtggatgatgttatctagaccttttgtggattatttcatatggggatgggataatcttcctcgaattgtgttaatgtattacgcaaacttcctttcatcgccagaaggttacttccacactgtgatttgcaatgctcgagagtttaccaacacaacggttaacagtgacttacatttcatctcatgggacaatcctccaaagcaacatcctcaccatcttacattagatgatttccagagaatggtggacagtaacgctccttttgctaggaaattccgtagagatgagcctgttctcgataagattgattcggaactattgtttcggagtcacgggatggtcactccgggtggttggtgtattggtacgagggaaaacgggagcgatccgtgtgcggtgattggtgatacgtcggttattaaacctggtcttggagctaaacggatcgagaaactcataacttatttgttatctactgagaatttcagaccacggcaatgccggtaatggcaaattagagttttgtcatagagatggttacgtggtttttcacacaaatgaactgtattgattatccgatactttgatatggttgtatagagatctttttggactttcttcatttgagaaagtgcagaaatttcgggaaagatcattgattattggaatttgtcttctattgccgacc

SEQ ID NO: 104454 - protein, 434 aa, Arabidopsis thaliana; identical to SEQ ID NO: 35755
  peptide (1)..(434): Ceres Seq. ID no. 13615002

SEQ ID NO: 104455 - protein, 426 aa, Arabidopsis thaliana; identical to SEQ ID NO: 35756
  peptide (1)..(426): Ceres Seq. ID no. 13615003

SEQ ID NO: 104456 - protein, 334 aa, Arabidopsis thaliana; identical to SEQ ID NO: 35757
  peptide (1)..(334): Ceres Seq. ID no. 13615004

SEQ ID NO: 104457 - DNA, 1235 bp, Arabidopsis thaliana
  misc_feature (1)..(1235): Ceres Seq. ID no. 13615005
  misc_feature (1)..(1235): Ortholog of  Ceres SEQ ID NO 12609869 as cited in SEQ ID NO 52065
  misc_feature (1)..(1235): Ortholog of  Ceres SEQ ID NO 14301506 as cited in SEQ ID NO 61159
  misc_feature (1)..(1235): Ortholog of  Ceres SEQ ID NO 13597124 as cited in SEQ ID NO 64173
  misc_feature (1)..(1235): Ortholog of  Ceres SEQ ID NO 12780602 as cited in SEQ ID NO 65695
cagaatcctccattactcttcttctcgacttcggaatctttcaaagcttcttcgatttttccagaggcaatcatggttaaaggtccaggactctacactgaaatcggcaaaaaggccagagatcttctgtacagggattaccaaggagaccagaaattcagtgtcaccacttactcttcaactggtgttgcgatcactacaacgggaacaaacaaaggaagcttgtttttgggtgatgttgctacccaagtgaagaacaacaacttcactgctgatgtcaaagtttccactgattcttctcttttgaccactcttacctttgatgagcctgcccctggactgaaagttattgttcaggctaagttgcccgatcacaaatctggaaaggctgaggttcagtatttccatgactatgctggtatctctaccagcgttggattcacagctaccccgattgtcaacttctccggtgtggttggaaccaatggtttgtctcttggtactgatgtggcctataacaccgaatctggcaacttcaaacatttcaatgctggtttcaacttcaccaaggatgatttgactgcttccctcattctgaatgacaaaggtgagaaattgaatgcatcctactaccagattgtgagcccgtcgactgtggttggagctgagattagccacaacttcacgaccaaagagaacgccatcactgtcggaactcaacacgcgcttgacccattgaccacagtgaaggcaagagtgaacaatgctggtgtggctaacgctctgatccaacatgagtggcgtccaaagtcgttcttcaccgtttctggagaggttgattctaaggcgatcgataagagtgccaaggttgggattgctctcgctctcaagccctgagaagataccaccaaatgggccctgaagtgggtagaataggtgttatttctttttcgtcttcaaatctttggacaaatcgctgtctggtttgctaaacaatctttcatttgttttttttgttcggtgttgggatttgtagaaaataaaagagaaaaatactattgaaaggatcgtctttgacgataaagaaccattaagatcgttttacttggctctctctcttttattttccgcctctgctacaatactctgttccatatcttttacttggttctctcttttattttctgcctctgctatactttgttccatttggagttcccttagtggatttttct

SEQ ID NO: 104458 - protein, 298 aa, Arabidopsis thaliana
  peptide (1)..(298): Ceres Seq. ID no. 13615006
QNPPLLFFSTSESFKASSIFPEAIMVKGPGLYTEIGKKARDLLYRDYQGDQKFSVTTYSSTGVAITTTGTNKGSLFLGDVATQVKNNNFTADVKVSTDSSLLTTLTFDEPAPGLKVIVQAKLPDHKSGKAEVQYFHDYAGISTSVGFTATPIVNFSGVVGTNGLSLGTDVAYNTESGNFKHFNAGFNFTKDDLTASLILNDKGEKLNASYYQIVSPSTVVGAEISHNFTTKENAITVGTQHALDPLTTVKARVNNAGVANALIQHEWRPKSFFTVSGEVDSKAIDKSAKVGIALALKP

SEQ ID NO: 104459 - protein, 274 aa, Arabidopsis thaliana; identical to SEQ ID NO: 26016
  peptide (1)..(274): Ceres Seq. ID no. 13615007

SEQ ID NO: 104460 - DNA, 1600 bp, Arabidopsis thaliana
  misc_feature (1)..(1600): Ceres Seq. ID no. 13615008
  misc_feature (1)..(1600): Ortholog of  Ceres SEQ ID NO 15176317 as cited in SEQ ID NO 52865
  misc_feature (1)..(1600): Ortholog of  Ceres SEQ ID NO 13518893 as cited in SEQ ID NO 58108
  misc_feature (1)..(1600): Ortholog of  Ceres SEQ ID NO 12617152 as cited in SEQ ID NO 63555
atggcgagaagttctgttttgctatgtttaattctattggttacgttaggagttgtgataagtgtcacatttgccgacaacgttgaattgaaatcaaaagatctagagagcagtaagaaagataagaaggttgatcatgatagtacacacaaagagaagggaggtgaaaaggtagatggtgccggttctgatgatgaagacaacgataaaaaagaaaaaaagaaagagcatgatgtgcaaaaaaaggataaacaacatgaaaacaaagacaaggatgacgagaagaagcatgttgataagaagaagagcggtggtcatgataaagatgatgatgatgaaaagaagcacaaggataaaaagaaggatggacacaatgatgatgatgatagtgatgatgatacggatgatgacgatgacgatgatgatgatgatgatgatgatgatgaagttgatggagatgataatgagaaggagaaaattgggttatacgagctcaagaagggaaatctaactgtcaaattcacaaattggggtgcttcaatcatatctctccatttcccagacaaaaatggtaaaatggacgatattgttcttggctatgatagcgtcaaaacctacaagaccgacaaggtttatttcggagcaaccgttggccgagtagcaaatagaataggaaagggcaaattcaagttgaatggtaaagagtacaagacaagtgtcaacgatggaaaaaacacactccatggtggcaagaaagggtttggggatgttgtgtgggcagttgcaaaacaccagtacgatggcaagaaaccacacattgtcttcactcacacaagtcctgacggcgatcaagggtttccgggagaactcagtgtcacggtgacatataaacttgtcaaagacaatgaattgagtgtggtgatggaggcaaagcctaaggataaagcaactccggtgaacttagctcatcatagttattggaatcttggtggtcataattccggagatattttgtctgaagaaattcaaatcctcggctcgggttatacccccgtcgacggtgagctcattcccaccgggaaaatcaatccggtgaaaggaacagcatacgattttctccaactccgtcctattaaagataatatgaaggatcttaaaacaggatatgatataaattattgcttagatggtaaggcaaaaaagatgagaaaaatagttgaactcgtagataagaaatcagggaggaaaatggagttatccggaaaccaagcgggtttgcaattctataccggagggatgttaaaggatgtcaaagggaagaatggggcagtttaccaagctttcgggggattatgtttagaaacacaaagttatccagacgcattgaaccatcccaaatttccttcacagattgtcgagccagggaaaaaatacaaacacactatgctcttcaagttttctattgtttcatagattgttttagatgttgttacatgaacacccttggaaccatgtccaatgttcatgaacaagaaactaaatacattgtaatattttgtaacaatgcttaaattatcaaattatatgaacctaacgtgaa

SEQ ID NO: 104461 - protein, 490 aa, Arabidopsis thaliana; identical to SEQ ID NO: 27108
  peptide (1)..(490): Ceres Seq. ID no. 13615009

SEQ ID NO: 104462 - protein, 298 aa, Arabidopsis thaliana; identical to SEQ ID NO: 27109
  peptide (1)..(298): Ceres Seq. ID no. 13615010

SEQ ID NO: 104463 - DNA, 1344 bp, Arabidopsis thaliana
  misc_feature (1)..(1344): Ceres Seq. ID no. 13615019
  misc_feature (1)..(1344): Ortholog of  Ceres SEQ ID NO 13594301 as cited in SEQ ID NO 60110
ggagtagaaaaaattaaagctttgagatttctttccttatcgatttttctctccgcgaattgttcgttgttttcttctggcacctgattctcatcttctttcttgtggaatctgggttttgttgcggagttttcgaggttcctcattcgttgcttctgttgaaactctcttttttttttgggtggtttactttgtttttttgttgttgttgctttcaacctttaaatgccctaattttgaggttctagttgtggtttttaagattaggagcagaagccctttcgactaaagttcatgttagctgcaatttgctgaagtattcacagttttgttctgttggaagctctatgtgtttccttctgtgattgaaacacagagagaatgattttaccaaagcagtattgttgcacacactcgccgagctgccaatgcaccaaaggccatttaaacgaagacgtgttgttattagtgttccaacatttgaattggaatccgaaattagttgcaacactttcctgtgtatgcagatggtttgatgatttcgccaaacgggtactatggaaagagttttgcaagactcgtgccccaaaaatgatgcttgatttgcagtctagcggtagtcactgcattgacggtaactggcgagcccttgggaagcttctcatctactgctcaggatgtacacaaggtggtcttttcaatagctctgttcaaatcccaggccactttgtttatagaacccggttctcaagaacattaggaagaagcctccttccgcctcagtgtagaactgatgtactctatgtttgtgatccatgcgagcatcttgaccaaggagaagaaggcgacgtgggtttgttccgtgggattttcaagtcattcccaacatcgaaagttcggaaagtgatcattaacaaggcggttccttttcatccatccgaggtttgcccgtattgtaaagctaagctatggagcatgctacaagctaagataatacctcagagtgcctgcattcgtttggaagcttatgaagactgcattgagtattttgtttgccttaatggacatttgctgggtatctgcactctcgcgcctttgtctgattcagaggatgcaattccaagcgaagataacaatcacacagagaagaaacaagacaatggctttcctagagagaacgtattgaaaaggagaaattctttgttgggtggaagtgaaaatggacctccgccgcaaaaacgactgaccaatcctaatcagtgaaacatctgtaaatttgtgtactactgctaaatttattgtatctgcagagattcttcaacattcatatacagtcaaattatg

SEQ ID NO: 104464 - protein, 293 aa, Arabidopsis thaliana; identical to SEQ ID NO: 40686
  peptide (1)..(293): Ceres Seq. ID no. 13615020

SEQ ID NO: 104465 - protein, 223 aa, Arabidopsis thaliana; identical to SEQ ID NO: 40687
  peptide (1)..(223): Ceres Seq. ID no. 13615021

SEQ ID NO: 104466 - protein, 222 aa, Arabidopsis thaliana; identical to SEQ ID NO: 40688
  peptide (1)..(222): Ceres Seq. ID no. 13615022

SEQ ID NO: 104467 - DNA, 1557 bp, Arabidopsis thaliana
  misc_feature (1)..(1557): Ceres Seq. ID no. 13615026
  misc_feature (1)..(1557): Ortholog of  Ceres SEQ ID NO 15176437 as cited in SEQ ID NO 54861
  misc_feature (1)..(1557): Ortholog of  Ceres SEQ ID NO 15176748 as cited in SEQ ID NO 55581
atgaaaaaaaaagctttgaaattctctctcgacaatggtgtcggaccaggatctagcgaaaggagtcgagactttgcttcgacaatccgaccctagctctctcacatcgttaagcagtattgttcagcagcttgaagctaagttagggttagacctcacggagaagacgactttcatcagagatcagatcaatatcctcctccgtgctcaccaaaacccttctgcctccgtcgcctccgcttcatccgtacaacaatctcaccctcctcctccgccgtcttctcaccagcagcagaatttgcattccggcgtcaatgttcctccgatggcgaaagggcatttcacacttagccatccttcgcaattctctgtttcttctcaatcacaacaatatccttcacatttcgctcttcagcctccttatcactcttatgacctaaatttccggcagccttatccggtttacatgccgccgcaacagcaccagcatcagcagcagtctccgcgacaacaacaatcctctgtgatgctctcacatggcgggaatgcttctctatctgttaatcaagccccaaaagaaagtgctccggctggaactaaaagaaagggtggtcctggaggactaaacaaagtctgtagggtttctccagaacttgaagtagttgttggtgaacctgctcttcctagaactgagattgtgaggcaattgtgggcttatataaggaagaataaccttcaagacccgagtaacaagcggaagatcatctgtgatgatgcgttgcgtgtggtttttgagactgattgcactgacatgttcaagatgaataagttgcttgctaagcatattctcccgcttgatccatcaaaggactctggtcaagcaaaaaaggcaaaaactgaggtggagactaagactgagaccaccgagcctattagttcaactgctattagttcaactgttacattatctgagccacttggtaagttctttggcactggtgagacggagatggcagacgaagagattattcgccgtgtttgggaatacataaaactcaacaatttagaggacccagtaaatccaatggctattcagtgtgatgaaaagctccgagatcttcttggatgtgaaagcatttcagctgtggggataaatgagatgctgaggcgccatatgtacaagcagtcgtgatatcttctggtctgacttaattaactaggaactactagtgtgtgtatctagggaacctacttatgactccttgctgtagaactctgatagggaagaaaagatccttttcacttttaacttcctttaatgctattttaatcttccgttgggttctttgttttagttggttgtgtatcgacatgcttaggttgatgttgtatttagtattgtaccgaaactctagtgttaagggtgaaacggcgcagatgttttgtattaaacgccattcacccatgaatgtcttaggaaaaaaaaactcatgtgtttaactatgttttccctgttggaaatatttgcatcctactgatagaaaaatcttattccct

SEQ ID NO: 104468 - protein, 385 aa, Arabidopsis thaliana; identical to SEQ ID NO: 28899
  peptide (1)..(385): Ceres Seq. ID no. 13615027

SEQ ID NO: 104469 - protein, 288 aa, Arabidopsis thaliana; identical to SEQ ID NO: 28900
  peptide (1)..(288): Ceres Seq. ID no. 13615028

SEQ ID NO: 104470 - protein, 241 aa, Arabidopsis thaliana; identical to SEQ ID NO: 28901
  peptide (1)..(241): Ceres Seq. ID no. 13615029

SEQ ID NO: 104471 - DNA, 623 bp, Arabidopsis thaliana
  misc_feature (1)..(623): Ceres Seq. ID no. 13615030
  misc_feature (1)..(623): Ortholog of  Ceres SEQ ID NO 14309653 as cited in SEQ ID NO 0
aaggacagatttgtaaacattctcaaatccttcaaaaaccctaatttctttctgtgagcttattgagaacgaagaagatgacgggagaggtagtgaaccctaaggcgtatccgttagcagattctcagctttcgataacaataatggatcttgttcaacaagctactaactacaagcagcttaagaagggagctaatgaagctaccaaaacattgaaccgtggaatctctgagttcgttgttatggctgctgatgctgaaccacttgagattcttcttcatcttcctttgcttgccgaagataagaatgtgccatatgtgtttgtaccttcgaaacaagcattgggaagagcatgtggagtaacaagacctgttattgcttgttcagtgacatcgaatgaggcaagccagttgaaatcgcagattcagcatctcaaggatgcaattgagaagctcctgatctaaggatttctgctcagtatgaagagtctctgcaatgtggaatggctctgactgaagttagtttgtgtgatttacctatttgaagaatgtattgtgactggtgttaatgcttagtatgtggatcatcatcgctcatttgtacaattgagtttcttagatttt

SEQ ID NO: 104472 - protein, 128 aa, Arabidopsis thaliana; identical to SEQ ID NO: 26405
  peptide (1)..(128): Ceres Seq. ID no. 13615031

SEQ ID NO: 104473 - protein, 106 aa, Arabidopsis thaliana; identical to SEQ ID NO: 26406
  peptide (1)..(106): Ceres Seq. ID no. 13615032

SEQ ID NO: 104474 - protein, 73 aa, Arabidopsis thaliana; identical to SEQ ID NO: 21543
  peptide (1)..(73): Ceres Seq. ID no. 13615033

SEQ ID NO: 104475 - DNA, 772 bp, Arabidopsis thaliana
  misc_feature (1)..(772): Ceres Seq. ID no. 13615036
  misc_feature (1)..(772): Ortholog of  Ceres SEQ ID NO 15179490 as cited in SEQ ID NO 0
atctgttacgacagttatgtctccgtcgacgacgacgattttcatcggtcccatcttagcggtggacgccgccgtatctcacgcgattcacacggcggcgaaaccattcctcccaccatttgtcctcctcctcctcgaaatctcagctgatttccgattctccttccccgtatccctttccttcctcctctcccctccattacgctctttcctcgtccctttcctcctcggcctcctcttcgatctaatcttcgtcggaatcgtaaaattaatcttccgtcgtgctcgtcccgcttacaatcacccttcaatgtccgccgctgtatcagctgatcactactcgttcccctcaggtcacgcttctcgcgttttcttcgttgctgcatctgttcacttcttctctgctgctgctgaagcttccatgactggtccaagctactccttcttagatggatggatcagagatcataacgatggcgatgtgaaggtagaagttgtggtcgttgtatggatctgggcaacagtgactgcaatttcaaggattcttttaggaagacattacgttctcgatgtagctgctggtgcttttttagggattgtagaagctctctttgctcttcgatttctgagatttgatgaaatgatctttgggaggtaacaaatgtatccaaattgttgttgtttttaacaaattgttctgtaatttttgtttcgattacattgagaagaagaattgtattgttcatgaatcaaagattgttccttttgtttc

SEQ ID NO: 104476 - protein, 218 aa, Arabidopsis thaliana
  peptide (1)..(218): Ceres Seq. ID no. 13615037
SVTTVMSPSTTTIFIGPILAVDAAVSHAIHTAAKPFLPPFVLLLLEISADFRFSFPVSLSFLLSPPLRSFLVPFLLGLLFDLIFVGIVKLIFRRARPAYNHPSMSAAVSADHYSFPSGHASRVFFVAASVHFFSAAAEASMTGPSYSFLDGWIRDHNDGDVKVEVVVVVWIWATVTAISRILLGRHYVLDVAAGAFLGIVEALFALRFLRFDEMIFGR

SEQ ID NO: 104477 - protein, 213 aa, Arabidopsis thaliana; identical to SEQ ID NO: 23670
  peptide (1)..(213): Ceres Seq. ID no. 13615038

SEQ ID NO: 104478 - protein, 115 aa, Arabidopsis thaliana; identical to SEQ ID NO: 23671
  peptide (1)..(115): Ceres Seq. ID no. 13615039

SEQ ID NO: 104479 - DNA, 847 bp, Arabidopsis thaliana
  misc_feature (1)..(847): Ceres Seq. ID no. 13615040
  misc_feature (1)..(847): Ortholog of  Ceres SEQ ID NO 14316367 as cited in SEQ ID NO 57626
  misc_feature (1)..(847): Ortholog of  Ceres SEQ ID NO 14315039 as cited in SEQ ID NO 57668
  misc_feature (1)..(847): Ortholog of  Ceres SEQ ID NO 13664189 as cited in SEQ ID NO 66834
  misc_feature (1)..(847): Ortholog of  Ceres SEQ ID NO 13654321 as cited in SEQ ID NO 67850
atgactgcttcactttctctttctcttttgttcaagtagtttgggagagagaagagaagaagaagacaccctttaagcaaaacagaggattttcattctctgttctgtttgaattattactaatctatcatcttgttgttctcttcgtcgacaatgtcgggaaacaaagaagaagaggatcctcgtatccatggaatcaaaactaagatccgtgtcgttccagattttcccaagaaaggaataatgtttcaagacataacaacagtgttgttggatccgaaagccttcaaagacacaattgatctgtttgtggagaggtacagagacaagaacatctcagtggttgcaggaatagaggctcgtggtttcctattcggtccaccgatcgcgctagccattggagcaaaatttgttcctctgcgcaaacccaagaaactacctggtgaaacaatatttgaggaatacgagttggaatatggaaatgaccgcctagagatgcacataggagccgtcgaggctggcgatcgagctttggtcgttgatgatcttatcgcgactggtggtactctctgcgctgccattaacttgctcgagagggttggagcagaagttgtggaatgtgcatgtgtgatcgagttacccgaattaaagggaaggcagagacttaaggggaagccactatgtatgcttgtggagtaccgatgatgattttagctttacttatttggataaaattattcggttaattaatttatgctccgaaaattcggattatgcagacttcttattattggattctacaatattttgatttaaattctagcggattagctggaacaaataatcc

SEQ ID NO: 104480 - protein, 183 aa, Arabidopsis thaliana; identical to SEQ ID NO: 28570
  peptide (1)..(183): Ceres Seq. ID no. 13615041

SEQ ID NO: 104481 - protein, 153 aa, Arabidopsis thaliana; identical to SEQ ID NO: 28571
  peptide (1)..(153): Ceres Seq. ID no. 13615042

SEQ ID NO: 104482 - DNA, 1154 bp, Arabidopsis thaliana
  misc_feature (1)..(1154): Ceres Seq. ID no. 13615043
  misc_feature (1)..(1154): Ortholog of  Ceres SEQ ID NO 13584238 as cited in SEQ ID NO 64216
gacataacttgcaagctgttgagattttccatcctcgataactttattcttccatatctcttccatttcgctctctatttcacatccccatataacataatatacaatcacacatatcatttctatatagtatttaatggggagacagccatgctgtgacaagctaggggtgaagaaagggccgtggacggtggaggaagataagaagcttataaacttcatactaaccaatggccattgttgctggcgtgctttgccgaagctggccggtctccgtcgctgtggaaagagctgccgcctccggtggactaactatctccggcctgacttaaaacgaggccttctctcgcatgatgaagaacaacttgtcatagatcttcatgctaatctcggcaataagtggtctaagatagcttcaagattacctggaagaacagataacgaaataaaaaaccattggaatactcatatcaagaagaaacttcttaagatgggaatcgatcctatgacccatcaacccctaaatcaagaaccttctaatatcgataattccaaaaccattccgtccaatccagacgatgtctcagtggaaccaaagacaactaacacgaaatacgtggagataagtgtcacgacaacagaagaagaaagtagtagcacggttactgatcaaaacagttcgatggataatgaaaatcatctaattgacaacatttatgatgatgatgaattgtttagttacttatggtccgacgaaactactaaagatgaggcctcttggagtgatagtaactttggtgttggtggaacattatatgaccacaatatctccggcgccgatgcagattttccgatatggtcaccggaaagaatcaatgacgagaagatgtttttggattattgtcaagactttggtgttcatgattttgggttttgactgttcaccattgacatattggcaactctatggagatgaacacaagcattgagttgtcatgtttatacatacgtggcatatacatatatatatatatgtacattatatgtaaacatatacacgcatacaaatcataaacatgtaaggataataaatccatgtaaagcagtaagggtgcaccatggttttcaagtattattaattagggtttggtagg

SEQ ID NO: 104483 - protein, 266 aa, Arabidopsis thaliana; identical to SEQ ID NO: 43012
  peptide (1)..(266): Ceres Seq. ID no. 13615044

SEQ ID NO: 104484 - protein, 148 aa, Arabidopsis thaliana; identical to SEQ ID NO: 43013
  peptide (1)..(148): Ceres Seq. ID no. 13615045

SEQ ID NO: 104485 - protein, 143 aa, Arabidopsis thaliana; identical to SEQ ID NO: 43014
  peptide (1)..(143): Ceres Seq. ID no. 13615046

SEQ ID NO: 104486 - DNA, 784 bp, Arabidopsis thaliana
  misc_feature (1)..(784): Ceres Seq. ID no. 13615055
  misc_feature (1)..(784): Ortholog of  Ceres SEQ ID NO 12610286 as cited in SEQ ID NO 55827
aaaattaaaccagaacttgggaattggaaattggagaaaaatctcagccatggcgattgcttcaacagccaccgttcttttctgctgcgccaaacccaatttccggcgaattcattctgagagccgtccagcttcttctctcaccacctctaacgaacctgtaattcggatccgaagccgcagtttaattcatgacccggttgcgctgtcgggtcttatcggaaccagtttggttgcggctgctttcatcacggcgggaccagatgctactgctttggcggcggtggtggattctcttcagctaagcgaaccgtccaatgcgttgtctttacccacttgggccgttcatgtttccagcgttgtcgaatggattacggcgatggcattggtatggaagtatggagaaagaaagggttatgagtcttggaaaggtctctcatggggaatggtacctttgcttggtggagctctctgtgcatgcacatggcatttcttctacaacgatgaatctcttgaggtgttggtcgctcttcaggcagcactaacggtgtttggtaatatcactctctgcattgctgcctttcggatcaacaagttgtcatccaaaattgaagtctctgaaaagccatgatggctaaaccgatcaatatgagcaaagtataattgaattattaattggaggatcactaagattcttttcccctttgaaaagttctatgagattctatgtcaacgatttaagtatattatatagtctttatatgaggaagatccatgtgcattc

SEQ ID NO: 104487 - protein, 209 aa, Arabidopsis thaliana; identical to SEQ ID NO: 44682
  peptide (1)..(209): Ceres Seq. ID no. 13615056

SEQ ID NO: 104488 - protein, 193 aa, Arabidopsis thaliana; identical to SEQ ID NO: 44683
  peptide (1)..(193): Ceres Seq. ID no. 13615057

SEQ ID NO: 104489 - DNA, 1661 bp, Arabidopsis thaliana
  misc_feature (1)..(1661): Ceres Seq. ID no. 13615102
  misc_feature (1)..(1661): Ortholog of  Ceres SEQ ID NO 13596816 as cited in SEQ ID NO 62287
aatcaaacccaaaagcccaaaacccagaagaacaaaaaatctctcttttgaaaattctccttttgcaaatcattcaagtgaagcacaatcatcttcttcttcttctccagcttcatcaatctcttctagactttttgcgtttacctgaaaaactgttttgatcgtaagtatctgattgcttcgatgtcgctgtcgaatcagattcccgtttactctcgatgaccctttgcttcttcttccactttttttccacagttttctgataactcttctcagatgagaagttctaagttacttcttctcaagttcttcttcttcttcttcttcaatctgacttcgcttgagtatcaagttgatggagcatttgttggaacatatgggataaattatggaaggatagctgacaacataccatctccggagaaagtagttttacttctaaagcaagctaaaattcggaatgtgcgtatatacgatgtagatcacactgttcttgaagcttttagtggaactggtttagaccttgttgttggacttcctaatgggtttttaaaagagatgagttcaaatgctgatcatgctttctcttgggttaaagaaaatattcagtctttcttacccaagactcggattcgcggtatcgctataggtaacgaagttcttggaggcggtgattctgagctcgcgggagctttacttggtgctgctaaaaatgtgtacaatgcgttgaagaaaatgaatctggaggacactgtgcagatcactacggctcattcacaggctgtgttttctgattcctacccgccttcgtcttgtgtgtttaaagagaatgttgttcagttcatgaagccattgttggagttttttcagcagattgggtctcctttttgtttgaatgcttacccttttttggcgtacacttataatccgaaggagattgatatcaactatgctcttttcaagccaacggaagggatatatgacccgaaaaccgatttgcattacgataacatgcttgatgctcagattgatgctgcttacatggcgttgcaagatgctgggtttaagaagatggaggttatgatcactgaaactgggtgggcttctaaaggggattcagatgaacctgcagcaacaccagagaacgcaagaacgtataactataacctcaggaagaggcttgctaagaagaaagggacacctcttagaccaaaaacggtgcttaaagcctatatctttgcattgttcaatgaaaactcaaaaccgggcaagagttctgagacacactttggactttttaaacctgatggaaccatatcatatgacattggattcaacaatctaaagtctgattctcccaagtcactcatttcatcatcaaagtcagctcgttactatgtggcattggtcatctctgtctcggctttcctcttgatgatataaatgcggaaatggtgtgagctttgacgatccttggatttggtcgtacattcgtagcactataatatatattactagggttgggacgctaacgaaatggtaggagcacaaatttactgcaattctcatatatgtagccaagagatatccagaaaagatatcaccagacactatcatatatacacatcttatgtaaaacaaatctaatacataaatttggg

SEQ ID NO: 104490 - protein, 388 aa, Arabidopsis thaliana
  peptide (1)..(388): Ceres Seq. ID no. 13615103
MRSSKLLLLKFFFFFFFNLTSLEYQVDGAFVGTYGINYGRIADNIPSPEKVVLLLKQAKIRNVRIYDVDHTVLEAFSGTGLDLVVGLPNGFLKEMSSNADHAFSWVKENIQSFLPKTRIRGIAIGNEVLGGGDSELAGALLGAAKNVYNALKKMNLEDTVQITTAHSQAVFSDSYPPSSCVFKENVVQFMKPLLEFFQQIGSPFCLNAYPFLAYTYNPKEIDINYALFKPTEGIYDPKTDLHYDNMLDAQIDAAYMALQDAGFKKMEVMITETGWASKGDSDEPAATPENARTYNYNLRKRLAKKKGTPLRPKTVLKAYIFALFNENSKPGKSSETHFGLFKPDGTISYDIGFNNLKSDSPKSLISSSKSARYYVALVISVSAFLLMI

SEQ ID NO: 104491 - protein, 294 aa, Arabidopsis thaliana
  peptide (1)..(294): Ceres Seq. ID no. 13615104
MSSNADHAFSWVKENIQSFLPKTRIRGIAIGNEVLGGGDSELAGALLGAAKNVYNALKKMNLEDTVQITTAHSQAVFSDSYPPSSCVFKENVVQFMKPLLEFFQQIGSPFCLNAYPFLAYTYNPKEIDINYALFKPTEGIYDPKTDLHYDNMLDAQIDAAYMALQDAGFKKMEVMITETGWASKGDSDEPAATPENARTYNYNLRKRLAKKKGTPLRPKTVLKAYIFALFNENSKPGKSSETHFGLFKPDGTISYDIGFNNLKSDSPKSLISSSKSARYYVALVISVSAFLLMI

SEQ ID NO: 104492 - protein, 235 aa, Arabidopsis thaliana
  peptide (1)..(235): Ceres Seq. ID no. 13615105
MNLEDTVQITTAHSQAVFSDSYPPSSCVFKENVVQFMKPLLEFFQQIGSPFCLNAYPFLAYTYNPKEIDINYALFKPTEGIYDPKTDLHYDNMLDAQIDAAYMALQDAGFKKMEVMITETGWASKGDSDEPAATPENARTYNYNLRKRLAKKKGTPLRPKTVLKAYIFALFNENSKPGKSSETHFGLFKPDGTISYDIGFNNLKSDSPKSLISSSKSARYYVALVISVSAFLLMI

SEQ ID NO: 104493 - DNA, 1220 bp, Arabidopsis thaliana
  misc_feature (1)..(1220): Ceres Seq. ID no. 13615106
  misc_feature (1)..(1220): Ortholog of  Ceres SEQ ID NO 15225993 as cited in SEQ ID NO 61065
acccaagatctctccttcttgtttccccagatctgaaatttcaaaagctacccaattttaactcaagactctgaacaacacatctagatccatttccatggcgagcgcctggaaaaaagacaagaaccaaaaacttttatcaccaaagacactaatctcacttcttgtcctttccattatcttcctctcttctctcttcttcttcttctctaactcctctctccaatactccaatccaaatctctccatcaattccccataccctatccctccttttgattgcttcaaatgtccacaatcaaaacccataatcgcaaacgtcgtcgaaaatctcaagtacccttttgtttactctctcgctgatctcggtaatctcccggagaaaccacataagaacattgttaggctacttaaaggtaagccctttaggaaaccagatatctccgcaacgattcaggaggtattggatagtatgagagctagtggtaaaaatgggattgttgttgatgttggagctaatgttggtatggctagctttgctgctgcggttatggggtttaaagttcttgcctttgagcctgtttttgagaatttacagaggatttgtgatgggatttggtttaatagagttgcttctttggttactgtgtttgaagctgctgcttctgacagaacaggggatattaccttccataagttggtaggacggcttgacaatagcgcggtttcggaggtgggagcaaggcttgcattcaagtccaacaaagagatagcagtgcaagtcaaatccatacctcttgataaactaattccaccttctcaacctgttcttcttatcaagatcgacgttcaaggttgggaataccacgttttaaagggtgcgaagaagttgctttcagggaaaccagcagaagctccttatctaatctatgaggaagatgagagattgctcacggcaagcaatagtagctcgaaagagatacgtgattttcttaaaagcgttggatatagtaagtgtagccagcatgggacagatgcacattgcaccaaggagtgaaagacattggacttaccgacaaatggtaataagatgccatacaagttgaggaatataaggaagatgagcaataggtatttgcagagaaaaacatttagtttataagttgccaaatttggtcagtcatgtttgtttctccttgtaatatgtactcaattttttt

SEQ ID NO: 104494 - protein, 319 aa, Arabidopsis thaliana
  peptide (1)..(319): Ceres Seq. ID no. 13615107
MASAWKKDKNQKLLSPKTLISLLVLSIIFLSSLFFFFSNSSLQYSNPNLSINSPYPIPPFDCFKCPQSKPIIANVVENLKYPFVYSLADLGNLPEKPHKNIVRLLKGKPFRKPDISATIQEVLDSMRASGKNGIVVDVGANVGMASFAAAVMGFKVLAFEPVFENLQRICDGIWFNRVASLVTVFEAAASDRTGDITFHKLVGRLDNSAVSEVGARLAFKSNKEIAVQVKSIPLDKLIPPSQPVLLIKIDVQGWEYHVLKGAKKLLSGKPAEAPYLIYEEDERLLTASNSSSKEIRDFLKSVGYSKCSQHGTDAHCTKE

SEQ ID NO: 104495 - protein, 194 aa, Arabidopsis thaliana
  peptide (1)..(194): Ceres Seq. ID no. 13615108
MRASGKNGIVVDVGANVGMASFAAAVMGFKVLAFEPVFENLQRICDGIWFNRVASLVTVFEAAASDRTGDITFHKLVGRLDNSAVSEVGARLAFKSNKEIAVQVKSIPLDKLIPPSQPVLLIKIDVQGWEYHVLKGAKKLLSGKPAEAPYLIYEEDERLLTASNSSSKEIRDFLKSVGYSKCSQHGTDAHCTKE

SEQ ID NO: 104496 - protein, 176 aa, Arabidopsis thaliana
  peptide (1)..(176): Ceres Seq. ID no. 13615109
MASFAAAVMGFKVLAFEPVFENLQRICDGIWFNRVASLVTVFEAAASDRTGDITFHKLVGRLDNSAVSEVGARLAFKSNKEIAVQVKSIPLDKLIPPSQPVLLIKIDVQGWEYHVLKGAKKLLSGKPAEAPYLIYEEDERLLTASNSSSKEIRDFLKSVGYSKCSQHGTDAHCTKE

SEQ ID NO: 104497 - DNA, 1020 bp, Arabidopsis thaliana
  misc_feature (1)..(1020): Ceres Seq. ID no. 13615117
  misc_feature (1)..(1020): Ortholog of  Ceres SEQ ID NO 13597272 as cited in SEQ ID NO 63951
aaagatttggcttgtctctggcttgagaacaaagaaaacccctttcttcgatctcagcttaaatcactcgacgaagaagaaatcagaaaagagtcagagaaaaaaaaaatcaaggaagatgagtagcattggaactgggtacgatctctccgtcaccactttctctcccgatggccgtgttttccagatcgagtacgccgctaaagctgtcgacaacagtgggactgttgttggaatcaagtgcaaagatgggattgttatgggagttgagaaacttattgcatcaaagatgatgctaccaggttccaacaggagaatccattctgttcatcgtcatgctggcatggctgttgctgggcttgcagctgatgggaggcaaattgttgcgcgtgctaagtctgaagcacgaagctatgagagtgtttatggcgatgctgtacctgtgaaggaactttctgagcgtgttgcaagttatgtacatctgtgtaccctgtattggtggctcaggccttttggctgtggggttattcttggaggttatgatagagatggacctcaattgtacatgattgaaccatcaggcatatcatatagatactttggtgcggccattggcaaaggaaagcaagctgccaaaacggaaattgagaaattaaatttatctgagatgacatgcaaagaaggcgttatcgaggtggcgaaaatcatctacaagctacacgatgaagccaaggacaaggcttttgaattggagatgagctggatatgcgaggagtcaaaacgagagcatcagaaggtccctgatgatcttctggaagaagcaaagacggcagctaaaactgcgctcgaggagatggatgctgactaaaactgaggagtgtgttgaatttagatccgtcttattgcgtcgtttgatgtttcttatgtactctgaattgaattttgtctggagggacagttgttgcagtttcgcatgaaccattggagtcttttatcttattgctatcaacagttgctacg

SEQ ID NO: 104498 - protein, 288 aa, Arabidopsis thaliana
  peptide (1)..(288): Ceres Seq. ID no. 13615118
KIWLVSGLRTKKTPFFDLSLNHSTKKKSEKSQRKKKSRKMSSIGTGYDLSVTTFSPDGRVFQIEYAAKAVDNSGTVVGIKCKDGIVMGVEKLIASKMMLPGSNRRIHSVHRHAGMAVAGLAADGRQIVARAKSEARSYESVYGDAVPVKELSERVASYVHLCTLYWWLRPFGCGVILGGYDRDGPQLYMIEPSGISYRYFGAAIGKGKQAAKTEIEKLNLSEMTCKEGVIEVAKIIYKLHDEAKDKAFELEMSWICEESKREHQKVPDDLLEEAKTAAKTALEEMDAD

SEQ ID NO: 104499 - protein, 249 aa, Arabidopsis thaliana; identical to SEQ ID NO: 28051
  peptide (1)..(249): Ceres Seq. ID no. 13615119

SEQ ID NO: 104500 - protein, 202 aa, Arabidopsis thaliana; identical to SEQ ID NO: 28052
  peptide (1)..(202): Ceres Seq. ID no. 13615120

SEQ ID NO: 104501 - DNA, 1599 bp, Arabidopsis thaliana
  misc_feature (1)..(1599): Ceres Seq. ID no. 13615137
  misc_feature (1)..(1599): Ortholog of  Ceres SEQ ID NO 15176433 as cited in SEQ ID NO 59539
gaaactaatcttgaagatgagttcaagatctgacctcaaaatcaaacgagtttctttgataatcttcttgctaagtgttcttgttgagttttgctatggagggttcacaagtgaatatgtcagaggaagtgatttaccagatgacatgccactagacagcgatgtttttgaagttcctcctggtcataattcacctcaacaggttcatgtaacgcaagggaaccatgaaggtaatggagtgatcatttcttgggtgactccggttaagcccggttctaagactgttcaatattggtgtgagaatgagaaatcgaggaaacaagcagaagcaacagttaatacttaccggttctttaattacacgtctggttatattcaccattgcctcatcgatgatttggaatttgatacgaaatactactacgaaattgggagtggcaagtggtccagacggttctggttctttatcccgcctaaatcaggccctgacgtaccttacacatttggattaattggggatctaggacaaacttatgactcaaatagtacgttaagccattatgagatgaatccgggaaaaggacaagcggttctgtttgtaggagacttgtcttacgcggatcgctaccctaaccacgacaacaatagatgggatacttggggaaggttcgttgagcgaagtgttgcttatcaaccttggatatggactgctggcaaccacgaaatcgacttcgttcctgacattggtgaaatagaaccattcaagccttttatgaatcggtatcatacgccacataaggcatcaggaagtatctctccattgtggtattccatcaaaagggcgtcagcttatattattgttatgtcatgttactcatcttatgggatatacacacctcaatacaaatggctggaaaaggagttacaaggagtgaatcgaacagagacgccatggcttatagtcttagtgcatagcccgttttacagtagctatgtgcatcattacatggaaggtgaaacattgagagtcatgtacgaacaatggtttgtcaaatacaaggttgatgttgtgtttgcaggtcatgttcatgcctatgagagatcggaacgtgtttctaatattgcttacaacattgtcaatggattgtgtgagccaatatcggatgagtcagctcctatatacatcacaatcggggatggcggaaactcggaaggcttgcttaccgacatgatgcagccacaaccaaaatactccgcgtttcgagaagctagctttgggcacgggttgctagagattaaaaacagaactcatgcttacttcagctggaatcggaaccaagatgggaacgccgtggcagcagattctgtgtggttgcttaatcggttttggcgagctcaaaagaagacatggcttgatgcattttaaagacaaattgaagaaggttttatttttgcagcaattctaaacgaataaatcagttagtgactgttttacgagggttgttattgagatttgattaaaacctcctctcatacagaaaaaagtttgttattaccataagtggttttgcacctatacaagttaatataccatttcac

SEQ ID NO: 104502 - protein, 474 aa, Arabidopsis thaliana
  peptide (1)..(474): Ceres Seq. ID no. 13615138
KLILKMSSRSDLKIKRVSLIIFLLSVLVEFCYGGFTSEYVRGSDLPDDMPLDSDVFEVPPGHNSPQQVHVTQGNHEGNGVIISWVTPVKPGSKTVQYWCENEKSRKQAEATVNTYRFFNYTSGYIHHCLIDDLEFDTKYYYEIGSGKWSRRFWFFIPPKSGPDVPYTFGLIGDLGQTYDSNSTLSHYEMNPGKGQAVLFVGDLSYADRYPNHDNNRWDTWGRFVERSVAYQPWIWTAGNHEIDFVPDIGEIEPFKPFMNRYHTPHKASGSISPLWYSIKRASAYIIVMSCYSSYGIYTPQYKWLEKELQGVNRTETPWLIVLVHSPFYSSYVHHYMEGETLRVMYEQWFVKYKVDVVFAGHVHAYERSERVSNIAYNIVNGLCEPISDESAPIYITIGDGGNSEGLLTDMMQPQPKYSAFREASFGHGLLEIKNRTHAYFSWNRNQDGNAVAADSVWLLNRFWRAQKKTWLDAF

SEQ ID NO: 104503 - protein, 469 aa, Arabidopsis thaliana
  peptide (1)..(469): Ceres Seq. ID no. 13615139
MSSRSDLKIKRVSLIIFLLSVLVEFCYGGFTSEYVRGSDLPDDMPLDSDVFEVPPGHNSPQQVHVTQGNHEGNGVIISWVTPVKPGSKTVQYWCENEKSRKQAEATVNTYRFFNYTSGYIHHCLIDDLEFDTKYYYEIGSGKWSRRFWFFIPPKSGPDVPYTFGLIGDLGQTYDSNSTLSHYEMNPGKGQAVLFVGDLSYADRYPNHDNNRWDTWGRFVERSVAYQPWIWTAGNHEIDFVPDIGEIEPFKPFMNRYHTPHKASGSISPLWYSIKRASAYIIVMSCYSSYGIYTPQYKWLEKELQGVNRTETPWLIVLVHSPFYSSYVHHYMEGETLRVMYEQWFVKYKVDVVFAGHVHAYERSERVSNIAYNIVNGLCEPISDESAPIYITIGDGGNSEGLLTDMMQPQPKYSAFREASFGHGLLEIKNRTHAYFSWNRNQDGNAVAADSVWLLNRFWRAQKKTWLDAF

SEQ ID NO: 104504 - protein, 426 aa, Arabidopsis thaliana
  peptide (1)..(426): Ceres Seq. ID no. 13615140
MPLDSDVFEVPPGHNSPQQVHVTQGNHEGNGVIISWVTPVKPGSKTVQYWCENEKSRKQAEATVNTYRFFNYTSGYIHHCLIDDLEFDTKYYYEIGSGKWSRRFWFFIPPKSGPDVPYTFGLIGDLGQTYDSNSTLSHYEMNPGKGQAVLFVGDLSYADRYPNHDNNRWDTWGRFVERSVAYQPWIWTAGNHEIDFVPDIGEIEPFKPFMNRYHTPHKASGSISPLWYSIKRASAYIIVMSCYSSYGIYTPQYKWLEKELQGVNRTETPWLIVLVHSPFYSSYVHHYMEGETLRVMYEQWFVKYKVDVVFAGHVHAYERSERVSNIAYNIVNGLCEPISDESAPIYITIGDGGNSEGLLTDMMQPQPKYSAFREASFGHGLLEIKNRTHAYFSWNRNQDGNAVAADSVWLLNRFWRAQKKTWLDAF

SEQ ID NO: 104505 - DNA, 1061 bp, Arabidopsis thaliana
  misc_feature (1)..(1061): Ceres Seq. ID no. 13615159
  misc_feature (1)..(1061): Ortholog of  Ceres SEQ ID NO 12609419 as cited in SEQ ID NO 52077
caatcttttcttcgatctctttcttttttatctcttcatcgattgtgagaaaagttttgatttgtctctctatatctttcatctttcttatttttacactttgatagattctctatttttggaatctgattcatatgtttggggtttaatagtttcagctcaaagaaatctgggttaaagtgtgttagtgttcgtgtgttctctaaaggaaaatcctgaagaaaccaattgtaacttgtacactgggaaaatataagtgttcctgaggagtaaaagaggggaaaaagagaatgagaatagtcgggttaacgggaggcatagcgtctgggaagagtacagtgtctaacctcttcaaggctagtggcattcccgttgttgacgctgatgttgttgctcgagatgtattgaagaaaggaagcggtggatggaaaagagtcgttgcagcttttggtgaggagattctgcttcctagtggagaagtggatcggccaaaactcggtcagattgtgttctcgtctgattccaagcgtcaacttctaaacaagctgatggctccatacatatcaagtggtatcttctgggaaattctgaaacaatgggcgagtggagctaaagtgatagttgtcgatatccctttgttgttcgaagtgaagatggataaatggactaaacctattgtggttgtgtgggttagtcaagagacacaacttaagagactgatggagagagatggattgagtgaggaagatgcaagaaacagagtgatggctcagatgccgttggattcgaaaagaagcaaagctgatgttgtgatcgataataatggctctcttgacgaccttcaccaacagttcgagaaggttttgattgaaattagaagaccattgacgtggatcgagttttggcgttcaaggcaaggagccttctcggtccttggttcagtgattttaggattatctgtttgcaaacagctcaaaattggctcttaacatttcacttctgttactgctaaaaaacttgttataatcttaaagctttgatttattattctcttgctctct

SEQ ID NO: 104506 - protein, 232 aa, Arabidopsis thaliana
  peptide (1)..(232): Ceres Seq. ID no. 13615160
MRIVGLTGGIASGKSTVSNLFKASGIPVVDADVVARDVLKKGSGGWKRVVAAFGEEILLPSGEVDRPKLGQIVFSSDSKRQLLNKLMAPYISSGIFWEILKQWASGAKVIVVDIPLLFEVKMDKWTKPIVVVWVSQETQLKRLMERDGLSEEDARNRVMAQMPLDSKRSKADVVIDNNGSLDDLHQQFEKVLIEIRRPLTWIEFWRSRQGAFSVLGSVILGLSVCKQLKIGS

SEQ ID NO: 104507 - protein, 146 aa, Arabidopsis thaliana
  peptide (1)..(146): Ceres Seq. ID no. 13615161
MAPYISSGIFWEILKQWASGAKVIVVDIPLLFEVKMDKWTKPIVVVWVSQETQLKRLMERDGLSEEDARNRVMAQMPLDSKRSKADVVIDNNGSLDDLHQQFEKVLIEIRRPLTWIEFWRSRQGAFSVLGSVILGLSVCKQLKIGS

SEQ ID NO: 104508 - DNA, 1324 bp, Arabidopsis thaliana
  misc_feature (1)..(1324): Ceres Seq. ID no. 13615162
  misc_feature (1)..(1324): Ortholog of  Ceres SEQ ID NO 14306769 as cited in SEQ ID NO 52984
ttttctcttcttcctcgactgctctgctctgctctattctctggattgagaatttggactgagaacgacgacaaatggggaaacgagagaaaaaacctaatcgacgtcgccacaaaggtgaatattcgaatgatgctgaagatttctacgatcaacacccgccggctgttgcctccgtcgacgaagaagatgaagaaaactctgacgaagaagaagaagaaaatgatggaaacgaatcatcggatttgccttcaaagtttctcctttaccaacaatccgttcagtcaccaaaaggagacataagttacttgcagaagttctttttaatgtatgttggtggaagacaacctttccatttccaagaagatttctgcggcactgctcttttaagtgcggagtggctgaagactgacactagacggactgctatagggcttgattttgatcttgaggcgttagaatggtgtatggataacaacattagtaaacttggttctgacgtgtattcaagaatgtcgcttttccatgggaatgttttaactcctcttgaggctaagcaagtgaaatctaaatcccatgagctgatacaaaatatcagcttggatgatggtgatgataatgaagatttggctgatccgagtgttgtcgaatctttagagaaagatggacctgattcgttgccaaagagggatattgtgtgtgcttttaattttagttgttgttgtctccacaaacgctcggagttggtttcttacttcaagaatgcacgtgacgctttgtctaagaaaggtggtatcttcgtgatggatttatatggaggtgcttctgctgagggacagttgaagcttcaacggaaattccctaatttcacgtatacatgggagcaggctgagtttgatattttaagccgcaagacaaggatcagtctgcactatcaccttcagaagcagaacagaaagattcgccatgctttttcatatagctggagactgtggtcattgccggagataaaggattgtatggaggaagctgggtttagctcagtccatttctggctcagagaaatgccggacgcttctgaaatgcgtagaacagatgggtttggtgctggacgtgatatcaagtacgaacaagtcaagagctttcaacagtgtgattcttggaatgcttacattgttgcggtcagcctctagttatgctttctatcttttgatcaaaagacactagccctttaactcagatcctttgtcgattttacatctagtatttatttctgacacgcactggtttagtttcatgatttcaatattatttttttgtcgtc

SEQ ID NO: 104509 - protein, 372 aa, Arabidopsis thaliana; identical to SEQ ID NO: 40072
  peptide (1)..(372): Ceres Seq. ID no. 13615163

SEQ ID NO: 104510 - protein, 288 aa, Arabidopsis thaliana; identical to SEQ ID NO: 40073
  peptide (1)..(288): Ceres Seq. ID no. 13615164

SEQ ID NO: 104511 - protein, 241 aa, Arabidopsis thaliana; identical to SEQ ID NO: 40074
  peptide (1)..(241): Ceres Seq. ID no. 13615165

SEQ ID NO: 104512 - DNA, 1521 bp, Arabidopsis thaliana
  misc_feature (1)..(1521): Ceres Seq. ID no. 13615166
  misc_feature (1)..(1521): Ortholog of  Ceres SEQ ID NO 13502943 as cited in SEQ ID NO 65097
acaaaacatttccataaccaaaaaacctcaaaataaaaaaatgagaactctcttaccttcccatactccggcaacggtaacaacggcggcgagaagaagacacgtcatacattgcgccggtaagagatctgactctttctccattaattccagtagctccgattggcaaagctcctgcgccattctctcaagcaaagttaactcacaagaacaatctgaatccttatcttccaattccaatggatcatcatcctaccacgtttccgccgtcaacggtcacaacaacggcgccggagtctcagatttgaatctagttccattcaacaacaaccaatcgattcaatcgaagaagcctttaagtatttcagatctatctccagctccgatgcatggatctaacctccgtgtagcttatcaaggtgttcccggagcttactccgaagccgccgctggtaaagcttatcctaactgtcaagcgattccttgcgatcaattcgaagttgcgtttcaagcggttgagctttggatcgccgatcgcgctgttttacccgtcgaaaactcactcggcggttcgattcatcgtaattacgatcttctcctccgtcaccgtcttcacatcgtcggcgaagttcagcttccggttcatcattgtctcattgctcttcccggtgtacggaaagagtttctcactcgtgtgatctctcatcctcaaggactagctcaatgcgaacacacgttgactaaactcggtctcaacgtagctcgtgaagctgttgatgataccgccggtgcggcggagtttatcgctgcgaataatatccgtgacaccgccgcgattgcgagtgcacgcgcggcggagatctacggattggagattttggaagatgggatacaagatgacgcgagtaacgtcacgcgctttgtgatgttggcgcgtgaaccgattataccgagaactgatcggccgtttaagacgagtatagtgtttgctcacgagaaaggcacgtgcgttttgtttaaggttctctctgcttttgcgtttaggaacattagtttgactaagattgagtctaggccgaaccataatgttcctattaggctagtcgatgaggctaatgtgggcacggctaagcattttgagtatatgttttatatcgacttcgaggcttccatggccgagtcacgtgctcagaatgcgctttctgaggttcaagagtttacgtcgtttttacgggttttggggagttatccgatggatatgacttcttggtcaccatcgtcttcgtcctcttcgtcatcaacattttcattgtgacaacactaagatcataaccaacgtgtgaagtcaattgtgtatgtaaattggagaagaaagttgtaaacataattttggtgaaaataaattacttatttctccaaagatcaatcttttgtattttgctgtttacattattatactttggagtttcgtttgatcgtagttttattatgaaattgcaagttttgagttgatttattctc

SEQ ID NO: 104513 - protein, 437 aa, Arabidopsis thaliana
  peptide (1)..(437): Ceres Seq. ID no. 13615167
QNISITKKPQNKKMRTLLPSHTPATVTTAARRRHVIHCAGKRSDSFSINSSSSDWQSSCAILSSKVNSQEQSESLSSNSNGSSSYHVSAVNGHNNGAGVSDLNLVPFNNNQSIQSKKPLSISDLSPAPMHGSNLRVAYQGVPGAYSEAAAGKAYPNCQAIPCDQFEVAFQAVELWIADRAVLPVENSLGGSIHRNYDLLLRHRLHIVGEVQLPVHHCLIALPGVRKEFLTRVISHPQGLAQCEHTLTKLGLNVAREAVDDTAGAAEFIAANNIRDTAAIASARAAEIYGLEILEDGIQDDASNVTRFVMLAREPIIPRTDRPFKTSIVFAHEKGTCVLFKVLSAFAFRNISLTKIESRPNHNVPIRLVDEANVGTAKHFEYMFYIDFEASMAESRAQNALSEVQEFTSFLRVLGSYPMDMTSWSPSSSSSSSSTFSL

SEQ ID NO: 104514 - protein, 424 aa, Arabidopsis thaliana
  peptide (1)..(424): Ceres Seq. ID no. 13615168
MRTLLPSHTPATVTTAARRRHVIHCAGKRSDSFSINSSSSDWQSSCAILSSKVNSQEQSESLSSNSNGSSSYHVSAVNGHNNGAGVSDLNLVPFNNNQSIQSKKPLSISDLSPAPMHGSNLRVAYQGVPGAYSEAAAGKAYPNCQAIPCDQFEVAFQAVELWIADRAVLPVENSLGGSIHRNYDLLLRHRLHIVGEVQLPVHHCLIALPGVRKEFLTRVISHPQGLAQCEHTLTKLGLNVAREAVDDTAGAAEFIAANNIRDTAAIASARAAEIYGLEILEDGIQDDASNVTRFVMLAREPIIPRTDRPFKTSIVFAHEKGTCVLFKVLSAFAFRNISLTKIESRPNHNVPIRLVDEANVGTAKHFEYMFYIDFEASMAESRAQNALSEVQEFTSFLRVLGSYPMDMTSWSPSSSSSSSSTFSL

SEQ ID NO: 104515 - protein, 309 aa, Arabidopsis thaliana
  peptide (1)..(309): Ceres Seq. ID no. 13615169
MHGSNLRVAYQGVPGAYSEAAAGKAYPNCQAIPCDQFEVAFQAVELWIADRAVLPVENSLGGSIHRNYDLLLRHRLHIVGEVQLPVHHCLIALPGVRKEFLTRVISHPQGLAQCEHTLTKLGLNVAREAVDDTAGAAEFIAANNIRDTAAIASARAAEIYGLEILEDGIQDDASNVTRFVMLAREPIIPRTDRPFKTSIVFAHEKGTCVLFKVLSAFAFRNISLTKIESRPNHNVPIRLVDEANVGTAKHFEYMFYIDFEASMAESRAQNALSEVQEFTSFLRVLGSYPMDMTSWSPSSSSSSSSTFSL

SEQ ID NO: 104516 - DNA, 497 bp, Arabidopsis thaliana
  misc_feature (1)..(497): Ceres Seq. ID no. 13615170
  misc_feature (1)..(497): Ortholog of  Ceres SEQ ID NO 12606011 as cited in SEQ ID NO 20354
atgggtcagatccagtactccgacaaatatttcgatgatactttcgaatacaggcacgttgtacttcctccggaagttgctaagcttttacctaagaatcgtattctttcggaatgaatggagagccatcggagtgcagcaaagtcgtggatgggttcattacgcgattcatcgtcctgagccacatatcatgctctttaggaggcctcttaactaccagcaggagcaccaagctcagattgctaagtagaagaattatgcaaaattctccctaatctctgtttatgtctctcgtaaacgaggttttaaaatactactctgatgttttgttcctgtagttttttttattgtgttcatgaattctcttcagtggagaatcatgtgagtttggtagaacaacttttaatgttatgttaagtctggtcctttgctagactttggttggatccacgtttgaacttcttcatggttaagaatgaagacgttatttctcatgc

SEQ ID NO: 104517 - protein, 82 aa, Arabidopsis thaliana
  peptide (1)..(82): Ceres Seq. ID no. 13615171
WVRSSTPTNISMILSNTGTLYFLRKLLSFYLRIVFFRNEWRAIGVQQSRGWVHYAIHRPEPHIMLFRRPLNYQQEHQAQIAK

SEQ ID NO: 104518 - protein, 71 aa, Arabidopsis thaliana
  peptide (1)..(71): Ceres Seq. ID no. 13615172
MILSNTGTLYFLRKLLSFYLRIVFFRNEWRAIGVQQSRGWVHYAIHRPEPHIMLFRRPLNYQQEHQAQIAK

SEQ ID NO: 104519 - protein, 53 aa, Arabidopsis thaliana
  peptide (1)..(53): Ceres Seq. ID no. 13615173
MNGEPSECSKVVDGFITRFIVLSHISCSLGGLLTTSRSTKLRLLSRRIMQNSP

SEQ ID NO: 104520 - DNA, 1562 bp, Arabidopsis thaliana
  misc_feature (1)..(1562): Ceres Seq. ID no. 13615174
  misc_feature (1)..(1562): Ortholog of  Ceres SEQ ID NO 13594345 as cited in SEQ ID NO 58043
  misc_feature (1)..(1562): Ortholog of  Ceres SEQ ID NO 12614112 as cited in SEQ ID NO 60891
  misc_feature (1)..(1562): Ortholog of  Ceres SEQ ID NO 13597574 as cited in SEQ ID NO 64677
  misc_feature (1)..(1562): Ortholog of  Ceres SEQ ID NO 13597678 as cited in SEQ ID NO 65375
  misc_feature (1)..(1562): Ortholog of  Ceres SEQ ID NO 13662880 as cited in SEQ ID NO 65422
  misc_feature (1)..(1562): Ortholog of  Ceres SEQ ID NO 12779098 as cited in SEQ ID NO 67698
  misc_feature (1)..(1562): Ortholog of  Ceres SEQ ID NO 13596180 as cited in SEQ ID NO 67941
  misc_feature (1)..(1562): Ortholog of  Ceres SEQ ID NO 13591190 as cited in SEQ ID NO 68044
  misc_feature (1)..(1562): Ortholog of  Ceres SEQ ID NO 13596089 as cited in SEQ ID NO 68373
acaaaacccattttaatggcggacgttagaaaccctacaaaaaatcatcatggtcatcatcatcttcatgctctcttgatcccatatccatttcaagggcatgtaaacccatttgtacacttagccatcaagctcgcgtcacaggggatcaccgtcactttcgtcaacactcattacatccaccaccagatcacaaacggctccgatggagatattttcgctggagttaggtcagagtctggccttgacataaggtacgcgacggtttccgatggtttaccggtcggatttgaccggtcgttgaaccatgacacgtaccaatcgtcgctgttgcacgtgttctatgcgcatgtggaagagcttgtggcgagtcttgttggaggagacggcggtgtgaatgtgatgatcgccgacacattctttgtttggccgtctgtggtggctaggaagtttggtttggtttgtgtctcgttttggaccgaagctgctttagtattttcactttattaccatatggatctgcttcggattcatggccattttggtgctcaagaaacccgcagcgatctaatcgactacattcccggagtcgccgcaattaacccaaaagacacggcgtcgtatcttcaagaaaccgacacgtcatcagtagttcatcaaatcatcttcaaagcattcgaagacgtgaaaaaagtcgattttgtactctgcaacacaattcagcaattcgaagacaaaacaatcaaagccctaaacacaaaaatcccattttacgcaatcggaccaatcataccattcaataaccaaaccggttcagtcacaacctcactctggtctgaatcagattgtacacaatggctcaacactaaaccaaaaagctccgtactttatatctcctttggtagttacgctcatgtcacaaagaaggatcttgttgagatagctcacgggattttgttgagtaaagttaatttcgtttgggtggtgagaccagacattgttagttcagacgaaaccaatccattaccagaagggtttgaaacagaagctggagatcgtgggattgtaataccatggtgttgtcaaatgacggttttgtcacatgagagtgttggtgggtttttgacacattgtggttggaactcgatattggagacgatttggtgtgaggttcctgtgttgtgttttccattgttgactgatcaggttacgaataggaagcttgtggttgatgattgggagattgggattaatctttgtgaagataagagtgattttggtagagatgaagttgggaggaatattaaccgtttgatgtgtggtgtttcgaaagagaagatcggacgggttaaaatgagtttggaaggtgcggtgagaaacagtggatcttcttcggagatgaatttaggtttgtttattgatggacttttgtctaaggttggtttatctaatgggaaagcttaaattctatgaaaactaaaaaaaaaaaatgtatgaatttttgtcaaattttttatttggggaaactactgtctcttaaatttaaatttacttttttcttt

SEQ ID NO: 104521 - protein, 487 aa, Arabidopsis thaliana
  peptide (1)..(487): Ceres Seq. ID no. 13615175
TKPILMADVRNPTKNHHGHHHLHALLIPYPFQGHVNPFVHLAIKLASQGITVTFVNTHYIHHQITNGSDGDIFAGVRSESGLDIRYATVSDGLPVGFDRSLNHDTYQSSLLHVFYAHVEELVASLVGGDGGVNVMIADTFFVWPSVVARKFGLVCVSFWTEAALVFSLYYHMDLLRIHGHFGAQETRSDLIDYIPGVAAINPKDTASYLQETDTSSVVHQIIFKAFEDVKKVDFVLCNTIQQFEDKTIKALNTKIPFYAIGPIIPFNNQTGSVTTSLWSESDCTQWLNTKPKSSVLYISFGSYAHVTKKDLVEIAHGILLSKVNFVWVVRPDIVSSDETNPLPEGFETEAGDRGIVIPWCCQMTVLSHESVGGFLTHCGWNSILETIWCEVPVLCFPLLTDQVTNRKLVVDDWEIGINLCEDKSDFGRDEVGRNINRLMCGVSKEKIGRVKMSLEGAVRNSGSSSEMNLGLFIDGLLSKVGLSNGKA

SEQ ID NO: 104522 - protein, 482 aa, Arabidopsis thaliana
  peptide (1)..(482): Ceres Seq. ID no. 13615176
MADVRNPTKNHHGHHHLHALLIPYPFQGHVNPFVHLAIKLASQGITVTFVNTHYIHHQITNGSDGDIFAGVRSESGLDIRYATVSDGLPVGFDRSLNHDTYQSSLLHVFYAHVEELVASLVGGDGGVNVMIADTFFVWPSVVARKFGLVCVSFWTEAALVFSLYYHMDLLRIHGHFGAQETRSDLIDYIPGVAAINPKDTASYLQETDTSSVVHQIIFKAFEDVKKVDFVLCNTIQQFEDKTIKALNTKIPFYAIGPIIPFNNQTGSVTTSLWSESDCTQWLNTKPKSSVLYISFGSYAHVTKKDLVEIAHGILLSKVNFVWVVRPDIVSSDETNPLPEGFETEAGDRGIVIPWCCQMTVLSHESVGGFLTHCGWNSILETIWCEVPVLCFPLLTDQVTNRKLVVDDWEIGINLCEDKSDFGRDEVGRNINRLMCGVSKEKIGRVKMSLEGAVRNSGSSSEMNLGLFIDGLLSKVGLSNGKA

SEQ ID NO: 104523 - protein, 353 aa, Arabidopsis thaliana
  peptide (1)..(353): Ceres Seq. ID no. 13615177
MIADTFFVWPSVVARKFGLVCVSFWTEAALVFSLYYHMDLLRIHGHFGAQETRSDLIDYIPGVAAINPKDTASYLQETDTSSVVHQIIFKAFEDVKKVDFVLCNTIQQFEDKTIKALNTKIPFYAIGPIIPFNNQTGSVTTSLWSESDCTQWLNTKPKSSVLYISFGSYAHVTKKDLVEIAHGILLSKVNFVWVVRPDIVSSDETNPLPEGFETEAGDRGIVIPWCCQMTVLSHESVGGFLTHCGWNSILETIWCEVPVLCFPLLTDQVTNRKLVVDDWEIGINLCEDKSDFGRDEVGRNINRLMCGVSKEKIGRVKMSLEGAVRNSGSSSEMNLGLFIDGLLSKVGLSNGKA

SEQ ID NO: 104524 - DNA, 1396 bp, Arabidopsis thaliana
  misc_feature (1)..(1396): Ceres Seq. ID no. 13615198
  misc_feature (1)..(1396): Ortholog of  Ceres SEQ ID NO 15171355 as cited in SEQ ID NO 51485
ctctctcttttccaccggcgaccattcattctctctcctcctcctcctcctcctcctcctcagcttcctccattgctccttaaccctcattcctcgatttgttcttctcttcaccatttcccctttttaccctttttctactcagacgtgacggcgactttttattcctgtgtctcccacctttgactcgccctggggggatttttttttgctccagaggcgaaagaaacaaaaaaaagcaatggggtttctccgttgtctccagctgctgctgcttctgtttctatctcttcgtctacaaaagctctctgctcaatcttcttcacccaatgcttcttcttcttcttcactcgatgctcttcttcaagattactcttttagagccttgcttcgtcctcgtaccggcattctctacgaggctactactgttccttccaatttgactgggatcaaactcgctgctatgagactcagaagcggaagctttagaaaacgtggagtcactccttttaatgagttctcaattcccagcggcgttatcgtcaagccgtatgtgacaaggcttgttttggtttatcaaaacctagctaatttctctcacttgtattaccctttgtctggttatgattatgtcgctcctgtcttgggtcttctcgcttacgatgctaagaatctctctgcgcttaatttgcctcagcttgatttaagggtgtctaatgatcctatcagaatcgatttctctgatctggaacgaatcccgcaagggtctagtgctaagtgtgttagattcgattctaaaggtgaagcgagtttcagcgattcgattcagcctggaaacacatgcgagactgagcatcagggacatttctctgtggtggtgaaatctgtggcttctgctccgagtctagctcctcctgggattgagagtaagaagaagaagaagagctctgattccaattccaagacttggatcattgttgggtcggtggttggtggattgatactgttggggcttttactgtttctggttttgagatgtcgaaattacaagaagcaagagaaaatgagggagatggagagagctggagagacaggggaagctctgaggatgactcaggttggtgaaacaagagcaccaactgctactacgactcgtacacaaccaatgcttgaaaccgaatacgcagcttaggatacttttgtgtacatcatcatcatcatcacatcttcttgatcatctgttactgtctttttctttttttcttctacaattattcttcttttggtaaagtgtttctttttctgattattttttctttgtggtaagcaagttgatacttccacattcatcttgtttctctgctggtgataaggaaataagtaatattgttttctt

SEQ ID NO: 104525 - protein, 316 aa, Arabidopsis thaliana; identical to SEQ ID NO: 27612
  peptide (1)..(316): Ceres Seq. ID no. 13615199

SEQ ID NO: 104526 - protein, 242 aa, Arabidopsis thaliana; identical to SEQ ID NO: 27613
  peptide (1)..(242): Ceres Seq. ID no. 13615200

SEQ ID NO: 104527 - DNA, 939 bp, Arabidopsis thaliana
  misc_feature (1)..(939): Ceres Seq. ID no. 13615219
  misc_feature (1)..(939): Ortholog of  Ceres SEQ ID NO 13595452 as cited in SEQ ID NO 56454
cctcctcgagtcctttccatcaggaccttatccacagtccacacacagcgagactctatttactcgccggcggaagaacaaaatggcgggaagagcgattttctctgtatcttgttcatctactccttccttgtgtatcccttattcaactgcttcgttttcatcgatgaatcgactggcgctccccgccgtccggatttctccccgaaccaacagatttcccaggattcactgctctatgtctgctaacgacatcaaagcgggaaccaatatcgaagtcgatggtgctccttggcgtgttcttgagtttcttcatgttaaaccaggaaaaggtgcggcatttgtgagaactaagatcaggaactatgtgaatggtagcacagtcgagagaacatttcgtgctggaatttctgttgaggaagctaatatatataaagaaaccaaacaattcacatacaaagatgggtctcagtttgttttcatggatttgaccacatacgaagaaacacgtcttaacgaatctgatatgggtgagaagacgaaatggttgaaagaaggaatggattgcattttgctctattggaaagacaaggttatcgatttcgatctaccgattacagttaagctaaaagtggttgacgttgatcctggccttcgcggtgatactgtgcaaggtggatcaaaaccggcgacaatggaaacgggtgcaatagttgctgtaccactctttattaacgtcggtgaagagatatttgtggacacaagaactggtgcatacatgaaccgagcgtgatccgggtctactacacctagttaattgggtcgttaacaacaaggcaatgatacatcttttttgtatatgagaatgttcgaatccggggacacatgtttgtttttctgaacatcgagagacaatttttcgattaaataaatttatat

SEQ ID NO: 104528 - protein, 263 aa, Arabidopsis thaliana; identical to SEQ ID NO: 26246
  peptide (1)..(263): Ceres Seq. ID no. 13615220

SEQ ID NO: 104529 - protein, 236 aa, Arabidopsis thaliana; identical to SEQ ID NO: 26247
  peptide (1)..(236): Ceres Seq. ID no. 13615221

SEQ ID NO: 104530 - protein, 208 aa, Arabidopsis thaliana; identical to SEQ ID NO: 26248
  peptide (1)..(208): Ceres Seq. ID no. 13615222

SEQ ID NO: 104531 - DNA, 796 bp, Arabidopsis thaliana
  misc_feature (1)..(796): Ceres Seq. ID no. 13615227
  misc_feature (1)..(796): Ortholog of  Ceres SEQ ID NO 13598422 as cited in SEQ ID NO 68856
gatagaaccaaaaaaaaaacacctccgatctcggcgagagaaagagaaacgatctgtgagagagaatggatcagatcttgaacaaggtaggctcgtactggttaggtaagaaggcgaacaagcagctcgattccgtcggtgacgatatcaactctttgtcttcgagcatcgaaggaggaacaaaatggttggtgaacaaaatcaaaggaaaaatgcagaagccattgcccgagttactaaaggagtttggtttgcctgtggggatctttccacgtgatgcaaccaactacgagttcaatgaacagacgaggaagttaactgtctttattccatcaatctgcgaagttggttacaaagatacatcagtcttgagattcaccactacagttaccggatttctcgagaagggaaagctagctgatgttgaagggatgaagacaaaagtaatgatatgggttaaagtcacaagtatctctgctgattcttcaaaggtacatttcacggcagggatgaagaaaagcagaagccgagatgcttatgaggttttaagagatggcgttgagattgataaattctagctctgttttgctggtaattctcaattcttttatcctctttctccaatctctatctttaaagtttcaactttcttcaaaattgttttgtatatgctgattttcaattatgttgaagttcatgaatttgataaactgaagaagatggtaactcagtacaccaaacaatgttcttatgtcttttggtattacttactgagtcactgtttaagcatatgacc

SEQ ID NO: 104532 - protein, 170 aa, Arabidopsis thaliana; identical to SEQ ID NO: 31063
  peptide (1)..(170): Ceres Seq. ID no. 13615228

SEQ ID NO: 104533 - protein, 121 aa, Arabidopsis thaliana; identical to SEQ ID NO: 31064
  peptide (1)..(121): Ceres Seq. ID no. 13615229

SEQ ID NO: 104534 - DNA, 1300 bp, Arabidopsis thaliana
  misc_feature (1)..(1300): Ceres Seq. ID no. 13615230
  misc_feature (1)..(1300): Ortholog of  Ceres SEQ ID NO 13639663 as cited in SEQ ID NO 57850
agagtttttcccattgaagaagatcgagtgaaattcgaagagcgaatcaaagaggaagaagaagaaggaggaggtatagcaatgggggtcgattattacaaggttcttcaggtggatcggaatgcgaaagacgacgacttgaagaaagcttatcgcaaactcgccatgaagtggcatccagacaagaaccctaacaacaaaaaagacgccgaagccaaattcaagcagatctccgaagcttacgatgttttgagtgatcctcaaaagagagccatctatgatcaatatggagaagaaggtctaacaagccaggctccgcctcccggagcaggcggcgggttttcggatggaggggcttcgttccggttcaacggtagaagcgcagatgatatcttctcggagttctttggcttcacaagaccatttggtgactcacgtggtgcaggtccctctaatgggttccggttcgcggaagacgttttctcgtcaaatgttgttccaccgaggaaagctgcccctattgagagacaacttccttgtagtttggaagatctctacaaaggagtcagtaagaagatgaagatctctcgggacgtcctcgattcaagcgggagacccacaacagttgaggagatcttgacgatagaaatcaagccagggtggaagaaagggacgaagattaccttcccggagaaaggaaacgagcagcgaggaatcataccatcagatcttgtattcatagttgatgagaagccacatgcggtgttcaagcgagacgggaatgaccttgtgatgacacagaagatccctcttgtggaagccctcacgggatacactgctcaggtctcgactctggatggaagatcagtaacggttccaattaacaacgtgatcagcccttcttatgaagaggtggtgaaaggtgaaggcatgccaatccctaaagacccatcaaagaaagggaacttgagaatcaagttcactgttaagttcccatcgaggctaacaacagagcagaaatctggaatcaaacgaatgttttcgtcttcctagtctgtctctttctatcttactgctacgtttgattttcggttatgactaggtatgtggtagtgtgggtctttgtttgggagattgtgaggttcttgaacgatgtcgcattgagatttctcaacgtccttcagagcttttggtttgggtttggggttttacattttagcatttttttttttttcgttcttttaaatttgttattagattgggggaaaaataaaaaactaaataaagattctttgcttct

SEQ ID NO: 104535 - protein, 350 aa, Arabidopsis thaliana
  peptide (1)..(350): Ceres Seq. ID no. 13615231
RVFPIEEDRVKFEERIKEEEEEGGGIAMGVDYYKVLQVDRNAKDDDLKKAYRKLAMKWHPDKNPNNKKDAEAKFKQISEAYDVLSDPQKRAIYDQYGEEGLTSQAPPPGAGGGFSDGGASFRFNGRSADDIFSEFFGFTRPFGDSRGAGPSNGFRFAEDVFSSNVVPPRKAAPIERQLPCSLEDLYKGVSKKMKISRDVLDSSGRPTTVEEILTIEIKPGWKKGTKITFPEKGNEQRGIIPSDLVFIVDEKPHAVFKRDGNDLVMTQKIPLVEALTGYTAQVSTLDGRSVTVPINNVISPSYEEVVKGEGMPIPKDPSKKGNLRIKFTVKFPSRLTTEQKSGIKRMFSSS

SEQ ID NO: 104536 - protein, 323 aa, Arabidopsis thaliana
  peptide (1)..(323): Ceres Seq. ID no. 13615232
MGVDYYKVLQVDRNAKDDDLKKAYRKLAMKWHPDKNPNNKKDAEAKFKQISEAYDVLSDPQKRAIYDQYGEEGLTSQAPPPGAGGGFSDGGASFRFNGRSADDIFSEFFGFTRPFGDSRGAGPSNGFRFAEDVFSSNVVPPRKAAPIERQLPCSLEDLYKGVSKKMKISRDVLDSSGRPTTVEEILTIEIKPGWKKGTKITFPEKGNEQRGIIPSDLVFIVDEKPHAVFKRDGNDLVMTQKIPLVEALTGYTAQVSTLDGRSVTVPINNVISPSYEEVVKGEGMPIPKDPSKKGNLRIKFTVKFPSRLTTEQKSGIKRMFSSS

SEQ ID NO: 104537 - protein, 295 aa, Arabidopsis thaliana
  peptide (1)..(295): Ceres Seq. ID no. 13615233
MKWHPDKNPNNKKDAEAKFKQISEAYDVLSDPQKRAIYDQYGEEGLTSQAPPPGAGGGFSDGGASFRFNGRSADDIFSEFFGFTRPFGDSRGAGPSNGFRFAEDVFSSNVVPPRKAAPIERQLPCSLEDLYKGVSKKMKISRDVLDSSGRPTTVEEILTIEIKPGWKKGTKITFPEKGNEQRGIIPSDLVFIVDEKPHAVFKRDGNDLVMTQKIPLVEALTGYTAQVSTLDGRSVTVPINNVISPSYEEVVKGEGMPIPKDPSKKGNLRIKFTVKFPSRLTTEQKSGIKRMFSSS

SEQ ID NO: 104538 - DNA, 1081 bp, Arabidopsis thaliana
  misc_feature (1)..(1081): Ceres Seq. ID no. 13615237
  misc_feature (1)..(1081): Ortholog of  Ceres SEQ ID NO 12557497 as cited in SEQ ID NO 43
  misc_feature (1)..(1081): Ortholog of  Ceres SEQ ID NO 15177850 as cited in SEQ ID NO 51765
  misc_feature (1)..(1081): Ortholog of  Ceres SEQ ID NO 14303417 as cited in SEQ ID NO 54923
  misc_feature (1)..(1081): Ortholog of  Ceres SEQ ID NO 15169084 as cited in SEQ ID NO 59115
  misc_feature (1)..(1081): Ortholog of  Ceres SEQ ID NO 12635723 as cited in SEQ ID NO 0
acaaaccgcaaacgcgacagaactaactaacgacgccggagatggccgccacttcaaccgccgctgctgcttcttcaatcatgggtacccgggtggtttccgacattagctccaattcaagccggttcacagcccggttcggattcggaaccaagaaagcatctcccaaaaaggctaagacggttatctcagaccggcctctatggttcccaggcgcaaaatcacccgaatatctcgacggttcacttgtcggggactacgggttcgatccttttggtttaggcaaaccggcggagtatctccaattcgatttggattccttggaccagaacttagccaagaacttatacggagaagtgatcgggactcgtaccgaggcggtggaccccaaatcgacgccgtttcagccatatagtgaagtcttcgggctacaaagattcagagaatgtgagctgattcacggtcggtgggcaatgctcgccactcttggcgctatcaccgtcgaatggctcaccggtgttacttggcaagacgccggcaaggtagagctagtggatggatcatcttacttaggacagccattgccgttctctatctcgacattgatatggatcgaagtgttagtgatcggctacattgagttccaacgaaacgctgaactggactcggagaagcgtttgtatccaggaggcaagttctttgacccgttaggactagcgtctgacccggtgaagaaggctcagcttcagctagctgagatcaaacatgctcgtttagccatggttggattcttgggttttgcggttcaggcggctgcaaccggtaaaggaccgctcaacaactgggcgactcaccttagtgacccacttcacaccaccattatcgataccttctcttcctcctgatgtggtggcttttagcttctactggtgtcatgtaatgatgtaacgtcgttattttaaagaaaatttggcaccttttgtataaacggaatttcttatacctcgcagtttgtgtttacgtagatcatcggagttatgatgagcctttacatcaaattaatcgtttgctaaattctgtc

SEQ ID NO: 104539 - protein, 287 aa, Arabidopsis thaliana; identical to SEQ ID NO: 34996
  peptide (1)..(287): Ceres Seq. ID no. 13615238

SEQ ID NO: 104540 - protein, 274 aa, Arabidopsis thaliana; identical to SEQ ID NO: 34997
  peptide (1)..(274): Ceres Seq. ID no. 13615239

SEQ ID NO: 104541 - protein, 143 aa, Arabidopsis thaliana; identical to SEQ ID NO: 34998
  peptide (1)..(143): Ceres Seq. ID no. 13615240

SEQ ID NO: 104542 - DNA, 1495 bp, Arabidopsis thaliana
  misc_feature (1)..(1495): Ceres Seq. ID no. 13615241
  misc_feature (1)..(1495): Ortholog of  Ceres SEQ ID NO 13584744 as cited in SEQ ID NO 69137
cttttaaagaaaagttccatttcatatctctatcaaacccttttctgaatattattttgcttgtgaatttgaatttgagcttttttcctctgttcttgggaggaatttttgtctgtgtttgtgatgcgttataattgcttcggacttctagatatgtgcaacggaagtgatcgtcttggacaaagagaagctgaagagatttgcaccaacaatgtgagggtcttttcatataattcattaagatcagccactgatagtttccatccaacgaacagaatcggaggtggtggctatggcgttgtctttaagggagttttgagagatggcacacaagtagctgtgaaatcactatcagcagaatctaaacaagggacacgcgagttcttgaccgagattaacttgatatcaaacattcatcatcctaaccttgttaaactcatcggttgctgcatcgaagggaacaatcggattcttgtctatgagtaccttgagaacaacagtcttgctagtgttttgcttggttcaaggagtagatatgtaccgcttgattggtccaaaagagctgcgatttgcgttgggacagcttcgggtttagctttccttcacgaggaagtcgaacctcatgttgttcaccgtgacatcaaggcgagtaatatcttactagactcaaacttttctcccaaaattggtgatttcgggttggctaagctttttccagacaatgtcactcatgtcagtacccgagtcgctggaacagtgggatacttggctccagaatatgcacttcttggtcaactgacaaaaaaagcagacgtttacagcttcgggatacttgtgcttgaggtcattagtggtaatagtagcaccagagccgcctttggagacgagtacatggttcttgttgaatgggtgtggaagctgagagaagaaaggaggctactagagtgtgtagatccagaactaaccaagttccccgcagatgaagtgacccgtttcatcaaggtggctcttttctgcactcaagccgcggcgcaaaagagaccaaacatgaagcaagtgatggagatgcttcgcaggaaagagcttaacctcaacgaggatgccttaacggaacctggcgtctacagaggtgtcaacaggggacgcaaccaccgtggaatcggtcttagggtcggccaaggaggcagctcacaggagagctcgtcaacgcaacgtgacaaagggaaaagctcagccgttcctcaagggtcgacgtccaactctaatatttccttccagagcatcacagagttggctcctagatgatttttttctgttaatagagcacaattttattcttgagtatattaattagtttatgatgtgttaatatcttatacatagggtatatatgaataaaccaaagatgctatctgataaaatgttatgtagttgtctgacatttccctttgtgtcagaagccagcagtttaaaattatgattggcatgattttgc

SEQ ID NO: 104543 - protein, 393 aa, Arabidopsis thaliana; identical to SEQ ID NO: 41872
  peptide (1)..(393): Ceres Seq. ID no. 13615242

SEQ ID NO: 104544 - protein, 383 aa, Arabidopsis thaliana; identical to SEQ ID NO: 41873
  peptide (1)..(383): Ceres Seq. ID no. 13615243

SEQ ID NO: 104545 - DNA, 1793 bp, Arabidopsis thaliana
  misc_feature (1)..(1793): Ceres Seq. ID no. 13615252
  misc_feature (1)..(1793): Ortholog of  Ceres SEQ ID NO 13600220 as cited in SEQ ID NO 0
accatcctaaacattttttcttgaataaaatcagaattacaaacaaaaatggttttgcaaaagcttcctctcattgggctgcttttgctcctgaccatcgtcgcctctccagcaaatgcagatggacctgtttgcccgccgtcgaacaaactaagccgggcaagtttccctgaaggttttttatttggcacggctactgcggcataccaggtcgaaggtgcgattaatgaaacttgtcgtggaccagccttatgggacatctactgtagaagatatccagagaggtgcaataacgataacggcgatgtggccgttgatttcttccatcgttataaggaagatatccaactaatgaagaatctaaacacagacgcctttagaatgtctatcgcatggccaagaatatttcctcatgggagaaaggagaaaggagtgagtcaagctggtgtgcaattctaccacgacctcatcgacgagctcataaaaaatggtataactccattcgttactgtttttcactgggacactccacaagatttagaagatgaatatggcggctttttaagcgaaaggattgtgaaggatttccgagagtatgcagattttgttttccaagaatacggtggaaaagtgaaacattggatcactttcaatgagccatgggttttctcgcacgctggctatgacgtaggcaaaaaggcacctggtcgttgctcttcttacgtcaatgctaaatgccaagacggacgatcaggatacgaggcttaccttgtcactcacaatctccttatctctcacgcagaagcagttgaagcttaccggaaatgcgaaaagtgtaaaggtgggaagatcggaattgcacatagtcctgcttggttcgaagcacatgaccttgctgattcacaagacggtgcgtccatcgaccgtgcacttgactttattttgggatggcatctagacacaactacatttggagattatccacagatcatgaaagacattgttggacatagattgcctaaatttacaactgagcagaaagcaaaactgaaagcttctaccgatttcgttgggctcaactactatacttcagtgttttcaaaccatttggagaaacctgatccttcaaaaccaagatggatgcaagattctcttattacatgggagtctaagaatgcgcaaaattacgccattggtagcaagcctttgaccgctgcattgaacgtttactcgagaggttttagaagtctgttgaagtacattaaggacaaatacgcaaatccggaaattatgatcatggaaaacggatatggagaagaactaggggcctcagattctgttgctgttggtaccgctgatcataacaggaaatattatcttcagaggcatcttttgagtatgcaagaagctgtttgcatcgacaaagtgaatgttacaggatactttgtatggtcattgttggataacttcgagtggcaagatggttacaaaaacagatttggactctactacgttgatttcaaaaataacctcacacgttacgagaaagaatccggcaagtattacaaggatttcctcagtcaaggtgttcgtccatccgcgctcaagaaggatgagctttaagctatttctgtttcaatgtgtttttcctatgttttactttgtgagtgaccaagattcatgaggtcttggttctaataaaaagagtttatttttcttctcatttttcattgtctacatgatttgccagatctacaaggctctggttataataaaatgatcctttgtgcctc

SEQ ID NO: 104546 - protein, 524 aa, Arabidopsis thaliana; identical to SEQ ID NO: 22472
  peptide (1)..(524): Ceres Seq. ID no. 13615253

SEQ ID NO: 104547 - protein, 423 aa, Arabidopsis thaliana; identical to SEQ ID NO: 22473
  peptide (1)..(423): Ceres Seq. ID no. 13615254

SEQ ID NO: 104548 - protein, 413 aa, Arabidopsis thaliana; identical to SEQ ID NO: 22474
  peptide (1)..(413): Ceres Seq. ID no. 13615255

SEQ ID NO: 104549 - DNA, 1464 bp, Arabidopsis thaliana
  misc_feature (1)..(1464): Ceres Seq. ID no. 13615259
  misc_feature (1)..(1464): Ortholog of  Ceres SEQ ID NO 14304838 as cited in SEQ ID NO 59750
aagatttttaagaatgttgtagtagcttcgcgaataatctcaggtcttctataaaaccaaactagcgattagccgactcttcctctttattattacaaagacgaaaaggcttcgagttttgtaatttcttcttctgttacaagttcttttcactgtgaaagtaattcttcaatggcgaaagacggacctaattgggatggtttgcttaagtggagtctctctcacgccgacggtactcgacccactcgccagttgagtgaggaggatcgaaaatggtttatggaggctatgcaatcgcagactgtagatgtagtcaaacgcatgaaggagattacactagttatgcaaacacctgaacaagttttggtggaacatggagtaacacctgaagatatccaagatttgctggatgagctgcaagagcacgttgaatcgatcgatatggctaacgatcttcattcaattggaggcttggttcctcttcttagtttccttaaaaactctcatgctaatattcgggcaaaagctgcggatgtcgttagcacaatagttcagaacaatcctagaagtcaggaacttgttatggaaaccaatgctctggagtcattgctctcgaatttcacttcagacactgatattcacgctcgaacccaggctcttggcgcaatatcatctttgattcgccataacaaaccaggagtaacggctttcaagcttgccaatggttatgctggcctaagagacgccttggcatctgatagtgtgagatttcaaaggaaagccttaaacttgttgcaatatctactgcaagaggatgattcagaccgcagtattgccactggacttggattcccccgagtgatgatgcatcttgcctctagtgacgatgctgagatcagagaagccgctcttcgtggattacttgagctttcaagagagaaaaacgatggaagtagcagcatagataaaagcgatgagaaactgaggcagctactagaagaacggatcaaaggaatcaccttgatgtcacaagaggatcttgaaacggttaaagaagagagacagctcgtggatttactgtggagcatttgctacaatgaaccttcttctctgagagaaaaaggacttgtcgttcttcccggtgaagacgcattgcctcctgatgtcgctagcaagctctttgagcctcctcttagagcttctgcagcaaaccgtaatgctactgagaagaaagatgaacctatgaaactacttggaccatagacgagaaatcaaagctaaaactttttattacttttccttgttttttatgttttgtaacttttcaaattgtcagaaaagtttcatagatatatgtattatgtcaatgatcaagggctatgttatgttaatttttgttttcatcattcgagatctttagtcttgttattgttgagattaagaatattcagcttcaatgctttt

SEQ ID NO: 104550 - protein, 363 aa, Arabidopsis thaliana; identical to SEQ ID NO: 30785
  peptide (1)..(363): Ceres Seq. ID no. 13615260

SEQ ID NO: 104551 - protein, 327 aa, Arabidopsis thaliana; identical to SEQ ID NO: 30786
  peptide (1)..(327): Ceres Seq. ID no. 13615261

SEQ ID NO: 104552 - protein, 324 aa, Arabidopsis thaliana; identical to SEQ ID NO: 30787
  peptide (1)..(324): Ceres Seq. ID no. 13615262

SEQ ID NO: 104553 - DNA, 937 bp, Arabidopsis thaliana
  misc_feature (1)..(937): Ceres Seq. ID no. 13615266
  misc_feature (1)..(937): Ortholog of  Ceres SEQ ID NO 15175519 as cited in SEQ ID NO 1110
  misc_feature (1)..(937): Ortholog of  Ceres SEQ ID NO 13637980 as cited in SEQ ID NO 58973
  misc_feature (1)..(937): Ortholog of  Ceres SEQ ID NO 12624081 as cited in SEQ ID NO 61729
  misc_feature (1)..(937): Ortholog of  Ceres SEQ ID NO 13599435 as cited in SEQ ID NO 0
atttgtgcctactcatttcctccaaacgtcaaacatagcagcagccatggctgccaccaacacaatcctcgcattctcatctccttctcgtcttctcattcctccttcctccaatccttcaactctccgttcctctttccgcggcgtctctctcaacaacaacaatctccaccgtctccaatctgtttccttcgccgttaaagctccgtcgaaagcgttgacagttgtttccgcggcgaagaaggctgttgcagtgcttaaaggtacttctgatgtcgaaggagttgttactttgacccaagatgactcaggtcctacaactgtgaatgttcgtatcactggtctcactccagggcctcatggatttcatctccatgagtttggtgatacaactaatggatgtatctcaacaggaccacatttcaaccctaacaacatgacacacggagctccagaagatgagtgccgtcatgcgggtgacctgggaaacataaatgccaatgccgatggcgtggcagaaacaacaatagtggacaatcagattcctctgactggtcctaattctgttgttggaagagcctttgtggttcacgagcttaaggatgacctcggaaagggtggccatgagcttagtctgaccactggaaacgcaggcgggagattggcatgtggtgtgattggcttgacgccgctctaagtcagaggctaagcaagtactcttatgtctactgtgttgatcttgtctgtttgaacagatgtaagaatcttagcaaataatgtttggcttaataaactttgatgtttatgttcattgcatcaatttttctctttttgaatttgtgacagtgatgtgtttacttttgatacaactttgtgtttgatcgtttaagtacattttggtttatttagcatcctttttattcagttcaagattgtg

SEQ ID NO: 104554 - protein, 231 aa, Arabidopsis thaliana
  peptide (1)..(231): Ceres Seq. ID no. 13615267
FVPTHFLQTSNIAAAMAATNTILAFSSPSRLLIPPSSNPSTLRSSFRGVSLNNNNLHRLQSVSFAVKAPSKALTVVSAAKKAVAVLKGTSDVEGVVTLTQDDSGPTTVNVRITGLTPGPHGFHLHEFGDTTNGCISTGPHFNPNNMTHGAPEDECRHAGDLGNINANADGVAETTIVDNQIPLTGPNSVVGRAFVVHELKDDLGKGGHELSLTTGNAGGRLACGVIGLTPL

SEQ ID NO: 104555 - protein, 216 aa, Arabidopsis thaliana; identical to SEQ ID NO: 25091
  peptide (1)..(216): Ceres Seq. ID no. 13615268

SEQ ID NO: 104556 - DNA, 1528 bp, Arabidopsis thaliana
  misc_feature (1)..(1528): Ceres Seq. ID no. 13615273
  misc_feature (1)..(1528): Ortholog of  Ceres SEQ ID NO 14303423 as cited in SEQ ID NO 54243
  misc_feature (1)..(1528): Ortholog of  Ceres SEQ ID NO 12611314 as cited in SEQ ID NO 56535
  misc_feature (1)..(1528): Ortholog of  Ceres SEQ ID NO 14312016 as cited in SEQ ID NO 60412
  misc_feature (1)..(1528): Ortholog of  Ceres SEQ ID NO 13661438 as cited in SEQ ID NO 61414
aaataggcctctccaccaaatctctctctctttctctctgtcacactctttatcactctctgctctcacagatcggagaatctcctctgagagctctaatctctcagctttcttcaccggcgtctccggatctaataatcctgtaaggcctctactgcagaaaaaagattgaatttttacaatttggggtgactcaattttgttgactagagtgtttggagatatttctaactaaatgggaacaatgcaccgcagtggtgctcctcgaagaacgaatgaaaatgcaaaggttattattactactattttggggatagtgtttgggacttttattggtatcacattaccttcactttcgtttaagattaacttaccctcgcgccttatatcatctcttgatgtagccatatctggtgacaaatcccctgaagatttcggttcaagaaagtttcctgagatatatgttccaactaacccgcgtggtgcagaactactacctccaggaatcgttgtggcgaaaactgatttttacttgcgtagattatggggagaacctaatgaagatttgaagaagaagccaaaatatcttgtgacatttacagttggatttgagcagaggaaccatattaatggagttgttaagaagttttctgaagatttccaaattttgctcttccattatgatggccggacaactgaatgggaccaatttgagtggtcgaagagcgcgattcatattagtacaagaaagcaaacaaaatggtggtacgcgaagaggtttttgcatcctgatgttgtgtcagcttatgagtacatatttatatgggatgaagatcttggagtggagcatttcaatgcggataagtacattgagttagttaagaagcatggtttagagatttctcaaccaggcttagagcctaacaatggactcacatgggaaatgacaaagaggagaggtgaccgggaagtccataaagatacaaaagagaaaccaggatggtgtaaagacccacatttacctccatgtgccgcgtttgttgaaataatggcgcctgtattttctcgagaagcatggcgatgtgtgtggcatatgattcagaatgatctggttcatggatggggtctcgactttgcgcttagaagatgcgttgaacctgctcatgagaagattggtgttgtggattcgcaatggataatacataaagtgataccttcacttggaagtcaaggaaagtcagagaatgggaaagctccatggcaaggagtgagagatagatgcaaaatggaatggacaatgtttcagaaccgattggctgatgctgataaagagtatcttgggaagatggtgaaagattagatttgtttttcttttttctttctatataattaatatattaaaaaaacttttacttttgtatatcaaatattttacactaaattaggttttcataggacatgtgtgaagccctttttattgatattgtgtaagatttatacattttgattgagctttattatgttgttt

SEQ ID NO: 104557 - protein, 374 aa, Arabidopsis thaliana
  peptide (1)..(374): Ceres Seq. ID no. 13615274
MGTMHRSGAPRRTNENAKVIITTILGIVFGTFIGITLPSLSFKINLPSRLISSLDVAISGDKSPEDFGSRKFPEIYVPTNPRGAELLPPGIVVAKTDFYLRRLWGEPNEDLKKKPKYLVTFTVGFEQRNHINGVVKKFSEDFQILLFHYDGRTTEWDQFEWSKSAIHISTRKQTKWWYAKRFLHPDVVSAYEYIFIWDEDLGVEHFNADKYIELVKKHGLEISQPGLEPNNGLTWEMTKRRGDREVHKDTKEKPGWCKDPHLPPCAAFVEIMAPVFSREAWRCVWHMIQNDLVHGWGLDFALRRCVEPAHEKIGVVDSQWIIHKVIPSLGSQGKSENGKAPWQGVRDRCKMEWTMFQNRLADADKEYLGKMVKD

SEQ ID NO: 104558 - protein, 371 aa, Arabidopsis thaliana
  peptide (1)..(371): Ceres Seq. ID no. 13615275
MHRSGAPRRTNENAKVIITTILGIVFGTFIGITLPSLSFKINLPSRLISSLDVAISGDKSPEDFGSRKFPEIYVPTNPRGAELLPPGIVVAKTDFYLRRLWGEPNEDLKKKPKYLVTFTVGFEQRNHINGVVKKFSEDFQILLFHYDGRTTEWDQFEWSKSAIHISTRKQTKWWYAKRFLHPDVVSAYEYIFIWDEDLGVEHFNADKYIELVKKHGLEISQPGLEPNNGLTWEMTKRRGDREVHKDTKEKPGWCKDPHLPPCAAFVEIMAPVFSREAWRCVWHMIQNDLVHGWGLDFALRRCVEPAHEKIGVVDSQWIIHKVIPSLGSQGKSENGKAPWQGVRDRCKMEWTMFQNRLADADKEYLGKMVKD

SEQ ID NO: 104559 - DNA, 1096 bp, Arabidopsis thaliana
  misc_feature (1)..(1096): Ceres Seq. ID no. 13615282
  misc_feature (1)..(1096): Ortholog of  Ceres SEQ ID NO 15168856 as cited in SEQ ID NO 56354
  misc_feature (1)..(1096): Ortholog of  Ceres SEQ ID NO 13583591 as cited in SEQ ID NO 63084
aagctatattcttccttttgatcaaaacacccacacctcttcttcttcttcgcataaaccttaaaaaccatttccacgatcttcttcttcttcttccctcaaatatagcttaggattttcttaatttcctctacccaagctccatggctgctttcaatttcttcctctcttcttaattctctcaggtaggggagatttgagtagtagtagattgttagatttgtaattcagctattggtgaagaggaagggagagagagatgtgttgaattggttgagtttggtggaggaaagaagaagaagaaatgaatgtgagccatgcatcggtacatccagtggaagatcctcctgcagctgcgacggaagtagagaatccgcctcgggtgaggatggatgatatggaaggaatgcctggaacattgcttggtcttgcattgcgtttttttcagttcttgtttgctgctgctgctctttgtgtcatggcttctactagtgattttccttccgttaccgccttctgctacctagttgcagctactggtctgcagagcttgtggagtcttgcactagccatggttgacgtctatgccattatggtcaaacgctctctacagaaccgtcgacttgtgagcttgtttgcaattggtgatggggtgacatcgacgctgacttttgcagcagcttgtgcatcggcaggcataacggttctaatagacaacgatctgaatagctgcgcacaaaaccactgtgttcagtttgaaacatcaacggcattagctttcataagctggttcgctgctttgccttcgtttctcttcaatttctggtctcttgcatcccgttgacacgatactgctcagcaagatgtgttttcatggtgtgtttttcggtgtatagtgactgatttttcttcttctttcttgttttgggtttggaaccaactttcttcaaacccaatacttggaaactgggaattgttttgtagacgacgaccttattcattttgttgtacaatgaaactatctggtcggctttgttgtatgattgaagaaatttcagatgttgaatgcattattatgatatgttgactgaattgc

SEQ ID NO: 104560 - protein, 179 aa, Arabidopsis thaliana; identical to SEQ ID NO: 29444
  peptide (1)..(179): Ceres Seq. ID no. 13615283

SEQ ID NO: 104561 - protein, 151 aa, Arabidopsis thaliana; identical to SEQ ID NO: 29445
  peptide (1)..(151): Ceres Seq. ID no. 13615284

SEQ ID NO: 104562 - protein, 148 aa, Arabidopsis thaliana; identical to SEQ ID NO: 29446
  peptide (1)..(148): Ceres Seq. ID no. 13615285

SEQ ID NO: 104563 - DNA, 869 bp, Arabidopsis thaliana
  misc_feature (1)..(869): Ceres Seq. ID no. 13615286
  misc_feature (1)..(869): Ortholog of  Ceres SEQ ID NO 13595495 as cited in SEQ ID NO 56624
  misc_feature (1)..(869): Ortholog of  Ceres SEQ ID NO 12608406 as cited in SEQ ID NO 58017
  misc_feature (1)..(869): Ortholog of  Ceres SEQ ID NO 13599397 as cited in SEQ ID NO 0
aagctttgtctcgtcggaatctgatggaggagaagaagaagaaaggcgatgatgaattgaactcgaaaccgccgttaatggcgttgaaccatgtgtcaaggctttgtaaagacgtcaaaaagtctctcgagttctacacaaaggtattagggttcgtggagatagagcgtccagcttctttcgacttcgacggtgcgtggcttttcaactacggcgttgggatccacttggtgcaggccaaggaccaagataagttaccttctgacacggaccatttggacccaatggataaccacatctctttccagtgtgaagatatggaagctttggagaagaggctcaaggaggtgaaggtaaagtacatcaagaggacggtgggtgatgagaaagatgcagctatcgaccagctcttcttcaatgaccctgacggctttatggttgaaatctgtaactgcgagaatctcgaacttgtcccgtgccattcagccgacgccatacgcctcccagaagaccgacatgcacctcctgttgccctccctgactcctccaaccgtaggatgccccagcccaattcttaatactatttagactcgtttcgtctctagttagtactgtgttgtgctcagctcccactctattagttaatgtttgtttgggacaccaagtccttccaaccatgagtgctagtaggctggccattttggtttttgtttagattcggtttggttcagttttaataaatctctggctgaactctaaccgaagttatttcgcttttggtttggttttactttggttcggtttccatttggttaggtttgttttagtttgttccaaaaaaaccgtgaacaaaaattctgatgtttttt

SEQ ID NO: 104564 - protein, 191 aa, Arabidopsis thaliana
  peptide (1)..(191): Ceres Seq. ID no. 13615287
ALSRRNLMEEKKKKGDDELNSKPPLMALNHVSRLCKDVKKSLEFYTKVLGFVEIERPASFDFDGAWLFNYGVGIHLVQAKDQDKLPSDTDHLDPMDNHISFQCEDMEALEKRLKEVKVKYIKRTVGDEKDAAIDQLFFNDPDGFMVEICNCENLELVPCHSADAIRLPEDRHAPPVALPDSSNRRMPQPNS

SEQ ID NO: 104565 - protein, 184 aa, Arabidopsis thaliana
  peptide (1)..(184): Ceres Seq. ID no. 13615288
MEEKKKKGDDELNSKPPLMALNHVSRLCKDVKKSLEFYTKVLGFVEIERPASFDFDGAWLFNYGVGIHLVQAKDQDKLPSDTDHLDPMDNHISFQCEDMEALEKRLKEVKVKYIKRTVGDEKDAAIDQLFFNDPDGFMVEICNCENLELVPCHSADAIRLPEDRHAPPVALPDSSNRRMPQPNS

SEQ ID NO: 104566 - protein, 166 aa, Arabidopsis thaliana
  peptide (1)..(166): Ceres Seq. ID no. 13615289
MALNHVSRLCKDVKKSLEFYTKVLGFVEIERPASFDFDGAWLFNYGVGIHLVQAKDQDKLPSDTDHLDPMDNHISFQCEDMEALEKRLKEVKVKYIKRTVGDEKDAAIDQLFFNDPDGFMVEICNCENLELVPCHSADAIRLPEDRHAPPVALPDSSNRRMPQPNS

SEQ ID NO: 104567 - DNA, 1553 bp, Arabidopsis thaliana
  misc_feature (1)..(1553): Ceres Seq. ID no. 13615297
  misc_feature (1)..(1553): Ortholog of  Ceres SEQ ID NO 13584744 as cited in SEQ ID NO 69137
atgtagatttgactttgtttcaaagcggaggaagaaggagaaggcaacactaaaagatcaaaaccttagatctttgcttacgctttcgcctggttaggaacggtttttcagaaacaaaagattccatttttagattcaattcccttctggtttgaaaaatgatatcaaaatggtgaatagaagtgatttggtggtgattggcatctcggttgggcttgcacttggtctcttgctcgctctgcttttgttcttcgccataaaatggtactatggccgctctcacctcaggcgatgcgctaatgaacagaattccccgactctacctgttcacactgctaaaagaggtgtagtaatccctgatgatagagcaaacacagaatcgtcacagccacctgagaatggagcaccaactcaacatcagccatggtggaacaaccacaccaaagatctcactgtatctgcatccggcatacctagatataactacaaggatattcagaaagcaacacaaaatttcacaaccgttctaggacaaggatcttttggtcctgtctacaaagcggttatgcccaatggagaattagctgcagcgaaagttcatggctctaattcaagtcaaggagacagagagtttcaaaccgaggtatctttacttgggagactgcatcaccggaatcttgtgaacttgacaggatactgtgtcgataaaagtcaccggatgttgatctatgagttcatgagtaatggaagtttggagaatcttttgtatggcggaatgcaagtcttgaattgggaagagcggcttcaaatcgctcttgacatctcccacggcattgaataccttcacgaaggggccgtaccgccagttattcaccgtgatcttaagtcagcaaacattttgttagatcattccatgagagctaaggtcgcggatttcgggttgtcgaaagagatggttttagatagaatgacttccggattgaagggtactcacggctacatggatccaacatacatttcgactaacaaatacacgatgaagagcgacatttacagtttcggtgtcatcattcttgagctcattactgcaatccatccccaacagaatctgatggaatacatcaacctggcttcgatgagtccagatggtatcgacgaaatactcgatcagaaactagtgggaaacgcaagcattgaagaagtgaggttactggcgaagattgcaaacaggtgtgtgcataagacaccaagaaaaagaccatctattggagaagtaacacagttcatactaaagatcaaacaaagtcggtctcgaggaagaagacaggacacgatgtcttcatcgtttggtgttggttatgaggaagatctgtcaagggttatgagcaggattaaggatcagcatgttgagttagggttattggctggtgttaaggaagagaatcatcaagagaggaacattgcaacaacatagtaactctttactttaggagtaagtctttttgtacatattaccacatgagtctcaaaagtaagatttctccctcttctgc

SEQ ID NO: 104568 - protein, 434 aa, Arabidopsis thaliana; identical to SEQ ID NO: 35951
  peptide (1)..(434): Ceres Seq. ID no. 13615298

SEQ ID NO: 104569 - protein, 302 aa, Arabidopsis thaliana; identical to SEQ ID NO: 35952
  peptide (1)..(302): Ceres Seq. ID no. 13615299

SEQ ID NO: 104570 - protein, 251 aa, Arabidopsis thaliana; identical to SEQ ID NO: 35953
  peptide (1)..(251): Ceres Seq. ID no. 13615300

SEQ ID NO: 104571 - DNA, 805 bp, Arabidopsis thaliana
  misc_feature (1)..(805): Ceres Seq. ID no. 13615301
  misc_feature (1)..(805): Ortholog of  Ceres SEQ ID NO 15180167 as cited in SEQ ID NO 0
agcattttctttcagctcaaacccaagaacctcatcgccgattatttcttcatccttactctatcccgcgccgattaatctctctcagtaccgtccgagatgagaaagctcaagtatcacgagaagaagcttataaagaaagtaaatttcttagaatggaaaagagaaggtaaccatcgggaaaacgagattacgtatcgataccacatgggctctcgtgatgattacaaaaagtattcaggattgtgtaggatggtgcagaaactgacgaatataatgaaacaaatggatccagcagatccttttcgtattcagatgactgatatgcttttggagaagctatataacatgggtgttataccgactaggaaaagcttgactctaactgagcggttatcagtttcatccttctgtaggcgtaggctatctactgtgctggttcacctgaagtttgcagagcaccacaaagaagctgtgacatacatagagcaaggacacgttcgtgtaggaccagaaacaattactgatccagctttcttagtaactcggaacatggaagatttcatcacttgggttgattcatccaagattaaacgaaaggttcttgagtacaatgacacattggatgattatgacatgcttgcttagctttgaggaagttaaaaaagactgatgttttgtaaaagccaaaaaaggttcactgctactactattgcagggtttgtttggatttttgaatatgcaaatgtgctactattcccttgtctttaatcttactttcgatctatttgcaagaagaaacttg

SEQ ID NO: 104572 - protein, 182 aa, Arabidopsis thaliana
  peptide (1)..(182): Ceres Seq. ID no. 13615302
MRKLKYHEKKLIKKVNFLEWKREGNHRENEITYRYHMGSRDDYKKYSGLCRMVQKLTNIMKQMDPADPFRIQMTDMLLEKLYNMGVIPTRKSLTLTERLSVSSFCRRRLSTVLVHLKFAEHHKEAVTYIEQGHVRVGPETITDPAFLVTRNMEDFITWVDSSKIKRKVLEYNDTLDDYDMLA

SEQ ID NO: 104573 - protein, 146 aa, Arabidopsis thaliana
  peptide (1)..(146): Ceres Seq. ID no. 13615303
MGSRDDYKKYSGLCRMVQKLTNIMKQMDPADPFRIQMTDMLLEKLYNMGVIPTRKSLTLTERLSVSSFCRRRLSTVLVHLKFAEHHKEAVTYIEQGHVRVGPETITDPAFLVTRNMEDFITWVDSSKIKRKVLEYNDTLDDYDMLA

SEQ ID NO: 104574 - protein, 131 aa, Arabidopsis thaliana
  peptide (1)..(131): Ceres Seq. ID no. 13615304
MVQKLTNIMKQMDPADPFRIQMTDMLLEKLYNMGVIPTRKSLTLTERLSVSSFCRRRLSTVLVHLKFAEHHKEAVTYIEQGHVRVGPETITDPAFLVTRNMEDFITWVDSSKIKRKVLEYNDTLDDYDMLA

SEQ ID NO: 104575 - DNA, 1304 bp, Arabidopsis thaliana
  misc_feature (1)..(1304): Ceres Seq. ID no. 13615328
  misc_feature (1)..(1304): Ortholog of  Ceres SEQ ID NO 12609045 as cited in SEQ ID NO 51314
  misc_feature (1)..(1304): Ortholog of  Ceres SEQ ID NO 14316312 as cited in SEQ ID NO 60042
  misc_feature (1)..(1304): Ortholog of  Ceres SEQ ID NO 13595877 as cited in SEQ ID NO 67702
  misc_feature (1)..(1304): Ortholog of  Ceres SEQ ID NO 13654367 as cited in SEQ ID NO 67993
actcaatccaaactcaacccacaacgctacacattaaaaaataaaaaacctatggcaaccatttccttctctcacaaccaccaatcctccgacaaccgccgtggtggatcccatcaccaccgtcacggccccgtcgtggaagagatcgaaggactcatcaaagttttcaacgacggctgcgtcgaaagacctcccatagttcccatcgtctcaccaaccattcacccatcttctaaagccacagcctttgacatcaaactatccaacgacacatggacacgtgtctacatccccgatgccgcagcagcctcgccgtccgttactctccctctcctcgtttacttccacggcggtggtttctgcgttggctccgccgcttggagttgctaccatgacttcttgaccagccttgccgttaaagcccgttgcgtcatcgtttccgtaaactaccgtttagcccctgaacaccgtctcccggcggcgtacgacgacggcgttaatgtcgtctcgtggctagtcaagcaacaaatatctaccggtggtggatatccttcttggttgagtaaatgtaacctctcaaacgttttcttggccggagatagcgccggagccaacatagcttaccaagtcgccgtaagaatcatggccagtggcaaatacgcaaacactctacacctcaagggcattattctcatccaccctttcttcggcggcgaatcaagaacgtcttcggagaaacaacaacatcacaccaagtcatcggcgcttactctttcagcttccgacgcatattggcgtctagctctgccacgtggagcgagtagagaccatccatggtgtaaccctctgatgagctcggcgggagcgaagttaccgacgacgatggtgttcatggcggagtttgatatactaaaagaacgaaacttggagatgtgtaaagtgatgagaagccatgggaagagagttgaaggtatagttcatggaggtgttggtcacgcttttcatattctcgacaactcgtcggtgtcacgtgatcgaatccacgacatgatgtgtcgtcttcacaacttcatacatccatcataataattccctaaagacctttttctgaaacctttaattgatttaaaatgttgttcttgaaaaataataagagataaaaacttgaaatgttgtgtttttattgtggattaaagtaagctttgctttgtagtgttttttcagtgaaggtgaatagtataaattatgtaatacaatagatggacttgtacttttaagttaagttatgtatccaatgcttgaat

SEQ ID NO: 104576 - protein, 361 aa, Arabidopsis thaliana; identical to SEQ ID NO: 23817
  peptide (1)..(361): Ceres Seq. ID no. 13615329

SEQ ID NO: 104577 - protein, 344 aa, Arabidopsis thaliana; identical to SEQ ID NO: 23818
  peptide (1)..(344): Ceres Seq. ID no. 13615330

SEQ ID NO: 104578 - DNA, 872 bp, Arabidopsis thaliana
  misc_feature (1)..(872): Ceres Seq. ID no. 13615331
  misc_feature (1)..(872): Ortholog of  Ceres SEQ ID NO 12557850 as cited in SEQ ID NO 65
  misc_feature (1)..(872): Ortholog of  Ceres SEQ ID NO 14312702 as cited in SEQ ID NO 0
atcgaacattaaaacctgattttactgaaactgtgctgcgaaggagaagccgcaaaccattttttgtcaatctagggttcttcttcgtacttgcagatttcgcctccgttttcactacgatctgtgaagatgttctccgctcagaacaagatcaagaaggacaagaatgctgagccaacagaatgcgaggagcaagttgctcaggctttgtttgatttggagaacactaaccaggagttgaaaagcgagttgaaagatctctacatcaaccaagctgttcacatggatatctctggaaaccgcaaagctgttgtgatttacgttccattcagattgaggaaagctttccgcaagattcatccccgtctcgtcagagagcttgagaagaagttcagtggaaaggatgttatctttgttaccacaagaaggatcatgcgtccccccaagaagggtgctgctgttcagaggccacgtaacagaactcttacctcagttcatgaagctatgcttgaagatgttgctttccccgctgagattgttggaaagcgtactcgctaccgtcttgatggttccaagatcatgaaggtctttttggatgccaaggaaaagaacaacacagagtacaagctcgagactatggtcggtgtgtaccgtaaacttactggcaaagatgttgtttttgagtacccagtcgaagcttgaaagaagatgatgaagaaccatcaggatagtgaaagagagcttttgtttatgttttgtggtatttaggatgaaggaaactctcttgattcagttccttgttcacaatctttaatgttctatttacaatgactactttttgtgtttttcaattttgaaacctctatgatttc

SEQ ID NO: 104579 - protein, 190 aa, Arabidopsis thaliana [sequence omitted]

SEQ ID NO: 104580 - protein, 139 aa, Arabidopsis thaliana; identical to SEQ ID NO: 35491
  peptide (1)..(139): Ceres Seq. ID no. 13615333

SEQ ID NO: 104581 - DNA, 924 bp, Arabidopsis thaliana
  misc_feature (1)..(924): Ceres Seq. ID no. 13615334
  misc_feature (1)..(924): Ortholog of  Ceres SEQ ID NO 14311392 as cited in SEQ ID NO 58307
  misc_feature (1)..(924): Ortholog of  Ceres SEQ ID NO 13599348 as cited in SEQ ID NO 0
gtcttcgcaaaagaaaattccgaaattgtttcgaaaaatcctgaagaagaagaggtctttgaatcaacaacagttccatgttgtgcccaacgtatacaccaagtgtttaccattttcaaacgcaaaagccagttttccggaaacagaggtttcgggtttgttcatctacttctggtggtgaggatgatagattcaaagtagagtacactccttggcttatcgttgggttgggcaatccaggaaacaagtatcatggaacaagacacaatgttggtttcgagatgatcgatgtgttggctagaaaagaaggggtgttgatgaacactatacagtccaaagctctaatcggaataggtgctattgaagatgtacctatcttgttggctaaacctcagacttatatgaacttcagcggcgaatcggttggatctctagcttcacactatcgagtaccattgcgccacattttaatgatttacgatgagatggctttaccaaatggggttttgagacttcaaccgaaaggaggtcaaggctatcacaacggagtgaagagtgtaatggggcatttggatggtcgtcgaaactttcctcgtttaagcataggcattggtaaaccacctggaaacatggatatgaaagcttttcttcttcagaagtttagtccattggaacagaaacagatcgaggaagcactcgagcaaggaagtgaagcagtgaagactcttgtgcttaatggcttcaatcaaggaatttcgagatttaatcttgtgcagaaatataaattccataaagtatagactccgatttgcaataaaagcaaccatgtagagattggtttagcactttcattttatcgtctcaagagacactctttcgttacgaagtgtatgaagtttcttagattaatataattcagtctcg

SEQ ID NO: 104582 - protein, 240 aa, Arabidopsis thaliana
  peptide (1)..(240): Ceres Seq. ID no. 13615335
MLCPTYTPSVYHFQTQKPVFRKQRFRVCSSTSGGEDDRFKVEYTPWLIVGLGNPGNKYHGTRHNVGFEMIDVLARKEGVLMNTIQSKALIGIGAIEDVPILLAKPQTYMNFSGESVGSLASHYRVPLRHILMIYDEMALPNGVLRLQPKGGQGYHNGVKSVMGHLDGRRNFPRLSIGIGKPPGNMDMKAFLLQKFSPLEQKQIEEALEQGSEAVKTLVLNGFNQGISRFNLVQKYKFHKV

SEQ ID NO: 104583 - protein, 172 aa, Arabidopsis thaliana; identical to SEQ ID NO: 20863
  peptide (1)..(172): Ceres Seq. ID no. 13615336

SEQ ID NO: 104584 - protein, 160 aa, Arabidopsis thaliana; identical to SEQ ID NO: 20864
  peptide (1)..(160): Ceres Seq. ID no. 13615337

SEQ ID NO: 104585 - DNA, 1803 bp, Arabidopsis thaliana
  misc_feature (1)..(1803): Ceres Seq. ID no. 13615342
  misc_feature (1)..(1803): Ortholog of  Ceres SEQ ID NO 14309715 as cited in SEQ ID NO 55353
  misc_feature (1)..(1803): Ortholog of  Ceres SEQ ID NO 13595521 as cited in SEQ ID NO 59840
aaaaacccatttctaaaatcatctcctcttccttcaaaaactctatctctcactcccacttcttggttctaagaagaatagttaaatttcttttgcgaagaatagttcaggatgcagctgcgactttcgaaaagcttgaagcatatataatggtgtaaagactaaagagtaaagataattaagcatgaagacgatgtggtggagagatatgagaagtctacttatagttccaatgttcaagtgtttggtggctatatgtttggtcatctcactattagttttcgtagaaagtttatatatgaacattgtagtaatctacgtcaagttgtgtaaacgcaaacccgagaagatttacaaatgggaggcaatgcaagaggacttggagctcggaaatcaaaactttcccatggttcttgtccaaatcccaatgtacaacgaacgagaggtgtttaagttatccattggtgctgcttgcagactcatatggccattggatcgactaatcgttcaagttttagatgattccactgatcccaccatcatggaaatggtaagcacagagtgtggaaaatgggcaaccaaaggcataaacataaaatgtgagaggagagacaatagaaatggctataaggctggagctcttaaacaaggtatgaggcatagttacgtcaaaacatgcacctacattgcaatcttcgatgctgattttcagccagagcccgactacctcgaacgcactgtcccatttcttatccacaatcccgaactcgctcttgttcaagctcgatggaaatttgtgaacgcaaagaagtgcttgatgactaggatgcaggagatgtccctcaattaccatttcacggcagagcaagaatccggatccactagacatgccttctttggctttaatgggactgcgggtgtatggagactggcggcgatggaagaagctggtggttggaaagaccggaccaccgtagaggacatggacttggccgttcgtgtaggtctacacggctggaaatttgtctttgtcaacgatgtttcggtgaaaagtgagctaccaagccaatttaaggcattcagattccagcaacatcgatggtcatgcggtccagctaatctcttcagaaaaatgactatggaaattattcgcaataagagagtgacgatttggaagaaattgtatgtgatctatagtttctttttcgtaaggaagatcatagtccatttcttcactttcttcttctattgtttcattcttcctacgagcgtattctttcccgaagtcaacattccgacttggtcaaccgtttattttccttttatgatcactctattcaatgccattgccacaccaagatctttctacctcgtgattttttgggtcttattcgagaatgtaatggctatgcatcggaccaaaggcactttcatcggtttacttgaaggagggagagttaacgaatgggtcgtcaccgagaaattaggtgatgcgcttgagactaagttacttccccaagtaagaaaacctcgcaacgggtttctcgaaaggataaactcaaaagagatgatggtggggatatacatattgtgctgtgcatcatataaccttgtctttgggaagacagtgttatatatctatctttacatgcaggctcttgcttttattattgccggaattggttttataggaacttgataagtgtaattagtaatttatatatccgttagtattctcgttcttttctttttcatatttcagaataagtaggtgaattattttatttaatacaattcttattc

SEQ ID NO: 104586 - protein, 504 aa, Arabidopsis thaliana
  peptide (1)..(504): Ceres Seq. ID no. 13615343
MKTMWWRDMRSLLIVPMFKCLVAICLVISLLVFVESLYMNIVVIYVKLCKRKPEKIYKWEAMQEDLELGNQNFPMVLVQIPMYNEREVFKLSIGAACRLIWPLDRLIVQVLDDSTDPTIMEMVSTECGKWATKGINIKCERRDNRNGYKAGALKQGMRHSYVKTCTYIAIFDADFQPEPDYLERTVPFLIHNPELALVQARWKFVNAKKCLMTRMQEMSLNYHFTAEQESGSTRHAFFGFNGTAGVWRLAAMEEAGGWKDRTTVEDMDLAVRVGLHGWKFVFVNDVSVKSELPSQFKAFRFQQHRWSCGPANLFRKMTMEIIRNKRVTIWKKLYVIYSFFFVRKIIVHFFTFFFYCFILPTSVFFPEVNIPTWSTVYFPFMITLFNAIATPRSFYLVIFWVLFENVMAMHRTKGTFIGLLEGGRVNEWVVTEKLGDALETKLLPQVRKPRNGFLERINSKEMMVGIYILCCASYNLVFGKTVLYIYLYMQALAFIIAGIGFIGT

SEQ ID NO: 104587 - protein, 501 aa, Arabidopsis thaliana
  peptide (1)..(501): Ceres Seq. ID no. 13615344
MWWRDMRSLLIVPMFKCLVAICLVISLLVFVESLYMNIVVIYVKLCKRKPEKIYKWEAMQEDLELGNQNFPMVLVQIPMYNEREVFKLSIGAACRLIWPLDRLIVQVLDDSTDPTIMEMVSTECGKWATKGINIKCERRDNRNGYKAGALKQGMRHSYVKTCTYIAIFDADFQPEPDYLERTVPFLIHNPELALVQARWKFVNAKKCLMTRMQEMSLNYHFTAEQESGSTRHAFFGFNGTAGVWRLAAMEEAGGWKDRTTVEDMDLAVRVGLHGWKFVFVNDVSVKSELPSQFKAFRFQQHRWSCGPANLFRKMTMEIIRNKRVTIWKKLYVIYSFFFVRKIIVHFFTFFFYCFILPTSVFFPEVNIPTWSTVYFPFMITLFNAIATPRSFYLVIFWVLFENVMAMHRTKGTFIGLLEGGRVNEWVVTEKLGDALETKLLPQVRKPRNGFLERINSKEMMVGIYILCCASYNLVFGKTVLYIYLYMQALAFIIAGIGFIGT

SEQ ID NO: 104588 - protein, 496 aa, Arabidopsis thaliana
  peptide (1)..(496): Ceres Seq. ID no. 13615345
MRSLLIVPMFKCLVAICLVISLLVFVESLYMNIVVIYVKLCKRKPEKIYKWEAMQEDLELGNQNFPMVLVQIPMYNEREVFKLSIGAACRLIWPLDRLIVQVLDDSTDPTIMEMVSTECGKWATKGINIKCERRDNRNGYKAGALKQGMRHSYVKTCTYIAIFDADFQPEPDYLERTVPFLIHNPELALVQARWKFVNAKKCLMTRMQEMSLNYHFTAEQESGSTRHAFFGFNGTAGVWRLAAMEEAGGWKDRTTVEDMDLAVRVGLHGWKFVFVNDVSVKSELPSQFKAFRFQQHRWSCGPANLFRKMTMEIIRNKRVTIWKKLYVIYSFFFVRKIIVHFFTFFFYCFILPTSVFFPEVNIPTWSTVYFPFMITLFNAIATPRSFYLVIFWVLFENVMAMHRTKGTFIGLLEGGRVNEWVVTEKLGDALETKLLPQVRKPRNGFLERINSKEMMVGIYILCCASYNLVFGKTVLYIYLYMQALAFIIAGIGFIGT

SEQ ID NO: 104589 - DNA, 855 bp, Arabidopsis thaliana
  misc_feature (1)..(855): Ceres Seq. ID no. 13615346
  misc_feature (1)..(855): Ortholog of  Ceres SEQ ID NO 13663563 as cited in SEQ ID NO 66853
actaacttctacataaacaaactcgttgcgctcttctcaattccacgaatcacacactcttcttcttcttctgttcatcaaagaaaacgaaacccatttctcaaaatccaaaattttcaaaaactcaaaactcatcatgggtttcatttcttcttcatcaccagtagaagagtctcattaccatacacacaagatcttccttttctccaactacatccttctcggcgctgcttcaagttgtatcttcctcacactctctctccgtctaatcccttccatctgcggattcctcctcatcctcctccacgccaccacaatcgccgccgcagtctcaggctgcgctgctgcatcttgcggaagaaaccgttggtacgccgctcacatggttgcaactgtgctcactgctatattccaaggctctgtctctgttctcatcttcaccaacacgtctaaattcctcgggagtcttaagtcgtatgtgcgtgaggaagatgctgctgtgattttgaaactcggtggtggtctttgtattgtgatcttttgtcttgattggatcgttcttgtgtgtgctttcttcttgaagtactatgcttatgtcgatggtggtgatggcgttgcgatgaagagaactggtaaggttcagagtgaggagaatccgaaggactggccatggccgttccaagtttaaagtttgtgtccttttgttttgtggtgagaactgttgagttagatcaatatcaaatgttggttttatggttctgtttcggtgggtattattgtgatttgttcatttgttttttgagtgtttgatgtaattcgtcaatgatctgttacatatataaagtcttttcttat

SEQ ID NO: 104590 - protein, 183 aa, Arabidopsis thaliana
  peptide (1)..(183): Ceres Seq. ID no. 13615347
MGFISSSSPVEESHYHTHKIFLFSNYILLGAASSCIFLTLSLRLIPSICGFLLILLHATTIAAAVSGCAAASCGRNRWYAAHMVATVLTAIFQGSVSVLIFTNTSKFLGSLKSYVREEDAAVILKLGGGLCIVIFCLDWIVLVCAFFLKYYAYVDGGDGVAMKRTGKVQSEENPKDWPWPFQV

SEQ ID NO: 104591 - protein, 150 aa, Arabidopsis thaliana; identical to SEQ ID NO: 30540
  peptide (1)..(150): Ceres Seq. ID no. 13615348

SEQ ID NO: 104592 - protein, 101 aa, Arabidopsis thaliana
  peptide (1)..(101): Ceres Seq. ID no. 13615349
MVATVLTAIFQGSVSVLIFTNTSKFLGSLKSYVREEDAAVILKLGGGLCIVIFCLDWIVLVCAFFLKYYAYVDGGDGVAMKRTGKVQSEENPKDWPWPFQV

SEQ ID NO: 104593 - DNA, 1316 bp, Arabidopsis thaliana
  misc_feature (1)..(1316): Ceres Seq. ID no. 13615350
  misc_feature (1)..(1316): Ortholog of  Ceres SEQ ID NO 13657014 as cited in SEQ ID NO 65644
  misc_feature (1)..(1316): Ortholog of  Ceres SEQ ID NO 15176878 as cited in SEQ ID NO 0
ctttcgagtctgcagctagcgtgaagacgatgaaatcgatgggaggagatagataagcgcgaatttgagagtgaaaattctaaattcagacccattttcaccggcgcgagtcatcgttgaaccatgtcttggcttcctgtagaatctgatcctggtattttcactgagattatacaacaaatgcaagtgaaaggtgtgcaggttgaggaattgtattccttggacttcaactctctggatgaaataagacctgtctatggattgatattgctttacaagtggcgtccagaagaaaaggagaatcgtgttgtcatcacagagccaaacccgaatttcttctttgcaagccagataatcaacaatgcttgtgcgacccaagcgatattatcagtcctcatgaactcttcgagtattgatattggctcagaactatcagaactgaaacaattcgccaaagaatttcctcctgaactgaaaggtttagccatcaacaacaatgaggcaatacgtgcagctcacaacacatttgccaggcctgacccgtcttccatcatggaagatgaagaattagctgctgcgaaaaatctagacgaagatgatgatgtgtatcattacatcagctacttacctgttgatggtatcttatatgagctcgatggtcttaaagaaggacccattagtcttggacagtgtctgggtgagccagaaggaatcgagtggctcagaatggtccaacctgtggtacaagagcagattgaccggtattcgcagaatgagattcggtttagtctcttagctgtagttaagaacaggaaagagatgtatgtagctgaactgaaagagtatcaaagaaagcgagagagggttttgcagcagttaggtgctttgcaagctgataaatacgctgagaaaagcagttacgaggctcttgatagagagctttcggaagtcaatatcgggatagagactgtttcacaaaagattgtaatggaggaggagaaatctaagaactggaagaaagagaacatgagaaggaaacacaactatgtccctttcctcttcaacttcctcaagattcttgctgacaagaagaagctgaaacctctcattgctaagcaccatccctaaatctgctttaccgggatgttaacttgatagaaatcagatgttttagtgatctgaatactgtggtggcgtggttatatgtagccaaactttaacttgatggaagtcagatgttttagcgatccttgattgtaattggtctgaggattatgttgaaccaaatcttttttttttacttaattacatgttcc

SEQ ID NO: 104594 - protein, 334 aa, Arabidopsis thaliana; identical to SEQ ID NO: 28109
  peptide (1)..(334): Ceres Seq. ID no. 13615351

SEQ ID NO: 104595 - protein, 315 aa, Arabidopsis thaliana; identical to SEQ ID NO: 28110
  peptide (1)..(315): Ceres Seq. ID no. 13615352

SEQ ID NO: 104596 - protein, 243 aa, Arabidopsis thaliana; identical to SEQ ID NO: 28111
  peptide (1)..(243): Ceres Seq. ID no. 13615353

SEQ ID NO: 104597 - DNA, 1233 bp, Arabidopsis thaliana
  misc_feature (1)..(1233): Ceres Seq. ID no. 13615354
  misc_feature (1)..(1233): Ortholog of  Ceres SEQ ID NO 14314272 as cited in SEQ ID NO 57461
  misc_feature (1)..(1233): Ortholog of  Ceres SEQ ID NO 15170602 as cited in SEQ ID NO 57485
gacatcttctctctctctttctgaagtgaactgttgttgttgtgctctttggtttcatcgagagagaacctaaacccgatctgaaccaataacaataagaagacgaatggcgtcttcgtcgttctcagtcacatctccagctgctgctgcttccgtctatgcagtcactcaaacctcctcgcacttcccaatccaaaaccgctctcgcagagtttctttccgtctctctgctaagcccaagcttcgctttctctccaagcctagtcgcagtagctaccctgtggtgaaagcacaatctaacaaggttagtactggtgcatcatcaaatgctgccaaagttgatgggccatcatcagctgaaggaaaggagaaaaactcattgaaggagtcgtctgcttcttctcctgaattagctacagaagagtctatttctgagttccttacccaagtaacaactcttgtcaagcttgtggattcaagagacattgttgagttgcagttgaaacaactcgactgtgaactagtcattcgaaaaaaagaagccttacctcaacctcaagctcctgcatcttatgttatgatgcagcaaccaaatcaaccatcttatgcccagcaaatggctcctcctgctgcacctgctgctgccgcaccagccccttctacgccagcctctctgcctccaccatccccacctactccagccaaatcgtcacttcctactgttaaaagccccatggctggcacattctaccgtagtcctgcacctggtgaaccaccctttattaaggttggagacaaagtgcagaaggggcaagttctatgcattgttgaagccatgaagttaatgaatgaaatagagtctgaccataccggaaccgtagtcgatattgtcgcagaagacggcaagcctgtcagcctcgacactcctctgtttgtggttcaaccgtagaatcggcaccatgagaaatggagaaaagaagctctactaaattcattctctgtgctttggtaatacaaaatttgctgagacttctaaaaacgtttccccttcgctgtcactgttaaagtctgttaggtttgttagtttggtgaggaagaattgagttttctttagtttctctattcgttaaaaaaaaaaagatgagacatttttttccataagctctgtttttatttctttcctatatacacgaactcttcttgttctgttctatttgcaaattatccaatttc

SEQ ID NO: 104598 - protein, 280 aa, Arabidopsis thaliana; identical to SEQ ID NO: 76139
  peptide (1)..(280): Ceres Seq. ID no. 13615355

SEQ ID NO: 104599 - DNA, 769 bp, Arabidopsis thaliana
  misc_feature (1)..(769): Ceres Seq. ID no. 13615360
  misc_feature (1)..(769): Ortholog of  Ceres SEQ ID NO 13581866 as cited in SEQ ID NO 52179
  misc_feature (1)..(769): Ortholog of  Ceres SEQ ID NO 14315451 as cited in SEQ ID NO 59289
aaaaagtaaaaaaatcaatcatttataatttattatggagaagtgagagcaagtgttagcttttgatctttcttatattcttctctgaaatagtaacacactgtgaagagtttttcctacatctgaattttgtctgatccaggaaaaagaagaaaatggcgtttgtgacaactgcggaagtttgtgacgcgaatcaagagctgattcggagtggtcagctacgagctttgcaacccattttccagatttatggccgtcgacaaatattctcaggaccagttgtcactgtcaaagtttttgaagacaatggcttaatccgtcaattcatcgaggagaaaggaaacggtagagttcttgtggtggatggtggagggagtcaacgatgtgcaatactcggaggtaaccccgttgttcaagctcagaacaacggatgggcaggaatcgttgtgaacggatgcatcagagacgtcgatgagatcaacggttgtgatatcggagtgagagctttggcctctcatccgataaaagcgagtaagaaaggacttggagaacaacgagttccggtaaatatcgcagggactcggatttgtgatggtgaatggctttatgcagatactgatgggattcttgtctcccaaattgagttatccgtttaataaaaaaggctttgatcagttaccaaaaaaaaaaaaacagaacgtggtttgtgttcatcttcttgttacttaagagattgttgaattataatggaaaataaatttttgttttg

SEQ ID NO: 104600 - protein, 166 aa, Arabidopsis thaliana; identical to SEQ ID NO: 29350
  peptide (1)..(166): Ceres Seq. ID no. 13615361

SEQ ID NO: 104601 - DNA, 901 bp, Arabidopsis thaliana
  misc_feature (1)..(901): Ceres Seq. ID no. 13615362
  misc_feature (1)..(901): Ortholog of  Ceres SEQ ID NO 14316436 as cited in SEQ ID NO 59213
aacgaatctctatctctctctagattttggggattttgctctctctccctctctgtctctctttggtgctcgtagctttctgtctcccaattgagagaaggagggagatagaaacgtcgatgggcttaattgtggatgatgataacgatggagaagttttgattccgccgccgaatttttcaatggtagaagatgaaatttaccgatctgggtttcctgagctggagaatttcggattcttatcaaccctaaatcttcgatccatcatttatctgtgtcctgagccataccctgaggacaatctcaagtctcttgcatccaacaacattaagcttttccagttcgggattgaaggcaaaacggatcctccaactcctatgccaaaggatacagtgttgagtgctcttagagtactagttgatgttcgaaatcatccaattcttatccactgtaagcgcggaaagcataggacaggttgtcttgtgggatgcttgaggaaagtgcagaactggtgcttgtcatcggttctcgaggaataccagaagtgtgcgggtttgaaatggagacaaagagatttaaggttcattgaggatttcgatgtgctcagattgaagcaatgtctatacagcatcatatatcagtacaatgggtatggtctcaagagaagaaagttgctgtatcaagaagagaatgttgttcaagaacagcaaaaacctcaagccaccaaaggataaagaaagagatttgaaatcggatttttttttgtttctttacattttgtcgtgatgatgatgatgatttttttgagaataggatagttctttaaaaagcttgagaaaacagaggatttgatttggtctctctctatcttttttttacggttagagaaatttacagattg

SEQ ID NO: 104602 - protein, 204 aa, Arabidopsis thaliana
  peptide (1)..(204): Ceres Seq. ID no. 13615363
MGLIVDDDNDGEVLIPPPNFSMVEDEIYRSGFPELENFGFLSTLNLRSIIYLCPEPYPEDNLKSLASNNIKLFQFGIEGKTDPPTPMPKDTVLSALRVLVDVRNHPILIHCKRGKHRTGCLVGCLRKVQNWCLSSVLEEYQKCAGLKWRQRDLRFIEDFDVLRLKQCLYSIIYQYNGYGLKRRKLLYQEENVVQEQQKPQATKG

SEQ ID NO: 104603 - protein, 183 aa, Arabidopsis thaliana
  peptide (1)..(183): Ceres Seq. ID no. 13615364
MVEDEIYRSGFPELENFGFLSTLNLRSIIYLCPEPYPEDNLKSLASNNIKLFQFGIEGKTDPPTPMPKDTVLSALRVLVDVRNHPILIHCKRGKHRTGCLVGCLRKVQNWCLSSVLEEYQKCAGLKWRQRDLRFIEDFDVLRLKQCLYSIIYQYNGYGLKRRKLLYQEENVVQEQQKPQATKG

SEQ ID NO: 104604 - protein, 118 aa, Arabidopsis thaliana; identical to SEQ ID NO: 30545
  peptide (1)..(118): Ceres Seq. ID no. 13615365

SEQ ID NO: 104605 - DNA, 2159 bp, Arabidopsis thaliana
  misc_feature (1)..(2159): Ceres Seq. ID no. 13615366
  misc_feature (1)..(2159): Ortholog of  Ceres SEQ ID NO 14306319 as cited in SEQ ID NO 59927
gacttcttcgtcttcgtttcttcatttcgaagctctctctgtgtgtgatggcgtgccctagaaactccataacatacaacgccacgcgctgcgcgtgcggtatcggtcagctactaaaccggagctccgggagctgcgagatcttcggttggccgtcaacaatctccacagacaaagatgtaaactacagcgtaatatcattcgccgagactttattcgctttcgataggatccgtaagttcacgcaatctcaagctattttcttagaagctacgctcgtgatgcttctctcctggttagtcttttgtttcttcctgagattcaccaaactcggcgatggtcgtaatgtctggtttaatctccgttggtggattactcgacttgacgtcttcttctccactagacattggctcgttagtgctttctctactctcattgcttttgtctccatgaattggtttcttttgagtaaaccaattaggttcctgaatcttgtaggatgatcaacaaattgtcaagaaacgtaaaacagaacttggtggaacattttctgttgcgagctggattgttttcattggtttattcgctgcgtgagtttgataacttcagaatttagtgcttcctttggtttttgttaacttagtcagtttcttcacaggctgctttatcaaatcataaccaagagaacaattgaagttcacaatgtgagagctactggttctccagatttgatctcattcgagaacgatttggagtttaacatcaccgctgtttcggatatgagttgctctaatttacgcggtattgggaacgtggtcatgggtaatcccgggtttagcgagttcaaagttgctgctctttctagtttaggaagctatacttgtaagaatacaacttcaggaccaacagtgaatttcaaatgtaccaaatgtcgtctcaccaacgattacatatatatctcgtggcatttcgttgatcttcctgattcgcctgctgctgctgttggatttcagtttaactttacgtctaagaatggacctaacgagaagcatatgagttttgttagtggcactctgagaaacggaagcattctcgatgaaagtccggttactttccgtggaaccgaagggaatatattgaagtttaatctgtttcctcggatttaccatcatttgcatgatctaaagctaatccaacctctctttcacgagtttatccctggctctgtttaccgagacactactcagcttcaggcatctatgggaaggtcaacagatggcatactcaatacgacattgttcatcaactatctctctgcttatattgttgagatagaccatgaaaatatactcggtcctgttagcttccttgccgatcttggtggtttgtattgcatcagtattggcatatttttctacctactagtgcagtgtgagtacaggatcaagaagctgcgaaatgaagatactgttttcaggaagataaggaatcgtcgtaaagctctagatcactgggataaactgagaagatatgttgcatacacatgggattgcagcatattggtcgatgatgccatcaaaacgacaaaggtatcaggaatgtgtggtttaacgagacctccaacatcttctaatagctcggaacacggggaatcgatcatggcgaacaagaagcctaacttaggtattgagaagaatgtgatttcacaacctgcaagtttagaactgagctcttttgattcggcttcttctctggctcatggagataatttctcaaataaaaagagtataactcatccaatttctcatagtgaagacgtttcaatccctccacctcctccaatggagttcattgatggatcttctggttcagaagtggacgcaatggatatcaagaataaatttcaacttctttacgactacaatgtattgcttagggaaaaacttttagagactcagtctttgcttaatactttggcacccaaaccaatagcatcatcatcttcaaccgtggaacgcagtgcctagaacaacgaggttgtttgacatgtattgtttgtatactccctgtaacttccacatttattgaacaaaggaatgactaatgcttgttgtatctttgtgaatatacctagttgctaatagtaacaaattttcgct

SEQ ID NO: 104606 - protein, 415 aa, Arabidopsis thaliana
  peptide (1)..(415): Ceres Seq. ID no. 13615367
MSCSNLRGIGNVVMGNPGFSEFKVAALSSLGSYTCKNTTSGPTVNFKCTKCRLTNDYIYISWHFVDLPDSPAAAVGFQFNFTSKNGPNEKHMSFVSGTLRNGSILDESPVTFRGTEGNILKFNLFPRIYHHLHDLKLIQPLFHEFIPGSVYRDTTQLQASMGRSTDGILNTTLFINYLSAYIVEIDHENILGPVSFLADLGGLYCISIGIFFYLLVQCEYRIKKLRNEDTVFRKIRNRRKALDHWDKLRRYVAYTWDCSILVDDAIKTTKVSGMCGLTRPPTSSNSSEHGESIMANKKPNLGIEKNVISQPASLELSSFDSASSLAHGDNFSNKKSITHPISHSEDVSIPPPPPMEFIDGSSGSEVDAMDIKNKFQLLYDYNVLLREKLLETQSLLNTLAPKPIASSSSTVERSA

SEQ ID NO: 104607 - protein, 402 aa, Arabidopsis thaliana
  peptide (1)..(402): Ceres Seq. ID no. 13615368
MGNPGFSEFKVAALSSLGSYTCKNTTSGPTVNFKCTKCRLTNDYIYISWHFVDLPDSPAAAVGFQFNFTSKNGPNEKHMSFVSGTLRNGSILDESPVTFRGTEGNILKFNLFPRIYHHLHDLKLIQPLFHEFIPGSVYRDTTQLQASMGRSTDGILNTTLFINYLSAYIVEIDHENILGPVSFLADLGGLYCISIGIFFYLLVQCEYRIKKLRNEDTVFRKIRNRRKALDHWDKLRRYVAYTWDCSILVDDAIKTTKVSGMCGLTRPPTSSNSSEHGESIMANKKPNLGIEKNVISQPASLELSSFDSASSLAHGDNFSNKKSITHPISHSEDVSIPPPPPMEFIDGSSGSEVDAMDIKNKFQLLYDYNVLLREKLLETQSLLNTLAPKPIASSSSTVERSA

SEQ ID NO: 104608 - protein, 324 aa, Arabidopsis thaliana
  peptide (1)..(324): Ceres Seq. ID no. 13615369
MSFVSGTLRNGSILDESPVTFRGTEGNILKFNLFPRIYHHLHDLKLIQPLFHEFIPGSVYRDTTQLQASMGRSTDGILNTTLFINYLSAYIVEIDHENILGPVSFLADLGGLYCISIGIFFYLLVQCEYRIKKLRNEDTVFRKIRNRRKALDHWDKLRRYVAYTWDCSILVDDAIKTTKVSGMCGLTRPPTSSNSSEHGESIMANKKPNLGIEKNVISQPASLELSSFDSASSLAHGDNFSNKKSITHPISHSEDVSIPPPPPMEFIDGSSGSEVDAMDIKNKFQLLYDYNVLLREKLLETQSLLNTLAPKPIASSSSTVERSA

SEQ ID NO: 104609 - DNA, 1039 bp, Arabidopsis thaliana
  misc_feature (1)..(1039): Ceres Seq. ID no. 13615370
  misc_feature (1)..(1039): Ortholog of  Ceres SEQ ID NO 13494980 as cited in SEQ ID NO 51049
actcttattacttcctaaatccgatcgaaacaactgttgggttagtttctaatttccaagaatggcgcaagatcacgacgagacggagaataaaacctttgccgacgttgtcggtggcgatgatgtcggcgaaattgtcaacggaggaacaaagaatggctatcgtaaaccggactctgtggagaaggaagatgatgaggatttgaagagtctctattccttgatttgtctcacgatcggttcgattctgtttccagattcgaaaaccggtgatgcgtcttcgtttcttgaacgtgtaagaaactccgtcgctgaaaatgggcctaagcttcgagaagcttctgaaagaacaggacgcgagattcttctctggactcgtagaggcagctcgcttcgtgctctgcttgtcatcactatgggaacaatagttcttttgacaacaatggctttggttgtattcacactcttctttgtagctgcaacagccaatgctatcataatctctcttctgatttcacttgctgttgctggtggcttcttggcactcttctttctctgcttgactggtgtttacattggagccttatccgttgctgcattcgtcatctctaccgctacagtttctgctgtcgtttctgtcttaatagcttcaggttggattgggtttttctatgcggtgtggttgggaacaagaggaagcctacgcttggctaagcaatcggtttcagtggtgggatcagccatttcaggtaacactatcagtcgtcatcaacaccaagaccgggaggtaaacatcgaatcaaccaactgagaatccgtccttaccgcgtttgtaaataaaccccgacttttggttgttaatggaagcttgatataaatatgatctatggagtttgttgtgaagaagcagagaaagaatgataagaatatttcaaaatgcaacttgaaacattttgtgatcaatgtctacggatttttggatctatgtatgcatacattgtgtgttttatgtacttaagaaagaataatgatcagtatc

SEQ ID NO: 104610 - protein, 249 aa, Arabidopsis thaliana
  peptide (1)..(249): Ceres Seq. ID no. 13615371
MAQDHDETENKTFADVVGGDDVGEIVNGGTKNGYRKPDSVEKEDDEDLKSLYSLICLTIGSILFPDSKTGDASSFLERVRNSVAENGPKLREASERTGREILLWTRRGSSLRALLVITMGTIVLLTTMALVVFTLFFVAATANAIIISLLISLAVAGGFLALFFLCLTGVYIGALSVAAFVISTATVSAVVSVLIASGWIGFFYAVWLGTRGSLRLAKQSVSVVGSAISGNTISRHQHQDREVNIESTN

SEQ ID NO: 104611 - protein, 131 aa, Arabidopsis thaliana; identical to SEQ ID NO: 20885
  peptide (1)..(131): Ceres Seq. ID no. 13615372

SEQ ID NO: 104612 - DNA, 1005 bp, Arabidopsis thaliana
  misc_feature (1)..(1005): Ceres Seq. ID no. 13615373
  misc_feature (1)..(1005): Ortholog of  Ceres SEQ ID NO 13585286 as cited in SEQ ID NO 62478
  misc_feature (1)..(1005): Ortholog of  Ceres SEQ ID NO 13503500 as cited in SEQ ID NO 68001
  misc_feature (1)..(1005): Ortholog of  Ceres SEQ ID NO 15174327 as cited in SEQ ID NO 0
aagattccacaaaaactctgtattgtctctttctctctcactatctctctctcttttgtgagctcagatctgaccagagagaaagaaacaaccggagaagaagaagatgactgaccgagtcttcccagcttccaaaccaccaaccgccactaatggagctccaccagttggttccataccacctcctccagctccggcgactgtaaccagcaacggaacaacaaacggaatggctaatcagaaacctcaagtctacattccagctaaccgtccggtttaccgtccacagccttacagtcgccgtcatcaccaccaatctcgaccaagctgccgacgaatttgctgttgttgctgtttctggtcgattctgataattctgatcttagctctcatgactgcaatcgccgccaccgcgatgtacgtgatctaccaccctcgtccgccgtcgttctccgtcccgtcaataagaatcagccgcgtgaacctaacaacctcctctgattcctccgtctctcatctctcttccttcttcaacttcactctaatctcagagaatccaaaccaacacctctctttctcttacgatcctttcaccgtcaccgttaattcagctaaatccggtacgatgctcggtaacggaactgttcctgctttcttcagcgataacggtaacaaaacttcgtttcacggcgtgatcgctacgtctacagcggcgcgtgagttagatccggatgaagctaagcatctgagatcagatctgacgcgcgcgcgtgtaggatatgagatcgagatgagaactaaagtgaagatgataatggggaagctgaagagtgaaggagtagagatcaaagtgacatgtgaaggatttgaaggaactataccaaaaggtaaaactccaattgtagctacttctaaaaaaactaagtgtaagtctgatcttagtgtcaaggtctggaaatggagtttctagagggaattttgataatttcacaattgaaattttct

SEQ ID NO: 104613 - protein, 287 aa, Arabidopsis thaliana
  peptide (1)..(287): Ceres Seq. ID no. 13615374
MTDRVFPASKPPTATNGAPPVGSIPPPPAPATVTSNGTTNGMANQKPQVYIPANRPVYRPQPYSRRHHHQSRPSCRRICCCCCFWSILIILILALMTAIAATAMYVIYHPRPPSFSVPSIRISRVNLTTSSDSSVSHLSSFFNFTLISENPNQHLSFSYDPFTVTVNSAKSGTMLGNGTVPAFFSDNGNKTSFHGVIATSTAARELDPDEAKHLRSDLTRARVGYEIEMRTKVKMIMGKLKSEGVEIKVTCEGFEGTIPKGKTPIVATSKKTKCKSDLSVKVWKWSF

SEQ ID NO: 104614 - protein, 246 aa, Arabidopsis thaliana
  peptide (1)..(246): Ceres Seq. ID no. 13615375
MANQKPQVYIPANRPVYRPQPYSRRHHHQSRPSCRRICCCCCFWSILIILILALMTAIAATAMYVIYHPRPPSFSVPSIRISRVNLTTSSDSSVSHLSSFFNFTLISENPNQHLSFSYDPFTVTVNSAKSGTMLGNGTVPAFFSDNGNKTSFHGVIATSTAARELDPDEAKHLRSDLTRARVGYEIEMRTKVKMIMGKLKSEGVEIKVTCEGFEGTIPKGKTPIVATSKKTKCKSDLSVKVWKWSF

SEQ ID NO: 104615 - protein, 192 aa, Arabidopsis thaliana
  peptide (1)..(192): Ceres Seq. ID no. 13615376
MTAIAATAMYVIYHPRPPSFSVPSIRISRVNLTTSSDSSVSHLSSFFNFTLISENPNQHLSFSYDPFTVTVNSAKSGTMLGNGTVPAFFSDNGNKTSFHGVIATSTAARELDPDEAKHLRSDLTRARVGYEIEMRTKVKMIMGKLKSEGVEIKVTCEGFEGTIPKGKTPIVATSKKTKCKSDLSVKVWKWSF

SEQ ID NO: 104616 - DNA, 1148 bp, Arabidopsis thaliana
  misc_feature (1)..(1148): Ceres Seq. ID no. 13615377
  misc_feature (1)..(1148): Ortholog of  Ceres SEQ ID NO 14312166 as cited in SEQ ID NO 59253
aagcttttcgaggtatctcctccgcgcgacgatgtcagagactcgccggaatcagtctagcgatgaacaaatcgaaaaatcagagattcagcaccaaagagttgtaattgagaacagtcatggtgagaaactcgtaggagttttgcatgatactggttctacagagactgttgtcatctgccatggatttcgttcatcaaagaatcggattccaatgctgaccattgcaagtttctttgaaagagcaatgatcagttctttccggtttgactttgctggcaacggggaaagccaaggatcatttcagtatggtaactatcgccgtgaagttgaagatttgcgctctgttttgcaacacttgcgtggtgttaaccgtgtgatttctgcgattatcggacatagtaaaggtggaaatgtggtgcttttgtatgcagcaaagtacaatgatgtgcagactgttgtgaatatctcagggcggttttttcttgacagaggaatcgaatttcggcttggtaaggactacttcaagagaatcaaagataatggattcattgatgttagcaacagaaagggaaagtttgaatatcgggtaacagaagagagtctaatggaccgtctcacaaccaatgctcatgaagcatgtctctcaattcgtgaaaactgcagggtcttgacagtccatgggtcaaatgataggattgtgcatgtaacagaagcgtccgaatttgctaaacagataaagaatcataagctgtatgttattgaaggagctgatcatgagttcacttctcaccagcatcagcttgcttcaatcgttctctcattctttaaattggatcctaagaaagatgatgagtcaggtgatatcagtacaagtaaccaagactccatgagatcagttgttcctattacatcgcgaatttaaatcgctttgctgagttacttaatgtctcacggtctcgggggtgataataaacggtttgataaacacagttagaaaccaaaatgttcttatggataaaatcttgttggtagtatacagtctatttaaatatctcaacacaaaatcgatcataaaagtttcacttgttttcttaggctttgtttaggatcagttttcgaatctggctgtcctaaactattggctg

SEQ ID NO: 104617 - protein, 307 aa, Arabidopsis thaliana
  peptide (1)..(307): Ceres Seq. ID no. 13615378
SFSRYLLRATMSETRRNQSSDEQIEKSEIQHQRVVIENSHGEKLVGVLHDTGSTETVVICHGFRSSKNRIPMLTIASFFERAMISSFRFDFAGNGESQGSFQYGNYRREVEDLRSVLQHLRGVNRVISAIIGHSKGGNVVLLYAAKYNDVQTVVNISGRFFLDRGIEFRLGKDYFKRIKDNGFIDVSNRKGKFEYRVTEESLMDRLTTNAHEACLSIRENCRVLTVHGSNDRIVHVTEASEFAKQIKNHKLYVIEGADHEFTSHQHQLASIVLSFFKLDPKKDDESGDISTSNQDSMRSVVPITSRI

SEQ ID NO: 104618 - protein, 297 aa, Arabidopsis thaliana
  peptide (1)..(297): Ceres Seq. ID no. 13615379
MSETRRNQSSDEQIEKSEIQHQRVVIENSHGEKLVGVLHDTGSTETVVICHGFRSSKNRIPMLTIASFFERAMISSFRFDFAGNGESQGSFQYGNYRREVEDLRSVLQHLRGVNRVISAIIGHSKGGNVVLLYAAKYNDVQTVVNISGRFFLDRGIEFRLGKDYFKRIKDNGFIDVSNRKGKFEYRVTEESLMDRLTTNAHEACLSIRENCRVLTVHGSNDRIVHVTEASEFAKQIKNHKLYVIEGADHEFTSHQHQLASIVLSFFKLDPKKDDESGDISTSNQDSMRSVVPITSRI

SEQ ID NO: 104619 - protein, 236 aa, Arabidopsis thaliana
  peptide (1)..(236): Ceres Seq. ID no. 13615380
MLTIASFFERAMISSFRFDFAGNGESQGSFQYGNYRREVEDLRSVLQHLRGVNRVISAIIGHSKGGNVVLLYAAKYNDVQTVVNISGRFFLDRGIEFRLGKDYFKRIKDNGFIDVSNRKGKFEYRVTEESLMDRLTTNAHEACLSIRENCRVLTVHGSNDRIVHVTEASEFAKQIKNHKLYVIEGADHEFTSHQHQLASIVLSFFKLDPKKDDESGDISTSNQDSMRSVVPITSRI

SEQ ID NO: 104620 - DNA, 657 bp, Arabidopsis thaliana
  misc_feature (1)..(657): Ceres Seq. ID no. 13615385
  misc_feature (1)..(657): Ortholog of  Ceres SEQ ID NO 15173015 as cited in SEQ ID NO 51216
atcaaagaaaacaaaaagccaagaatcaaagaatcaggaaagcaaacacaacacaactaacaatggatttaggaaggtttccaataatctcaatcctcgaagacatgcttgaagtccccgaagaccacaacaacgagaagacccgcaacaacccttcacgagtttacatgcgagacgctaaggcaatggctgctacacctgctgacgtcatcgagcaccctaacgcatatgcattcgtcgtggacatgcctggaatcaaaggagatgagatcaaggttcaggtcgagaacgacaatgtgcttgtggtgagtggagagaggcagagagagaacaaagaaaacgaaggtgtgaagtatgtgaggatggagagaagaatgggtaagttcatgaggaagtttcagttgcctgaaaatgcagatttggacaagatctctgctgtttgtcatgacggtgtgttgaaggttactgttcagaaacttcctcctccggaaccaaagaaaccaaagacaattcaagttcaagttgcttgagtttgttttgtgattgtgtgttggatttatctattttgttttgatttatggatttgatgaatgtaatcggaatgcgtgagggatatggtgttttgttctaagatgaaataaaagtttgttctgtttc

SEQ ID NO: 104621 - protein, 175 aa, Arabidopsis thaliana
  peptide (1)..(175): Ceres Seq. ID no. 13615386
QRKQKAKNQRIRKANTTQLTMDLGRFPIISILEDMLEVPEDHNNEKTRNNPSRVYMRDAKAMAATPADVIEHPNAYAFVVDMPGIKGDEIKVQVENDNVLVVSGERQRENKENEGVKYVRMERRMGKFMRKFQLPENADLDKISAVCHDGVLKVTVQKLPPPEPKKPKTIQVQVA

SEQ ID NO: 104622 - protein, 155 aa, Arabidopsis thaliana; identical to SEQ ID NO: 26255
  peptide (1)..(155): Ceres Seq. ID no. 13615387

SEQ ID NO: 104623 - protein, 141 aa, Arabidopsis thaliana; identical to SEQ ID NO: 26256
  peptide (1)..(141): Ceres Seq. ID no. 13615388

SEQ ID NO: 104624 - DNA, 668 bp, Arabidopsis thaliana
  misc_feature (1)..(668): Ceres Seq. ID no. 13615389
  misc_feature (1)..(668): Ortholog of  Ceres SEQ ID NO 15173015 as cited in SEQ ID NO 51216
aatcaaaccaaagaaaaagccaagaagcaagaaagttaacacaacagctaagaatggatttggagtttggaaggtttccaatattttcaatcctcgaagacatgcttgaagcccctgaagaacaaaccgagaagactcgtaacaacccttcaagagcttacatgcgagacgcaaaggcaatggctgctacaccagctgacgttatcgagcacccggatgcgtacgttttcgccgtggacatgcctggaatcaaaggagatgagattcaggtccagatagagaacgagaacgtgcttgtggtgagtggcaaaagacagagggacaacaaggagaatgaaggtgtgaagtttgtgaggatggagaggaggatggggaagtttatgaggaagtttcagttacctgataatgcagatttggagaagatctctgcggcttgtaatgacggtgtgttgaaagtgactattccgaaacttcctcctcctgagccaaagaaaccaaagactatacaagttcaagtcgcttgagtttgtttgtgatcgtgtttttgtgttttaatgaatgtaatcgataagcaactacctcttggtgttcgttgtaaaatgaaataaaaatagttttctctgttcatatttgtctttgtgttcaatcttcaaatcaatgaagttttt

SEQ ID NO: 104625 - protein, 173 aa, Arabidopsis thaliana
  peptide (1)..(173): Ceres Seq. ID no. 13615390
SNQRKSQEARKLTQQLRMDLEFGRFPIFSILEDMLEAPEEQTEKTRNNPSRAYMRDAKAMAATPADVIEHPDAYVFAVDMPGIKGDEIQVQIENENVLVVSGKRQRDNKENEGVKFVRMERRMGKFMRKFQLPDNADLEKISAACNDGVLKVTIPKLPPPEPKKPKTIQVQVA

SEQ ID NO: 104626 - protein, 156 aa, Arabidopsis thaliana; identical to SEQ ID NO: 42333
  peptide (1)..(156): Ceres Seq. ID no. 13615391

SEQ ID NO: 104627 - protein, 140 aa, Arabidopsis thaliana; identical to SEQ ID NO: 42334
  peptide (1)..(140): Ceres Seq. ID no. 13615392

SEQ ID NO: 104628 - DNA, 1316 bp, Arabidopsis thaliana
  misc_feature (1)..(1316): Ceres Seq. ID no. 13615434
  misc_feature (1)..(1316): Ortholog of  Ceres SEQ ID NO 14312844 as cited in SEQ ID NO 55601
  misc_feature (1)..(1316): Ortholog of  Ceres SEQ ID NO 14312866 as cited in SEQ ID NO 55630
  misc_feature (1)..(1316): Ortholog of  Ceres SEQ ID NO 13597376 as cited in SEQ ID NO 64002
  misc_feature (1)..(1316): Ortholog of  Ceres SEQ ID NO 13503573 as cited in SEQ ID NO 65402
  misc_feature (1)..(1316): Ortholog of  Ceres SEQ ID NO 13659615 as cited in SEQ ID NO 67248
aataaaaaacaaaacgctctccagaatttcgaaacttctaagatattttgttttctctcttaacgatggcgaagagtgttttggttaccggcggcgctggctatatcggaagtcatactgttcttcaactgcttgaaggtggttactccgccgtcgttgttgacaattacgacaattcctctgctgcttcgcttcagcgcgtgaagaaactcgccggcgaaaacggaaaccgcctctccttccaccaggtggatctccgagacaggcctgcgcttgagaagatattctcagaaacaaagtttgatgcagtgatacactttgctggacttaaagcagtaggtgagagtgtggagaagcctttgctctattataataataacattgttggcactgttactcttttggaggttatggctcaatacggctgcaaaaatcttgtattttcatcatcagctactgtctatggctggcctaaggaggttccttgcactgaggagtcaccaatttctgccactaacccatatggccgtacaaagctttttatcgaagagatttgccgggatgtacatcgttctgactcggaatggaagatcatattgcttagatacttcaaccctgttggtgcacatcctagtggttacattggtgaagatcctcttggagttcccaacaatctcatgccttatgtccaacaagttgcagttggccggagacctcaccttactgtctttggaaccgactacaagacaaaggatggtacaggggttagagattacattcatgtcatggatttagcagatggacacatagctgctctgcgtaagctagatgatctcaaaatcagttgtgaggtatacaatcttggaacgggtaatggaacatcggtcctagaaatggtcgctgcctttgaaaaagcatccggaaagaaaatccctttggtgatggctggacgacgtcctggagacgctgaagttgtttacgcctcaacggaaaaagcagagcgcgaactaaattggaaggctaagaatgggatagaggagatgtgtagggatctatggaattgggcaagcaataacccctacggctacaattcctcctccaatggctcctcttcataattctccttttttaatttttattttgccttttttgcttacttatattcatataaacaaacacataaaaaaaaagaagagaaaggctgacaagtacccaaactttagaagaaattgaggaaaattcttgtactatcaatttatcatagaaactatatttattaaatcgttagttttcaatcgttgggagttttttttctt

SEQ ID NO: 104629 - protein, 350 aa, Arabidopsis thaliana; identical to SEQ ID NO: 28659
  peptide (1)..(350): Ceres Seq. ID no. 13615435

SEQ ID NO: 104630 - protein, 235 aa, Arabidopsis thaliana; identical to SEQ ID NO: 28660
  peptide (1)..(235): Ceres Seq. ID no. 13615436

SEQ ID NO: 104631 - DNA, 911 bp, Arabidopsis thaliana
  misc_feature (1)..(911): Ceres Seq. ID no. 13615441
  misc_feature (1)..(911): Ortholog of  Ceres SEQ ID NO 12557928 as cited in SEQ ID NO 111
aatcttcttttcaattcaatacttttttttctcaatctctcctctcaaatcaaacaactttgattgatcttcgcaatcgattccacatgaagcgcagtactaccgactctgatttggccggtgatgctcacaacgagacaaacaagaagatgaagagtacagaggaagaagaaatcggattctccaatttagacgagaatctagtgtacgaggtgttgaaacacgtcgacgcaaagaccttagctatgtcatcttgcgtgagcaagatctggcacaaaacggcacaagacgagcggctttgggagctgatctgtactcgtcactggactaacatcggctgcgggcagaaccagctcagatctgttgtgttggcgcttggtggcttccgaagactccactctctttacctctggcctctctctaaacccaatccgcgtgctaggttcggtaaggacgagcttaaactcactctttctcttctctcaattcgatactacgagaagatgagtttcactaagagacctcttccagaatccaaataattgactacaaattattagagtttggttttggagtttgtgtatttggagtttgttgattggtaagtcagatgtgatgttcaatgctggcaataaaatttgttggtatccataagccagactgttagcaacagttgtgttctgtaataatagagggtgatgagaatttttaattactgtaatcggagctgattaaaagtagatttaatatcaaatgtgattcgattttgttgtaatggttctgtcgtgaagttaagttggtccgtagttggacaatgattgtaacaaaatcgattcgtgatccagtttggtaagattaagaactgttagtgacgattctgttttattattcaatgaaaaacaatgttcacc

SEQ ID NO: 104632 - protein, 179 aa, Arabidopsis thaliana
  peptide (1)..(179): Ceres Seq. ID no. 13615442
SSFQFNTFFSQSLLSNQTTLIDLRNRFHMKRSTTDSDLAGDAHNETNKKMKSTEEEEIGFSNLDENLVYEVLKHVDAKTLAMSSCVSKIWHKTAQDERLWELICTRHWTNIGCGQNQLRSVVLALGGFRRLHSLYLWPLSKPNPRARFGKDELKLTLSLLSIRYYEKMSFTKRPLPESK

SEQ ID NO: 104633 - protein, 151 aa, Arabidopsis thaliana; identical to SEQ ID NO: 24048
  peptide (1)..(151): Ceres Seq. ID no. 13615443

SEQ ID NO: 104634 - protein, 130 aa, Arabidopsis thaliana; identical to SEQ ID NO: 24049
  peptide (1)..(130): Ceres Seq. ID no. 13615444

SEQ ID NO: 104635 - DNA, 1489 bp, Arabidopsis thaliana
  misc_feature (1)..(1489): Ceres Seq. ID no. 13615449
  misc_feature (1)..(1489): Ortholog of  Ceres SEQ ID NO 15171366 as cited in SEQ ID NO 51578
  misc_feature (1)..(1489): Ortholog of  Ceres SEQ ID NO 14308536 as cited in SEQ ID NO 55469
  misc_feature (1)..(1489): Ortholog of  Ceres SEQ ID NO 14314909 as cited in SEQ ID NO 58002
ccccctttttcactctcttcatttattcttcccctcatcatcatcatcatcttcttctttaaccaaaaacacaacttacaagaaaactgttgaatctttgtatttatttacatctcctttgacctttaataagaatctgagtggttggtctctgatttgatgagatgactgttgagctgatgatgagcagctacagcggcggcggaggaggaggtgatggttttcctgcaatcgccgcggcggcgaaaatggaagataccgctttgagagaagctgcttctgcagggattcacggtgtggaggagtttcttaaactgatcggtcaaagtcaacaaccaacggagaagagtcagacggagataaccgcggtgactgacgtcgccgttaacagcttcaagaaggtcatttctctactcggtagatctagaaccggacacgctagattcagacgagctcccgcgtcaacgcaaacgccgtttaagcaaacgccggtggttgaggaggaggtggaggtggaggagaagaagccagaaacaagctccgtgttaacaaaacagaaaacagagcaatatcacggtggtggatctgcgtttagagtttattgtccaacaccaattcatcgtcgtcctcctctatcacacaataacaacaacaatcagaatcaaacaaagaacggttcgtcttcttcatctcctccgatgctcgcaaacggagcaccgtcaacgataaactttgcgccgtcaccaccagtctcagcgacgaactcattcatgtcttctcatagatgtgacaccgatagtactcacatgtcatcaggattcgagttcactaacccatctcagctctctggttcgagaggtaaacctcctttatcatcagcttcgttgaagagaagatgtaattcatctccctcaagccgttgccattgctccaagaaaaggaaatcaagagtaaaaagagtgattagagttccagcagtaagtagcaaaatggctgatataccatcagatgagttttcatggagaaaatatggtcaaaaaccaatcaaaggctctcctcatcctcggggatattacaagtgcagcagtgtaagaggttgtccggcgcgtaagcatgtggagcgtgcactagatgatgcgatgatgctaatcgtgacgtacgaaggagaccacaaccatgctttggttctcgagacgacgacgatgaatcatgacaaaactctttagtttctcgagtttgaggggaactgtctgtgtgtgaccactatccagattagtcaacgacagagtgggcccgcactgcacttttttattcttttctttttgaaaagcttttgctttatctttctttttgattggaggaaatagagggaggggagataaagacgagagaggaacgttgtggatcttgatggaagttgaatcatgtgaatgtccttttctgtttatttatttctaggataatatatatttagtgcactatttttgtc

SEQ ID NO: 104636 - protein, 353 aa, Arabidopsis thaliana; identical to SEQ ID NO: 40099
  peptide (1)..(353): Ceres Seq. ID no. 13615450

SEQ ID NO: 104637 - protein, 348 aa, Arabidopsis thaliana; identical to SEQ ID NO: 40100
  peptide (1)..(348): Ceres Seq. ID no. 13615451

SEQ ID NO: 104638 - protein, 347 aa, Arabidopsis thaliana; identical to SEQ ID NO: 40101
  peptide (1)..(347): Ceres Seq. ID no. 13615452

SEQ ID NO: 104639 - DNA, 1258 bp, Arabidopsis thaliana
  misc_feature (1)..(1258): Ceres Seq. ID no. 13615453
  misc_feature (1)..(1258): Ortholog of  Ceres SEQ ID NO 13596944 as cited in SEQ ID NO 68910
agtctagagacgagaagcacgtggaaagaagaaactatcaagttggacttggatgatatatatatatatgcagctgtggatttgaatcgtaaaccaaccaaccaatcagatggaccacactctttctcttcttccatttctcttcatcataatcatttcttccttccatgttttgcctgtttcacccacaccttcacacaaactaaaatccgccactaccatcagaaaactcaaccgcggaggaccttacatcggtctcgtgacggtcattgcgaccgaagaaaatgcttttctccgcagtgtcgatttcagacctgaccctactcatcccttcttggatctctctgggagacgttttcgaatagggaagattcatggaaagaaggttgtgtatgttagatgtgggagaggaatggtgaatggagcagcagcaacacaacagatgatagatgtgttcaatgtgaaagggatagtgcattttgggattgctggaaatatgaacaactcaatgtccataggagatgtgagcatccctaagcaaattacgaatgctggcttgtgggattggctgaatccagacaaagtaaagggagttgaggatatagcgtacttagatgtcggaaactataatgttccaaaaggagatggcgacaatgagttagggagtattggatataattacgagcaactatattcagtcactggtcacatcaatgcacctcagaatgtgttttggatcaacacaactcaagagtggcttcatcttgcagctgatctagagaagatggagctatcgcagtgtgtaaatgcaagtttgtgtcttccaaagaaaccaaaattggtagttggattgaaagcagccactgcttacatatttgtggataatgcagcctatagaaatttcttatacgatacttttggagtctcctcctctgatatggagagttctgcagtagccatgacatgcgcatcaaatgggtatccgataattgtgataaggggtttatcagatttagctggagaaggaggagataacactgttcataagtttggatctttggctgccactaacactgccaaagctgttttagagttcattaggaagctcccaccgtactaattcctctagtgtaacctatttatcatgaatgtttgaatctagttctctagttcatatcaacgaacccgtgacaacaaatgatttggattgttatcaaattccattttccatgatcgtaacaatgacaacacttttatc

SEQ ID NO: 104640 - protein, 336 aa, Arabidopsis thaliana; identical to SEQ ID NO: 25408
  peptide (1)..(336): Ceres Seq. ID no. 13615454

SEQ ID NO: 104641 - protein, 235 aa, Arabidopsis thaliana; identical to SEQ ID NO: 25409
  peptide (1)..(235): Ceres Seq. ID no. 13615455

SEQ ID NO: 104642 - protein, 225 aa, Arabidopsis thaliana; identical to SEQ ID NO: 25410
  peptide (1)..(225): Ceres Seq. ID no. 13615456

SEQ ID NO: 104643 - DNA, 5365 bp, Arabidopsis thaliana
  misc_feature (1)..(5365): Ceres Seq. ID no. 13615465
  misc_feature (1)..(5365): Ortholog of  Ceres SEQ ID NO 13657915 as cited in SEQ ID NO 66051
atgccttacttaaccaacgcagaagagaataggattcctgcaagattgtttctcatagcggttgatgtcccttttttctctcctctgtttcaaagccacacggcacttttggcacctttatcctctgccatggcaacctctaaatcccaacaattccagctaattgaagggatggagcttcagatcaccgtcactggattgccgaatgggagcagtgtaagagctgagtttcacctgaagaactgcactcgcgcatggattcttcattggggttgtatttaccaaggaaataaccattggtatatcccatctgaacattcctcgaagcaaggtgcattgcagactacctttgtgaagagtggggatgcatatgtagtgatccttgagttgcgggatccaagggtacgcgcaattgaatttgttttgaaagatggtagccataacagatgggatgaacgggaatgcaccttgttgcctaatggaaattttaggttgagacagcataatggaaacttccgtgttgagattccctggaatgatctgcatgctcatcatcggataccgaagactctgatagaaagaagagcacataagatatgggaccggaagggacgaccacaaagctctgcacgtgaacaacagatagactatgacaatgcagtaagagagctccacgccgagctcgctagaggaatatctttagacgaacttcaggctaactctacagtaccagtggagaaagaagaaaccagtgagccacatcacacaatgatccaatcatatcgccggaagcatgatgttcagaaatggttacagaaatatacggaaccaatcaacagaagtggaagtgtgaaaagttcagcccttgcagaactctccaagagatctgtgggccaagaaaatctagtttcacagaaaagctttcatgtcagaaactacgagatcacggtcctccaaagggatgttaagggagattgtcgcttatggattgccacgaacatggcaggtccaacagttctccattggggagtcgcaaagtcatctgcaggagagtggttgataccaccacctgacgtgttacctgagaaatcaaaatttgttcacggagcatgtcaaacacaatttaccgatatgtcgagcagagaacactcttatcagtttattgatataaatttaaaacgaggtggttttgttggtatccaatttgtaatatggtcgggaggctactgggtgaacaataacggagccaacttcgttgtaaacctgaagtcagcagacagtaccagtggtaagcttgacgtggatgaaaagtatgttctcaaatggttacttgatgaaatatctgagcgagagaaagaggctgagagatcattgatgcacaggttcaacattgcaacagagttgaccgagcgttgtaaggatgaaggagaaggtggatgtattggtataatggtgtggatgagattcatggccaccagacatctcacctggaataagaactataacgtgaaacctcgggaaattagtgaagcactagaaagattcaccaatttgatggagaaaatatatttgcagcaaccaaataagagagaaattgtgagactaactatggcacttgtgggtcgtggaggtcaaggtgatgttgggcagagaatccgtgacgaaatccttgttattcagagaaataaccactgcaaatccggcatgatggaagagtggcaccaaaagttgcacaacaacagtagcgcagatgatgtgataatttgtgaggctctcttgaactatgtgagatctgacttcaggatcgatgcatactggcaaacactacagaccaatggtctcacaaaagaaaggcttgcaagttatgaccgccccatagtatcagagcctcgtttcagaagtgattctaaagaaggactcatccgtgaccttacaatgtacttgaaaacattaaaggcagttcattcaggtgcagaccttgagtctgctattgatacgttcctttctccatctaagggtcatcatgtctttgctgtcaatggtttatcaccaaaattgcaggatctactgaatttagttaagaggcttgttcgcgaagagaacactgagcccctaatagagaagttagttgatgctcgcattcagttacaccctgcactacgagcacctcgcacgagggcaaaagatttactatttttggacattgcgttggagtcatgttttaaaacaacaatagagaagagactcatctctttaaacttcaataacccaccggaaattatatatgtcatctgcgtggtgcttgagaatctgtgcttatctatagttaacaatgaagaaatcatattctgtacaaagtgggcattgcaaacaaaagcggtccttgaccgtttacaactagtacttgctgatagatgtcagcattattttacaataatacagcctactgcaaaatatcttggtcaactgttacgtgttgacaagcatgggattgatgttttcactgaagaggttataagagcagggccaggagccgttttatcaactcttgtaaacagatttgatccttctctaaggaaaatcgcgaatttaggctgttggcaggttatcagctcggctgatgcatatgggtttgtggtttgtgtgaatgagttaattgttgttcagaacaaattctactcgaagccaactgtaattattgcaagtaaagtcacaggagaagaggagatccctgctggtgttgtagccgtgctgactcctagtatgattgatgtcttgtctcatatatgctttgctacatgcttcgatcagaatgttctcagcaatctgaagtcgaaggaagggagagcaatatctattcatacaaagtctactggtttagttatcagtgatggcaacaactctgatgtctctgttcgtcatatttttatttcctctgttccacggggagtgatctctaaggggaagaagttttgtggccactatgtgatttcatctaaggaattcactgatgaaagggttggctcaaaatcatacaatataaaatttctacgtgaaagagttccatcatggatcaagatacctacctcagctgctcttccattcggaacatttgagaatatactctcagatgattccaataaggatgtagcacgcaggatttctgtccttaaagattctcttaacagaggagacctgacaaaacttaagtccattcaagaagctatcttacaaatgagtgctccaatggctctgagaaatgaactgatcacaaaattgagaagtgaaagaatgccttatcttggtgatgaatcaggctggaaccgctcctgggtggcaattaagaaggtctgggcttcaaagtggaacgagagagcttatgtcagttgcaaaaaaaataagcttgatcatgatgcggtctgcatggctgtgctgattcaagaagtcatttgtggcgattatgctttcgtcattcacacaaacaatccggtctctggtgactcttcagaaatatacacagagattgtgaagggtttgggagagaccttggttggagcatatccaggacgagcaatgagcttcatcaccaagaaaacaaacctcaagtctccaaccgtgatcagttacccaagtaagaggataggtctgtattctaaaccctcaatcatattcagatcagattcaaacaacgaggatctcgaaggcaacgcaggcgctggactttacgacagtgtgataatggatgaagcagaggaagtagtggtggattactcaagggagccactaataatggacaaatcctttcgagtgcgtctattctcagcgattgcagaagctggaaatgtgatagagtcaatctatggttgtcctcaagacattgaaggtgttgtcaaaggtggacatatctacatcgtccaagctagaccccaatcgccgagaaagtctcccgctatggataccgttctcatggctacaacaccaccaatcagatgtcttcatgcttcaattcctacggtgttccgttcgccggcgatttatcaggtcagctgccggagctcccaactgttttcctaccgttcgacgactatgatgagcatgtgttttctcagacggtccgatttgagatctcgctttcttagtactccgaaaaccacttctccgatgagacgacctcgcttttccgtcggtgcttctacggaggagtcttcaattccttctaatcggaaccttatcgtggctaactccgtcgtaatcgtagctttagctgtagctaatcgcgtgctctacaaactcgctttggttcccatgaaacagtacccttttttcatggctcagctcaccactttcggctacgtcttgatttatttcaccattctgtatacgaggcgccgtctaggcattgtgacgaatgaaatgatggatgtacccaaatggagattcgcaatcattggttttctcgaagctcttggtgttgccactggcatggctgcagcagcaatgcttcctggaccagttatacccattttgaatcagacatatttggtgtggcagctgctttttgctcttcttattttaggcaggaggtttttgcttaaccaaattgctggttgtctccttgtggctgtgggggttgtggtggctgtttcaagtggatctggtgcagatactacgctatctggaatcggtttcttatggcctgctgtattggtagcatccgctgcttttcaagctggtgcatctatcataaaggaatttgttttcaatgatgctgcaaagcgtcttgagggaaagtcactggatatatttgtggtaaattcatttggatctggatttcaggctctttttgtgttcctgttgttgccttttctctcaaacttgaaaggcattccattcgccagccttccttcatatctaaaagatggtgccggatgcttcttcaacactggagctaagatttctggctgtgatggtgcccctatactcccactgctctatatatccaccaatctcgctttcaacatctcattgctccatctggtgaaaatatcttcagcaatcgtttcctctcttaccatgatgctctcagtgccattagcggtgtacataatgtcaaaaccattgccgtatctaccgggaggatcaagcttgagctcaaattttacgatggggtgtatagttcttgtcctaggtcttcttctctacaacattcccactactccaactaaacaacacaccaagacctcctaacacactcactcaccattcatcctttttgtgcattacttttttttttgttgataaaccaaattcgtgtaatttcccaattttttttcctttgaccatcaaagatacatagaatattctc

SEQ ID NO: 104644 - protein, 1748 aa, Arabidopsis thaliana
  peptide (1)..(1748): Ceres Seq. ID no. 13615466
MPYLTNAEENRIPARLFLIAVDVPFFSPLFQSHTALLAPLSSAMATSKSQQFQLIEGMELQITVTGLPNGSSVRAEFHLKNCTRAWILHWGCIYQGNNHWYIPSEHSSKQGALQTTFVKSGDAYVVILELRDPRVRAIEFVLKDGSHNRWDERECTLLPNGNFRLRQHNGNFRVEIPWNDLHAHHRIPKTLIERRAHKIWDRKGRPQSSAREQQIDYDNAVRELHAELARGISLDELQANSTVPVEKEETSEPHHTMIQSYRRKHDVQKWLQKYTEPINRSGSVKSSALAELSKRSVGQENLVSQKSFHVRNYEITVLQRDVKGDCRLWIATNMAGPTVLHWGVAKSSAGEWLIPPPDVLPEKSKFVHGACQTQFTDMSSREHSYQFIDINLKRGGFVGIQFVIWSGGYWVNNNGANFVVNLKSADSTSGKLDVDEKYVLKWLLDEISEREKEAERSLMHRFNIATELTERCKDEGEGGCIGIMVWMRFMATRHLTWNKNYNVKPREISEALERFTNLMEKIYLQQPNKREIVRLTMALVGRGGQGDVGQRIRDEILVIQRNNHCKSGMMEEWHQKLHNNSSADDVIICEALLNYVRSDFRIDAYWQTLQTNGLTKERLASYDRPIVSEPRFRSDSKEGLIRDLTMYLKTLKAVHSGADLESAIDTFLSPSKGHHVFAVNGLSPKLQDLLNLVKRLVREENTEPLIEKLVDARIQLHPALRAPRTRAKDLLFLDIALESCFKTTIEKRLISLNFNNPPEIIYVICVVLENLCLSIVNNEEIIFCTKWALQTKAVLDRLQLVLADRCQHYFTIIQPTAKYLGQLLRVDKHGIDVFTEEVIRAGPGAVLSTLVNRFDPSLRKIANLGCWQVISSADAYGFVVCVNELIVVQNKFYSKPTVIIASKVTGEEEIPAGVVAVLTPSMIDVLSHICFATCFDQNVLSNLKSKEGRAISIHTKSTGLVISDGNNSDVSVRHIFISSVPRGVISKGKKFCGHYVISSKEFTDERVGSKSYNIKFLRERVPSWIKIPTSAALPFGTFENILSDDSNKDVARRISVLKDSLNRGDLTKLKSIQEAILQMSAPMALRNELITKLRSERMPYLGDESGWNRSWVAIKKVWASKWNERAYVSCKKNKLDHDAVCMAVLIQEVICGDYAFVIHTNNPVSGDSSEIYTEIVKGLGETLVGAYPGRAMSFITKKTNLKSPTVISYPSKRIGLYSKPSIIFRSDSNNEDLEGNAGAGLYDSVIMDEAEEVVVDYSREPLIMDKSFRVRLFSAIAEAGNVIESIYGCPQDIEGVVKGGHIYIVQARPQSPRKSPAMDTVLMATTPPIRCLHASIPTVFRSPAIYQVSCRSSQLFSYRSTTMMSMCFLRRSDLRSRFLSTPKTTSPMRRPRFSVGASTEESSIPSNRNLIVANSVVIVALAVANRVLYKLALVPMKQYPFFMAQLTTFGYVLIYFTILYTRRRLGIVTNEMMDVPKWRFAIIGFLEALGVATGMAAAAMLPGPVIPILNQTYLVWQLLFALLILGRRFLLNQIAGCLLVAVGVVVAVSSGSGADTTLSGIGFLWPAVLVASAAFQAGASIIKEFVFNDAAKRLEGKSLDIFVVNSFGSGFQALFVFLLLPFLSNLKGIPFASLPSYLKDGAGCFFNTGAKISGCDGAPILPLLYISTNLAFNISLLHLVKISSAIVSSLTMMLSVPLAVYIMSKPLPYLPGGSSLSSNFTMGCIVLVLGLLLYNIPTTPTKQHTKTS

SEQ ID NO: 104645 - protein, 1705 aa, Arabidopsis thaliana
  peptide (1)..(1705): Ceres Seq. ID no. 13615467
MATSKSQQFQLIEGMELQITVTGLPNGSSVRAEFHLKNCTRAWILHWGCIYQGNNHWYIPSEHSSKQGALQTTFVKSGDAYVVILELRDPRVRAIEFVLKDGSHNRWDERECTLLPNGNFRLRQHNGNFRVEIPWNDLHAHHRIPKTLIERRAHKIWDRKGRPQSSAREQQIDYDNAVRELHAELARGISLDELQANSTVPVEKEETSEPHHTMIQSYRRKHDVQKWLQKYTEPINRSGSVKSSALAELSKRSVGQENLVSQKSFHVRNYEITVLQRDVKGDCRLWIATNMAGPTVLHWGVAKSSAGEWLIPPPDVLPEKSKFVHGACQTQFTDMSSREHSYQFIDINLKRGGFVGIQFVIWSGGYWVNNNGANFVVNLKSADSTSGKLDVDEKYVLKWLLDEISEREKEAERSLMHRFNIATELTERCKDEGEGGCIGIMVWMRFMATRHLTWNKNYNVKPREISEALERFTNLMEKIYLQQPNKREIVRLTMALVGRGGQGDVGQRIRDEILVIQRNNHCKSGMMEEWHQKLHNNSSADDVIICEALLNYVRSDFRIDAYWQTLQTNGLTKERLASYDRPIVSEPRFRSDSKEGLIRDLTMYLKTLKAVHSGADLESAIDTFLSPSKGHHVFAVNGLSPKLQDLLNLVKRLVREENTEPLIEKLVDARIQLHPALRAPRTRAKDLLFLDIALESCFKTTIEKRLISLNFNNPPEIIYVICVVLENLCLSIVNNEEIIFCTKWALQTKAVLDRLQLVLADRCQHYFTIIQPTAKYLGQLLRVDKHGIDVFTEEVIRAGPGAVLSTLVNRFDPSLRKIANLGCWQVISSADAYGFVVCVNELIVVQNKFYSKPTVIIASKVTGEEEIPAGVVAVLTPSMIDVLSHICFATCFDQNVLSNLKSKEGRAISIHTKSTGLVISDGNNSDVSVRHIFISSVPRGVISKGKKFCGHYVISSKEFTDERVGSKSYNIKFLRERVPSWIKIPTSAALPFGTFENILSDDSNKDVARRISVLKDSLNRGDLTKLKSIQEAILQMSAPMALRNELITKLRSERMPYLGDESGWNRSWVAIKKVWASKWNERAYVSCKKNKLDHDAVCMAVLIQEVICGDYAFVIHTNNPVSGDSSEIYTEIVKGLGETLVGAYPGRAMSFITKKTNLKSPTVISYPSKRIGLYSKPSIIFRSDSNNEDLEGNAGAGLYDSVIMDEAEEVVVDYSREPLIMDKSFRVRLFSAIAEAGNVIESIYGCPQDIEGVVKGGHIYIVQARPQSPRKSPAMDTVLMATTPPIRCLHASIPTVFRSPAIYQVSCRSSQLFSYRSTTMMSMCFLRRSDLRSRFLSTPKTTSPMRRPRFSVGASTEESSIPSNRNLIVANSVVIVALAVANRVLYKLALVPMKQYPFFMAQLTTFGYVLIYFTILYTRRRLGIVTNEMMDVPKWRFAIIGFLEALGVATGMAAAAMLPGPVIPILNQTYLVWQLLFALLILGRRFLLNQIAGCLLVAVGVVVAVSSGSGADTTLSGIGFLWPAVLVASAAFQAGASIIKEFVFNDAAKRLEGKSLDIFVVNSFGSGFQALFVFLLLPFLSNLKGIPFASLPSYLKDGAGCFFNTGAKISGCDGAPILPLLYISTNLAFNISLLHLVKISSAIVSSLTMMLSVPLAVYIMSKPLPYLPGGSSLSSNFTMGCIVLVLGLLLYNIPTTPTKQHTKTS

SEQ ID NO: 104646 - protein, 1691 aa, Arabidopsis thaliana
  peptide (1)..(1691): Ceres Seq. ID no. 13615468
MELQITVTGLPNGSSVRAEFHLKNCTRAWILHWGCIYQGNNHWYIPSEHSSKQGALQTTFVKSGDAYVVILELRDPRVRAIEFVLKDGSHNRWDERECTLLPNGNFRLRQHNGNFRVEIPWNDLHAHHRIPKTLIERRAHKIWDRKGRPQSSAREQQIDYDNAVRELHAELARGISLDELQANSTVPVEKEETSEPHHTMIQSYRRKHDVQKWLQKYTEPINRSGSVKSSALAELSKRSVGQENLVSQKSFHVRNYEITVLQRDVKGDCRLWIATNMAGPTVLHWGVAKSSAGEWLIPPPDVLPEKSKFVHGACQTQFTDMSSREHSYQFIDINLKRGGFVGIQFVIWSGGYWVNNNGANFVVNLKSADSTSGKLDVDEKYVLKWLLDEISEREKEAERSLMHRFNIATELTERCKDEGEGGCIGIMVWMRFMATRHLTWNKNYNVKPREISEALERFTNLMEKIYLQQPNKREIVRLTMALVGRGGQGDVGQRIRDEILVIQRNNHCKSGMMEEWHQKLHNNSSADDVIICEALLNYVRSDFRIDAYWQTLQTNGLTKERLASYDRPIVSEPRFRSDSKEGLIRDLTMYLKTLKAVHSGADLESAIDTFLSPSKGHHVFAVNGLSPKLQDLLNLVKRLVREENTEPLIEKLVDARIQLHPALRAPRTRAKDLLFLDIALESCFKTTIEKRLISLNFNNPPEIIYVICVVLENLCLSIVNNEEIIFCTKWALQTKAVLDRLQLVLADRCQHYFTIIQPTAKYLGQLLRVDKHGIDVFTEEVIRAGPGAVLSTLVNRFDPSLRKIANLGCWQVISSADAYGFVVCVNELIVVQNKFYSKPTVIIASKVTGEEEIPAGVVAVLTPSMIDVLSHICFATCFDQNVLSNLKSKEGRAISIHTKSTGLVISDGNNSDVSVRHIFISSVPRGVISKGKKFCGHYVISSKEFTDERVGSKSYNIKFLRERVPSWIKIPTSAALPFGTFENILSDDSNKDVARRISVLKDSLNRGDLTKLKSIQEAILQMSAPMALRNELITKLRSERMPYLGDESGWNRSWVAIKKVWASKWNERAYVSCKKNKLDHDAVCMAVLIQEVICGDYAFVIHTNNPVSGDSSEIYTEIVKGLGETLVGAYPGRAMSFITKKTNLKSPTVISYPSKRIGLYSKPSIIFRSDSNNEDLEGNAGAGLYDSVIMDEAEEVVVDYSREPLIMDKSFRVRLFSAIAEAGNVIESIYGCPQDIEGVVKGGHIYIVQARPQSPRKSPAMDTVLMATTPPIRCLHASIPTVFRSPAIYQVSCRSSQLFSYRSTTMMSMCFLRRSDLRSRFLSTPKTTSPMRRPRFSVGASTEESSIPSNRNLIVANSVVIVALAVANRVLYKLALVPMKQYPFFMAQLTTFGYVLIYFTILYTRRRLGIVTNEMMDVPKWRFAIIGFLEALGVATGMAAAAMLPGPVIPILNQTYLVWQLLFALLILGRRFLLNQIAGCLLVAVGVVVAVSSGSGADTTLSGIGFLWPAVLVASAAFQAGASIIKEFVFNDAAKRLEGKSLDIFVVNSFGSGFQALFVFLLLPFLSNLKGIPFASLPSYLKDGAGCFFNTGAKISGCDGAPILPLLYISTNLAFNISLLHLVKISSAIVSSLTMMLSVPLAVYIMSKPLPYLPGGSSLSSNFTMGCIVLVLGLLLYNIPTTPTKQHTKTS

SEQ ID NO: 104647 - DNA, 1032 bp, Arabidopsis thaliana
  misc_feature (1)..(1032): Ceres Seq. ID no. 13615473
  misc_feature (1)..(1032): Ortholog of  Ceres SEQ ID NO 15225236 as cited in SEQ ID NO 66266
tctctatattgccgatcgatctccaagtttgctaaatcgccgggaactttactgaaatttggagctagtcatgtcttcggatcctgacaaaatgatgtccaaagccgacaaaatgacaaagctcacgcttactagatggagtgctgattggagaggtgctactgagttgtatgagcaagcagcaaatgggtttagagcatcaaacaaatatgagaaagctaaagtggctctcgagaaagcttcaaaaggacaagagatgcaagcttctccttgggatgctgcaaagcatatggagtctgctgctgccttagcacagaagctaagtatttggaatgaagttgctgatttttatagaaaggcgtcggagctgtatgttgagtgtggaagggcacaacccgcatcagatgctcttggaaaggctgcccgtgctttggaagatgtcaaaccagatgacgccatccaactatacactgatgcttgtgaaattcttgaagaggatgggagggaccaaatggcctttgatctgtaccgtgcttgtgctaatgtctacattaagcttgagaagttcacagatgctgcaacctttttcttaagattgggtgtagctgctgataagtgtgatgcgacaaatagccagtgtaaggcctatctcagtgcaatcatcttatatctgtatgctcacgacctgcagcaggcagaaaaatgctacaatgactgttctcagattgatgcctttctgaagagtgatcagagccgaagtgctagtagacttctcaccgcctataatgaaggtgacattgaagaaatcaagaaggtggcgagtgcaagcactgtctcgaatttggatcatatgattatcaagttggctaggaagctacccactggagatgttactgcaattcagatgaacactaatgacgatctagacgaggatgatctcacttaaagtttctcctctttgtacatattcatatttacacttggcttcttttcagtccaaagattcaaaaaaaacatattatcgtttgtccc

SEQ ID NO: 104648 - protein, 291 aa, Arabidopsis thaliana
  peptide (1)..(291): Ceres Seq. ID no. 13615474
MSSDPDKMMSKADKMTKLTLTRWSADWRGATELYEQAANGFRASNKYEKAKVALEKASKGQEMQASPWDAAKHMESAAALAQKLSIWNEVADFYRKASELYVECGRAQPASDALGKAARALEDVKPDDAIQLYTDACEILEEDGRDQMAFDLYRACANVYIKLEKFTDAATFFLRLGVAADKCDATNSQCKAYLSAIILYLYAHDLQQAEKCYNDCSQIDAFLKSDQSRSASRLLTAYNEGDIEEIKKVASASTVSNLDHMIIKLARKLPTGDVTAIQMNTNDDLDEDDLT

SEQ ID NO: 104649 - protein, 284 aa, Arabidopsis thaliana
  peptide (1)..(284): Ceres Seq. ID no. 13615475
MMSKADKMTKLTLTRWSADWRGATELYEQAANGFRASNKYEKAKVALEKASKGQEMQASPWDAAKHMESAAALAQKLSIWNEVADFYRKASELYVECGRAQPASDALGKAARALEDVKPDDAIQLYTDACEILEEDGRDQMAFDLYRACANVYIKLEKFTDAATFFLRLGVAADKCDATNSQCKAYLSAIILYLYAHDLQQAEKCYNDCSQIDAFLKSDQSRSASRLLTAYNEGDIEEIKKVASASTVSNLDHMIIKLARKLPTGDVTAIQMNTNDDLDEDDLT

SEQ ID NO: 104650 - protein, 283 aa, Arabidopsis thaliana
  peptide (1)..(283): Ceres Seq. ID no. 13615476
MSKADKMTKLTLTRWSADWRGATELYEQAANGFRASNKYEKAKVALEKASKGQEMQASPWDAAKHMESAAALAQKLSIWNEVADFYRKASELYVECGRAQPASDALGKAARALEDVKPDDAIQLYTDACEILEEDGRDQMAFDLYRACANVYIKLEKFTDAATFFLRLGVAADKCDATNSQCKAYLSAIILYLYAHDLQQAEKCYNDCSQIDAFLKSDQSRSASRLLTAYNEGDIEEIKKVASASTVSNLDHMIIKLARKLPTGDVTAIQMNTNDDLDEDDLT

SEQ ID NO: 104651 - DNA, 1797 bp, Arabidopsis thaliana
  misc_feature (1)..(1797): Ceres Seq. ID no. 13615477
  misc_feature (1)..(1797): Ortholog of  Ceres SEQ ID NO 14313216 as cited in SEQ ID NO 66103
aatcagtttctcaacgaatctttctaaacaagacaaaggatcaagaacactacttgttctttgtctgagacttcaaacacaagaaaccaaaaatagaaaaagatatgagagagctttttatgtatctatttcttcttttcttagttctatgtgtcaaatctgtttattctactccgacaagagaacaattccaaaattgcttgtccacaaaacaattcaattctaccctcaaaaaccctataaatctcaccactcatacactagattcccgagttcacaccgacttttccgagtcttcatctccaaattctagtttcctcaacttgaatttcacaagcttgaagccgattctcatcgttaagccaaaatccgaatccgaaataaaacaatcgattttatgcagcaggaaacttggagtgcaagtaagaacaatgagtggtggtcatgactacgaaggtctatcttacctctcactatcacctttcataatcgtcgacctcgttaacctcagatcaatcagcatcaacctcacagacgagaccgcttggatccaatcgggcgcaacactcggcgaagtctactacaagatcgccaaaaccagcaagatccatgcctttgccgcagggatatgtccaagtgttggtgttggtggacatattagcggaggaggattcggtacaataatgaggaaatacggtttagcgtctgataacgttgtggacgcacgtttgatggatgtaaatgggaaaactcttgaccggaaaacgatgggagaggatttgttttgggcgcttagaggcggtggagctgcgagttttggcgttgtcttgtcgtggaaggttaagcttgctagggttcctgaaaaggtaacttgtttcataagtcaacatccgatgggacctagcatgaacaagcttgttcatagatggcaatccataggatcagagctagacgaagatttattcatcagagtcattattgacaacagtctagaagggaatcaaagaaaagtgaaatcaacatttcaaactctatttcttggtggaatcgatagactgattcctctgatgaaccagaagtttccggaactcggcttacgatctcaagactgttcggaaatgagctggatcgaatcgataatgttcttcaactggagatcaggacagccgttagagattttgctcaacagagacctaagattcgaggatcagtatttcaaagcaaagtcagattatgttcaaaaacccgttcctgaaaacgttttcgaagaagtaaccaagagatttctcgagcaagatactccactgatgatctttgagccattgggtgggaaaatcagcaagatttcagaaacagaatctccatatccacacagaagaggtaatctgtataatatacagtacatggtgaaatggaaagtgaatgaagtcgaggagatgaacaaacatgtcaggtggatgagatcgttacacgattacatgactccgtatgtttctaaatcgccgagaggagcttatttgaattacagagatcttgatttgggctcgaccaaagggattaacacgagtttcgaagatgcaaggaaatggggtgagacttatttcaaaggtaatttcaagagattaggtttggttaaagggaagattgatccaacaaatttcttcaggaacgaacagagtattcctcctctgttttgagtcctcaatacaaaaccagatataaaagatgtcatttcattttttcaattataatagataatgtaactttctgctacaattgtaaaagtgagatgtaccc

SEQ ID NO: 104652 - protein, 530 aa, Arabidopsis thaliana
  peptide (1)..(530): Ceres Seq. ID no. 13615478
MRELFMYLFLLFLVLCVKSVYSTPTREQFQNCLSTKQFNSTLKNPINLTTHTLDSRVHTDFSESSSPNSSFLNLNFTSLKPILIVKPKSESEIKQSILCSRKLGVQVRTMSGGHDYEGLSYLSLSPFIIVDLVNLRSISINLTDETAWIQSGATLGEVYYKIAKTSKIHAFAAGICPSVGVGGHISGGGFGTIMRKYGLASDNVVDARLMDVNGKTLDRKTMGEDLFWALRGGGAASFGVVLSWKVKLARVPEKVTCFISQHPMGPSMNKLVHRWQSIGSELDEDLFIRVIIDNSLEGNQRKVKSTFQTLFLGGIDRLIPLMNQKFPELGLRSQDCSEMSWIESIMFFNWRSGQPLEILLNRDLRFEDQYFKAKSDYVQKPVPENVFEEVTKRFLEQDTPLMIFEPLGGKISKISETESPYPHRRGNLYNIQYMVKWKVNEVEEMNKHVRWMRSLHDYMTPYVSKSPRGAYLNYRDLDLGSTKGINTSFEDARKWGETYFKGNFKRLGLVKGKIDPTNFFRNEQSIPPLF

SEQ ID NO: 104653 - protein, 525 aa, Arabidopsis thaliana
  peptide (1)..(525): Ceres Seq. ID no. 13615479
MYLFLLFLVLCVKSVYSTPTREQFQNCLSTKQFNSTLKNPINLTTHTLDSRVHTDFSESSSPNSSFLNLNFTSLKPILIVKPKSESEIKQSILCSRKLGVQVRTMSGGHDYEGLSYLSLSPFIIVDLVNLRSISINLTDETAWIQSGATLGEVYYKIAKTSKIHAFAAGICPSVGVGGHISGGGFGTIMRKYGLASDNVVDARLMDVNGKTLDRKTMGEDLFWALRGGGAASFGVVLSWKVKLARVPEKVTCFISQHPMGPSMNKLVHRWQSIGSELDEDLFIRVIIDNSLEGNQRKVKSTFQTLFLGGIDRLIPLMNQKFPELGLRSQDCSEMSWIESIMFFNWRSGQPLEILLNRDLRFEDQYFKAKSDYVQKPVPENVFEEVTKRFLEQDTPLMIFEPLGGKISKISETESPYPHRRGNLYNIQYMVKWKVNEVEEMNKHVRWMRSLHDYMTPYVSKSPRGAYLNYRDLDLGSTKGINTSFEDARKWGETYFKGNFKRLGLVKGKIDPTNFFRNEQSIPPLF

SEQ ID NO: 104654 - protein, 421 aa, Arabidopsis thaliana
  peptide (1)..(421): Ceres Seq. ID no. 13615480
MSGGHDYEGLSYLSLSPFIIVDLVNLRSISINLTDETAWIQSGATLGEVYYKIAKTSKIHAFAAGICPSVGVGGHISGGGFGTIMRKYGLASDNVVDARLMDVNGKTLDRKTMGEDLFWALRGGGAASFGVVLSWKVKLARVPEKVTCFISQHPMGPSMNKLVHRWQSIGSELDEDLFIRVIIDNSLEGNQRKVKSTFQTLFLGGIDRLIPLMNQKFPELGLRSQDCSEMSWIESIMFFNWRSGQPLEILLNRDLRFEDQYFKAKSDYVQKPVPENVFEEVTKRFLEQDTPLMIFEPLGGKISKISETESPYPHRRGNLYNIQYMVKWKVNEVEEMNKHVRWMRSLHDYMTPYVSKSPRGAYLNYRDLDLGSTKGINTSFEDARKWGETYFKGNFKRLGLVKGKIDPTNFFRNEQSIPPLF

SEQ ID NO: 104655 - DNA, 2349 bp, Arabidopsis thaliana
  misc_feature (1)..(2349): Ceres Seq. ID no. 13615493
  misc_feature (1)..(2349): Ortholog of  Ceres SEQ ID NO 15169346 as cited in SEQ ID NO 53994
aaaagctatagatcgatcctaggcttacctcaaacctcagtctccgttgactactgagactcgtcgacctctgatccgcttcttcgactatacggatctacttccgatcttgatgatggccggaggtaacgtacggtttctggttttgatactcgccgtagcaatttgcggtgctgcttctgttttccagccgatctcagactctcaccgatctgcggctctggatgtcttcgtaccagtcgatggatcatacaaaagcttggaggaggcatatgaagcattaaagactttggagattcttggaattgataaaaagtctgatcttagctcaaagacttgtgagaatgtggttaaagttcttcagtcgtcttcttctactcttaaggatgcattttatgcgttaaacgttaatgggattctaaaatgtaaaattggtgaagctggtcctaaggacattgtttctcaacttcaagctggtgttaaagatgcgaagctattgcttgatttctattattctgtcagaggcttggtgctggctaaggagcaatttcctggaactcatataagtcttggagatgccgaagccattttccgttccatcaagtctcttagccagagtgatggaagatggcgctacagctccaacaatcccgaatcaagcacttttgctgctggcttagcctatgaaacgcttgctggagtgatttcattagcaccttcagagtttgatccatctttgatccagtcggtgaagacgggtatcctgaagctttctgacagtatccaaaaatatgatgatgggacattttattttgatgagaagtctgttgatgcaagtcaaggcccgatctcaacaactgcatcagttattagagggctcacgtcatttgcagcttcagaatccacaggattgaaccttccaggtgataagatagttggtctggccaaattctttctgggtgttggaattcctggtgatgccaaggacttcttcaaccaaatagatgcactagcttgtttggaagacaacaagttttctgttccactcatcttgtctcttccatccactgtcatttcattgacaaagaaagagcctctgaaggttaaagttagcactgtactgggttcgaaggcaccagctcttagtgtgaagcttacacaagctctaagttctaagtcagtggattcatctgtaattaataaccaggagcttaagtttgacgctgacagtgcaacgtacttcctggactcctttcccaagaactttgacattggaaaatatacttttgtatttaagattgtgctggatgaatcagcacatgagaaagtatacataactgaagctcaaacaaaagtgcctatagctgccacaggagctattagcattgaaaatgcagaaattgctgtacttgacagtgacattggaagcgttgaatctcagaaaaagctagatttaactaaagatggagcggtatcattatcagcaaaccaccttcaaaagctacgcctgtcattccagttaactactccacttggcaatgcgtttaagccacaccaggcatttttcaagctgaaacatgagtcacaggtcgagcatatctttctcgtgaaaacttctggaaagaagtctgaattagttctagattttcttggattggttgagaagctctactacctctctggtaaatatgagatacagctaaccattggagatgcttctatggagaactctttactgagtaatattggtcacattgaactagacctaccagagcgtccagagaaggcgactcgtcctcctctacagtctactgagccttactcaagatatgggccaaaagctgaaatatcacacatattcaggattcctgaaaagcttccagcaaagcagctctcactagttttcttgggtgttatcgttctcccattcatcggtttcctgattgggcttacgcggttgggagtgaacataaagagcttcccatcgtcgactggatctgcaatatccgctttacttttccactgcggaattggagctgttttgcttctatatgtgctattctggttgaagttggatctattcacgactctcaaggcactttctttgttgggagtgtttctgttgttcgtgggacacagaacactatctcaacttgcatcagcatcaaacaagttgaaatctgcttgaagaagaagaactcactatgaaggatctttttttggtttatgcgtattttcagttttgtagtattgcttatagattatggtgatagacaaattcaaaagaagttcagagtttacatactctctcagtttagtcttaaaaagtaatcaagagtctctttcctt

SEQ ID NO: 104656 - protein, 691 aa, Arabidopsis thaliana; identical to SEQ ID NO: 30697
  peptide (1)..(691): Ceres Seq. ID no. 13615494

SEQ ID NO: 104657 - protein, 690 aa, Arabidopsis thaliana; identical to SEQ ID NO: 30698
  peptide (1)..(690): Ceres Seq. ID no. 13615495

SEQ ID NO: 104658 - DNA, 1294 bp, Arabidopsis thaliana
  misc_feature (1)..(1294): Ceres Seq. ID no. 13615496
  misc_feature (1)..(1294): Ortholog of  Ceres SEQ ID NO 13638750 as cited in SEQ ID NO 52185
atcagacatcagagggaacttggaggacacagagaagcgcaaattatcagacagagtgagaacgaagaagaagaaagcacaggatgctaagcttgagatattcattaccttatcttcttcttcaaacaagggaatcatcaactaagctcttcaccaaaaagcctaacaatgttgtggtttgtgcggcgagaggtccaagacctcggtctcctcgtgtatggaaaacaaggaagaggattggaactatctctaaagctgccaaaatgattgcttgtataaaaggattgtcgaatgttaaagaagaagtttatggagcgcttgattccttcattgcttgggaattagagttccctcttgttatagttaagaaggcattagttatacttgaagatgaaaaagaatggaagaagattattcaggtgacaaaatggatgctgagtaaaggccaaggaagaacaatgggaacttacttctcattactaaatgctttagcagaagataatcgccttgacgaagctgaggaattgtggaacaaattgttcatggaacatttagaaggaactcctagaaagttcttcaacaaaatgatctctatatattacaagagagatatgcaccaaaagctcttcgaggtctttgctgacatggaggagcttggagtgaaaccgaatgttgcgattgtgtctatggttggaaaagtgtttgtgaaactagagatgaaggataagtacgagaaactgatgaagaaatatcctccaccacagtgggagtttagatacatcaaaggaagacgtgttaaggtcaaggcaaagcagctgaatgagctaagcgaaggtgaaggtggtttaagcagcgacgaagataagattgacaatgagattgagagtgaagaagaagatggtgaggatctcagtgaagaggaagaagatgaaaaagaacttttgggtggaagtcaaggacagattacttctagagaacccagtcttgatcatttggactcttcatgagcttttgagatcgtatctaccgttgaatcatctataaggaaaatagatagacggccaaggttcttcaaagaagctttctggggctgagcttgggtttctgacgaaaacatgaccagaaaagttttgaactatctgagcttaagagtcaaaacaaggtatagatttgaagagtcaactaaaaagagtattaaactcagcaaaaagattaaatactgtaaaatcttttagtacgactgtgtaagctctgaaaacaaaaattattgtataatttcagacaataatttcag

SEQ ID NO: 104659 - protein, 307 aa, Arabidopsis thaliana; identical to SEQ ID NO: 39451
  peptide (1)..(307): Ceres Seq. ID no. 13615497

SEQ ID NO: 104660 - protein, 247 aa, Arabidopsis thaliana; identical to SEQ ID NO: 39452
  peptide (1)..(247): Ceres Seq. ID no. 13615498

SEQ ID NO: 104661 - protein, 191 aa, Arabidopsis thaliana; identical to SEQ ID NO: 39453
  peptide (1)..(191): Ceres Seq. ID no. 13615499

SEQ ID NO: 104662 - DNA, 1049 bp, Arabidopsis thaliana
  misc_feature (1)..(1049): Ceres Seq. ID no. 13615504
  misc_feature (1)..(1049): Ortholog of  Ceres SEQ ID NO 14305878 as cited in SEQ ID NO 52309
gaattctcaggagaagaagaagaagaagaagtgaacagagaaaatggcggcttactacagatggaagagtttcgaggagaacgaagatcgtccagagaagcctcgccgttacggtgttacggagatgcgaggtcctcattactccgttctcagccagaaccttcttcaggaaatttttgaatcgatgggacagtttgttgatgggttaaagttctctggaggatccaacagtttgattccaaaatcattcatcaaacaagctattgaaatggctcatgaacatggtgtttatgttagcactggtgattgggctgaacatatgcttcgtagtggtccttcagctttcaaagactatgtggaggagtgtaagcagttggggtttgacactattgagctgaatgcaaatttgcttgaagttcctgaggaaactcttctacgatatgtacgtttgattaagaacggtggtctcagagccaaaccaatgtttgctgtgaaattcaacaagtctgatattcctggtaggaatagagcatttggttcctatgttgttccagaacctcggtcaagcgagtttgtggaggacatagatctcttgatcagaaaggctgaacggtgtttagaagccggggcagacactattatgatagatgcggatgatgtctgcaaatacgcggattcccttcgagcagacataattgctaaagtcataggacgtttgggaatagagaagactatgtttgaagcatctgatgcgaagttggttgagtggttcatcaaacgttatggtccaaatgtgaatctctatgtggatcattctcagattatggatctcgagtgcctccgtggtcgtcatctgggtaaagatcaccaatctgttctcagttcctcctacttcttgttttaaagtagtagctctcgcactacatctagtgttgtgtgaatttcctatatatgtattatgtcgtatgtgtctgatgttatgtgcttctttgatgctgtaagaatgcaaatgttttgagaataatgtgatatgcgatttttcggtgatc

SEQ ID NO: 104663 - protein, 286 aa, Arabidopsis thaliana
  peptide (1)..(286): Ceres Seq. ID no. 13615505
MAAYYRWKSFEENEDRPEKPRRYGVTEMRGPHYSVLSQNLLQEIFESMGQFVDGLKFSGGSNSLIPKSFIKQAIEMAHEHGVYVSTGDWAEHMLRSGPSAFKDYVEECKQLGFDTIELNANLLEVPEETLLRYVRLIKNGGLRAKPMFAVKFNKSDIPGRNRAFGSYVVPEPRSSEFVEDIDLLIRKAERCLEAGADTIMIDADDVCKYADSLRADIIAKVIGRLGIEKTMFEASDAKLVEWFIKRYGPNVNLYVDHSQIMDLECLRGRHLGKDHQSVLSSSYFLF

SEQ ID NO: 104664 - protein, 259 aa, Arabidopsis thaliana
  peptide (1)..(259): Ceres Seq. ID no. 13615506
MRGPHYSVLSQNLLQEIFESMGQFVDGLKFSGGSNSLIPKSFIKQAIEMAHEHGVYVSTGDWAEHMLRSGPSAFKDYVEECKQLGFDTIELNANLLEVPEETLLRYVRLIKNGGLRAKPMFAVKFNKSDIPGRNRAFGSYVVPEPRSSEFVEDIDLLIRKAERCLEAGADTIMIDADDVCKYADSLRADIIAKVIGRLGIEKTMFEASDAKLVEWFIKRYGPNVNLYVDHSQIMDLECLRGRHLGKDHQSVLSSSYFLF

SEQ ID NO: 104665 - protein, 239 aa, Arabidopsis thaliana
  peptide (1)..(239): Ceres Seq. ID no. 13615507
MGQFVDGLKFSGGSNSLIPKSFIKQAIEMAHEHGVYVSTGDWAEHMLRSGPSAFKDYVEECKQLGFDTIELNANLLEVPEETLLRYVRLIKNGGLRAKPMFAVKFNKSDIPGRNRAFGSYVVPEPRSSEFVEDIDLLIRKAERCLEAGADTIMIDADDVCKYADSLRADIIAKVIGRLGIEKTMFEASDAKLVEWFIKRYGPNVNLYVDHSQIMDLECLRGRHLGKDHQSVLSSSYFLF

SEQ ID NO: 104666 - DNA, 1150 bp, Arabidopsis thaliana
  misc_feature (1)..(1150): Ceres Seq. ID no. 13615511
  misc_feature (1)..(1150): Ortholog of  Ceres SEQ ID NO 13661504 as cited in SEQ ID NO 61294
  misc_feature (1)..(1150): Ortholog of  Ceres SEQ ID NO 12615311 as cited in SEQ ID NO 62517
  misc_feature (1)..(1150): Ortholog of  Ceres SEQ ID NO 12617197 as cited in SEQ ID NO 63406
  misc_feature (1)..(1150): Ortholog of  Ceres SEQ ID NO 13598597 as cited in SEQ ID NO 65496
  misc_feature (1)..(1150): Ortholog of  Ceres SEQ ID NO 13596227 as cited in SEQ ID NO 68750
  misc_feature (1)..(1150): Ortholog of  Ceres SEQ ID NO 15179068 as cited in SEQ ID NO 0
aagacccaactaaatatcttcttttctctccatacactttttccagatatttctaatcaacaaaactgatgaatcaagaaaagaccatttcttgttgttgtgttcttgatgcttccacttatgttggtttctggattctcaagagattgctcactagaggttactctgttcacgcagctatccgtaaaaacggggagagtgtgcttgaagagaaaatcagagacatggaagctaacgaagagagattagaggtttatgatgtggatgtgttagattaccaaagtatcctcatttctctcaacaattgtaatgctgtcttctgttgtttggataatcctgaagggtacgatgaggagaaggaagtggatttggaggtgagaggagctattaatgtggtggaagcatgtgcaagaacagagagtatagagaagattgtgttctcatcttcgttaactgctgcaatttggagagataacattggaactcagaaagatgttgatgagaagtgttggagtgatcttgacttctgtctcaaaaaaaagttgtggcatgctcttgcgaagacacagtccgagaaggcagcttgggcattagccatggatcgtatggtcaacatggtttcggttaacccgggcctcatcgttggaccatcagtggctcaacacaacccaagaccgaccatgtcttacctcaaaggagctgcacaaatgtatgagaacggtgtgttagcgtacgtagatgttgaatttgtagcggatgttcacattcgagcattcgaggatacttcggcttgtggtagatacttttgcttcaaccaaattgtgaacacggaagaagaagctctcaagcttgtacaaactctatctcctttaatacctatgccaccaaggcatgagaaagaaatgcaaggaagtgaagtttatgaagagagattgagaaacaagaaactaaacaagctggtggaagctggatttgcttgttaattacatgaagagagatgttataaattaaagggcaagaaaataacaaagaaattttatagtaagagttgtttgtttacttatttttttaattattgtactctcaattcagtattttatatatctatattttattttattttgaaatgaaaggaaaatatgtgttactc

SEQ ID NO: 104667 - protein, 304 aa, Arabidopsis thaliana
  peptide (1)..(304): Ceres Seq. ID no. 13615512
MNQEKTISCCCVLDASTYVGFWILKRLLTRGYSVHAAIRKNGESVLEEKIRDMEANEERLEVYDVDVLDYQSILISLNNCNAVFCCLDNPEGYDEEKEVDLEVRGAINVVEACARTESIEKIVFSSSLTAAIWRDNIGTQKDVDEKCWSDLDFCLKKKLWHALAKTQSEKAAWALAMDRMVNMVSVNPGLIVGPSVAQHNPRPTMSYLKGAAQMYENGVLAYVDVEFVADVHIRAFEDTSACGRYFCFNQIVNTEEEALKLVQTLSPLIPMPPRHEKEMQGSEVYEERLRNKKLNKLVEAGFAC

SEQ ID NO: 104668 - protein, 252 aa, Arabidopsis thaliana
  peptide (1)..(252): Ceres Seq. ID no. 13615513
MEANEERLEVYDVDVLDYQSILISLNNCNAVFCCLDNPEGYDEEKEVDLEVRGAINVVEACARTESIEKIVFSSSLTAAIWRDNIGTQKDVDEKCWSDLDFCLKKKLWHALAKTQSEKAAWALAMDRMVNMVSVNPGLIVGPSVAQHNPRPTMSYLKGAAQMYENGVLAYVDVEFVADVHIRAFEDTSACGRYFCFNQIVNTEEEALKLVQTLSPLIPMPPRHEKEMQGSEVYEERLRNKKLNKLVEAGFAC

SEQ ID NO: 104669 - DNA, 2385 bp, Arabidopsis thaliana
  misc_feature (1)..(2385): Ceres Seq. ID no. 13615522
  misc_feature (1)..(2385): Ortholog of  Ceres SEQ ID NO 13584744 as cited in SEQ ID NO 69137
acaacactacctacactctctcttgctttctctcctctctgttttttctagctttctctctcacaaaatcaaaactttttttctgtgttcattatcatctccttaaattcataacaatacactctcataattcttctctgcgtaggagagacattgcagaaataaaagagtttttaatagacccaagaaaaagagaaaaaaagcattcatttttttcttgctttgttgctttgcttttgcttttctgtttctcttcttttgtgggcacaacaaaacatcaacaaagtaatgattttgtgttcttccttctccttctggtaatctaatctaaagcttttcatggtggtgatgaagttaataacaatgaagatattctctgttctgttactactatgtttcttcgttacttgttctctctcttctgaacccagaaaccctgaagtggaggcgttgataaacataaagaacgagttacatgatccacatggtgttttcaaaaactgggatgagttttctgttgatccttgtagctggactatgatctcttgttcttcagacaacctcgtaattggcttaggagctccaagtcagtctctttcaggaactttatctgggtctattggaaatctcactaatcttcgacaagtgtcattacagaacaataacatctccggtaaaatcccaccggagatttgttctcttcccaaattacagactctggatttatccaataaccggttctccggtgaaatccccggttctgttaaccagctgagtaatctccaatatctgaggttgaacaacaactcattatctgggccctttcctgcttctctgtctcaaatccctcacctctctttcttagacttgtcttataacaatctcagaggtcctgttcctaaatttcctgcaaggacattcaatgttgctgggaaccctttgatttgtaaaaacagcctaccggagatttgttcaggatcaatcagtgcaagccctctttctgtctctttacgttcttcatcaggacgtagaaccaacatattagcagttgcacttggtgtaagccttggctttgctgttagtgtaatcctctctctcgggttcatttggtatcgaaagaaacaaagacggttaacgatgcttcgcattagtgacaagcaagaggaagggttacttgggttgggaaatctaagaagcttcacattcagggaacttcatgtagctacggatggttttagttccaagagtattcttggtgctggtgggtttggtaatgtctacagaggaaaattcggggatgggacagtggttgcagtgaaacgattgaaagatgtgaatggaacctccgggaactcacagtttcgtactgagcttgagatgatcagcttagctgttcataggaatttgcttcggttaatcggttattgtgcgagttctagcgaaagacttcttgtttacccttacatgtccaatggcagcgtcgcctctaggctcaaagctaagccagcgttggactggaacacaaggaagaagatagcgattggagctgcaagagggttgttttatctacacgagcaatgcgatcccaagattattcaccgagatgtcaaggcagcaaacattctcctagatgagtattttgaagcagttgttggggattttggactagcaaagctactcaaccacgaggattcacatgtcacaaccgcggttagaggaactgttggtcacattgcacctgagtatctctccaccggtcagtcatctgagaaaaccgatgtctttgggttcggtatacttttgctagagctcatcacaggaatgagagctctcgagtttggcaagtctgttagccagaaaggagctatgctagaatgggtgaggaagctacacaaggaaatgaaagtagaggagctagtagaccgagaactggggacaacctacgatagaatagaagttggagagatgctacaagtggcactgctctgcactcagtttcttccagctcacagacccaaaatgtctgaagtagttcagatgcttgaaggagatggattagctgagagatgggctgcttcacatgaccattcacatttctaccatgccaacatgtcttacaggactattacctctactgatggcaacaaccaaaccaaacatctgtttggctcctcaggatttgaagatgaagatgataatcaagcgttagattcattcgccatggaactatctggtccaaggtagtaaatcttggacacagaaagaaacagatataatatccccatgacttcaatttttgtttttgagatgatatagacatgtaaatggttatcaaacctttgaaaaaattgagattctgggtctaatggttaatattttggatgt

SEQ ID NO: 104670 - protein, 634 aa, Arabidopsis thaliana; identical to SEQ ID NO: 20999
  peptide (1)..(634): Ceres Seq. ID no. 13615523

SEQ ID NO: 104671 - protein, 631 aa, Arabidopsis thaliana; identical to SEQ ID NO: 21000
  peptide (1)..(631): Ceres Seq. ID no. 13615524

SEQ ID NO: 104672 - protein, 626 aa, Arabidopsis thaliana; identical to SEQ ID NO: 21001
  peptide (1)..(626): Ceres Seq. ID no. 13615525

SEQ ID NO: 104673 - DNA, 1167 bp, Arabidopsis thaliana
  misc_feature (1)..(1167): Ceres Seq. ID no. 13615530
  misc_feature (1)..(1167): Ortholog of  Ceres SEQ ID NO 14316539 as cited in SEQ ID NO 57567
ttattcttctggataagagcttcgtgatggtttgaaacctctgagtgaagaagaagcgccatggctgggattaccagcagcaccgttggattcaacgccgtcttcaccggaataaccaaaacagtatcatcacattcactcttctctgttgattccaaactctgtagtcttcgtctctccaaaaccgaactgtctttcactaatctcactccttctcctcgccgtgctttcgccgtcacttgccgcttcggcggtggtggtggaggttatcgattctctggagacaatagaagaggtaggccgaaagaagctgaaattgatgaagctcttgatatctcctcaattaggtcagctactgttaggcttatcgatgggcaacaaaacatgcttggtttagtgtctaaagacgaagccgttcgaatggctgatgatgctgaacttgatctggttatactatcgcctgatgcagatcctccggttgttaaaatgatggactacagtaaatacagatacgaacagcaaaagaggaaaaaagatcagcaaaagaaaacaactcgcatggatttaaaggagcttaaaatgggttataatattgatcagcatgattattccgttcgtctaagggctgcccaaaagttcttgcaagatggtgacaaggttaaggtgattgtgagcatgaaaggacgagaaaacgagttcagaaatatcgctattgaactcctcagacgtttccaaaccgaaataggggagcttgcaactgaagagagcaaaaacttcagggacagaaatatgttcattatcttggtcccaaacaaagaaatgattcggaaaccacaagaaccacccacaagaaagaagaaaaaaacagcggaaaacgaagcttcagcttcagctgcagaaataacagctgagcctgagcctgagcctgagcctgagcctgaacctgagcctgagcctgagcctgagcctgagccagagcctctacagatcgattcttgagtttaaaatcttgtggtaggattttcagagctaaagtaaagttttgtatatttacttttctaccatgtctcaagagagccaagagctgtataacaaatagagttagtcctatttgaatgatgttcttcgtttgtagatcttttctctaatctatttttttgtttaact

SEQ ID NO: 104674 - protein, 312 aa, Arabidopsis thaliana; identical to SEQ ID NO: 37566
  peptide (1)..(312): Ceres Seq. ID no. 13615531

SEQ ID NO: 104675 - protein, 204 aa, Arabidopsis thaliana; identical to SEQ ID NO: 37567
  peptide (1)..(204): Ceres Seq. ID no. 13615532

SEQ ID NO: 104676 - protein, 192 aa, Arabidopsis thaliana; identical to SEQ ID NO: 37568
  peptide (1)..(192): Ceres Seq. ID no. 13615533

SEQ ID NO: 104677 - DNA, 1040 bp, Arabidopsis thaliana
  misc_feature (1)..(1040): Ceres Seq. ID no. 13615538
  misc_feature (1)..(1040): Ortholog of  Ceres SEQ ID NO 15170627 as cited in SEQ ID NO 52703
  misc_feature (1)..(1040): Ortholog of  Ceres SEQ ID NO 13655124 as cited in SEQ ID NO 62896
  misc_feature (1)..(1040): Ortholog of  Ceres SEQ ID NO 13597493 as cited in SEQ ID NO 64613
  misc_feature (1)..(1040): Ortholog of  Ceres SEQ ID NO 14313540 as cited in SEQ ID NO 68110
  misc_feature (1)..(1040): Ortholog of  Ceres SEQ ID NO 13596175 as cited in SEQ ID NO 68297
attcttgtctgaactaaaacctagaaaaaaatggctgaggaatcaccaagttctggcctttgtagatatgctatagttactggagggaatagaggaattggatttgagatatgcagacaattagcaaacaaagggattagggttattttgacatctagagatgagaaacaagggcttgaagctgttgagacattgaagaaagagcttgagatttctgatcaaagcattgtctttcatcagcttgatgtctctgatcctgttagtgtcacttctcttgctgagtttgtgaaaacccatttcggaaaactcgatatcttgatcaataatgctggggttggtggtgtaatcactgatgttgatgctttaagagctgggacagggaaagaaggtttcaagtgggaggaaactatcactgagacttatgagctagctgaggaatgcataaagattaactattatggaccaaagagaatgtgtgaggcgtttattccacttttgcagttatctgattctccaagaatcattaacgtatcatccttcatgggtcaagtaaagaatttagtaaacgaatgggcaaaagggatcctgagtgacgcagagaatctaacggaggtaagaattgaccaagtgatcaaccaacttctcaatgatctgaaagaagatacggctaagacaaaatattgggctaaagtcatgtcggcttacgttgtttcgaaagccggtttgaatgcttacacgaggatcttagcgaagaaacatcccgagattcgcgttaactcggtttgtcctggatttgttaagactgatatgaattttaaaactggaattttatctgtggaagaaggagcatcaagtcctgtgaggttagctttgcttccacatcaagaatctccttctggttgcttctttgatcgcaaacaagtttcagagttctgaaatctttgtgtggagatagataagccaaagttttattcatgtaatgagaattattgtttgaaagctaaacagaaagtatcgactattcaataaacagaaacatt

SEQ ID NO: 104678 - protein, 301 aa, Arabidopsis thaliana
  peptide (1)..(301): Ceres Seq. ID no. 13615539
MAEESPSSGLCRYAIVTGGNRGIGFEICRQLANKGIRVILTSRDEKQGLEAVETLKKELEISDQSIVFHQLDVSDPVSVTSLAEFVKTHFGKLDILINNAGVGGVITDVDALRAGTGKEGFKWEETITETYELAEECIKINYYGPKRMCEAFIPLLQLSDSPRIINVSSFMGQVKNLVNEWAKGILSDAENLTEVRIDQVINQLLNDLKEDTAKTKYWAKVMSAYVVSKAGLNAYTRILAKKHPEIRVNSVCPGFVKTDMNFKTGILSVEEGASSPVRLALLPHQESPSGCFFDRKQVSEF

SEQ ID NO: 104679 - protein, 154 aa, Arabidopsis thaliana; identical to SEQ ID NO: 41728
  peptide (1)..(154): Ceres Seq. ID no. 13615540

SEQ ID NO: 104680 - DNA, 1040 bp, Arabidopsis thaliana
  misc_feature (1)..(1040): Ceres Seq. ID no. 13615553
  misc_feature (1)..(1040): Ortholog of  Ceres SEQ ID NO 15171366 as cited in SEQ ID NO 51578
  misc_feature (1)..(1040): Ortholog of  Ceres SEQ ID NO 15175723 as cited in SEQ ID NO 57875
  misc_feature (1)..(1040): Ortholog of  Ceres SEQ ID NO 14314909 as cited in SEQ ID NO 58002
  misc_feature (1)..(1040): Ortholog of  Ceres SEQ ID NO 15179772 as cited in SEQ ID NO 64248
tttcgctctctcattcatcaaaaaaaacttgcacatcttctcagatcttcaagtttctcctctggtttctcatcatgaccgttgatattatgcgtttacctaagatggaagatcaaacggctatacaagaagctgcatcacaaggcttaaaaagcatggaacacttgattcgtgtcctctctaaccgtcccgaagaacgtaacgttgattgctctgagatcactgatttcacagtttctaagttcaagaaagttatctctcttcttaaccgttccggtcacgcccggtttagacgtggtccggttcattcccctccttcctcctccgttcctccaccggtgaaagtgacaactccggctcccactcagatctctgctccagcaccggttagcttcgttcaggcaaatcaacaaagcgtgacgttagatttcactagaccgagcgtttttggcgctaaaaccaagagctcggaggttgttgagtttgctaaagagagctttagcgtatcttctaactcttctttcatgtcttctgcgatcaccggtgatggaagtgtctctaaaggctcttcgatctttcttgctccggctccagcggtgccagtgacttcctccgggaaaccgccgctttctggtcttccttacaggaagagatgctttgaacatgaccactctgaaggcttttccggcaagatctctggctccggcaacggcaagtgccattgcaagaaaagccgaaaaaatcggatgaagagaaccgtgagagtaccggcggtaagtgcaaagatcgccgatataccaccagacgaatattcatggagaaagtatggacaaaaaccgatcaaaggctcaccacatccacggggttattacaagtgtagtacatttagaggatgtccagcgaggaaacacgtggaaagagctttggatgattcaacgatgttgattgtgacgtacgaaggagagcaccgtcatcaccagtccacgatgcaggagcatgtaactcctagcgtgagtggtttggtgtttggttcggcttga

SEQ ID NO: 104681 - protein, 345 aa, Arabidopsis thaliana
  peptide (1)..(345): Ceres Seq. ID no. 13615554
SLSHSSKKTCTSSQIFKFLLWFLIMTVDIMRLPKMEDQTAIQEAASQGLKSMEHLIRVLSNRPEERNVDCSEITDFTVSKFKKVISLLNRSGHARFRRGPVHSPPSSSVPPPVKVTTPAPTQISAPAPVSFVQANQQSVTLDFTRPSVFGAKTKSSEVVEFAKESFSVSSNSSFMSSAITGDGSVSKGSSIFLAPAPAVPVTSSGKPPLSGLPYRKRCFEHDHSEGFSGKISGSGNGKCHCKKSRKNRMKRTVRVPAVSAKIADIPPDEYSWRKYGQKPIKGSPHPRGYYKCSTFRGCPARKHVERALDDSTMLIVTYEGEHRHHQSTMQEHVTPSVSGLVFGSA

SEQ ID NO: 104682 - protein, 321 aa, Arabidopsis thaliana; identical to SEQ ID NO: 40359
  peptide (1)..(321): Ceres Seq. ID no. 13615555

SEQ ID NO: 104683 - protein, 316 aa, Arabidopsis thaliana; identical to SEQ ID NO: 40360
  peptide (1)..(316): Ceres Seq. ID no. 13615556

SEQ ID NO: 104684 - DNA, 1000 bp, Arabidopsis thaliana
  misc_feature (1)..(1000): Ceres Seq. ID no. 13615561
  misc_feature (1)..(1000): Ortholog of  Ceres SEQ ID NO 14305743 as cited in SEQ ID NO 52462
  misc_feature (1)..(1000): Ortholog of  Ceres SEQ ID NO 13623029 as cited in SEQ ID NO 0
atgccgttgtcatggacatttaaagttgacccacaaaaaataactttcatcttcaatttcgaatcgataaccctaatttctcacagacgagcaagagaaagagccaaagccgtttcttcaggtaacttgaggatgtcgcgtgtgtatgttggtaatttggatccgcgagttactgaacgtgaactcgaggatgagtttcgttcctttggtgtgatcaggagtgtctgggttgctagaagacctcctggttacgcttttcttgattttgaagattcaagagatgcccgtgacgccatccgtgaagtagatggcaagaatggatggagggtagagcagtctcataaccgtggtggtggtggaggtcgtggtggtggtcgtggaggaggtgatggtggtcgtggacgtggtggttctgatttgaagtgctatgagtgtggtgagtctggtcactttgcacgtgaatgtcgttctcgtggtggttctggtggtaggcgtcgtagccgcagccgtagtcgcagtcctcctagatacagaaagagtcctacctatggaggacgaagaagttacagccctcgtgctagatctcctcctcctccaagacgtcgtagtccttctcctcgtggtcgcaactacagtaggtcaccaccaccttatagagcacgtgacgaggtgccatatgctaatggaaatggtctgaaagatgtgcgcagaagccggagctgagtgttacttgtctagatagcaaattatgggatcaggagacaactatttgcttgtgacgtcaagaggagaggaaattagtatctgtgaatttcactaagagaatatgttttagctgtgtggtggattggatatgcttgctacttttgaattgctggaaagcttcttattgcgtttggattatgaagccatagttgtatctgccgttaggtaaagtacttttaaatatctacccatgttcttaaaagacataaacaaaagctctgctaaaaacctatgc

SEQ ID NO: 104685 - protein, 240 aa, Arabidopsis thaliana
  peptide (1)..(240): Ceres Seq. ID no. 13615562
MPLSWTFKVDPQKITFIFNFESITLISHRRARERAKAVSSGNLRMSRVYVGNLDPRVTERELEDEFRSFGVIRSVWVARRPPGYAFLDFEDSRDARDAIREVDGKNGWRVEQSHNRGGGGGRGGGRGGGDGGRGRGGSDLKCYECGESGHFARECRSRGGSGGRRRSRSRSRSPPRYRKSPTYGGRRSYSPRARSPPPPRRRSPSPRGRNYSRSPPPYRARDEVPYANGNGLKDVRRSRS

SEQ ID NO: 104686 - protein, 196 aa, Arabidopsis thaliana; identical to SEQ ID NO: 26467
  peptide (1)..(196): Ceres Seq. ID no. 13615563

SEQ ID NO: 104687 - DNA, 1765 bp, Arabidopsis thaliana
  misc_feature (1)..(1765): Ceres Seq. ID no. 13615575
  misc_feature (1)..(1765): Ortholog of  Ceres SEQ ID NO 13582285 as cited in SEQ ID NO 59817
ctaacattggattcgagctctctagtgaagaatccgccatggctgttccatttctaagctcttctctacaactcacacccacttctccgattctcttcactaaagtaacaccaacaccaataatccacaaccacagatcaacatgcactatacccacaaagcctcgtctacgtctcctccgccgctccgccgtcgctggaaccgccgtatctgatcaaacagaaggaggtggagatgttcttttaaaccctgaagaagagaaacgtgttgaggtggcggattatgattggacagaggaatggtatccattgtacttaactaaaaacgtccctgaagatgcgcctcttggcctcaccgtctacgatcgtcaaattgttttgtataaagacggtgaaggaacacttcgttgttacgaagatcggtgtcctcatcggttggctaagttgtctgaaggacaattgattgatgggagattggaatgtttgtatcatggttggcaatttgaaggagagggcaaatgtgtcaagattcctcagcttcctgcaagtgctaagattccaaaggctgcttgtgtgaagacgtatgaggtgaaggattcacaaggagttgtgtgggtgtggatgtcaacaaagacacctccaaaccctgagaagcttccttggtttgagaatttcgctagacccggttttttcgacatttcgactactcatgagcttccttatgaccattccattcttttagagaatctgatggatcctgctcatgttcctatctctcatgatagaacggatttcactgctaaaagagaagatgctcagcctttggttttcgaggtcacagagcgaagtaatcggggtttcgcagggacttggggccgagagaaagaaggtgggaaagggagtaatttacttcggtttgatgctccttgtgttctgcagaacaatcgagagttcgaggggaaggatggagtgaagaactatttttcagggctgtttctttgtagacctacagggcaagggaagtctatgcttattgttaggtttggggtcacaaaaagatcgcctttggtttcggtgttacctcaatggttctggcatcagaatgcctgcaaggtttttgaacaagacatggggtttctatcgtctcaaaatgaggttctgatgaaggagaaagtaccaactaaggacttgtatttgaatctaaagtcatcggacacatgggtcgctgaatatagaaagtggatggacaaagttggtcatgggatgccttaccatttcgggcataggaccatatctctccccaaagtccctcctgtcgtggaacatgccccggcagggctcattgcagctctctctgcttcttaccctgcaaaaggcggaattgggactatgcatgctcccaatttggctaaccggtacttcagacatattattcattgtagaagctgcagcaatgtgatcaaatcttttgagctctggaaaaatatcctctctgccacggcagtggctttgacggctttggccattctggtggttagtagacagtggaaggctgtcctgttaggttcagcagcattgtgctcagccgcagcttatacctgcttaagagctataaatctaaacaccaataacttcattagaacacacagaagactatgaaaatgtatagtgtcatgtttcctcttcttccaacaatatgtatttcatgaaataaatttttgcttgtaaacgcaattatataattcagaaggttccaatgtttgcca

SEQ ID NO: 104688 - protein, 551 aa, Arabidopsis thaliana
  peptide (1)..(551): Ceres Seq. ID no. 13615576
NIGFELSSEESAMAVPFLSSSLQLTPTSPILFTKVTPTPIIHNHRSTCTIPTKPRLRLLRRSAVAGTAVSDQTEGGGDVLLNPEEEKRVEVADYDWTEEWYPLYLTKNVPEDAPLGLTVYDRQIVLYKDGEGTLRCYEDRCPHRLAKLSEGQLIDGRLECLYHGWQFEGEGKCVKIPQLPASAKIPKAACVKTYEVKDSQGVVWVWMSTKTPPNPEKLPWFENFARPGFFDISTTHELPYDHSILLENLMDPAHVPISHDRTDFTAKREDAQPLVFEVTERSNRGFAGTWGREKEGGKGSNLLRFDAPCVLQNNREFEGKDGVKNYFSGLFLCRPTGQGKSMLIVRFGVTKRSPLVSVLPQWFWHQNACKVFEQDMGFLSSQNEVLMKEKVPTKDLYLNLKSSDTWVAEYRKWMDKVGHGMPYHFGHRTISLPKVPPVVEHAPAGLIAALSASYPAKGGIGTMHAPNLANRYFRHIIHCRSCSNVIKSFELWKNILSATAVALTALAILVVSRQWKAVLLGSAALCSAAAYTCLRAINLNTNNFIRTHRRL

SEQ ID NO: 104689 - protein, 539 aa, Arabidopsis thaliana
  peptide (1)..(539): Ceres Seq. ID no. 13615577
MAVPFLSSSLQLTPTSPILFTKVTPTPIIHNHRSTCTIPTKPRLRLLRRSAVAGTAVSDQTEGGGDVLLNPEEEKRVEVADYDWTEEWYPLYLTKNVPEDAPLGLTVYDRQIVLYKDGEGTLRCYEDRCPHRLAKLSEGQLIDGRLECLYHGWQFEGEGKCVKIPQLPASAKIPKAACVKTYEVKDSQGVVWVWMSTKTPPNPEKLPWFENFARPGFFDISTTHELPYDHSILLENLMDPAHVPISHDRTDFTAKREDAQPLVFEVTERSNRGFAGTWGREKEGGKGSNLLRFDAPCVLQNNREFEGKDGVKNYFSGLFLCRPTGQGKSMLIVRFGVTKRSPLVSVLPQWFWHQNACKVFEQDMGFLSSQNEVLMKEKVPTKDLYLNLKSSDTWVAEYRKWMDKVGHGMPYHFGHRTISLPKVPPVVEHAPAGLIAALSASYPAKGGIGTMHAPNLANRYFRHIIHCRSCSNVIKSFELWKNILSATAVALTALAILVVSRQWKAVLLGSAALCSAAAYTCLRAINLNTNNFIRTHRRL

SEQ ID NO: 104690 - protein, 345 aa, Arabidopsis thaliana
  peptide (1)..(345): Ceres Seq. ID no. 13615578
MSTKTPPNPEKLPWFENFARPGFFDISTTHELPYDHSILLENLMDPAHVPISHDRTDFTAKREDAQPLVFEVTERSNRGFAGTWGREKEGGKGSNLLRFDAPCVLQNNREFEGKDGVKNYFSGLFLCRPTGQGKSMLIVRFGVTKRSPLVSVLPQWFWHQNACKVFEQDMGFLSSQNEVLMKEKVPTKDLYLNLKSSDTWVAEYRKWMDKVGHGMPYHFGHRTISLPKVPPVVEHAPAGLIAALSASYPAKGGIGTMHAPNLANRYFRHIIHCRSCSNVIKSFELWKNILSATAVALTALAILVVSRQWKAVLLGSAALCSAAAYTCLRAINLNTNNFIRTHRRL

SEQ ID NO: 104691 - DNA, 1189 bp, Arabidopsis thaliana
  misc_feature (1)..(1189): Ceres Seq. ID no. 13615583
  misc_feature (1)..(1189): Ortholog of  Ceres SEQ ID NO 14306479 as cited in SEQ ID NO 53033
atgaatttggtcttcgctataatctcacgttacattaaattggctcctgtgaacctaaatttatggactatgatcccaacaccaatccgttcgaccttcatttctccggtaaacttccgaaaagagaagtctcggcttcagcttctaaagttgtagagaagaaatggttagtgaaagatgagaagagaaatatgctacaagatgaaataaaccgggttaattcggagaacaagaagctaaccgaaatgttagcaagagtctgtgagaagtactatgctcttaataatcttatggaggagttgcagagtcgaaagagtcctgaaagtgttaactttcagaacaaacagctaacggggaaacgaaaacaagaacttgatgagtttgttagctccccaattggactcagtctcggaccaatcgagaacatcaccaacgataaagcgacggtttcaaccgcttactttgctgctgagaagtctgacacaagcttgactgtgaaagatggatatcaatggaggaaatacgggcaaaagattacgagagataatccatctcctagagcttacttcagatgctcgttttcaccgtcttgtctagtcaagaagaaggtgcaacgaagtgcagaagatccatctttcttggtagccacttacgaagggacacataaccacaccggaccacatgcaagtgtgtccaggacagtgaaacttgatctagttcaaggtgggcttgaaccagttgaggaaaagaaagagagagggacgattcaagaggttttggtgcaacaaatggcttcttcgttgaccaaagatcctaagttcactgcagctcttgcgactgctatttccgggagattgatagagcattcaagaacatgaaagttctctagaacatgtatatttctgttttgttctattttgttgctcattcctagtaaaaaggtaaagatttgtttgatcttgattaggaggcatagatgtcaattttaatgtgtgtgtatataattacatcaaatctaagtatccaaaaagggtcacccccattttatcttatgttgaaagagttttgttatagctcggtgtaagtatggtagattgacgctgcttcgacagtttatgtatcttccaatgttatcttgttcagttgtttgtattaacttccattagagaagaatgtgatgccattacag

SEQ ID NO: 104692 - protein, 271 aa, Arabidopsis thaliana
  peptide (1)..(271): Ceres Seq. ID no. 13615584
MDYDPNTNPFDLHFSGKLPKREVSASASKVVEKKWLVKDEKRNMLQDEINRVNSENKKLTEMLARVCEKYYALNNLMEELQSRKSPESVNFQNKQLTGKRKQELDEFVSSPIGLSLGPIENITNDKATVSTAYFAAEKSDTSLTVKDGYQWRKYGQKITRDNPSPRAYFRCSFSPSCLVKKKVQRSAEDPSFLVATYEGTHNHTGPHASVSRTVKLDLVQGGLEPVEEKKERGTIQEVLVQQMASSLTKDPKFTAALATAISGRLIEHSRT

SEQ ID NO: 104693 - protein, 228 aa, Arabidopsis thaliana
  peptide (1)..(228): Ceres Seq. ID no. 13615585
MLQDEINRVNSENKKLTEMLARVCEKYYALNNLMEELQSRKSPESVNFQNKQLTGKRKQELDEFVSSPIGLSLGPIENITNDKATVSTAYFAAEKSDTSLTVKDGYQWRKYGQKITRDNPSPRAYFRCSFSPSCLVKKKVQRSAEDPSFLVATYEGTHNHTGPHASVSRTVKLDLVQGGLEPVEEKKERGTIQEVLVQQMASSLTKDPKFTAALATAISGRLIEHSRT

SEQ ID NO: 104694 - protein, 210 aa, Arabidopsis thaliana
  peptide (1)..(210): Ceres Seq. ID no. 13615586
MLARVCEKYYALNNLMEELQSRKSPESVNFQNKQLTGKRKQELDEFVSSPIGLSLGPIENITNDKATVSTAYFAAEKSDTSLTVKDGYQWRKYGQKITRDNPSPRAYFRCSFSPSCLVKKKVQRSAEDPSFLVATYEGTHNHTGPHASVSRTVKLDLVQGGLEPVEEKKERGTIQEVLVQQMASSLTKDPKFTAALATAISGRLIEHSRT

SEQ ID NO: 104695 - DNA, 1127 bp, Arabidopsis thaliana
  misc_feature (1)..(1127): Ceres Seq. ID no. 13615595
  misc_feature (1)..(1127): Ortholog of  Ceres SEQ ID NO 15177607 as cited in SEQ ID NO 59136
  misc_feature (1)..(1127): Ortholog of  Ceres SEQ ID NO 15179183 as cited in SEQ ID NO 0
aaaagcacgaggaaggatcaaatcggaaacttaacagaatttagctaccaattactgtctccggcgagatctcaatttgatccttcacggtggcgtcgacgtccgggcaacaacaagctctctcgagaagaaagccattatcatcatcatcatcatcttcatcatctcctcctccgtcttcctcacctgttcgagctcctgcggcgaagaaaccgagtccggaatacccattttggcagcagaactggtttatcggtctgctattcgtgatggctttaggattcttctgtctcgctatcttcctttacctaagtctcgatcctgattccggttacacgtctgcctccgccgctgcttctggtaaagaaggtgtcgagattacttatggaagtgcgatcaagttgatgcacgagaaaactaaatttcgattacattctcacgatgtgccgtatggatccggcagtggtcagcaatcagtcactggttttccaggcgtcgttgattccaacagctattggattgttaaacctgtgcctgggacaacagaaaagcaaggtgatgctgtcaagagtggagcaaccattaggttgcagcatatgaagaccagaaaatggcttcacagtcacttgcatgcatctcctatatcagggaacttagaggttagctgctttggagatgatacaaattccgatactggggatcactggaagcttataattgaaggaagtgggaagacatggaaacaggaccaaagagtccgtcttcaacacatagacactagtggctacctccatagccatgacaagaagtaccaacgtatagctggtggtcagcaagaggtgtgtggaattcgggagaagaaggcggataacatttggttggcagcagaaggagtctaccttccccttaatgagagcagcaagtaaggttaagagtgaaaaaacttctctggaggactttgaatcttatctcttactctctaaactcacaatcaagaaaatagagatatatatttcttaattttcgattggtaatacttttagtggcacgaatatatcttgttttggtagatattctgcatttatctcttttttaggtcacccttaagagacactatcttattatcc

SEQ ID NO: 104696 - protein, 218 aa, Arabidopsis thaliana; identical to SEQ ID NO: 25607
  peptide (1)..(218): Ceres Seq. ID no. 13615596

SEQ ID NO: 104697 - protein, 173 aa, Arabidopsis thaliana; identical to SEQ ID NO: 25608
  peptide (1)..(173): Ceres Seq. ID no. 13615597

SEQ ID NO: 104698 - protein, 109 aa, Arabidopsis thaliana; identical to SEQ ID NO: 25609
  peptide (1)..(109): Ceres Seq. ID no. 13615598

SEQ ID NO: 104699 - DNA, 1632 bp, Arabidopsis thaliana
  misc_feature (1)..(1632): Ceres Seq. ID no. 13615615
  misc_feature (1)..(1632): Ortholog of  Ceres SEQ ID NO 14311942 as cited in SEQ ID NO 51516
gttaaaagctctcacacaaccaccgttctccgtcacggtggcgctttattctctcatcggagcgcctcaccggtggcagacggtgtcgttgttcctctcctaaaacctccatcaatcaccatctctttacacagagctctaaccaaaatcttcgagagatggggcagagtatgagctgtggaagtcgaccggagcacggaatattcgcctctgtacagtgcggcgatatcatcactatccgtcgtgtgatggcgacggagcctagtctgttgaatcaaactactccttatgatcgtcactctgttcttcatgtcgctgctgctaatggtcagatcgagattttgtcattgcttttggaacgatttacgaatccagatttgttgaatcgtcacaagcagactccgttaatgttggctgcgatgtatggaagaatctcttgtgtgaagaagctagctgaagttggagctaatattttgatgtttgattctgtgaatcgaagaacatgtttgcattacgctgcttattatggacatgctaattgtgttcaagctattctctctgctgctcaatcaagtcctgttgctgtccattggggatatgcgagatttgtgaacataagagatgataaaggagcgactccgttgcatttagctgctcgacagagacgacctgaatgtgtgaatgttttgttggatagtggttctcttgtttgtgcatctactagtgtatatggttctccaggaagcacacctcttcatttagcagctagaagtggatctatagattgtgtcagaaagttgcttgcttggggtgctgatcgtcttcaacgagacgcttctgggagaataccttatgtggttgcgatgaagcataagcatggagcatgtggagccttacttaatccgtcctctgcagagccacttgtttggccatcaccattaaagttcatcagtgagcttaatgacgaggcgaaacttctcttagagcaggctttaatggaggctaacagggagagagagaaaaccatcctcaaaggaacagcttattccttaccatcaccctctttctctgacacggatgataacatgtccgaggtgagtgatacggaactgtgctgcatttgctttgagcaagtatgtacaattgaagttaaagactgtggtcaccaaatgtgtgcacaatgcacacttgcactgtgctgtcacaacaaaccaaacccaacgacctcaaccgtgactccaccggtctgtccgttctgtagaagcaccattgcatgtttagtcgtcgcccagaacaacaacaacaacaacgaaaagagcaaaagcctagatgatgttgttgttgttgatcgtgaggcaggtgatgttagctcctccaaattcagaaaacatagaagatcaataaaccttggcgaagaaagcagcagcttcatgggactatcaactattggatcattcggtaggataaccggccgtggctcgggaaggatcgcagccgaaaacgagctgatggacaaaccaatattgtgagggatcgattccgttttaagggacattttggggcatgggggagcaataaaaaagatgaggggatgaaattgtgagaatgtataaaatatagatgaatttatgt

SEQ ID NO: 104700 - protein, 456 aa, Arabidopsis thaliana; identical to SEQ ID NO: 21329
  peptide (1)..(456): Ceres Seq. ID no. 13615616

SEQ ID NO: 104701 - protein, 452 aa, Arabidopsis thaliana; identical to SEQ ID NO: 21330
  peptide (1)..(452): Ceres Seq. ID no. 13615617

SEQ ID NO: 104702 - protein, 426 aa, Arabidopsis thaliana; identical to SEQ ID NO: 21331
  peptide (1)..(426): Ceres Seq. ID no. 13615618

SEQ ID NO: 104703 - DNA, 689 bp, Arabidopsis thaliana
  misc_feature (1)..(689): Ceres Seq. ID no. 13615619
  misc_feature (1)..(689): Ortholog of  Ceres SEQ ID NO 15173170 as cited in SEQ ID NO 64240
atccaccgttaaaagcccctttatatcccaagaaataggtgaacttgttacagaacaagcaaagatcaaagagaaaaatatcccaaaaccaaaaacagaggaagaaagaagaagaaaagatgccttcaagcacattctccgggactgttagcacgccgaagctgtcggtggcagtggacatgggaaacccttttctcaatctcaccgttgatgccttcctcaagatcggagctgttggagtcactaaatctcttgcagaagacacttacaaggccatcgacaaagggagtctctccaagagcactttggagcatgcgcttaagaagttgtgtaaagaaggtgtttactggggagctgctggtggagtgtacattggaacagaatacggaatcgaacgtatccgtggcagcagagattggaaaaacgcaatgttagcaggcgcggcgacaggagcagtgctctcagcggttggtaagaaaggcaaagacactattgtgatcgatgccattcttggtggcgcgcttgcaaccgcttctcagttcgttaacaatcattatttctactgattctccatcttcctttagggaccaatttggttcatatggtgtggattcctttgtttactctttaaataataataaaaaacaatgtagtgtttttgaaatgaatacattcgagtattgttgacg

SEQ ID NO: 104704 - protein, 148 aa, Arabidopsis thaliana; identical to SEQ ID NO: 28418
  peptide (1)..(148): Ceres Seq. ID no. 13615620

SEQ ID NO: 104705 - protein, 128 aa, Arabidopsis thaliana; identical to SEQ ID NO: 28419
  peptide (1)..(128): Ceres Seq. ID no. 13615621

SEQ ID NO: 104706 - protein, 74 aa, Arabidopsis thaliana; identical to SEQ ID NO: 28420
  peptide (1)..(74): Ceres Seq. ID no. 13615622

SEQ ID NO: 104707 - DNA, 1517 bp, Arabidopsis thaliana
  misc_feature (1)..(1517): Ceres Seq. ID no. 13615623
  misc_feature (1)..(1517): Ortholog of  Ceres SEQ ID NO 15225703 as cited in SEQ ID NO 59527
  misc_feature (1)..(1517): Ortholog of  Ceres SEQ ID NO 12615972 as cited in SEQ ID NO 62455
  misc_feature (1)..(1517): Ortholog of  Ceres SEQ ID NO 13596229 as cited in SEQ ID NO 68800
  misc_feature (1)..(1517): Ortholog of  Ceres SEQ ID NO 15179393 as cited in SEQ ID NO 0
aattagcttgttcacaaggaaatgcctcaaaagaggaaagacgattgattcatctcaaccttctcgtcttctttcggacaacaatgtcacaaaaagtctgatcctttctctttagatttggcttcgagaaatggctcgcgatcggcgggaaggtctggagatcaaggtggtgaatccaccggcggcggcgacaaacaatgtggctgtagaaacgtctccggcgacggcgacgaggagacggagacaacaacaacgagcttcgttcgctgagtttagaccgtttaagctttggtttccatggcttgttccagctatcgtggtggctaacattgcccttttcgccatttcgatgtttattaacaattgtcctaagaactcggcttattgcttagctaggtttcttgggagatttgcttttcagcctatgaaagagaatcctcttctgggtccttcttctttgacattggagaagatgggggctttagatgtatcaatggtggttcataagcacgaggtgtggcgcttgttcacttgtatatggctacatgctggggtttttcatgttcttgccaacatgttgagccttatcttcattggcattcgacttgagcaagaatttggatttgtacgcattggattgctttatatgatatctggatttggtggaagtttgttatcttctctatttaaccgggctggtatatccgttggtgcctctggagcattattcggcttgcttggtgctatgctttcagagcttctcactaattggactatttacgctaataagtttgcagctcttttgacactcatcttcatcatagccattaatttagcagtaggtattcttccacatgtagacaactttgcccatcttggaggattcacatcagggtttcttctaggctttgttttcttgatacgtcctcagtatggatacttcaaccagcggaacaatcctcggggttatgctgcaccgtctgctaaatccaaacacaagccataccaatacgttctttggatcacctctttagtgcttttaatagcaggatataccgctggactcgtagtgcttcttcgaggaacggatctaaacaagcattgttcatggtgccattatctcagctgtattcctacgtcgctttggagctgtaaatctcaaaatgtctactgtgagtcgagccaaattgggcagcagatgaacttgacatgtatcacgaatgggaaaacagagatgtacaagctctctaacgatataccgtctcggattcagcagttgtgttcccaattgtgcagatgaataccactaaacgtctaatttttatactcttgtagaaagttaggaatgtgtcttgaggaagagaagattgttcatttaacatgatcatgcacttgtggattcttctttctgatcattgtttgtttccacttcttgttttattgttgcatatgtattgaccatgatctatgtaatgagaacataggtgaagagaaagttgaacaaagtttttgttctt

SEQ ID NO: 104708 - protein, 389 aa, Arabidopsis thaliana
  peptide (1)..(389): Ceres Seq. ID no. 13615624
MARDRREGLEIKVVNPPAAATNNVAVETSPATATRRRRQQQRASFAEFRPFKLWFPWLVPAIVVANIALFAISMFINNCPKNSAYCLARFLGRFAFQPMKENPLLGPSSLTLEKMGALDVSMVVHKHEVWRLFTCIWLHAGVFHVLANMLSLIFIGIRLEQEFGFVRIGLLYMISGFGGSLLSSLFNRAGISVGASGALFGLLGAMLSELLTNWTIYANKFAALLTLIFIIAINLAVGILPHVDNFAHLGGFTSGFLLGFVFLIRPQYGYFNQRNNPRGYAAPSAKSKHKPYQYVLWITSLVLLIAGYTAGLVVLLRGTDLNKHCSWCHYLSCIPTSLWSCKSQNVYCESSQIGQQMNLTCITNGKTEMYKLSNDIPSRIQQLCSQLCR

SEQ ID NO: 104709 - protein, 316 aa, Arabidopsis thaliana
  peptide (1)..(316): Ceres Seq. ID no. 13615625
MFINNCPKNSAYCLARFLGRFAFQPMKENPLLGPSSLTLEKMGALDVSMVVHKHEVWRLFTCIWLHAGVFHVLANMLSLIFIGIRLEQEFGFVRIGLLYMISGFGGSLLSSLFNRAGISVGASGALFGLLGAMLSELLTNWTIYANKFAALLTLIFIIAINLAVGILPHVDNFAHLGGFTSGFLLGFVFLIRPQYGYFNQRNNPRGYAAPSAKSKHKPYQYVLWITSLVLLIAGYTAGLVVLLRGTDLNKHCSWCHYLSCIPTSLWSCKSQNVYCESSQIGQQMNLTCITNGKTEMYKLSNDIPSRIQQLCSQLCR

SEQ ID NO: 104710 - protein, 291 aa, Arabidopsis thaliana
  peptide (1)..(291): Ceres Seq. ID no. 13615626
MKENPLLGPSSLTLEKMGALDVSMVVHKHEVWRLFTCIWLHAGVFHVLANMLSLIFIGIRLEQEFGFVRIGLLYMISGFGGSLLSSLFNRAGISVGASGALFGLLGAMLSELLTNWTIYANKFAALLTLIFIIAINLAVGILPHVDNFAHLGGFTSGFLLGFVFLIRPQYGYFNQRNNPRGYAAPSAKSKHKPYQYVLWITSLVLLIAGYTAGLVVLLRGTDLNKHCSWCHYLSCIPTSLWSCKSQNVYCESSQIGQQMNLTCITNGKTEMYKLSNDIPSRIQQLCSQLCR

SEQ ID NO: 104711 - DNA, 543 bp, Arabidopsis thaliana
  misc_feature (1)..(543): Ceres Seq. ID no. 13615631
  misc_feature (1)..(543): Ortholog of  Ceres SEQ ID NO 13582124 as cited in SEQ ID NO 51028
  misc_feature (1)..(543): Ortholog of  Ceres SEQ ID NO 15176134 as cited in SEQ ID NO 0
aaggatttatgatcttcaaattcaagtatgaattataaagtttcgatttttacgaatcattaattttgtattcaggtactgctaaaaaaatggcttctcctattcccgtcggcgttactaaggaacaggcgtttagtatggcacaaacggagatggagtatcgcgtggaactctttaacaagcttgctcaaacatgctttaataaatgtgtggataaaaggtacaaggaagctgagctaaacatgggtgagaatagttgcatcgaccgttgtgtttccaagtactggcaggtaaatggaatggttggacagcttctaagtgctggcaagcctcccgtgtaatccagtttaaaggcaattattacagaccaaaaagctcatggagggaacacaactctgttctttgtttttctaaagtttaaggcaatcttgtttttattgtcaagaaagttgcatcacatttttggcgctgatttggacaaattatgcaattccatgtgaacccattattattacctaaggggtgaaatgaaataacaaatcg

SEQ ID NO: 104712 - protein, 83 aa, Arabidopsis thaliana; identical to SEQ ID NO: 27029
  peptide (1)..(83): Ceres Seq. ID no. 13615632

SEQ ID NO: 104713 - protein, 67 aa, Arabidopsis thaliana; identical to SEQ ID NO: 27031
  peptide (1)..(67): Ceres Seq. ID no. 13615633

SEQ ID NO: 104714 - protein, 62 aa, Arabidopsis thaliana; identical to SEQ ID NO: 35976
  peptide (1)..(62): Ceres Seq. ID no. 13615634

SEQ ID NO: 104715 - DNA, 1671 bp, Arabidopsis thaliana
  misc_feature (1)..(1671): Ceres Seq. ID no. 13615635
  misc_feature (1)..(1671): Ortholog of  Ceres SEQ ID NO 15227226 as cited in SEQ ID NO 54691
  misc_feature (1)..(1671): Ortholog of  Ceres SEQ ID NO 14303169 as cited in SEQ ID NO 65741
agattcaaacttgttcatcgaaattttgcttgaagattcgaatcgagaagtccgtggaagaggaagaagaagaagatgtctgtgcaagagtatttagacaagcatatgctttctcggaaaatcgaagacgccgttaatgccgccgtaagggctaaaacctcagatcccgttctcttcatcgctaatcatctgaagaaagctgtatcatctgtgataacgaaggttaaagcacgacagatccttgacagcagaggaattccaacagttgaagttgatctgcacacgaacaaaggcgtttttcgtgcttctgttcccagtggtgattcttctggaacgtatgaagctattgagctacgtgatggagacaaaggaatgtatcttggaaacagtgtggctaaagctgttaagaacataaatgaaaaaatttctgaggcgttgattggtatggacccaaaacttcagggtcagatagatcaggctatgatagatttggataaaactgaaaagaagagtgaacttggtgctaatgctatacttgctgtgtcaattgcggcatgcaaggctggagctgctgagaaagaggtccctttgtgcaagcatctttctgatcttagtggcagagcaaacatggtgttacctgtacctgcgttcactgttttgagtggtgggaagcatgcttcgaatacttttgccattcaggaaattatgattctcccaattggagcaagtagatttgaggaggccctgcaatggggatctgagacatatcatcatttaaaggctgtcatttcagaaaagaatggtggtttgggatgtaatgttggtgaagatggtggtcttgctccagatatctcgagcctcaaggaaggtttggagcttgtaaaagaagctatcaaccgaacagggtacaatgataagataaagatagccattgatattgccgccactaatttttgtttaggtaccaagtatgatttagatatcaagtctccaaataaatctgggcaaaatttcaagtcagcggaagatatgatagatatgtacaaagaaatttgtaatgattatccaattgtgtctatagaagacccttttgacaaggaggactgggaacacaccaagtatttttcgagtcttggaatatgtcaggtggtaggtgacgatttgttgatgtcaaattcaaaacgagttgagcgtgccatacaggagtcttcttgtaatgctcttcttctcaaggtgaatcagattggtacagtaacagaagccattgaagtagtgaaaatggcaagggatgcccagtggggtgtggtgacatctcatagatgtggagaaacagaggactctttcatctctgacttatctgtgggtctcgcaacaggtgtgattaaagctggtgctccttgcagaggagaacgtactatgaagtataaccagttgctacggatagaggaagagcttggggatcaagcagtgtatgctggagaagattggaagctatctctctaaacaaaatgcacatgtgatattaattgttacacttctcgtcttacttcattgttctcgagtctatttctcacgcagacaaattcttgtgtcttgaaagttcaaattttttgttgtttttgccaaatttaagaacaaacagaagtaaagagtgttaaacatgttttttac

SEQ ID NO: 104716 - protein, 475 aa, Arabidopsis thaliana; identical to SEQ ID NO: 42943
  peptide (1)..(475): Ceres Seq. ID no. 13615636

SEQ ID NO: 104717 - protein, 465 aa, Arabidopsis thaliana; identical to SEQ ID NO: 42944
  peptide (1)..(465): Ceres Seq. ID no. 13615637

SEQ ID NO: 104718 - protein, 376 aa, Arabidopsis thaliana; identical to SEQ ID NO: 42945
  peptide (1)..(376): Ceres Seq. ID no. 13615638

SEQ ID NO: 104719 - DNA, 1131 bp, Arabidopsis thaliana
  misc_feature (1)..(1131): Ceres Seq. ID no. 13615639
  misc_feature (1)..(1131): Ortholog of  Ceres SEQ ID NO 14307312 as cited in SEQ ID NO 54745
  misc_feature (1)..(1131): Ortholog of  Ceres SEQ ID NO 14314194 as cited in SEQ ID NO 57366
  misc_feature (1)..(1131): Ortholog of  Ceres SEQ ID NO 13655305 as cited in SEQ ID NO 63328
atcacttcccgctaacaattgcaatctcctcccagaaatttcaacagctctaaaaaccctaaccgtttcgattcacactctaacctttcgataatttcccagaagatgttggagcttcgtttagttcaaggttctctactgaagaaggttctagaagcggtcaaagatctggtgaacgatgcgaacttcgactgttcgaccacagggttctcgcttcaagctatggattcgagccatgtcgcgttggtgtctcttttgcttagatctgaaggtttcgagcactatagatgcgataggaacctctctatgggaatgaatcttggtaatatgtctaagatgctgaaatgtgctggaaatgatgatatcatcaccatcaaagctgatgatggtagcgacactgttactttcatgtttgagagtcccacacaagacaagattgcagattttgagatgaagctgatggatatcgacagtgagcatttaggaattcctgatgctgagtaccactcgattgtgagaatgccttctggtgaattttccaggatatgcaaagatctcagtagcattggtgacacagttgtgatctcggtaacaaaagaaggggtgaagttttcaacagcaggtgatatcgggacagcaaacattgtgctcaggcagaatactaccgtcgacaaacctgaagatgctattgtgatagagatgaacgagcctgtttcgctttcatttgcattgaggtacatgaactccttcacaaaggctactccattgtcggaaactgtgaccatcagtttgtcctctgagttaccggtcgtggtggagtacaaggtggctgagatgggttacattcgatactatctggcgcctaagattgaagaagaagaagacaccaaaccagaataatgatgaatgtttgatagtcttcgttcgagtcctttgttgaaatgtctgtcttgattcagttgttttctggatttactatcttaaggcaatgctaaactagataatcgtatgatgtttgtctttctgaaatttggaaaagcttgtttataacacttttcatctgtttgttaaacattgaagaaaaagaagacacgaagccctaaaacacgtttgtttgtggcttctgcaacc

SEQ ID NO: 104720 - protein, 264 aa, Arabidopsis thaliana
  peptide (1)..(264): Ceres Seq. ID no. 13615640
MLELRLVQGSLLKKVLEAVKDLVNDANFDCSTTGFSLQAMDSSHVALVSLLLRSEGFEHYRCDRNLSMGMNLGNMSKMLKCAGNDDIITIKADDGSDTVTFMFESPTQDKIADFEMKLMDIDSEHLGIPDAEYHSIVRMPSGEFSRICKDLSSIGDTVVISVTKEGVKFSTAGDIGTANIVLRQNTTVDKPEDAIVIEMNEPVSLSFALRYMNSFTKATPLSETVTISLSSELPVVVEYKVAEMGYIRYYLAPKIEEEEDTKPE

SEQ ID NO: 104721 - protein, 225 aa, Arabidopsis thaliana
  peptide (1)..(225): Ceres Seq. ID no. 13615641
MDSSHVALVSLLLRSEGFEHYRCDRNLSMGMNLGNMSKMLKCAGNDDIITIKADDGSDTVTFMFESPTQDKIADFEMKLMDIDSEHLGIPDAEYHSIVRMPSGEFSRICKDLSSIGDTVVISVTKEGVKFSTAGDIGTANIVLRQNTTVDKPEDAIVIEMNEPVSLSFALRYMNSFTKATPLSETVTISLSSELPVVVEYKVAEMGYIRYYLAPKIEEEEDTKPE

SEQ ID NO: 104722 - protein, 197 aa, Arabidopsis thaliana
  peptide (1)..(197): Ceres Seq. ID no. 13615642
MGMNLGNMSKMLKCAGNDDIITIKADDGSDTVTFMFESPTQDKIADFEMKLMDIDSEHLGIPDAEYHSIVRMPSGEFSRICKDLSSIGDTVVISVTKEGVKFSTAGDIGTANIVLRQNTTVDKPEDAIVIEMNEPVSLSFALRYMNSFTKATPLSETVTISLSSELPVVVEYKVAEMGYIRYYLAPKIEEEEDTKPE

SEQ ID NO: 104723 - DNA, 1671 bp, Arabidopsis thaliana
  misc_feature (1)..(1671): Ceres Seq. ID no. 13615647
  misc_feature (1)..(1671): Ortholog of  Ceres SEQ ID NO 13597574 as cited in SEQ ID NO 64677
  misc_feature (1)..(1671): Ortholog of  Ceres SEQ ID NO 13597843 as cited in SEQ ID NO 64850
  misc_feature (1)..(1671): Ortholog of  Ceres SEQ ID NO 13597678 as cited in SEQ ID NO 65375
  misc_feature (1)..(1671): Ortholog of  Ceres SEQ ID NO 13662880 as cited in SEQ ID NO 65422
  misc_feature (1)..(1671): Ortholog of  Ceres SEQ ID NO 13596180 as cited in SEQ ID NO 67941
  misc_feature (1)..(1671): Ortholog of  Ceres SEQ ID NO 13591190 as cited in SEQ ID NO 68044
  misc_feature (1)..(1671): Ortholog of  Ceres SEQ ID NO 13595961 as cited in SEQ ID NO 68223
aacgaggctgtggagaaaagaaccaaaggtgactgttgttagagatgaggaatgcagagctcatcttcatcccaacaccaactgttggtcatcttgttccgtttcttgaatttgctaggcgtctcattgagcaggatgatagaatccgtatcaccttcctcttgatgaagcaacaaggtcagtctcatctggattcctatgttaagacaatttcctcgtctctgccgtttgttagatttattgatgtccctgagttagaggagaaaccaacacttggtacacagtctgtggaagcctatgtgtacgattttattgaaacaaatgtccctcttgtgcaaaatataatcatgggtatcctatcttctcctgcatttgatggagttacggtcaagggattcgttgctgattttttctgtctcccgatgattgatgttgcaaaagatgcaagtcttcctttttatgtgttcttgacttcaaattccggattcctagctatgatgcagtatctggcatatggacataagaaagatacctcagtttttgcaagaaactctgaagaaatgttgtcaattcctggatttgtaaaccctgtcccagccaaagtactgccgtcagctctgtttattgaggatggttatgatgctgacgttaaactggctatattgtttacaaaggctaatggaatcctagtgaatacctcctttgatattgagcctacctctctgaatcattttcttggagaagagaattacccttctgtttatgctgttggccccatatttaacccgaaggcccatcctcatccagatcaagacctcgcctgttgtgacgagtcgatgaaatggcttgatgctcaacccgaggcatcagttgtattcctttgttttgggagtatgggtagcttaagaggtcctctagtgaaggaaatagcacatggacttgagctatgtcagtatagattcctctggtcactccgcacagaagaagtgacaaatgatgatcttttgccagagggattcatggaccgtgtcagtggacggggaatgatatgcggttggtctcctcaggtggaaatactggcccataaagcagtgggaggttttgtttctcattgtggatggaactcaatagtagagagtttatggtttggtgtgccaattgtgacatggccaatgtatgcagagcaacagctcaatgcgtttctgatggtgaaggaactgaagctcgcagtggagctgaaactcgattatagtgtacatagtggtgagattgtaagtgcaaacgagatagagacagcgatttcttgtgtaatgaacaaggataataatgttgtgaggaaacgagtgatggatatctcgcagatgatccagagagctacgaagaatggtggatcttcgtttgccgcaattgagaaattcatacatgacgtgataggaaccaggacttagcctttcttatcggattctccataaactgtaacctgattatgcaacagtcctttgaatctgctttgtttctaatatttttttctattcttttgtcatcagctttgcttttaactttgtctgtgttgattcctttatctaccaagctgtgagtttctttgttagccaatgctgcatttcttctgttatggattttgttcaaaattgggtacatctcttattcttt

SEQ ID NO: 104724 - protein, 467 aa, Arabidopsis thaliana
  peptide (1)..(467): Ceres Seq. ID no. 13615648
MRNAELIFIPTPTVGHLVPFLEFARRLIEQDDRIRITFLLMKQQGQSHLDSYVKTISSSLPFVRFIDVPELEEKPTLGTQSVEAYVYDFIETNVPLVQNIIMGILSSPAFDGVTVKGFVADFFCLPMIDVAKDASLPFYVFLTSNSGFLAMMQYLAYGHKKDTSVFARNSEEMLSIPGFVNPVPAKVLPSALFIEDGYDADVKLAILFTKANGILVNTSFDIEPTSLNHFLGEENYPSVYAVGPIFNPKAHPHPDQDLACCDESMKWLDAQPEASVVFLCFGSMGSLRGPLVKEIAHGLELCQYRFLWSLRTEEVTNDDLLPEGFMDRVSGRGMICGWSPQVEILAHKAVGGFVSHCGWNSIVESLWFGVPIVTWPMYAEQQLNAFLMVKELKLAVELKLDYSVHSGEIVSANEIETAISCVMNKDNNVVRKRVMDISQMIQRATKNGGSSFAAIEKFIHDVIGTRT

SEQ ID NO: 104725 - protein, 427 aa, Arabidopsis thaliana
  peptide (1)..(427): Ceres Seq. ID no. 13615649
MKQQGQSHLDSYVKTISSSLPFVRFIDVPELEEKPTLGTQSVEAYVYDFIETNVPLVQNIIMGILSSPAFDGVTVKGFVADFFCLPMIDVAKDASLPFYVFLTSNSGFLAMMQYLAYGHKKDTSVFARNSEEMLSIPGFVNPVPAKVLPSALFIEDGYDADVKLAILFTKANGILVNTSFDIEPTSLNHFLGEENYPSVYAVGPIFNPKAHPHPDQDLACCDESMKWLDAQPEASVVFLCFGSMGSLRGPLVKEIAHGLELCQYRFLWSLRTEEVTNDDLLPEGFMDRVSGRGMICGWSPQVEILAHKAVGGFVSHCGWNSIVESLWFGVPIVTWPMYAEQQLNAFLMVKELKLAVELKLDYSVHSGEIVSANEIETAISCVMNKDNNVVRKRVMDISQMIQRATKNGGSSFAAIEKFIHDVIGTRT

SEQ ID NO: 104726 - protein, 366 aa, Arabidopsis thaliana
  peptide (1)..(366): Ceres Seq. ID no. 13615650
MGILSSPAFDGVTVKGFVADFFCLPMIDVAKDASLPFYVFLTSNSGFLAMMQYLAYGHKKDTSVFARNSEEMLSIPGFVNPVPAKVLPSALFIEDGYDADVKLAILFTKANGILVNTSFDIEPTSLNHFLGEENYPSVYAVGPIFNPKAHPHPDQDLACCDESMKWLDAQPEASVVFLCFGSMGSLRGPLVKEIAHGLELCQYRFLWSLRTEEVTNDDLLPEGFMDRVSGRGMICGWSPQVEILAHKAVGGFVSHCGWNSIVESLWFGVPIVTWPMYAEQQLNAFLMVKELKLAVELKLDYSVHSGEIVSANEIETAISCVMNKDNNVVRKRVMDISQMIQRATKNGGSSFAAIEKFIHDVIGTRT

SEQ ID NO: 104727 - DNA, 1527 bp, Arabidopsis thaliana
  misc_feature (1)..(1527): Ceres Seq. ID no. 13615651
  misc_feature (1)..(1527): Ortholog of  Ceres SEQ ID NO 15176325 as cited in SEQ ID NO 52802
  misc_feature (1)..(1527): Ortholog of  Ceres SEQ ID NO 15176313 as cited in SEQ ID NO 52831
aatattgattatagaaaagtgaatccacttgacctcctcttggaacgcggctatgtctcttgtgcgtccgatctatcctttcttggccagaagcaagagatggtttccggttcgaaccggattaaaatcggtttgcttaacaacgaccagagccgaaacaagcggtgttgacagagaggagaaagtagtgattgttgggggcgggattggcggacttgccactgccgttgctcttcaccggcttggaatccggtcggtggtgttggagcaggcagagtcgcttcggacaggaggagcatcgctgacgctatccaagaatgggtggcgtgttcttgacgccatctccatcggacctcaactccgaaagcagtttcttgaaatgcaaggggtggtattgaagaaggaagatggaagagagcttcgttctttcaaatttaaagacaatgatcaaagccaagaagttcggggggtggagaggcgagtactcttggaaacacttgcaagccagcttcctccacagaccattcggttttcttcaaaactggaaagtatacaaagcaatgccaatggtgacactctccttcaacttaaagatggaactcggtttcttgcaaatattgttataggttgtgatggtatccggtctaaggttgcaacttggatggggttcagtgagccgaaatatgttggttattgcgctttccgtggccttgggttctttccaaatggacagccatttcagcaaaaggtgaactacatattcggtagagggcttcgagctggatatgtacctgtatctgcaacaaaagtctactggttcatcactttcaacagcccttctctagggcctcaaatgatggatccagctatcctaagaaaagaagccaaggaactggttagtacctggccagaagatctgcaaaacctcattgatctaacacctgatgaagcaatcagtagaactcctcttgcggaccggtggctttggcctggcattgctccttcagcatcaaaaggtagggttgttcttgttggagatgcttggcacccaatgactccaaatcttggacaaggtgcttgctgtgccttggaagattcagttcttctggcaaataaacttgccagtgcaataaatggagggaccgaatcagttgaaggggcgatggaatcatataggagtgagagatggtctcaggtattccggttgacagtacttgcaaacctagtcggaaaacttctgcaatcagacaatcctcttgtgtgttccgttagagacaatattgtcagtgcaatgggaaaatcctctcggaccaacgatggaacacacaaactttgagtgtgagcctctctatgtttcaatattgtctatgtaatgagatgtaaaagcatatgctccattggatagaggacttagacaatgtatcatcagaggaataatatcaaagaagataatataaactctgattgaatgtaaaagaataatacaatgtaattcgtttatgctatgaaagggaatgactctagagc

SEQ ID NO: 104728 - protein, 427 aa, Arabidopsis thaliana
  peptide (1)..(427): Ceres Seq. ID no. 13615652
MSLVRPIYPFLARSKRWFPVRTGLKSVCLTTTRAETSGVDREEKVVIVGGGIGGLATAVALHRLGIRSVVLEQAESLRTGGASLTLSKNGWRVLDAISIGPQLRKQFLEMQGVVLKKEDGRELRSFKFKDNDQSQEVRGVERRVLLETLASQLPPQTIRFSSKLESIQSNANGDTLLQLKDGTRFLANIVIGCDGIRSKVATWMGFSEPKYVGYCAFRGLGFFPNGQPFQQKVNYIFGRGLRAGYVPVSATKVYWFITFNSPSLGPQMMDPAILRKEAKELVSTWPEDLQNLIDLTPDEAISRTPLADRWLWPGIAPSASKGRVVLVGDAWHPMTPNLGQGACCALEDSVLLANKLASAINGGTESVEGAMESYRSERWSQVFRLTVLANLVGKLLQSDNPLVCSVRDNIVSAMGKSSRTNDGTHKL

SEQ ID NO: 104729 - protein, 318 aa, Arabidopsis thaliana
  peptide (1)..(318): Ceres Seq. ID no. 13615653
MQGVVLKKEDGRELRSFKFKDNDQSQEVRGVERRVLLETLASQLPPQTIRFSSKLESIQSNANGDTLLQLKDGTRFLANIVIGCDGIRSKVATWMGFSEPKYVGYCAFRGLGFFPNGQPFQQKVNYIFGRGLRAGYVPVSATKVYWFITFNSPSLGPQMMDPAILRKEAKELVSTWPEDLQNLIDLTPDEAISRTPLADRWLWPGIAPSASKGRVVLVGDAWHPMTPNLGQGACCALEDSVLLANKLASAINGGTESVEGAMESYRSERWSQVFRLTVLANLVGKLLQSDNPLVCSVRDNIVSAMGKSSRTNDGTHKL

SEQ ID NO: 104730 - protein, 224 aa, Arabidopsis thaliana; identical to SEQ ID NO: 22691
  peptide (1)..(224): Ceres Seq. ID no. 13615654

SEQ ID NO: 104731 - DNA, 1440 bp, Arabidopsis thaliana
  misc_feature (1)..(1440): Ceres Seq. ID no. 13615655
  misc_feature (1)..(1440): Ortholog of  Ceres SEQ ID NO 15177298 as cited in SEQ ID NO 52711
aaaattcatcaaaccctttcttcaccacattattttcactgagcgcataacatttttgagacaagagactctctctctctctcttctctctttctctccccctctctccggcgatggttgttgctatggaccaacgcaccaatgtgaacggagatcccggcgccggagaccggaagaaagaagaaaggtttgatccgagtgcacaaccaccgttcaagatcggagatataagggcggcgattcctaagcactgttgggttaagagtcctttgagatcaatgagttacgtcgtcagagacattatcgccgtcgcggctttggccatcgctgccgtgtatgttgatagctggttcctttggcctctttattgggccgcccaaggaacacttttctgggccatctttgttctcggccacgactgtggacatgggagtttctcagacattcctctactgaatagtgtggttggtcacattcttcattctttcatcctcgttccttaccatggttggagaataagccaccggacacaccaccagaaccatggccatgttgaaaacgacgagtcatgggttccgttaccagaaagggtgtacaagaaattgccccacagtactcggatgctcagatacactgtccctctccccatgctcgcatatcctctctatttgtgctacagaagtcctggaaaagaaggatcacattttaacccatacagtagtttatttgctccaagcgagagaaagcttattgcaacttcaactacttgttggtccataatgttcgtcagtcttatcgctctatctttcgtcttcggtccactcgcggttcttaaagtctacggtgtaccgtacattatctttgtgatgtggttggatgctgtcacgtatttgcatcatcatggtcacgatgagaagttgccttggtatagaggcaaggaatggagttatctacgtggaggattaacaacaattgatagagattacggaatctttaacaacattcatcacgacattggaactcacgtgatccatcatctcttcccacaaatccctcactatcacttggtcgacgccacgaaagcagctaaacatgtgttgggaagatactacagagaaccaaagacgtcaggagcaataccgatccacttggtggagagtttggtcgcaagtattaagaaagatcattacgtcagcgacactggtgatattgtcttctacgagacagatccagatctctacgtttacgcttctgacaaatctaaaatcaattaatctccatttgtttagctctattaggaataaaccagcccacttttaaaatttttatttcttgttgtttttaagttaaaagtgtactcgtgaaactcttttttttttcttttttttttattaatgtatttacattacaaggcgtaaagttttgttatttctcttttct

SEQ ID NO: 104732 - protein, 386 aa, Arabidopsis thaliana; identical to SEQ ID NO: 23723
  peptide (1)..(386): Ceres Seq. ID no. 13615656

SEQ ID NO: 104733 - protein, 382 aa, Arabidopsis thaliana; identical to SEQ ID NO: 23724
  peptide (1)..(382): Ceres Seq. ID no. 13615657

SEQ ID NO: 104734 - protein, 331 aa, Arabidopsis thaliana; identical to SEQ ID NO: 23725
  peptide (1)..(331): Ceres Seq. ID no. 13615658

SEQ ID NO: 104735 - DNA, 1465 bp, Arabidopsis thaliana
  misc_feature (1)..(1465): Ceres Seq. ID no. 13615659
  misc_feature (1)..(1465): Ortholog of  Ceres SEQ ID NO 13659033 as cited in SEQ ID NO 66372
  misc_feature (1)..(1465): Ortholog of  Ceres SEQ ID NO 13655724 as cited in SEQ ID NO 68973
  misc_feature (1)..(1465): Ortholog of  Ceres SEQ ID NO 12625899 as cited in SEQ ID NO 69079
acgtattagtaagttccatgcaaaggacaaacatataataacaacaacttctcttctttactcgtttctctctctctcttttcttttcttttcttcaagcgcttctttaatggcggctgttcaatgtctcactttcctcttcttgtttcttctccaaaacgcgacgtcagcttcacctctccctctcttccggcggccgatccaaagcaaccacagcaacttcgtgaagcatcctcgccgaagtcaggtggttttcccggtgaatcatagtagttgtgatctgttcgccggcgagtgggtgcgggatgagacttacccactttaccggtctaaagaatgcggccgaggaatcatagatccgggattcgactgccagacttacggcagacctgactccgactatctcaagttccggtggaaacctttcaactgcaatgtccctagattcaatggagtgaagtttctacaagaaatgagagacaaaaccataatgttcgttggtgattcgttgggtagaaaccaatgggagtcgttgatatgtatgatctcttcatcagcaccgtccattaatactcacatcattcatgaagatcctctctctaccttcaagatccttgactacaacgtgaaggtatcattctatagagctccttatcttgtagacatcgacaaaattaacggaaagacaactcttaaactcgacgaaatctctgtggatgcatcgaatgcttggcgcacagccgacgttctattgttcaacactggtcactggtggagccacacaggttctttacgagggtgggagcagatggagacaggtgggagatattacggcgacatggataggttagtggcgttgagaaaaggactaggaacgtggtctagttgggtccttcgttatatcaattctcctctcactagagttttcttcctctcggtctcacccacacactacaacccaaatgagtggacttcaagatcaaaaacttcaacaataactcaaggaggtaaaagctgctacggacaaacgacaccgtttagtggaacaacgtatccaacaagttcatacgtgaaccagaagaaagtgatagacgacgtggttaaagagatgaagtctcatgtctcattgatggatataactatgctctctgctcttcgtgtcgacggtcatccttcgatatatagtggagatctcaacccttctttgaaaagaaatcctgaccgttcatctgattgtagccattggtgtcttccgggtcttcccgacacttggaaccaattgttttatgctgctttgttgtactgaagatttgattaaccaagatcaaacaaaatgtatctattgaattatatagtttcctaatttttatttgtaagttcactaagttgttacgtttaatcaaacatataattgtgaagttgaggatcttgttacgtttaatcaaacatataagttgttacgttc

SEQ ID NO: 104736 - protein, 434 aa, Arabidopsis thaliana
  peptide (1)..(434): Ceres Seq. ID no. 13615660
RISKFHAKDKHIITTTSLLYSFLSLSFLFFSSSASLMAAVQCLTFLFLFLLQNATSASPLPLFRRPIQSNHSNFVKHPRRSQVVFPVNHSSCDLFAGEWVRDETYPLYRSKECGRGIIDPGFDCQTYGRPDSDYLKFRWKPFNCNVPRFNGVKFLQEMRDKTIMFVGDSLGRNQWESLICMISSSAPSINTHIIHEDPLSTFKILDYNVKVSFYRAPYLVDIDKINGKTTLKLDEISVDASNAWRTADVLLFNTGHWWSHTGSLRGWEQMETGGRYYGDMDRLVALRKGLGTWSSWVLRYINSPLTRVFFLSVSPTHYNPNEWTSRSKTSTITQGGKSCYGQTTPFSGTTYPTSSYVNQKKVIDDVVKEMKSHVSLMDITMLSALRVDGHPSIYSGDLNPSLKRNPDRSSDCSHWCLPGLPDTWNQLFYAALLY

SEQ ID NO: 104737 - protein, 398 aa, Arabidopsis thaliana; identical to SEQ ID NO: 24726
  peptide (1)..(398): Ceres Seq. ID no. 13615661

SEQ ID NO: 104738 - protein, 277 aa, Arabidopsis thaliana; identical to SEQ ID NO: 24727
  peptide (1)..(277): Ceres Seq. ID no. 13615662

SEQ ID NO: 104739 - DNA, 1238 bp, Arabidopsis thaliana
  misc_feature (1)..(1238): Ceres Seq. ID no. 13615663
  misc_feature (1)..(1238): Ortholog of  Ceres SEQ ID NO 14314164 as cited in SEQ ID NO 54346
  misc_feature (1)..(1238): Ortholog of  Ceres SEQ ID NO 13595066 as cited in SEQ ID NO 55849
  misc_feature (1)..(1238): Ortholog of  Ceres SEQ ID NO 13597721 as cited in SEQ ID NO 65430
  misc_feature (1)..(1238): Ortholog of  Ceres SEQ ID NO 14309100 as cited in SEQ ID NO 0
attttaaccagcaaatacaaaaaacttccgatcccccttagcgtttccttctccggcgatattcttcttcttcggctcacattgcatcgtctctcactcgatccttcgttctttcagggacaatcatttcggaaacatgccaggtcagaagattgaaacgggtcatgaggacattgtccatgatgtgcagatggattactatggaaagcgaattgcaactgcatcatctgactgcaccatcaagataaccggtgtcagcaacaacggtggatcgcagcaactagccacattaaccggccaccgtggtcctgtctgggaagtcgcgtgggcacacccaaagtatggatcaatccttgcttcatgctcctatgatggtcaagtcatactctggaaagaaggcaaccagaaccaatggacccaagatcatgttttcacagaccacaaatcttcagtcaactccattgcatgggctcctcatgatatcggactatccttggcctgcgggtcatctgatggcaacatttcggttttcacagcccgtgctgacggtggctgggacacatcaaggattgaccaagcacatccggttggagtcacttcagtctcatgggccccagccacagcgcctggtgctcttgtgagctctggtcttctcgatccggtttacaagctagcttctggtggatgtgataataccgtgaaagtgtggaagctcgctaacgggtcatggaagatggattgctttccagctcttcaaaagcacactgattgggtccgtgatgtggcttgggcaccaaacttgggtctccccaagtccaccatagccagtggttcccaagatgggaaagttatcatatggacagtgggaaaagaaggtgagcaatgggaaggtaaggttctcaaggactttatgactcctgtgtggcgggtctcgtggtcgttgaccggtaacttattggccgtatccgatgggaacaacaacgtgactgtgtggaaagaggctgttgatggagagtgggaacaagttactgctgttgagccttaggtttttgatgctttgctatctctctgctcttcctttaaggaactgaatcaaacattttttctttactcttttcttagtccggtttggtggtctttttcagggaatgttgaattggttttcttaaagacttttggattattttttttcttattcttttcatagacaccattttaaaattctaaaaaccaagatc

SEQ ID NO: 104740 - protein, 302 aa, Arabidopsis thaliana; identical to SEQ ID NO: 23542
  peptide (1)..(302): Ceres Seq. ID no. 13615664

SEQ ID NO: 104741 - protein, 284 aa, Arabidopsis thaliana; identical to SEQ ID NO: 23543
  peptide (1)..(284): Ceres Seq. ID no. 13615665

SEQ ID NO: 104742 - DNA, 732 bp, Arabidopsis thaliana
  misc_feature (1)..(732): Ceres Seq. ID no. 13615666
  misc_feature (1)..(732): Ortholog of  Ceres SEQ ID NO 15178260 as cited in SEQ ID NO 59907
aactctaagtttttctttcttctttctctgctctcaaagctcaagagaactctatccttattaacttacaaggataactaaaaccggtgtaatcacgatcatagtagaagatgggcggtcccggatcatcaccatgtgcttcgtgtaagcttcttcgacgacgatgtgcaaaagattgcatcttcgcaccttattttcctcctgacgatcctcacaaattcgccattgttcataaggtctttggtgccagcaacgtcagcaaaatgttgcaggagctaccagttcatcaaagagctgacgcggtgaatagtctggtttttgaagcaaacgcaagagtaagagatccggtctacggctgcgtaggagcaatctcctacttacaaaaccaagtctcgcagcttcagatgcaactagcagtggctcaagccgagattctttgcattcagatgcaaaatgagccaaccttacagtctcatcatcaagtacttgaactagaccaagaccacaaagctctcttactaaacaacaacaacatcaataactgcaacaccaacaacaacaataacaactttggttatgccatgtcttctggacagttcaactctaactttgcctcaccaagcagcataatgcaaatgcagatgcaaatgcaaatgcaagaccctcttaagcaagaatctctttggacttaatgtaataataataataataattaatgttcgacaagtttgc

SEQ ID NO: 104743 - protein, 193 aa, Arabidopsis thaliana
  peptide (1)..(193): Ceres Seq. ID no. 13615667
MGGPGSSPCASCKLLRRRCAKDCIFAPYFPPDDPHKFAIVHKVFGASNVSKMLQELPVHQRADAVNSLVFEANARVRDPVYGCVGAISYLQNQVSQLQMQLAVAQAEILCIQMQNEPTLQSHHQVLELDQDHKALLLNNNNINNCNTNNNNNNFGYAMSSGQFNSNFASPSSIMQMQMQMQMQDPLKQESLWT

SEQ ID NO: 104744 - protein, 142 aa, Arabidopsis thaliana; identical to SEQ ID NO: 21430
  peptide (1)..(142): Ceres Seq. ID no. 13615668

SEQ ID NO: 104745 - DNA, 764 bp, Arabidopsis thaliana
  misc_feature (1)..(764): Ceres Seq. ID no. 13615675
  misc_feature (1)..(764): Ortholog of  Ceres SEQ ID NO 13582188 as cited in SEQ ID NO 55950
  misc_feature (1)..(764): Ortholog of  Ceres SEQ ID NO 12611286 as cited in SEQ ID NO 56182
  misc_feature (1)..(764): Ortholog of  Ceres SEQ ID NO 15173288 as cited in SEQ ID NO 58150
  misc_feature (1)..(764): Ortholog of  Ceres SEQ ID NO 13663461 as cited in SEQ ID NO 66601
atccaacaaacttatatgtgtatcggacacagaagaatactttccacgatcatcagcttctggagatctcttctgggaatcgagcttcactgttaaagattttccttcaatcggctaaaaatgatacatttcgtgttactagtcagtcgacaagggaaagtaaggctcaccaagtggtattcgccgtatacgcagaaggaaagatctaaggtcatacgtgaactcagtggagtgattctgaaccgaggtcccaagctctgcaattttattgaatggagaggatacaaggttgtctacaaaagatatgcaagcttgtacttctgcatgtgcattgatgaggcggataacgagttagaggtactggagataattcatcactacgtcgagattcttgaccgctactttggcagtgtgtgtgaactcgatttgatttttaacttccacaaggcgtattatatactcgatgagctgttgatcgccggagaacttcaagagtcaagcaagaaaacagttgcaaggataatatcagcccaggatcaattggtggaagttgcgaaagaggaggcgagttccataagtaatataattgctcaggctaccaagtagtccttttctgaacttttcttatgcagctgaaacaatcgtaaatgagttaatattttccttaaactctgagatattctcttctgaatcacacttttgtttgtcatgtcatgtgattgtttgattgattagaagaaagaagcattcatcgttttgggttt

SEQ ID NO: 104746 - protein, 161 aa, Arabidopsis thaliana
  peptide (1)..(161): Ceres Seq. ID no. 13615676
MIHFVLLVSRQGKVRLTKWYSPYTQKERSKVIRELSGVILNRGPKLCNFIEWRGYKVVYKRYASLYFCMCIDEADNELEVLEIIHHYVEILDRYFGSVCELDLIFNFHKAYYILDELLIAGELQESSKKTVARIISAQDQLVEVAKEEASSISNIIAQATK

SEQ ID NO: 104747 - protein, 93 aa, Arabidopsis thaliana; identical to SEQ ID NO: 29147
  peptide (1)..(93): Ceres Seq. ID no. 13615677

SEQ ID NO: 104748 - DNA, 842 bp, Arabidopsis thaliana
  misc_feature (1)..(842): Ceres Seq. ID no. 13615678
  misc_feature (1)..(842): Ortholog of  Ceres SEQ ID NO 14306406 as cited in SEQ ID NO 1412
  misc_feature (1)..(842): Ortholog of  Ceres SEQ ID NO 14309488 as cited in SEQ ID NO 52755
  misc_feature (1)..(842): Ortholog of  Ceres SEQ ID NO 15178824 as cited in SEQ ID NO 0
atgtatcctttatgtgtctctattataacgtggatcaagattctttcttatcttcatcactccacacattttcttgtcttcaaactcacacaaagaaagaaaagtctccaaagctcaaaaagcaatgactcgaccgtcaagattacttgagacggcggcgccaccaccacaaccgtcggaggagatgatcgcagcggaatccgacatggtggtgatcttgtcggctcttctttgcgctcttatctgcgttgctggtctcgccgccgtcgtacgatgcgcttggctccggcggtttacagccggaggagattcgccgtcaccgaacaaaggcttgaaaaagaaagctcttcagtctcttccaagatccactttcaccgccgcggaatcaacctccggcgccgccgctgaagagggagactcgacggaatgtgctatttgcctcactgacttcgccgacggtgaagaaataagagtgcttcctctttgtggtcattctttccacgtggagtgtattgacaaatggctagtttctaggtcttcttgtccttcttgtcgcaggattcttacgccggtgagatgtgaccggtgtggtcatgcttctacggcggagatgaaagatcaagctcatcgtcatcaacatcaccaacactcttctactaccattcctacgtttcttccttaattaacactaatttttgttttattatggcaataattaattgcataaaagttatgtaaagtgagtttaattaggattagagagatcttttaaagtttttctctcttttctccttgttgtaatccagtgtatttaatcaaatctcagatggagttcaaatttc

SEQ ID NO: 104749 - protein, 185 aa, Arabidopsis thaliana; identical to SEQ ID NO: 22151
  peptide (1)..(185): Ceres Seq. ID no. 13615679

SEQ ID NO: 104750 - protein, 165 aa, Arabidopsis thaliana
  peptide (1)..(165): Ceres Seq. ID no. 13615680
MIAAESDMVVILSALLCALICVAGLAAVVRCAWLRRFTAGGDSPSPNKGLKKKALQSLPRSTFTAAESTSGAAAEEGDSTECAICLTDFADGEEIRVLPLCGHSFHVECIDKWLVSRSSCPSCRRILTPVRCDRCGHASTAEMKDQAHRHQHHQHSSTTIPTFLP

SEQ ID NO: 104751 - protein, 158 aa, Arabidopsis thaliana
  peptide (1)..(158): Ceres Seq. ID no. 13615681
MVVILSALLCALICVAGLAAVVRCAWLRRFTAGGDSPSPNKGLKKKALQSLPRSTFTAAESTSGAAAEEGDSTECAICLTDFADGEEIRVLPLCGHSFHVECIDKWLVSRSSCPSCRRILTPVRCDRCGHASTAEMKDQAHRHQHHQHSSTTIPTFLP

SEQ ID NO: 104752 - DNA, 1160 bp, Arabidopsis thaliana
  misc_feature (1)..(1160): Ceres Seq. ID no. 13615682
  misc_feature (1)..(1160): Ortholog of  Ceres SEQ ID NO 14308401 as cited in SEQ ID NO 55082
gtagcgattctctctgcggcgcgtgtaaacggtgacggggctctaatggctaatcttcctcctccgctctccatgaaatctgtcgccctctcaggagcttcttctccttcttcttcctccaacaacgatcggaagctatcatcggcggagcagttaattctcgatctcagcaatcccgaactcagagaaaatgcacttcacgagttgtctaagaagagagagatctttcaagatttggctccgcttttatggcattctgttggtaccattcctgctcttctacaggagattatcgcagtttaccctgccctatctcctccaaccatgactcctgctcaatctaacagggtgtgcaatgcacttgctcttcttcagtgtgttgcttctcatactgatacgagaatgttgttcctaaaagcccatctgccattgtacctgtatgctttcttgaatacatcaagcaaatcaagaccgtttgagtacctgcggctgactagcttgggggttattggtgcacttgttaaggttgatgatactgaagtgatcagattccttcttcaaactgagattgtcccattgtgcctccggacaatggagaatggcagcgagttatcaaagactgttgctactttcattgttcagaaagttttgctggacgatgttgggcttgagtacatgtgcacgacagcggagagattctttgctctgggtcgggttttgggaaatatggttacttcacttgcagaaggaccgtccgctaggctactaaagcacatcatacgctgctatcttcgcttgacagataaccccagagcatgcgatgcacttggaagttgccttccagatcttctgagggatgctactttcagtggttgtctctatgatgacccacctgcaatgcaatggctgcagcaactgctccacaacgttaacgttggcgggagagcacctcaagggttggctcatatgtttgtgaattaaatcgaacccttatagtctgggcagaaactgttattcattggacaaaaaaagttagttggaaacagaattacagatgagaaacagaaacccaaccaaagattttgagtttgatggatatatgtatttggatttcttgaccgtcttatgatgttgcaatcaatataactaaaattccattg

SEQ ID NO: 104753 - protein, 326 aa, Arabidopsis thaliana; identical to SEQ ID NO: 41461
  peptide (1)..(326): Ceres Seq. ID no. 13615683

SEQ ID NO: 104754 - protein, 311 aa, Arabidopsis thaliana; identical to SEQ ID NO: 41462
  peptide (1)..(311): Ceres Seq. ID no. 13615684

SEQ ID NO: 104755 - protein, 302 aa, Arabidopsis thaliana; identical to SEQ ID NO: 41463
  peptide (1)..(302): Ceres Seq. ID no. 13615685

SEQ ID NO: 104756 - DNA, 992 bp, Arabidopsis thaliana
  misc_feature (1)..(992): Ceres Seq. ID no. 13615686
  misc_feature (1)..(992): Ortholog of  Ceres SEQ ID NO 12627215 as cited in SEQ ID NO 60976
  misc_feature (1)..(992): Ortholog of  Ceres SEQ ID NO 12589584 as cited in SEQ ID NO 0
  misc_feature (1)..(992): Ortholog of  Ceres SEQ ID NO 12635657 as cited in SEQ ID NO 0
  misc_feature (1)..(992): Ortholog of  Ceres SEQ ID NO 12635879 as cited in SEQ ID NO 0
  misc_feature (1)..(992): Ortholog of  Ceres SEQ ID NO 13599649 as cited in SEQ ID NO 0
  misc_feature (1)..(992): Ortholog of  Ceres SEQ ID NO 14309404 as cited in SEQ ID NO 0
atcgtcaccttcaccttcacctaccatttttgccaacaaacgcgagcaagagttttgagctccaatggcgaccttgtcgatgactctgtcaaatccgaagtcgctctcagctcctccacgaagactttctccgatcaatacctccgctttcacatctacctctttccgattgcgcaccaaatcttccttcgattcaatctcgttctcgtcttcaactcccttctccgcctcatcgctcctccttcacacgtcttataccaaaagaaaccaccgctgtttctctgttcaatccaatgctgaggtggttactgaaccgcaatcgaaaataacacacaaggtgtatttcgatataagtgttggcaatccagtggggaagttagctgggaggattgttattggattgtatggtgatgatgttccccaaactgtggagaactttcgtgctctatgcacaggtgaaaagggatttggctacaagggttctacattccatcgtgtcatcagagatttcatgattcagggaggagactttgagaagggcaatggaactggaggtaaaagtgtatatggccgtacattcaaggatgagaatttcaagttatcccatgtcggaccaggagttctaagtatggcaaatgctggccctaatacaaatggaagtcagttctttatctgcactattaagacgtcatggttggacggaagacatgtggtgttcgggcaagtaatagaaggaatggaagtggtgaagctgatagaggaacaagagacagacagaggagaccgtcccagaaagaaagtggtgatagcagactgtggtcaacttccaatgtctgaagcttaaaagtaagatcatttaaccaaaatcttgtagacatgagatggagcttgtttttgcattttacaaccctttcttttgtgtaatggatttgtatccccttcttccaaaaatttaagaaagaaatagtattccgctgccgggtgttgaactc

SEQ ID NO: 104757 - protein, 259 aa, Arabidopsis thaliana; identical to SEQ ID NO: 25778
  peptide (1)..(259): Ceres Seq. ID no. 13615687

SEQ ID NO: 104758 - protein, 254 aa, Arabidopsis thaliana; identical to SEQ ID NO: 25779
  peptide (1)..(254): Ceres Seq. ID no. 13615688

SEQ ID NO: 104759 - DNA, 1162 bp, Arabidopsis thaliana
  misc_feature (1)..(1162): Ceres Seq. ID no. 13615699
  misc_feature (1)..(1162): Ortholog of  Ceres SEQ ID NO 12609770 as cited in SEQ ID NO 51477
  misc_feature (1)..(1162): Ortholog of  Ceres SEQ ID NO 15177764 as cited in SEQ ID NO 57561
ccgaaagagagaaatcaatttgaccaatcaaataattgcggtggtgaaaatggctcgaaacgactcgcgatctaggtcgccgtctcaccgccgacggtactctcgctcgcctgtgactcatcgtagcagccgtcgtaccaggcgcgaccgcagccgctcaccctacacatcaaggcataagaagagcagatctcctgcaccaaggcaacaccaaagggatagaagtagttcattgtctccttccgagcatagaattgcgattgaagtgaagaaagaacaggaagacaaggcaagattgcagcatgaggcggagctcaagcgactagaagaagagactgcacagcggattgaggaagcagtaaggaaaaatgtagaggaaaggatgaaaaccgaagaagttaaagaagaaattgaaagacggacaaaggaagcttatgagaagatgtttcttgacgtggaaatacagctgaagaaagaaaaagaagctgctctaaacgaggcaagaagaaaagaagaacaagctaggagagaaagagaagagctggataagatgttagaagaaaatagtaggagggttgaagaatctcaaaggcgagaagcaatggaacttcaacgtaaagaagaggaaaggtatcgagaattggagctcctgcagagacagaaggaggaggctgcaaggagaaagaagctggaagaagaagaagagattagaaactccagcaagctatcaaatggaaacagatcacgatccaagctgcatttcggcatgggtttataattaaagaaacattgatgaaggcaaagtctgaagaaacttttgacttcttgtatcagagaataggaagatacagttgaggagttgactcatccaagtaagcacagacaacattctctagctgacccttcatagagcttgttgcttcactatgttagttaatctttggaaagaagcatctatcagtttggtaaagtttgataatagctctggcgggctttgggctggcgggttgggccggacctgatcaaaagcctgttttaacatgtgaggaataattgtaatttcttttttttgttagtttacttagaaaaagttgcatgttgttaaaaatctgataatatgatttgttttatcgatttttttgttttataataccagaagttt

SEQ ID NO: 104760 - protein, 258 aa, Arabidopsis thaliana; identical to SEQ ID NO: 35738
  peptide (1)..(258): Ceres Seq. ID no. 13615700

SEQ ID NO: 104761 - protein, 242 aa, Arabidopsis thaliana; identical to SEQ ID NO: 35739
  peptide (1)..(242): Ceres Seq. ID no. 13615701

SEQ ID NO: 104762 - protein, 131 aa, Arabidopsis thaliana; identical to SEQ ID NO: 35740
  peptide (1)..(131): Ceres Seq. ID no. 13615702

SEQ ID NO: 104763 - DNA, 2060 bp, Arabidopsis thaliana
  misc_feature (1)..(2060): Ceres Seq. ID no. 13615703
  misc_feature (1)..(2060): Ortholog of  Ceres SEQ ID NO 15177463 as cited in SEQ ID NO 0
aaaagaacaaaatcaactcatacatacacaattgccggtaccctaacatttcgccacaccacaccttttgtctcctttatccaatctctcctccatagttctgaagcttcgagagagaggggccagaaggtcacccagaacagaggttttgcagacaatagaaagcagtaagcaagcatgttaccaaagttcgatccaacaaaccaaaaagcttgtctgtctcttcttgaggatttgaccaccaacgtaaagcagattcaagattccgtattggaagcaatactttcacgtaatgctcaaactgagtatcttagaggtttcctcaacggtcaagtcgataagcagaacttcaagaaaaacgtacccgttgtgacctacgaagatattaggtcttatatcgaccgtatcgctaatggagagccgtctgatctcatctgtgatcgacccatcagtgtactcttgaccagctcgggtacttcaggaggagttccaaagttgattcctttgacaacagaggatttggaacagaggatttcgttttcttctctctatgcacctctactctacaagcacatcgatgggcttagcgaaggaaaatctctcatattttattttgtgacccgagagagcaagactgccaatgggttgatggtcaggactatggttactagttttttgaaaagcattaaacagaccaactcatttctttgggatagcttacaggtaagcccgcatgcgattactacttgtgcagacactactcagagcatgtactgccaattgctttgtgggcttcttgaaagagataatgttgctcgcctcggtgcaccctttgcttcatcattcctcaaagtaatcaagttcttggaagatcattggcctgagttatgctcaaacataaggactggccgtctcagcgactggatcacagacgcgacctgtacttcagggatcggtaagttcctcactgctccaaatccggaactagcaagcctgatcgagcaagaatgcagtaaaacatcatgggaggcaatattgaagagactttggccaaaagcaaaatgcatcgaatccatcattacaggcaccatggcacagtacattccattgctggaattctatagtggtggtcttcctttgacttcatcgttttacggcagctctgaatgtttcatgggtgtcaactttaatcctctgtgtaagcctagtgatgtgtcgtacaccatcattccatgtatggggtacttcgagttcttagaggtcgagaaagaccatcaagaagctggtcatgatcccacagagaaacctgtggttgtcgatcttgtcgatgttaaaatcggccatgattatgaacctgttgtcacaacgttttcaggtctatataggtaccgtgtgggggacgttttaagagcgactggtttctacaacaatgcgccacatttttgtttcgtgggaagacagaaagttgttctgagcatcgacatggacaagacctacgaagacgacctcctcaaggcagtgacaaacgcaaagctcctgcttgagccacatgacctgatgctcatggatttcactagccgtgtagattcgtcctcgtttccaggacactatgtaatctattgggaactcgggagcaaagtcaaggacgccaagtttgaacctaaccgcgatgttatggaagaatgctgcttcactgttgaggagtctctcgatgctgtatacagaaaaggacgaaagaatgataagaacattggaccacttgagattaaggttgttaagcctggcgcttttgacgagctcatgaacttctttctgtctagaggctcttctgtgagtcagtacaagacaccgaggtcggtgacgaatgaagaagccttgaagatattggaggccaacgttatttccgagtttcttagccggaaaattccatcgtgggagttacatgagttacactccggcagataaacccgcagtcataatatctgtgagatttgagggcaggggaggagaacaatgtttacgacttttcttaatttaaacctctctgtttttttccagcc

SEQ ID NO: 104764 - protein, 595 aa, Arabidopsis thaliana
  peptide (1)..(595): Ceres Seq. ID no. 13615704
MLPKFDPTNQKACLSLLEDLTTNVKQIQDSVLEAILSRNAQTEYLRGFLNGQVDKQNFKKNVPVVTYEDIRSYIDRIANGEPSDLICDRPISVLLTSSGTSGGVPKLIPLTTEDLEQRISFSSLYAPLLYKHIDGLSEGKSLIFYFVTRESKTANGLMVRTMVTSFLKSIKQTNSFLWDSLQVSPHAITTCADTTQSMYCQLLCGLLERDNVARLGAPFASSFLKVIKFLEDHWPELCSNIRTGRLSDWITDATCTSGIGKFLTAPNPELASLIEQECSKTSWEAILKRLWPKAKCIESIITGTMAQYIPLLEFYSGGLPLTSSFYGSSECFMGVNFNPLCKPSDVSYTIIPCMGYFEFLEVEKDHQEAGHDPTEKPVVVDLVDVKIGHDYEPVVTTFSGLYRYRVGDVLRATGFYNNAPHFCFVGRQKVVLSIDMDKTYEDDLLKAVTNAKLLLEPHDLMLMDFTSRVDSSSFPGHYVIYWELGSKVKDAKFEPNRDVMEECCFTVEESLDAVYRKGRKNDKNIGPLEIKVVKPGAFDELMNFFLSRGSSVSQYKTPRSVTNEEALKILEANVISEFLSRKIPSWELHELHSGR

SEQ ID NO: 104765 - protein, 438 aa, Arabidopsis thaliana
  peptide (1)..(438): Ceres Seq. ID no. 13615705
MVRTMVTSFLKSIKQTNSFLWDSLQVSPHAITTCADTTQSMYCQLLCGLLERDNVARLGAPFASSFLKVIKFLEDHWPELCSNIRTGRLSDWITDATCTSGIGKFLTAPNPELASLIEQECSKTSWEAILKRLWPKAKCIESIITGTMAQYIPLLEFYSGGLPLTSSFYGSSECFMGVNFNPLCKPSDVSYTIIPCMGYFEFLEVEKDHQEAGHDPTEKPVVVDLVDVKIGHDYEPVVTTFSGLYRYRVGDVLRATGFYNNAPHFCFVGRQKVVLSIDMDKTYEDDLLKAVTNAKLLLEPHDLMLMDFTSRVDSSSFPGHYVIYWELGSKVKDAKFEPNRDVMEECCFTVEESLDAVYRKGRKNDKNIGPLEIKVVKPGAFDELMNFFLSRGSSVSQYKTPRSVTNEEALKILEANVISEFLSRKIPSWELHELHSGR

SEQ ID NO: 104766 - protein, 434 aa, Arabidopsis thaliana
  peptide (1)..(434): Ceres Seq. ID no. 13615706
MVTSFLKSIKQTNSFLWDSLQVSPHAITTCADTTQSMYCQLLCGLLERDNVARLGAPFASSFLKVIKFLEDHWPELCSNIRTGRLSDWITDATCTSGIGKFLTAPNPELASLIEQECSKTSWEAILKRLWPKAKCIESIITGTMAQYIPLLEFYSGGLPLTSSFYGSSECFMGVNFNPLCKPSDVSYTIIPCMGYFEFLEVEKDHQEAGHDPTEKPVVVDLVDVKIGHDYEPVVTTFSGLYRYRVGDVLRATGFYNNAPHFCFVGRQKVVLSIDMDKTYEDDLLKAVTNAKLLLEPHDLMLMDFTSRVDSSSFPGHYVIYWELGSKVKDAKFEPNRDVMEECCFTVEESLDAVYRKGRKNDKNIGPLEIKVVKPGAFDELMNFFLSRGSSVSQYKTPRSVTNEEALKILEANVISEFLSRKIPSWELHELHSGR

SEQ ID NO: 104767 - DNA, 1092 bp, Arabidopsis thaliana
  misc_feature (1)..(1092): Ceres Seq. ID no. 13615707
  misc_feature (1)..(1092): Ortholog of  Ceres SEQ ID NO 12609965 as cited in SEQ ID NO 55883
  misc_feature (1)..(1092): Ortholog of  Ceres SEQ ID NO 13596393 as cited in SEQ ID NO 62144
  misc_feature (1)..(1092): Ortholog of  Ceres SEQ ID NO 13591076 as cited in SEQ ID NO 63757
  misc_feature (1)..(1092): Ortholog of  Ceres SEQ ID NO 13599575 as cited in SEQ ID NO 0
actagtaagtagtctcttatgttttgttttgcatcggccgtcccaaacctgaggatttctctgttcagctagagcgaaaccctagattcacatttgagctgagagatgctgcgtgtagcagggaggaggcttttctctgtctcgcagagatcttcgactgcgacctccttcgtcgtctcccgtgaccataccctttccgatggtggcggcgactcctcttcagctcccagatccctcccctctgcagatctctcatcttaccaccgtagccttatcagaggcttctcttctcaagtccttgctcaaggaaatgagataggttttggttcagaagtcccagccacagtcgaagctgtcaaaacgcctaactcaaagattgtctatgatgaccataaccatgagcgttacccacctggtgaccctagcaagcgtgcattcgcctattttgtcttgtcgggtgggaggtttgtttatgcctctgtcctccgcctgcttgttttgaagcttattgtgagcatgtctgcaagtaaagatgtccttgcccttgcatcccttgaggttgacctagggagcatagaaccaggaactaccgtgacagtcaagtggcgtggaaagcccgtcttcatcaggcgaagaacagaagatgacatcaagctggccaatagtgtggatgttggatccctgagggacccacaagaagactcggttagggtcaagaatccagaatggttagtggttgttggagtgtgcactcatttggggtgcatccccttgcctaatgctggtgattatggtggttggttttgtccgtgtcacggatcacattacgatatatctggaagaattaggaaaggtcctgcaccatacaacctggaagtaccaacctacagcttcctggaagagaataagttactcatcggttgattaataaaagcacaacagtcaagagtctggatctgaatgatgatcttcacttgttctttttttcttttaattaatattttccggcatgttagagcaagattgacttgtttttgctgaataatacaaacttgtgatttttgtttgaagtatactcaatcttcgtttatc

SEQ ID NO: 104768 - protein, 272 aa, Arabidopsis thaliana; identical to SEQ ID NO: 26036
  peptide (1)..(272): Ceres Seq. ID no. 13615708

SEQ ID NO: 104769 - DNA, 1298 bp, Arabidopsis thaliana
  misc_feature (1)..(1298): Ceres Seq. ID no. 13615709
  misc_feature (1)..(1298): Ortholog of  Ceres SEQ ID NO 12609965 as cited in SEQ ID NO 55883
  misc_feature (1)..(1298): Ortholog of  Ceres SEQ ID NO 13596393 as cited in SEQ ID NO 62144
  misc_feature (1)..(1298): Ortholog of  Ceres SEQ ID NO 13591076 as cited in SEQ ID NO 63757
  misc_feature (1)..(1298): Ortholog of  Ceres SEQ ID NO 13599575 as cited in SEQ ID NO 0
ctcgaagactattaaaggaatatccgcaaagaagaaaaaaaaacatttttttggtaaaggactaatctttttgtttgcatcggccatctctaaccttacgattgtgtgttcttgctttgagcgaaaccctagaatcggtcttaacccatttgagcagagatgctgcgagtagcaggaaggaggcttttttctgtttcgcagagatcatcgacggcgacctccttcgtcctttcccgtgaccataccctttccgatggaggcaactcctcttccgcttctagatctgtcccctctgcagatctctcatctttcaattcttaccaccggagcgttataagaggttttgcttctcaagtcattactcagggaaatgagataggttttggttcggaagtcccagccacagtcgaagctgtcaaaacacctaactcaaagattgtctatgacgaccataaccatgagcgttacccacctggtgaccctagcaagcgggcattcgcctattttgtcttgtcgggtggaaggtttgtttatgcctctgttctccgcctgcttgttctgaagcttattgtgagcatgtctgcaagtaaagatgtccttgcccttgcatccctcgaggttgacctagggagcatagaaccaggaactaccgtgacagtcaagtggcgtggaaagcccgtcttcatcaggcgaagaacagaagatgacatcaagctggccaatagtgtggatgttggatccctgagggacccacaagaagactcggttagagtcaagaatccagaatggttgatcgtggttggagtatgcactcatttggggtgcatccccttgcctaatgctggtgattatggtggttggttttgtccgtgtcacggatcacattacgatatatctggaagaattaggaaaggtcctgcaccatacaacctggaagtaccgacctacagcttcttggaagagaataaattactcattggttaatgaataaagcacaacagtccgagtgtcatggtctggatgatcttaaatctgtttttgtttttatattttccggcattttagcgtgcaagttcgctttcctcacactttgggctcagcaaaaattggcttgttttgctgaataatacaaacttgtcattgtatgacttagtatctgtctcatctggtgaaaatacattgttcatacttcatagtctctgtttattatttgaaaagagttttgaatagtatcatccctatttttcttatgtttgtaattttgtaacatatcgtttgtaagagagtttcctttcctt

SEQ ID NO: 104770 - protein, 274 aa, Arabidopsis thaliana; identical to SEQ ID NO: 38962
  peptide (1)..(274): Ceres Seq. ID no. 13615710

SEQ ID NO: 104771 - DNA, 1251 bp, Arabidopsis thaliana
  misc_feature (1)..(1251): Ceres Seq. ID no. 13615715
  misc_feature (1)..(1251): Ortholog of  Ceres SEQ ID NO 13595351 as cited in SEQ ID NO 55934
  misc_feature (1)..(1251): Ortholog of  Ceres SEQ ID NO 13639645 as cited in SEQ ID NO 57488
ataacaaaccaaacactactcttttctaaccaagagaaaggttttatatatgcagaatgaagtttgagagagcaaggccattcatagccattgttttcatacaatgtttgtacgctttgatgtctatagtagcaaaattagctttgaacaagggaatgagccctcacgtcttagttgcttaccgaatggcagttgcttccgctctcattacgcctttcgctctcatcctcgagaggaacacaagaccaaagttgaccttcaagattttgttacaaatagccatccttagtttatttgagcctgtggtcgaacaaaacctgtactactcagggatgaaacttaccactgccacattcacatcagctttgtgcaatgctcttcctgctatgacattcataatggcctgcgttttcaagctcgagaaggtgacaatcgaaagacgccacagccaggcaaagctggtgggaaccatggtggctattgggggagcaatgctcatgacattcgtgaaagggaatgtcattgagctgccttggacaagcaactcaaggggtcttaatgggcacacacacgctatgaggattccaaagcaggcggatatagcaagaggatcaattatgcttgtagcaagctgcttcagttggtcatgttacatcattttacaggcaaagattctggctcaatataaagctgagctctcgctaacagctcttatgtgcattatggggatgttggaggctactgttatgggattgatatgggaaaggaaaaacatgtcggtctggaaaatcaacccggacgtgacgcttttagcttcaatctacggaggactagtctcagggttagcatactatgttattggatgggcgtcaaaggagagagggcctgtgtttgtgagcgcgtttaacccgctcagcatggttctcgttgctattctgagcacctttgttttcttggaaaaagtgtacgtaggaagggttattgggtcagttgtcattgtcattgggatatatttggtattatggggtaaaagcaaggacaaaggagggatgcttcaaccaaacgctggatgcgcagagactgtggtaaagattgaccaacagaaggttccgacgcctgataataaccaagtagtatctatcagttaccatttaatgatcccgaaggcagcagctcggtctcaagagtgagtctaagatgccgattctgttccaggatctctatatatcgcaaaaaaacatttttgatagt

SEQ ID NO: 104772 - protein, 377 aa, Arabidopsis thaliana; identical to SEQ ID NO: 39551
  peptide (1)..(377): Ceres Seq. ID no. 13615716

SEQ ID NO: 104773 - protein, 356 aa, Arabidopsis thaliana; identical to SEQ ID NO: 39552
  peptide (1)..(356): Ceres Seq. ID no. 13615717

SEQ ID NO: 104774 - protein, 344 aa, Arabidopsis thaliana; identical to SEQ ID NO: 39553
  peptide (1)..(344): Ceres Seq. ID no. 13615718

SEQ ID NO: 104775 - DNA, 1270 bp, Arabidopsis thaliana
  misc_feature (1)..(1270): Ceres Seq. ID no. 13615719
  misc_feature (1)..(1270): Ortholog of  Ceres SEQ ID NO 13495070 as cited in SEQ ID NO 53216
  misc_feature (1)..(1270): Ortholog of  Ceres SEQ ID NO 13656228 as cited in SEQ ID NO 65648
  misc_feature (1)..(1270): Ortholog of  Ceres SEQ ID NO 15176717 as cited in SEQ ID NO 0
  misc_feature (1)..(1270): Ortholog of  Ceres SEQ ID NO 15179618 as cited in SEQ ID NO 0
atgtcgcgcctgttcttggtagtctcctccaatgtgtgttccgattccgatttctcttttctccttgatccttattctgattcagtctcactttttgcagatctcgtccgttgttgcataagtgctatggatctcgcgtcgaatcttggtgggaagatcgataaatccgatgttctcaccgccgtcgaaaagtatgagcaatatcatgtcttccatggaggaaacgaggaagagagaaaagccaattatactgacatggttaataagtactatgaccttgctactagcttttatgagtacggatggggagaatccttccattttgcacaaagatggaaaggagaatcgcttcgagagagtattaagcgacacgagcactttcttgctcttcagcttggcatccaaccaggacaaaaggtactggatgtaggatgtggaattggtggaccgttgagggaaattgcaagattcagcaattcagttgttaccgggctcaacaataacgaataccagatcaccagaggcaaggaactaaaccgacttgcaggtgtcgacaagacatgtaactttgtcaaggctgacttcatgaagatgccattcccggaaaacagtttcgatgcagtttatgcaatagaagcaacttgccatgcacctgatgcgtatggatgctacaaagagatctacagagtgctaaagcctgggcaatgttttgctgcctatgagtggtgtatgactgatgcatttgaccctgataacgccgaacatcagaaaataaagggagagatagagattggagatggtcttcctgacattaggctgactacaaaatgcctcgaagctctgaagcaggccggttttgaagtgatatgggaaaaggatctggccaaggactcgccggtcccatggtacttacctcttgacaaaaatcatttctcactcagtagcttccgccttacagctgttggacgattcataaccaaaaacatggtcaagatccttgaatacataagacttgcacctcaaggaagccaaagggtctcaaatttcctggagcaggctgcggaaggattagtcgacggtggaaggagagagattttcacgccaatgtatttcttcttggcccggaagccagagtaagcggatgagagatggcgatggtcatcgtaggtcgaatgaagtgacaaaatttctcaatttgcagtcttattttctatgtttatcggatttgttgcagagtttcttattcaccaactatattttggatgttcgt

SEQ ID NO: 104776 - protein, 378 aa, Arabidopsis thaliana
  peptide (1)..(378): Ceres Seq. ID no. 13615720
MSRLFLVVSSNVCSDSDFSFLLDPYSDSVSLFADLVRCCISAMDLASNLGGKIDKSDVLTAVEKYEQYHVFHGGNEEERKANYTDMVNKYYDLATSFYEYGWGESFHFAQRWKGESLRESIKRHEHFLALQLGIQPGQKVLDVGCGIGGPLREIARFSNSVVTGLNNNEYQITRGKELNRLAGVDKTCNFVKADFMKMPFPENSFDAVYAIEATCHAPDAYGCYKEIYRVLKPGQCFAAYEWCMTDAFDPDNAEHQKIKGEIEIGDGLPDIRLTTKCLEALKQAGFEVIWEKDLAKDSPVPWYLPLDKNHFSLSSFRLTAVGRFITKNMVKILEYIRLAPQGSQRVSNFLEQAAEGLVDGGRREIFTPMYFFLARKPE

SEQ ID NO: 104777 - protein, 336 aa, Arabidopsis thaliana; identical to SEQ ID NO: 26651
  peptide (1)..(336): Ceres Seq. ID no. 13615721

SEQ ID NO: 104778 - protein, 293 aa, Arabidopsis thaliana; identical to SEQ ID NO: 26652
  peptide (1)..(293): Ceres Seq. ID no. 13615722

SEQ ID NO: 104779 - DNA, 1656 bp, Arabidopsis thaliana
  misc_feature (1)..(1656): Ceres Seq. ID no. 13615723
  misc_feature (1)..(1656): Ortholog of  Ceres SEQ ID NO 15169511 as cited in SEQ ID NO 65927
aatttctcaataacgctctcagagagaccatttgatgaagcttctcgcttctggaatttgaaaaggaacttgttatggagataatctcactgaacgttgtgccccagtgctctgtggttacttggagtagtaaattagcaacgaaaagattggtcccaaatcggtcaagtttgttattctcaggggtcaaaaaatccagacttgtgattcgaagtggaaattccgatggttatgttgttggtgagaatgatgacttgggtcgtatagccagaagaggagaatcaacgtcaaaggttttgattcctggtttgcctgatgaatcaaatggtgaaattgctgctcgaatcagtcattctcactgcgagtggaagcccaagcttagagtacattatgagaaagccggttgtgacaatctcgatgctcctgcggtgttgtttcttcctggctttggcgttggttcatttcactatgagaagcagcttaccgatttgggaagggattatcgagtatgggctattgattttcttggacagggtttatctctccctactgaagatcctactaccatgactgaagaaaccagttcctcggaagataaggaaccattttggggatttggtgacaaaactgaaccgtgggctgatcaacttgtattctctctggatctctggagggatcaagttcagtattttgtagaagaggttatcggtgagcctgtgtacattgcagggaactcacttggagggtatgtagctctctactttgcagcaacccatcctcacctggttaagggtgttaccttgcttaatgcaacacctttctggggtttcttccctaatccagtaagatccccaaagctagcacgtctctttccatggcccggagcattccctctgccggaaagagtgaaaaaaatcacagaattggtgtggcaaaagataagtgatcctgaaagcatagctgagatacttaaacaggtctacacagaccattctatcaatgtggataaagtattctcacgtattgtggaggtcacacagcatccggctgctgcagcatcgtttgcttcaatcatgcttgctcctggtggagagctatctttctccgaagctttatctaggtgtaaggaaaacaatgttcagatatgtctcatgtatggaagagaagatccatgggtgagaccgttatggggaaagaagataaagaaggaaatccccaacgctccatactacgagatcagcccagcgggtcactgcccacacgatgaagtccctgaggtggtgaactatctgatgcgcgggtggatcaagcacctggagtctggtggttttgaagcgctcccgcttttggaggacactgaagaagattgggaggagtccaggattggtagagaaattgagttcccgagagatggttggaaaaaagcagtgaatctgtggttatatgggtcaaactatacgtactggagaggagttagagaatctttcagatccagttttataagggtgtttggagggaagtctgcatagaagaagcatggaacagtcgtctagtgtaaattaattgtaatctatgttgcatccgatgctagctatataatgttgtctgtagaatcaagtttctaaaatgttcaaaaggaaaagttagaaaaatatc

SEQ ID NO: 104780 - protein, 484 aa, Arabidopsis thaliana; identical to SEQ ID NO: 77954
  peptide (1)..(484): Ceres Seq. ID no. 13615724

SEQ ID NO: 104781 - protein, 320 aa, Arabidopsis thaliana; identical to SEQ ID NO: 77955
  peptide (1)..(320): Ceres Seq. ID no. 13615725

SEQ ID NO: 104782 - DNA, 1534 bp, Arabidopsis thaliana
  misc_feature (1)..(1534): Ceres Seq. ID no. 13615726
  misc_feature (1)..(1534): Ortholog of  Ceres SEQ ID NO 14306565 as cited in SEQ ID NO 53000
  misc_feature (1)..(1534): Ortholog of  Ceres SEQ ID NO 14312192 as cited in SEQ ID NO 59249
ataataattatatctttaaaaaaaaaacagaaaaattctttgctttgcaacaaaggcagacagacaaaaggctaattcggagctctcctccacatcttcttccaaaacacaaacaaacccccaaatttccagaaaaatcagatcattctttcatcaatctcgtcttctttaatcttaggtgagaattcatcagctcaaaaacgcagcacccgatcgttttacgactcaaatcagagaagctgattcttttccaatcattccaatttccatttcttccttgggaggtgatcgacgagttttacaccaaattagccgtcgaaaggggtgcttctttgatctaatttcgatggcgggattagagaaaaacgctgatttctcagggaagacgacgaaatcggctacaacgacgtcgttcttcaacaggtcgcttacaattcacggaagaacagtggtggattcgggccccaaatcccacaatctcaatccttctctcaatcgtaccacctccattaccaaattctacacccccgtagaatcgatgggaacttctcttaaaggcaaagtcaaaaacctttgtagattattcgagacttccaaacccgttaaacctgccttagctgagattcctcagaagcagaaatccggtaaatcccttttacccgaatcgcggatatcgcctttttcgagcttaaacaactcggtcatccgtcttcccgggacagaggacaggattgtggtgtattttactagcttgagagggattagacggacgtatgaggattgctatgctgtcagaatgatatttagagggtttcgggtttggatcgatgagcgcgacgtctccatggatatcgcttataggaaagagttgcagattgcaatgggagagaagtctgtgtctttgcctcaagttttcattatgggcaagtatgttggtggtgctgatgtgatcaagagtttgtttgagattggtgagcttgctaagattcttaaagagtttccaatgagacaaccagggtttgtttgccattgctgtggggacattcgatttgttccgtgttccaattgtagtggcagcaagaaactgtttgatgaggatgaagatagggtcaagagatgtcctgaatgcaatgagaatggattgatacgttgtcctgattgctcttcttgagatatatcatcaatgaacctgaaaaaaccattaaaaaaaagaagaaaaaagaggtatttatttctcttttgatgtttccattgttgtgtagaacagtgaatgatgctgccacaagtatccgaaaatctcttttggatcagcagcatttcactttgggttttttaaggtttgcgatcaacggtaatgggaatgccggtgatcgtggatttagtttatgtatgtgtttgctactaagggctaaatgtaattgtgtaatcaaaatgtctgaaacgggtagtaagcattttgactcttgtgtgtcaatgttgtgaaagacaactgtgttcttatgctatatatttgattgtaaatatttcgtgtgtt

SEQ ID NO: 104783 - protein, 274 aa, Arabidopsis thaliana; identical to SEQ ID NO: 40766
  peptide (1)..(274): Ceres Seq. ID no. 13615727

SEQ ID NO: 104784 - protein, 210 aa, Arabidopsis thaliana; identical to SEQ ID NO: 40767
  peptide (1)..(210): Ceres Seq. ID no. 13615728

SEQ ID NO: 104785 - DNA, 1535 bp, Arabidopsis thaliana
  misc_feature (1)..(1535): Ceres Seq. ID no. 13615742
  misc_feature (1)..(1535): Ortholog of  Ceres SEQ ID NO 14308437 as cited in SEQ ID NO 55577
aaacaaacagtttagcaaaagattttgagagggagaaaaagggcgatcgattagggtttttgtgttttcgtcttagtatcgaagatgatcggagctgtgaactcggtggaggctgtgataacgtcaatccaaggtttatcggggagtccagaggatttatctgcacttcacgatcttttgagaggagctcaagactcgctccgagccgaaccaggtgttaatttctctactcttgaccagctcgacgcctcgaagcactctctcggttacctgtatttccttgaggttcttacctgtggtccagtgtcgaaggagaaagctgcttatgagataccgataattgcacggttcatcaattcttgtgatgctgggcagattcgtttggcgagctataaatttgtatctctttgtaagatattgaaagaccatgttatagcactgggagatccgttgcgaggagtagggccactgttaaacgctgttcagaagcttcaggtctcctccaagcgtttgactgcattgcatccagatgttcttcaactctgtttgcaggcgaaatcgtacaaatctggtttctccattcttagtgatgatatcgtggagattgaccagccaagagacttttttctctatagctattatgggggaatgatttgtattggactgaagagatttcagaaagcattagagcttctttacaatgttgtgactgctcctatgcatcaagtcaatgccatagctcttgaggcgtacaaaaagtacatattggtgtctctcattcacaatgggcagtttactaacactctccccaagtgtgcttctacagcagcacagaggagcttcaagaactataccggaccttacattgaactgggtaattgttacaacgacgggaagattggtgaactagaggcattggttgtggccaggaatgcagaatttgaagaggataagaaccttggattagttaagcaagcagtgtcatccctttacaagcgtaacattctgagattgacacagaagtacttgaccctgtcgcttcaagatatagccaacatggtccaacttggtaatgctaaggaggcggaaatgcatgtgcttcagatgatccaggatggtcagatacatgcccttatcaaccagaaagacgggatggtcagattcttggaggaccctgagcagtacaaatctagtgagatgattgagatcatggattctgttatacaaaggactattggtctgtcgaagaatctcttagccatggatgagagcttatcatgtgaccctttatacttgggaaaggtaggaagggaaagacaaaggtacgactttggagacgatttcgatactgttcctcagaagttctccatgtaaacagcgaaagtcgagaagcaccaacaaaacttggctcaaagacaaccgtagtgtgaatcttgagaatgttacttttgatttctttgttcatttttgttggtttaaaaagtttcatatttttgtcacaattgccaacaagtagagaagaccattatggaccc

SEQ ID NO: 104786 - protein, 429 aa, Arabidopsis thaliana; identical to SEQ ID NO: 41473
  peptide (1)..(429): Ceres Seq. ID no. 13615743

SEQ ID NO: 104787 - protein, 241 aa, Arabidopsis thaliana; identical to SEQ ID NO: 41474
  peptide (1)..(241): Ceres Seq. ID no. 13615744

SEQ ID NO: 104788 - protein, 218 aa, Arabidopsis thaliana; identical to SEQ ID NO: 41475
  peptide (1)..(218): Ceres Seq. ID no. 13615745

SEQ ID NO: 104789 - DNA, 1888 bp, Arabidopsis thaliana
  misc_feature (1)..(1888): Ceres Seq. ID no. 13615746
  misc_feature (1)..(1888): Ortholog of  Ceres SEQ ID NO 15168464 as cited in SEQ ID NO 59187
  misc_feature (1)..(1888): Ortholog of  Ceres SEQ ID NO 15171618 as cited in SEQ ID NO 59968
accaccgtgataaaacagtcctctccatttctctactcaacatccatccgaaccaactcgaagatattatttttcatggattgagcaaagaagaggacgataatttcgaaaatatcgcgatacaatggacaagttctcgtacaattcgtatccagattcagctgaatcgtcgccaagatctcgcgatgtcgaatttgaaaatccgtcgccatgggaggaccagcagcagcagaactacaaggtgaagctcatgtgcagctatggcggcaagatccagcctcgtccacacgataaccagcttacttatgtaaacggcgataccaaaatcatgtcggtcgatcgtggtatcagatttccggctttagtatcgaagctctccgccgtctgcagcggtggtggtgatggaggagaaatctcgttcaagtatcagcttccaggtgaagatctagatgcgttgatttcggtgactaatgatgaggatctggagcacatgatgcatgagtacgatcggttgcttcgtttgtctactaaaccagctaggatgcgtttgtttctcttcccgtcttctcccatttccggcggatttggctccgaaggttcgactaaatcggatcgggatacgcttaatccaatccctagccgacctgaatcggagaaatctgtaaccgctcctccgaataatgctgatttcttgtttggatcggagaaagtagctccaattccgccgtcgccagtgaaggttcctcaaccggtaccggaaccagtggtgcttgaaccgccgcagatgttcgtagatcaacggatgttacaaccggaacacggcgtaaatccggcggagattcaaagacaaatccaggaatttcagatgattcaaatcagagaccaagagcaacaaatgcttcatcagaatcagctacatcaacaacaacaacaacaagaggctatacatcaaaatcagcttcatcaccaacaagaggttatacatcagaatcagctgcttcaacaagaggctatacatcagaatcagatgcttcaacaacaacaacaacaagaggctatgtacagaagaaaaaccgaagacgaagccggaagatacttccctcccacatacactcaaaatccggcgccggtgacgaatcaacaacctccggttggctactggcaaggaaacaccaacaacagtaatattcaggggaatatctacacaacaacgtcacagaatctaccggagcaacaacaacaacaacaacaagtatacatgattccagctcaatctcaagctccagggacattataccaaagcgtcatgagaccaacggtacaaggaaaccaaggttattacccatcacctgttcagcgacttcatcatcctgatgcatacatggaacagcagaaccagccaggttacaacgtggttcaaccacagccaacgttttcaggtggtccacaagttatgactagtgttggtccgcaagttatgactagtgtcggtcctccaatggggttacaggaaccttattcacagatggggaagcctgtgtactatacggtggctggagaaggcatgatggttcaaccgccaccagcccagcctcagcagcagcagcagcagtaccagggaatgggtcaaccggttagtggcatgaccgatctcagaaccggaccggatgggaaagtggcggttaacatggctgcaccacaagtttcagattcggtgtgagtgtgagattgagttaacattgaggttaatgttatgattatccatttctttaaactttatgatatatgtgtaaaagtgtttttttagatcaaactaggaatctggatttctgatgaatcaattgaagcacttttgatgtttttattttattttattttggtaaacttc

SEQ ID NO: 104790 - protein, 531 aa, Arabidopsis thaliana
  peptide (1)..(531): Ceres Seq. ID no. 13615747
MDKFSYNSYPDSAESSPRSRDVEFENPSPWEDQQQQNYKVKLMCSYGGKIQPRPHDNQLTYVNGDTKIMSVDRGIRFPALVSKLSAVCSGGGDGGEISFKYQLPGEDLDALISVTNDEDLEHMMHEYDRLLRLSTKPARMRLFLFPSSPISGGFGSEGSTKSDRDTLNPIPSRPESEKSVTAPPNNADFLFGSEKVAPIPPSPVKVPQPVPEPVVLEPPQMFVDQRMLQPEHGVNPAEIQRQIQEFQMIQIRDQEQQMLHQNQLHQQQQQQEAIHQNQLHHQQEVIHQNQLLQQEAIHQNQMLQQQQQQEAMYRRKTEDEAGRYFPPTYTQNPAPVTNQQPPVGYWQGNTNNSNIQGNIYTTTSQNLPEQQQQQQQVYMIPAQSQAPGTLYQSVMRPTVQGNQGYYPSPVQRLHHPDAYMEQQNQPGYNVVQPQPTFSGGPQVMTSVGPQVMTSVGPPMGLQEPYSQMGKPVYYTVAGEGMMVQPPPAQPQQQQQQYQGMGQPVSGMTDLRTGPDGKVAVNMAAPQVSDSV

SEQ ID NO: 104791 - protein, 489 aa, Arabidopsis thaliana
  peptide (1)..(489): Ceres Seq. ID no. 13615748
MCSYGGKIQPRPHDNQLTYVNGDTKIMSVDRGIRFPALVSKLSAVCSGGGDGGEISFKYQLPGEDLDALISVTNDEDLEHMMHEYDRLLRLSTKPARMRLFLFPSSPISGGFGSEGSTKSDRDTLNPIPSRPESEKSVTAPPNNADFLFGSEKVAPIPPSPVKVPQPVPEPVVLEPPQMFVDQRMLQPEHGVNPAEIQRQIQEFQMIQIRDQEQQMLHQNQLHQQQQQQEAIHQNQLHHQQEVIHQNQLLQQEAIHQNQMLQQQQQQEAMYRRKTEDEAGRYFPPTYTQNPAPVTNQQPPVGYWQGNTNNSNIQGNIYTTTSQNLPEQQQQQQQVYMIPAQSQAPGTLYQSVMRPTVQGNQGYYPSPVQRLHHPDAYMEQQNQPGYNVVQPQPTFSGGPQVMTSVGPQVMTSVGPPMGLQEPYSQMGKPVYYTVAGEGMMVQPPPAQPQQQQQQYQGMGQPVSGMTDLRTGPDGKVAVNMAAPQVSDSV

SEQ ID NO: 104792 - protein, 463 aa, Arabidopsis thaliana
  peptide (1)..(463): Ceres Seq. ID no. 13615749
MSVDRGIRFPALVSKLSAVCSGGGDGGEISFKYQLPGEDLDALISVTNDEDLEHMMHEYDRLLRLSTKPARMRLFLFPSSPISGGFGSEGSTKSDRDTLNPIPSRPESEKSVTAPPNNADFLFGSEKVAPIPPSPVKVPQPVPEPVVLEPPQMFVDQRMLQPEHGVNPAEIQRQIQEFQMIQIRDQEQQMLHQNQLHQQQQQQEAIHQNQLHHQQEVIHQNQLLQQEAIHQNQMLQQQQQQEAMYRRKTEDEAGRYFPPTYTQNPAPVTNQQPPVGYWQGNTNNSNIQGNIYTTTSQNLPEQQQQQQQVYMIPAQSQAPGTLYQSVMRPTVQGNQGYYPSPVQRLHHPDAYMEQQNQPGYNVVQPQPTFSGGPQVMTSVGPQVMTSVGPPMGLQEPYSQMGKPVYYTVAGEGMMVQPPPAQPQQQQQQYQGMGQPVSGMTDLRTGPDGKVAVNMAAPQVSDSV

SEQ ID NO: 104793 - DNA, 1516 bp, Arabidopsis thaliana
  misc_feature (1)..(1516): Ceres Seq. ID no. 13615750
  misc_feature (1)..(1516): Ortholog of  Ceres SEQ ID NO 14307404 as cited in SEQ ID NO 54231
  misc_feature (1)..(1516): Ortholog of  Ceres SEQ ID NO 14315052 as cited in SEQ ID NO 56951
aatcttaacgatttagatactcagtgattcggcttggatcatctttgccaatcatcatctccctctatatatcatcatttaatggcttttggttcgtctctgtgaaaaattctgacggcacaatcagaaattctcagtcgcgtttccgttgttgatgcgttttggggactaattggtagtacactttaagcttattagtcagaacaaatatggatgtgactggcactgtgactgtgagagatgcatttgatcgagtttctaaaaaacagaagctgtatcactcagttactcaagatgtcattgatctagtttgtgatggaatccaagatacattgactcgaatccaattaggtaacgacgatggagtagaaccggaatcggttcttaccgagttgagacgcaagcttgatgctcttttaccgattatccagcttcagaaatcacataaggaaactaaatggagtcttagtaagttggtgaaattgcttgaggtttcttaccatcctgatatatctctagcctgctttagcgttgatttcgatatcaacttagtgaataagatacttatccaccattgttaccgagaagggttgttcgacgttggtgattgtctggttaaggaggctggaagagaggaagaaactgaggttagatctcagttcttagagttccaccagatagtggactcattgaagctcagaaacattgagcctgcaatgagatggatctttgcgaaccgcggaaagctgaagcaaaagagttcaaagctggagtttaagctcttaagtttgaagtactgtgatatattaagagaaggaaagagtgatgatgctttggagtatgcaagaacccattttacgcaatatccactccattttaaggagatacaaaagcttatcacttgtttattatggattggaaactttgagaaaagtccttatgcagagatagtttctccatcatgttgggacaaggtaaccaaagagctaatcatggaatatcaccatcttctcgatcagccaattaactccccgttgaaagtcgctttatccgcgggttatgagagcttaccgtcactgttaaagctggttcatctaatggcattgacgaaacaagaatggcaagcaatgaaacagcttccggttcctctggagttagggaatgagtataagttccactcggcttttgtttgtcccgtgagtagagatcaaagcagcgaagaaaacccgccgatgcagttgccttgtggtcatgttattagcaagcagtcaatgatgagactcagcaagaactgcgctttccgcacattcaaatgcccttattgtcctgcagagactttagcttcagcatgcaggcaattatacttttgaaggatttggtaatttagttaatttgattgtttcacctcaataaatcgatgtgaacaaagcatttcatttgttctttcatcatttaaaaactcttgtttactagatcttgatttgatcttgttctctaatatgttgcatttagttgt

SEQ ID NO: 104794 - protein, 386 aa, Arabidopsis thaliana; identical to SEQ ID NO: 22450
  peptide (1)..(386): Ceres Seq. ID no. 13615751

SEQ ID NO: 104795 - protein, 217 aa, Arabidopsis thaliana; identical to SEQ ID NO: 22451
  peptide (1)..(217): Ceres Seq. ID no. 13615752

SEQ ID NO: 104796 - DNA, 1156 bp, Arabidopsis thaliana
  misc_feature (1)..(1156): Ceres Seq. ID no. 13615753
  misc_feature (1)..(1156): Ortholog of  Ceres SEQ ID NO 12616093 as cited in SEQ ID NO 63331
tttttgtgttctgtctttcttggtggtgtgataaagaataaagagagccagtcgagggtaaaacgaaaggccaccattttcaatctttccacaataatggcggctactagagtgttaactgcagcgacggccgtgacccaaaccacctcctgtttcctcgccaagcaagctttcactcttccggcgaagaaatcctgcggcggatttggtggtctctgcttcagcagaagagctttggtgttgaaatctaagagacctttctcctgcagtgccatttacaatcctcaggttaaggttcaagaagaaggtccggccgaatccctagattatcgagttttcttcctcgatggttctggaaagaaggtttctccatggcatgatataccattgaccttaggcgatggagttttcaactttatagttgaaatacctaaagagtcaaaagcaaaaatggaggttgctactgatgaagatttcactcctattaagcaggatactaagaaggggaagctcagatattatccgtataacattaactggaactatgggttgcttcctcaaacatgggaagatccatctcatgcaaattctgaagttgaaggatgttttggggataatgatccagttgatgttgttgagattggtgaaacacaaaggaagataggcgatattctaaagataaagcctttagctgctttagctatgattgatgaaggtgagctagactggaagattgttgccatttctttggatgacccaaaagctcatcttgtgaatgatgttgaagatgttgagaaacatttcccgggtacactaacagccattagagactggtttagagactacaagatcccagatggaaagcctgctaacagatttggtcttggagacaaaccagcaaacaaagactatgctttgaagatcatccaagaaacaaatgaatcatgggctaaacttgtgaagagatcagttgatgctggagacctttcactttactgaacatattttgcaatgtcgacttatgaggtcgaataatgaatagactcaagattcctatatcattcttgttgtttcctttcaattgagatgtaaacattgggatttggattttgtttttcaccattgatgactgagaagtaataaaatgactttctgc

SEQ ID NO: 104797 - protein, 332 aa, Arabidopsis thaliana; identical to SEQ ID NO: 22434
  peptide (1)..(332): Ceres Seq. ID no. 13615754

SEQ ID NO: 104798 - protein, 300 aa, Arabidopsis thaliana; identical to SEQ ID NO: 22435
  peptide (1)..(300): Ceres Seq. ID no. 13615755

SEQ ID NO: 104799 - protein, 182 aa, Arabidopsis thaliana; identical to SEQ ID NO: 22436
  peptide (1)..(182): Ceres Seq. ID no. 13615756

SEQ ID NO: 104800 - DNA, 2424 bp, Arabidopsis thaliana
  misc_feature (1)..(2424): Ceres Seq. ID no. 13615757
  misc_feature (1)..(2424): Ortholog of  Ceres SEQ ID NO 15173102 as cited in SEQ ID NO 61106
acaaaccacaacaaaaaatctcgagacaaagatacaatggcgagccgaaacagagcactcttctctgtttccactcttttcctctgtttcatcgtctgcatctccgagcaatcgaacaatcagtcttctccagtcttcgcctgtgacgtcaccggaaacccttctcttgccgggcttagattctgcaacgcggggttgagtatcaaagcccgagtcaccgatcttgtcggaagattgacgttggaggagaaaatcgggtttttgaccagcaaagctatcggcgttagccgccttgggattccgtcttacaaatggtggtcggaggcacttcatggcgtctctaacgtcggaggtggtagtcggttcaccggtcaagtccctggcgccactagcttcccacaagttatactcacggccgcttctttcaatgtgtctttgttccaagccattggcaaggttgtatcgacagaggcgagggcaatgtacaatgtgggatcagccggtttaacgttttggtcacctaatgtgaacatattccgggacccgagatggggaagaggacaagagactcccggtgaggacccaacactctcaagcaaatacgcagtggcctacgttaaaggtcttcaggagactgacggtggagatcctaaccgtctcaaagtcgctgcttgctgcaaacactacaccgcctatgatattgacaattggagaaatgtcaatcgtctcactttcaacgctgtggtaaaccaacaagatctggctgatacgtttcaaccaccgttcaagagctgtgtggttgatgggcatgttgctagtgtcatgtgttcttacaaccaagttaacggtaaaccaacatgtgccgatcctgatctgctttccggtgtgatccgcggacaatggcagctcaacggatacattgtttcggattgtgattcggtagatgtgttgttcagaaaacaacactatgctaagactccagaagaagctgtggccaaatctctattggcaggtttggatttgaattgtgatcatttcaatggtcaacacgcgatgggagcggtcaaggcgggtttggtaaacgaaacagctattgacaaagcgatttcaaacaatttcgcgactctgatgcgtttagggttcttcgatggagaccctaagaagcagctctacggtggtcttggtcctaaggatgtttgcaccgctgataaccaagaactcgcaagagatggcgcaagacaaggcattgtcttgcttaagaactctgctggttcgcttccgctctcaccttccgcaatcaaaacattagccgtgatcggaccaaacgccaatgccacagaaacaatgatcggaaactaccacggtgtaccatgcaagtacacaacgccgcttcagggattggcagaaacggtgtcgtctacctatcaactgggatgtaacgtggcttgcgtagatgcggatataggctcagccgtggatctggctgcttctgcggatgctgttgtgctcgtggtgggcgcagaccaatcaattgagagggagggccatgaccgagtcgacctgtatcttcctggaaagcagcaagagcttgtgactcgagttgctatggcagcaagaggaccggtggtgctagttatcatgtccggtggaggatttgacattacattcgccaagaatgataaaaagatcacaagcataatgtgggtcggataccctggtgaagccggtggtctcgccattgctgacgttatcttcggacgtcataatccgagtggaaatttgccgatgacgtggtatcctcaatcgtacgtggaaaaagttccgatgtcaaatatgaacatgagacccgacaaatcaaaggggtatccgggtcggagttacaggttttacaccggagaaaccgtatacgccttcgcagacgcgcttacctacactaaattcgaccatcagctaatcaaagcgccaagactcgtctctctcagtctcgacgagaaccacccttgccgatcatcggagtgccaatctttggacgcgatcggacctcactgcgagaacgccgttgagggaggatcggatttcgaggttcatttgaatgtaaagaacaccggagacagagcgggaagccacacggtgtttctgttcacgacgtcgccgcaagtacacggatctccgattaagcaactactaggatttgagaagattcgtctgggaaagagtgaagaagcggtggttaggtttaacgtcaatgtgtgtaaggatctgagtgtggttgatgagaccgggaagaggaaaatcgcgttaggtcatcatcttctccatgtaggaagcttgaaacactctttgaacattagtgtttgattcgacggctcgttttgtttttaacttaagatattaattatggtaataaaatgagatagcaatttt

SEQ ID NO: 104801 - protein, 785 aa, Arabidopsis thaliana; identical to SEQ ID NO: 42028
  peptide (1)..(785): Ceres Seq. ID no. 13615758

SEQ ID NO: 104802 - protein, 773 aa, Arabidopsis thaliana; identical to SEQ ID NO: 42029
  peptide (1)..(773): Ceres Seq. ID no. 13615759

SEQ ID NO: 104803 - protein, 625 aa, Arabidopsis thaliana; identical to SEQ ID NO: 42030
  peptide (1)..(625): Ceres Seq. ID no. 13615760

SEQ ID NO: 104804 - DNA, 1148 bp, Arabidopsis thaliana
  misc_feature (1)..(1148): Ceres Seq. ID no. 13615784
  misc_feature (1)..(1148): Ortholog of  Ceres SEQ ID NO 13594560 as cited in SEQ ID NO 51329
  misc_feature (1)..(1148): Ortholog of  Ceres SEQ ID NO 12613701 as cited in SEQ ID NO 67983
aatggatagattagagaaatagaaaaatcaaaagaagctttggcaaagagctaaagatcaaagcttttctttgagaatgagattgtggattgtgagtgtactcgtgcttacacaccttgtccatggagctctctgttgggggaaggatggtcactacactgtttgcaaattagctgagggattctttgaggatgatactattgctgcagtgaagaaacttctgcctgaatcagttgatggtggtggactagcagatttttgctcatggcctgatgaaattaaaaaactctcgcaatggcaatggactagcactttgcactatgttaacacacctgaatacaggtgcaactacgagtattgccgggactgccatgacactcataagcataaggactggtgtgtgacaggagcgatcttcaattacacaaaccagttaatgtctgcttctgaaaactcacagaatatagtccactacaacttgacagaggctctcttgttcttgtcacattatatgggagatgttcatcagcccttgcatactggttttcttggagatctaggtggtaacacaataatagtcaactggtaccataacaaatcaaatttgcaccatgtctgggacaacatgataattgactctgctctagaaacatactacaattcaagccttccacacatgattcaagctcttcaagccaaactcaagaacggctggtcgaatgatgttccgtcgtggaagtcatgtcactttcaccaaaaggcctgtccaaatctgtatgcttctgaaagcattgatctcgcctgcaagtatgcttacaggaacgctactccggggactactttaggagatgagtatttcctttctcggttacccgttgtagagaagagacttgcacaaggtgggattcgcttggcagctactcttaatcgtatcttttctgcaaaaccgaagctcgcaggattatgaatctaagaaaaagatccttgagaacccacgtaacaactccttttaagtgttttttataacactgtgaatggttgagtcatgactaatgagtgaacctccaaaatcttcatgcaaaaatttgttattttgggacatggttcaaacttccaataacaaaccacactaacggataacactttgc

SEQ ID NO: 104805 - protein, 296 aa, Arabidopsis thaliana
  peptide (1)..(296): Ceres Seq. ID no. 13615785
MRLWIVSVLVLTHLVHGALCWGKDGHYTVCKLAEGFFEDDTIAAVKKLLPESVDGGGLADFCSWPDEIKKLSQWQWTSTLHYVNTPEYRCNYEYCRDCHDTHKHKDWCVTGAIFNYTNQLMSASENSQNIVHYNLTEALLFLSHYMGDVHQPLHTGFLGDLGGNTIIVNWYHNKSNLHHVWDNMIIDSALETYYNSSLPHMIQALQAKLKNGWSNDVPSWKSCHFHQKACPNLYASESIDLACKYAYRNATPGTTLGDEYFLSRLPVVEKRLAQGGIRLAATLNRIFSAKPKLAGL

SEQ ID NO: 104806 - protein, 176 aa, Arabidopsis thaliana; identical to SEQ ID NO: 25297
  peptide (1)..(176): Ceres Seq. ID no. 13615786

SEQ ID NO: 104807 - protein, 151 aa, Arabidopsis thaliana; identical to SEQ ID NO: 25298
  peptide (1)..(151): Ceres Seq. ID no. 13615787

SEQ ID NO: 104808 - DNA, 2146 bp, Arabidopsis thaliana
  misc_feature (1)..(2146): Ceres Seq. ID no. 13615788
  misc_feature (1)..(2146): Ortholog of  Ceres SEQ ID NO 12613725 as cited in SEQ ID NO 68196
tactctcaatatcactattaaatatctttctcttttcacttcttcactttcctcgattcctgagttttcgatccttttgttctctaaccaccggtttcctctttaaccggtctctggataatcatcataatcattaggatcatcaagataaggaatctttttgagtatatctctacaccaaatcgaatctatggatcaaaaagttagacagtttgaggtttgcactcaagacggtagcgttgatcgtcacggcaatccagctatccgagctaataccggcaaatggctcactgctattctcattctagtgaatcaaggactagctacgcttgcgttcttcggtgtaggagtgaatttggttctgtttctgactcgagtgatgggacaagacaatgcagaagcggctaataatgttagtaaatggacaggaactgtctatatcttctctttgcttggtgctttcctcagtgactcttattggggacgttacaagacttgtgctatctttcaagcaagtttcgttgcagggttgatgatgttatctttatctactggtgcgttattgcttgaaccaagtggttgtggagttgaagattcgccgtgtaagcctcattcgacgtttaagacggttctgttttatctgtcggtgtatctaatcgcgttagggtatggtggttatcagccgaacatagctacttttggagctgatcagtttgatgcggaggattccgttgaaggacactcgaaaatcgcgtttttcagttacttttacttggctctgaatcttggatcgctcttctcaaatactgtcttgggttactttgaggatcaaggggaatggccgcttggattttgggcgtctgctggctctgcttttgcggggttagtgcttttcttgattggcacgccaaagtaccgacactttacgcctagagagagtccttggtctagattctgccaagtgttggttgctgcaacaagaaaggctaagattgatgtgcaccatgaagagttgaatctctatgattctgagactcaatacactggagataagaagattcttcataccaaaggcttcagattcttggatagagctgctattgttacacctgatgatgaggctgagaaagtagagagcggatcgaaatacgatccatggaggctctgctcggtgactcaagtcgaagaagtgaaatgtgtattaagactcttaccaatctggctctgcaccatcctctactctgtggttttcacccaaatggcttcactgttcgttgtgcaaggagcagcgatgaagacaaacatcaaaaacttccggattccagcttcaagcatgtctagtttcgacattctcagtgtcgccttcttcatcttcgcatacaggcggtttcttgatccactctttgcaagacttaacaaaacagaacgcaacaaaggtctcactgagcttcagaggatggggattgggcttgtgattgcgataatggcgatgatttccgcaggaatcgtagagatacacagactgaaaaataaggaaccggaaagtgctacttcgatctcaagctccagcactttgagcattttttggcaagtacctcagtacatgttgataggtgcatcagaagtgttcatgtacgttggtcaactcgagttcttcaacagccaagcaccaaccgggctaaagagctttgcaagcgcgctatgtatggcttcaatatctcttgggaactatgtaagcagtttgttagtttccattgtcatgaagatctctacaacagatgatgtgcatggctggattcctgaaaatctcaacaaaggacacttggagagattctacttccttttagctggtctaaccgctgctgatttcgtggtttacttgatttgtgccaaatggtacaagtatattaaatctgaagcaagtttctctgagtccgtaactgaagaggaggaagtctgagtcaggagctagagagttttgtgttttattttaatgctgtgaagctttttacagtaatttgtttaaagctgagcttgttctgtgatataaactggtcttattgtgtttttatttttgggttatactcttgtgcaaagtttagttgatgtttctcaataaaggataagttgattccacagttccaac

SEQ ID NO: 104809 - protein, 589 aa, Arabidopsis thaliana
  peptide (1)..(589): Ceres Seq. ID no. 13615789
MDQKVRQFEVCTQDGSVDRHGNPAIRANTGKWLTAILILVNQGLATLAFFGVGVNLVLFLTRVMGQDNAEAANNVSKWTGTVYIFSLLGAFLSDSYWGRYKTCAIFQASFVAGLMMLSLSTGALLLEPSGCGVEDSPCKPHSTFKTVLFYLSVYLIALGYGGYQPNIATFGADQFDAEDSVEGHSKIAFFSYFYLALNLGSLFSNTVLGYFEDQGEWPLGFWASAGSAFAGLVLFLIGTPKYRHFTPRESPWSRFCQVLVAATRKAKIDVHHEELNLYDSETQYTGDKKILHTKGFRFLDRAAIVTPDDEAEKVESGSKYDPWRLCSVTQVEEVKCVLRLLPIWLCTILYSVVFTQMASLFVVQGAAMKTNIKNFRIPASSMSSFDILSVAFFIFAYRRFLDPLFARLNKTERNKGLTELQRMGIGLVIAIMAMISAGIVEIHRLKNKEPESATSISSSSTLSIFWQVPQYMLIGASEVFMYVGQLEFFNSQAPTGLKSFASALCMASISLGNYVSSLLVSIVMKISTTDDVHGWIPENLNKGHLERFYFLLAGLTAADFVVYLICAKWYKYIKSEASFSESVTEEEEV

SEQ ID NO: 104810 - protein, 526 aa, Arabidopsis thaliana; identical to SEQ ID NO: 69606
  peptide (1)..(526): Ceres Seq. ID no. 13615790

SEQ ID NO: 104811 - protein, 475 aa, Arabidopsis thaliana; identical to SEQ ID NO: 69607
  peptide (1)..(475): Ceres Seq. ID no. 13615791

SEQ ID NO: 104812 - DNA, 1403 bp, Arabidopsis thaliana
  misc_feature (1)..(1403): Ceres Seq. ID no. 13615796
  misc_feature (1)..(1403): Ortholog of  Ceres SEQ ID NO 14302314 as cited in SEQ ID NO 62543
  misc_feature (1)..(1403): Ortholog of  Ceres SEQ ID NO 13598391 as cited in SEQ ID NO 62769
gcagatattcaaacaactcaatcctcattccctttgtttcgcctctctggatttcgaagagctgagagattagggtttctcgattttcgagattagagtctaatccccaccaccagcatagctgatatcctggaggagagaatgacggattcgggtctaatgatgccggcggagattgctggaattctaaccacggcgattacgagttggtgggatgatgttaatgagtcaactcagtggcaagatgggatctttttcgctctttgtggtgcttatgctcttgtttccgccgttgctcttgttcaactgataaggatccaaatgagagtgcctgagtatggttggactactcagaaggtgtttcatcttatgaactttgtcgtcaatggagttcgtgcggttctgtttggatttcacatgcaagtatttcttgttcatcccaaggctctttgctgggtactattggatcttcctggccttctctttttctcggcatacacgctgcttgtgctgttctgggcagagatatatcaccaggctagaagcttacctacagataagctgcggataacctatatttctgtcaacgtggctgtatatttggctcagattggtatctgggcatacatctgggtacatgataacagcactgtggagttagttggaaagatatttatcgcagttgtgtctttcatcgccgcattaggcttcttgctgtatggaggaagattgtttttcatgctaagaaggttccctatcgagtcaaaaggaagaaggaagaaactccacgaggttggatctgtgacagctatatgcttcacctgcttcctcataagatgcgttgtggtggctgtatcagcttttgacaaggatttaacacttgatgttcttgatcatccggttctgaacttaatctactatatggtggtagaagtacttccatcggcactagtcctcttcattctccgaaagctacctccaaagagagtatcagctcaataccatccgatccagtagaaacctttgtcactgaaccatctcacacggtgagtatgatgctgtttaagagaagagtaaagattaaaaaaaaaattggggcaaaaaatgaaaggtgaagaagaaatcggtgtggaatctgcgtgagtttttggaatgcacgttcatataaatgattttacagcttttagttgttgtagcccgccgtgacttttggtttggtagtttatgtctgttaaaattataaattgctcttctgctactttgaaaaatctggtcagtagtacaagaggtttaacatttgttgcgtcgatggttgattgttatgttatgtttggtaaaaaataaacgaatgctcttctccagtttcctttatgcttttgtcaactgttacatcttcttctcct

SEQ ID NO: 104813 - protein, 291 aa, Arabidopsis thaliana; identical to SEQ ID NO: 20955
  peptide (1)..(291): Ceres Seq. ID no. 13615797

SEQ ID NO: 104814 - protein, 285 aa, Arabidopsis thaliana; identical to SEQ ID NO: 20956
  peptide (1)..(285): Ceres Seq. ID no. 13615798

SEQ ID NO: 104815 - protein, 284 aa, Arabidopsis thaliana; identical to SEQ ID NO: 20957
  peptide (1)..(284): Ceres Seq. ID no. 13615799

SEQ ID NO: 104816 - DNA, 1937 bp, Arabidopsis thaliana
  misc_feature (1)..(1937): Ceres Seq. ID no. 13615807
  misc_feature (1)..(1937): Ortholog of  Ceres SEQ ID NO 15176081 as cited in SEQ ID NO 65838
  misc_feature (1)..(1937): Ortholog of  Ceres SEQ ID NO 13660287 as cited in SEQ ID NO 67316
atgtccacccataattcctcctcagtctttttataaacaaaccattttcttgcttttgctcgcaaaactttaaccttaaaaaccaaaccaaaaaaaacaaactaaattaaacttatggatgtgtcaaatgagacagtggaaagaaccgatctccggacacctttagtagatccggcagacacggaggtgaaacctctaccagaggtcgggctcgagagcgtattaacggagagtagcttgtcataccggaggcgtgtgtacttaggagcctgtatagagttgaaagtacttttccggttggcactaccggcgatacttatctatttagtcaactccggaatgggtatatccgctcgtgtcttcgccggtcatgttggtagtcaagaacttgcggccgcgtccatcggaaatagctgcttcaatctcgtctatggacttatgttaggtatgggcagtgcagtcgaaacactatgtggacaagcctatggagcccatcgttacgagatgcttgggatctatctccaaagagcaacaatagtcctcgctctagttggcttgcccatgacattactatacaccttctcgtaccctattctaatcctactaggggaacccaaaacggtgtcgtacatgggatccaaatacatcgccgggctcatccctcaaatcttcgcttacgccgtcaacttcacggcccaaaagttcctccaggcccaaagcgtggttgccccgagcgccttcatctcagccgccgccctcatcctccagatattgttgacgtggatcaccgtttatgtaatggacatgggctttatgggcatagcttatgttcttacaatttcttggtgggtcattgttggatcccagtgtttttacattgcggttagtcccaagtttagacacacgtggactggtcttagctggagatcgctccaaggtctttggagcttctttaaactctctgctggctcagctgttatgatttgtctggaaatgtggtattcgcagattcttgttcttcttgctggtttgctcgaaaatcctgctcgctctctagattctctttccatctgtatgtcaatttcagcattatcattcatggtctctgtcggctttaatgctgctgtaagtgtacggacaagtaatgagcttggagcaggaaatccgaaatcagcatggttctctacatggacggcgacttttgtatccttcgtgatctccgtgacggaagccctcgccgtgatttggtttcgtgattacgttagctacattttcacggaggatgctgacgtggctaaagccgtctctgacctctgtccttttcttgccatcaccatcattctcaacggaattcaacctgtcttgtccggagtggcagtgggatgtggatggcaaacatacgtggcatatgtgaatgttggttgttactacgttgttggtattccggttgggtgtattctcggcttcactttcgattttcaagccaagggaatatggaccgggatgattggaggtaccctcatgcaaacactcattttactttacgtcacgtaccgaacagattgggataaagaggtggaaaaagcgaggaaacgtttggatctgtgggacgacaagaaggagcctctccaaaactagttataacaagtttggtggagtgatagacaataaagaaaaggaaataagtgtcgtgtgtgcaggtgatttcaatgtacgtagcttttcatggttattatgcttgttctatggaaatagaacaattaaaatatatttttgtctgatggattattctttatttacgaaaagttgttcttaaattgatgtttctttcctttctcagaatgatttattatgtcttcactctatagacagttattaattatttattatggaattttgatgtaattgggtgtagtaagtaaagtagcacatcaatg

SEQ ID NO: 104817 - protein, 507 aa, Arabidopsis thaliana; identical to SEQ ID NO: 77565
  peptide (1)..(507): Ceres Seq. ID no. 13615808

SEQ ID NO: 104818 - protein, 432 aa, Arabidopsis thaliana; identical to SEQ ID NO: 30285
  peptide (1)..(432): Ceres Seq. ID no. 13615809

SEQ ID NO: 104819 - protein, 399 aa, Arabidopsis thaliana; identical to SEQ ID NO: 30286
  peptide (1)..(399): Ceres Seq. ID no. 13615810

SEQ ID NO: 104820 - DNA, 690 bp, Arabidopsis thaliana
  misc_feature (1)..(690): Ceres Seq. ID no. 13615818
  misc_feature (1)..(690): Ortholog of  Ceres SEQ ID NO 13638466 as cited in SEQ ID NO 58311
aaaacaaaaaagaaataggaaaagggtttactaacgccaaaaaacccaacccttgtctgcgttcttcatcagcgccgcgttctcaaagttgctctcacagtctccgatctccaattttataagttatggctggaaaagctgcagaagctgtggcaaagacagtgacagggtttcaacatccatggagggcgaaactcgataagtacagaaccgagttgacgaaaggtgtgtggggttattgggagatgggagcatggaaaccgttagggataagtgcacgaaggagggctatgctgaggaaagaagtgttgactaatggagaagattggccttatgatccagagaggaaagctatgaggacaaagaggaaagggcataaatgtgatagaatttcagctgagaaaagagagaacactgcgaagcttatgttgaagatgcctcagatgttgcttgattataagaagagaaggtgggaaaagaagatgaaggaagaagagaaagctaaagaagacaagtaattgatttgttgagatcatgattactatagacttggttgatgaataagaataatttagtttgttgatcttatgaaatcttggaaggtttaagatcacaagtttgcttctgatatacttttgtatgatgtttttttatgtttgtttttaacagaacccaaaagtgtttgtggtt

SEQ ID NO: 104821 - protein, 130 aa, Arabidopsis thaliana; identical to SEQ ID NO: 34957
  peptide (1)..(130): Ceres Seq. ID no. 13615819

SEQ ID NO: 104822 - protein, 90 aa, Arabidopsis thaliana; identical to SEQ ID NO: 34958
  peptide (1)..(90): Ceres Seq. ID no. 13615820

SEQ ID NO: 104823 - protein, 75 aa, Arabidopsis thaliana; identical to SEQ ID NO: 34959
  peptide (1)..(75): Ceres Seq. ID no. 13615821

SEQ ID NO: 104824 - DNA, 1391 bp, Arabidopsis thaliana
  misc_feature (1)..(1391): Ceres Seq. ID no. 13615822
  misc_feature (1)..(1391): Ortholog of  Ceres SEQ ID NO 13596581 as cited in SEQ ID NO 62420
  misc_feature (1)..(1391): Ortholog of  Ceres SEQ ID NO 13591273 as cited in SEQ ID NO 65904
  misc_feature (1)..(1391): Ortholog of  Ceres SEQ ID NO 13623086 as cited in SEQ ID NO 0
aagattcagtagaaaaaattgaccacaagacaaaatatagatacaactatacagaaagagaagataggatgaacaagtgagtctcttctctctctcaaatccactccgtaataagttcataatctatcatccaccatggagaaaacatcaatgttctccattcacgaaggaaagccgattcgatgcaaagcagcagtatctagaaaaccaggagaagcattggtgatagaagagatccatgtggatccacctcaagcttatgaagttaggataaagatcatatgtacatctttatgtcataccgatgtttctttctcgaaaatagacagtggaccgcttgcaaggtttcctaggattctaggacacgaagcagtcggtgtgatcgagagcattggtgaacatgtgaatggatttcaacaaggtgacgtcgttttgccagtgtttcaccctcactgtgaagaatgtagagattgcaaatcctcaaagagcaactggtgcgcaagatttgccgacgatttcttatcaaacacgagacgatatggaatgacttcacgattcaaagactcctttggagaagatatttaccattttctctttgtctcgagtttttctgaatatacggtcgtcgacatcgcacatcttgtcaaaatctctcctgatattccggttgataaagcagcattgcttagctgcggtgtttccacaggaattggagcagcttggaaagtggctaacgtggaaaaaggctccaccgttgcagtttttggccttggtgctgttggacttgcggttggagaaggagccaggctgcgtggagccggcaagatcattggtgttgatctcaatccagaaaaattcgagctaggcaagaaatttggtttcacggatttcatcaattctaccttgtgtggagaaaataagattagcgaggtgattaaagaaatgactggaggaggagttgactatagtttcgaatgcgttggtttaccttctttattgaccgaagctttctccagcactcgcacgggttcaggaaaaacggtagtgttggggatagataagcatctaacgccagtaagtttgggtagctttgatcttctcagaggcagacatgtttgtggaagcttgtttggtggtcttaaacccaaactagatattccgattctggttgatcattacttaaaaaaggagcttaatttggatagttttattacacatgaattgaaatttgaggaaatcaacaaagctttcgatttattagtgcaaggaaagtctctccgctgcattctttggatgaacaagtgaagtgattaattatgttgaaactatatatgttgaaaaattgattaaatttctttatcaaaaagaaaagaattaattattactctttc

SEQ ID NO: 104825 - protein, 389 aa, Arabidopsis thaliana
  peptide (1)..(389): Ceres Seq. ID no. 13615823
MEKTSMFSIHEGKPIRCKAAVSRKPGEALVIEEIHVDPPQAYEVRIKIICTSLCHTDVSFSKIDSGPLARFPRILGHEAVGVIESIGEHVNGFQQGDVVLPVFHPHCEECRDCKSSKSNWCARFADDFLSNTRRYGMTSRFKDSFGEDIYHFLFVSSFSEYTVVDIAHLVKISPDIPVDKAALLSCGVSTGIGAAWKVANVEKGSTVAVFGLGAVGLAVGEGARLRGAGKIIGVDLNPEKFELGKKFGFTDFINSTLCGENKISEVIKEMTGGGVDYSFECVGLPSLLTEAFSSTRTGSGKTVVLGIDKHLTPVSLGSFDLLRGRHVCGSLFGGLKPKLDIPILVDHYLKKELNLDSFITHELKFEEINKAFDLLVQGKSLRCILWMNK

SEQ ID NO: 104826 - protein, 384 aa, Arabidopsis thaliana
  peptide (1)..(384): Ceres Seq. ID no. 13615824
MFSIHEGKPIRCKAAVSRKPGEALVIEEIHVDPPQAYEVRIKIICTSLCHTDVSFSKIDSGPLARFPRILGHEAVGVIESIGEHVNGFQQGDVVLPVFHPHCEECRDCKSSKSNWCARFADDFLSNTRRYGMTSRFKDSFGEDIYHFLFVSSFSEYTVVDIAHLVKISPDIPVDKAALLSCGVSTGIGAAWKVANVEKGSTVAVFGLGAVGLAVGEGARLRGAGKIIGVDLNPEKFELGKKFGFTDFINSTLCGENKISEVIKEMTGGGVDYSFECVGLPSLLTEAFSSTRTGSGKTVVLGIDKHLTPVSLGSFDLLRGRHVCGSLFGGLKPKLDIPILVDHYLKKELNLDSFITHELKFEEINKAFDLLVQGKSLRCILWMNK

SEQ ID NO: 104827 - protein, 253 aa, Arabidopsis thaliana
  peptide (1)..(253): Ceres Seq. ID no. 13615825
MTSRFKDSFGEDIYHFLFVSSFSEYTVVDIAHLVKISPDIPVDKAALLSCGVSTGIGAAWKVANVEKGSTVAVFGLGAVGLAVGEGARLRGAGKIIGVDLNPEKFELGKKFGFTDFINSTLCGENKISEVIKEMTGGGVDYSFECVGLPSLLTEAFSSTRTGSGKTVVLGIDKHLTPVSLGSFDLLRGRHVCGSLFGGLKPKLDIPILVDHYLKKELNLDSFITHELKFEEINKAFDLLVQGKSLRCILWMNK

SEQ ID NO: 104828 - DNA, 1269 bp, Arabidopsis thaliana
  misc_feature (1)..(1269): Ceres Seq. ID no. 13615826
  misc_feature (1)..(1269): Ortholog of  Ceres SEQ ID NO 14302396 as cited in SEQ ID NO 66907
  misc_feature (1)..(1269): Ortholog of  Ceres SEQ ID NO 13496281 as cited in SEQ ID NO 69175
gtgaacagtaaaactcccaaatttgcaaatgactcatcttcttcacctggagagaatctagggttccagatttactcttcgtcttcctctcttcgcttcttccccactgggattttccttttcttctccttttttctctacccatcgatctacacatcctgatcttcttagaagccccaatccttatacattccgggaacaaaaaacctagctttttttttattccggcttaaccagttttcgaaaaaccctagcttccatggcgaaaactcgacctggtgtcgcctccaaaattaagacgggaaggaaggagctggactcttataccatcaagggcaccaacaaagttgtgagagcgggagattgtgtgttgatgcgcccatcagatgctggtaaaccaccatatgtggcccgtgttgagaagattgaagctgatgcgaggaacaatgtgaaggtgcactgtcgatggtattaccgccctgaggagtcacttggtggtaggagacaatttcatggagccaaagagcttttcttgtctgaccattttgatgttcaaagtgcacacaccattgagggaaaatgcattgttcacaccttcaaaaactacacgaggcttgaaaacgttggggcagaggattattattgtagattcgagtacaaggctgctactggcgcatttacccctgatcgagttgctgtgtactgcaaatgtgaaatgccttacaatccagacgatctcatggtgcagtgtgaaggctgcaaagactggtatcatcctgcgtgtgttggcatgacgattgaagaagcaaagaagcttgatcactttgtatgtgctgaatgcagttctgatgacgatgtcaaaaaatcgcagaatgggtttacttcatctccagctgatgatgttaaggtggaaacgaagcgcagaaaaaggtaatcgcgagttcttggggataaaagccacaagagatgataagttatataacttgggaagctctttggtgcagattttagtaagttagggtttatctttgtcggtctttgtcgtctatggttgtgatgtctgtatggtgcgttccaaaacttagagaaatgtgaaaaagaggagagatcagagagatgatgaagaaaactatgttggcagaatcagttgtatagacttccgtggggtttaagttaactttaggtttgtttattgttatggtctgttgttattttgtggctgatgagaacagatgaacatgaacaacgcttttgacttgggtcatctca

SEQ ID NO: 104829 - protein, 224 aa, Arabidopsis thaliana; identical to SEQ ID NO: 37749
  peptide (1)..(224): Ceres Seq. ID no. 13615827

SEQ ID NO: 104830 - protein, 186 aa, Arabidopsis thaliana; identical to SEQ ID NO: 23851
  peptide (1)..(186): Ceres Seq. ID no. 13615828

SEQ ID NO: 104831 - DNA, 1632 bp, Arabidopsis thaliana
  misc_feature (1)..(1632): Ceres Seq. ID no. 13615841
  misc_feature (1)..(1632): Ortholog of  Ceres SEQ ID NO 14313491 as cited in SEQ ID NO 0
atctctccttctttagattcctttctatcttcttctcttctcaaagatctgattctctcaagtctcaccaatggcgataattctccgttcatcagatccactcctctcacgaatccatccggaaccacaagaaatcgaccacttcgataacctcccagactcaatcctcctcctcatcttcaacaacatcggcgacgtcaaagccttaggtcgttgctccgtcgtctccaaaagattccattccttaatccctcaagtcgaaaatgtcttcgttcgtgtcgattgcgttatctccgacgacgattcttcctctctcctctccgataaacctcgatccgcctccgccgcttctcctttctccgccattttccgtctcgtcttcaagccgttacaagctttgggacagttccttaaacgctcaggttcttcttctcttccttcaggatcatctccttcttcgttgttgattagtggtggtgatgatggagagattgaacaaggaggtgtaacgcatcattcaccgactcaggttttgaaaaacttcgatgagattaagtttcttaaaatcgagcttcctagtggtgaattagggattgatgatggtgttttattgaaatggagagctgaatttggttctactctcgagaattgtgtgatcctcggtgcttcctctgtgattccgccgacgaattcggataagacggaagcgagttcggctcccgtcgcggcggtggaagataatggaagtataccggaatcgttttatacaaacggagggcttaagctacgtgttgtatggactataagctctttgattgctgcttccgctagacattacttgttgcaaccgattatagcagagcataagacgcttgatagtttagtgcttactgatgttgatggtcaaggagttttgtgtatgaatcgagatcagttagaggaattgagagtgaaaccattgtcagcttcttcagcttctaagaggactcttgtacctgctttgaatatgagactttggtatgctccttctttggaattgcctgatgggactgtgttgaagggagctacgcttgtggcgattaggccgagtgagtcgaagaaggaggtgtgtgatgtgtcttgggtttcttctgcgtttgatgagccttatggggtagctgctaagatgttggttaagagaaggacttattgtcttgaaatgaattcgttctaaagcttgacgatttcgctaagtcggatctgaggtgaatgaatcacaaaggctaaccaggttttgaaagagagagactacaatgcataagatcagttttgtatgcagtgtgactaatcttagattcaccaatggagctcaattctatgtgttattggtctattggaaggttcgaattccgtctgcttggtcatcggaaaccgcattcgctggctgttttttgttttagctggcaaagcaatcatgtaagagcaagttttaatcttataaaatcttccatgtagcaagttttctttcattatttatgtgaatattgtttgtaggtaagagatacagttgctttgcttctccttgtcttttgtatacttgtcccaagttgtttaaaaaataatattgagcaatgtaaagtactttattacttt

SEQ ID NO: 104832 - protein, 380 aa, Arabidopsis thaliana
  peptide (1)..(380): Ceres Seq. ID no. 13615842
MAIILRSSDPLLSRIHPEPQEIDHFDNLPDSILLLIFNNIGDVKALGRCSVVSKRFHSLIPQVENVFVRVDCVISDDDSSSLLSDKPRSASAASPFSAIFRLVFKPLQALGQFLKRSGSSSLPSGSSPSSLLISGGDDGEIEQGGVTHHSPTQVLKNFDEIKFLKIELPSGELGIDDGVLLKWRAEFGSTLENCVILGASSVIPPTNSDKTEASSAPVAAVEDNGSIPESFYTNGGLKLRVVWTISSLIAASARHYLLQPIIAEHKTLDSLVLTDVDGQGVLCMNRDQLEELRVKPLSASSASKRTLVPALNMRLWYAPSLELPDGTVLKGATLVAIRPSESKKEVCDVSWVSSAFDEPYGVAAKMLVKRRTYCLEMNSF

SEQ ID NO: 104833 - DNA, 1775 bp, Arabidopsis thaliana
  misc_feature (1)..(1775): Ceres Seq. ID no. 13615859
  misc_feature (1)..(1775): Ortholog of  Ceres SEQ ID NO 12611314 as cited in SEQ ID NO 56535
  misc_feature (1)..(1775): Ortholog of  Ceres SEQ ID NO 15178046 as cited in SEQ ID NO 60380
  misc_feature (1)..(1775): Ortholog of  Ceres SEQ ID NO 14312016 as cited in SEQ ID NO 60412
  misc_feature (1)..(1775): Ortholog of  Ceres SEQ ID NO 13661438 as cited in SEQ ID NO 61414
gtctcatcacttcccactttcctctctgcatttgttgtctctctctcctgaaaacccttgaattttgctacacgatctctgaaacgtgtctctttgactgacttcaatcttctttatcacttaccgtttctgggttttatgaagcaactgagctaataaaaagcttcttcttagactcggaagaagataaaaaacagaatctttattgtttaaagcttccaaattcgagaagagaatttgaaacgaccaagttcaggatattcgtttcttcgtctactttggtctcttcctcttctctttcgaaaagggtttattctgtcttaaaagaaacctttttgagagggtaaaaaaagcttcaattttcagagaaacacaaaaggcagaaacagagaaaaacaaatcatctaattcatgaaacagggttcaatgaatagatcgtgtctctgtagtgtcttaatcaccactgctctgatttgtggtgcttacttcatttgcaatgcttatcttgctaaagactttaaagagaagttgctgaagtgggaaatcactgataagatgcataacagtactgataagatgcagaatgcaacaacaaccagtacatgcaagaatttcaataagccagtgggtactgaagcactaccgcaaggaattatcgagaaaacatcgaacctggaaacacaacatctatggaactacgatgacacaaaaaagagaaggcctaaccattcgatgagtttgttagccatggcggtcggtatcaagcaaaaggagctagttaacaaagttatccaaaagtttcctcctcgagatttcgcggtcatgctttttcattatgatggtgttgtcgatgactggaagcagtatccatggaataatcatgcgattcatgtttccgtgatgaatcaaacaaaatggtggttcgccaagcgattcttgcatcccgatatagttgcagagtacgagtatatatttctttgggacgaagatcttggtgttggtcatttcaatcctcaacgatatctatctattgtcaaagaagaggggcttgagatatcgcaacctgctcttgacacttcaaaatcagaagtgcatcatcctataaccgctcgtcgaaaaaaatcaaaagttcatagaagaatgtataaatacaaaggtagcgggcgatgtgatgaccatagcaccaatcctccttgcatcgggtgggtggaaatgatggcacctgttttctctagagctgcatggagatgttcttggtatatgattcagaatgatttgatccatgcttggggtctggatacgcagcttggttattgtgctcaaggtgaccgaaagaaaaatgtcggtgttgttgatgcggagtacataattcattatggtcttccaacgctcggtgtggttgaaaccgcttcaagcgctttgcggaatgagacagactcgaaatcaacggaatcattagagtctcgtgaagtggataatagaccagaagtgaggatgaaatcatttgtggagatgaagagattcaaggaacgttggaagaaagctgtgagggatgatacatgttgggttgatccgtattgaaatccgagcggtttaagtaaaccgaatcaaaccggattcttttccttgttgagtgtgctttgtggtccattgtataccattattttggtacatagattttgttttacttcgagaaaaattagtgtatttatgtgttttatggaccacagtgtagatttaacattttggagcattatacaaaagtgtttttgtgc

SEQ ID NO: 104834 - protein, 389 aa, Arabidopsis thaliana
  peptide (1)..(389): Ceres Seq. ID no. 13615860
MKQGSMNRSCLCSVLITTALICGAYFICNAYLAKDFKEKLLKWEITDKMHNSTDKMQNATTTSTCKNFNKPVGTEALPQGIIEKTSNLETQHLWNYDDTKKRRPNHSMSLLAMAVGIKQKELVNKVIQKFPPRDFAVMLFHYDGVVDDWKQYPWNNHAIHVSVMNQTKWWFAKRFLHPDIVAEYEYIFLWDEDLGVGHFNPQRYLSIVKEEGLEISQPALDTSKSEVHHPITARRKKSKVHRRMYKYKGSGRCDDHSTNPPCIGWVEMMAPVFSRAAWRCSWYMIQNDLIHAWGLDTQLGYCAQGDRKKNVGVVDAEYIIHYGLPTLGVVETASSALRNETDSKSTESLESREVDNRPEVRMKSFVEMKRFKERWKKAVRDDTCWVDPY

SEQ ID NO: 104835 - protein, 384 aa, Arabidopsis thaliana
  peptide (1)..(384): Ceres Seq. ID no. 13615861
MNRSCLCSVLITTALICGAYFICNAYLAKDFKEKLLKWEITDKMHNSTDKMQNATTTSTCKNFNKPVGTEALPQGIIEKTSNLETQHLWNYDDTKKRRPNHSMSLLAMAVGIKQKELVNKVIQKFPPRDFAVMLFHYDGVVDDWKQYPWNNHAIHVSVMNQTKWWFAKRFLHPDIVAEYEYIFLWDEDLGVGHFNPQRYLSIVKEEGLEISQPALDTSKSEVHHPITARRKKSKVHRRMYKYKGSGRCDDHSTNPPCIGWVEMMAPVFSRAAWRCSWYMIQNDLIHAWGLDTQLGYCAQGDRKKNVGVVDAEYIIHYGLPTLGVVETASSALRNETDSKSTESLESREVDNRPEVRMKSFVEMKRFKERWKKAVRDDTCWVDPY

SEQ ID NO: 104836 - protein, 341 aa, Arabidopsis thaliana
  peptide (1)..(341): Ceres Seq. ID no. 13615862
MHNSTDKMQNATTTSTCKNFNKPVGTEALPQGIIEKTSNLETQHLWNYDDTKKRRPNHSMSLLAMAVGIKQKELVNKVIQKFPPRDFAVMLFHYDGVVDDWKQYPWNNHAIHVSVMNQTKWWFAKRFLHPDIVAEYEYIFLWDEDLGVGHFNPQRYLSIVKEEGLEISQPALDTSKSEVHHPITARRKKSKVHRRMYKYKGSGRCDDHSTNPPCIGWVEMMAPVFSRAAWRCSWYMIQNDLIHAWGLDTQLGYCAQGDRKKNVGVVDAEYIIHYGLPTLGVVETASSALRNETDSKSTESLESREVDNRPEVRMKSFVEMKRFKERWKKAVRDDTCWVDPY

SEQ ID NO: 104837 - DNA, 1396 bp, Arabidopsis thaliana
  misc_feature (1)..(1396): Ceres Seq. ID no. 13615863
  misc_feature (1)..(1396): Ortholog of  Ceres SEQ ID NO 13598368 as cited in SEQ ID NO 62140
atggaggaagaagacaagaaagtgatgaagtgttttagcttcaagagaatcatgaagaggaagaagaaagaggaggaggaggagaagttgatagtgactagagaattcgcgaagagatggcgagatctgagcggtcaaaaccattggaaagggatgttacagccgttggatcaagatctccgggaatatatcatacattatggtgagatggctcaggctggttacgatactttcaatatcaacaccgaatctcagttcgccggtgctagcatctactctagaaaagacttcttcgccaaggttggtttagagatagcacacccgtacacaaagtacaaagtgacgaagtttatatacgcgacatccgatatccacgtgcctgagtcattcttattgttcccaatttcacgtgagggatggtcaaaggaatcaaattggatgggttacgtggcggtaacagacgaccaaggcacggcacttcttggtcggagagatatcgtggtttcttggagaggctcagtgcaaccacttgaatgggtcgaagacttcgagtttggtttagtcaacgccataaaaatcttcggtgaaagaaacgatcaagtacaaattcatcaaggttggtattcaatctacatgtctcaagatgaacgatcaccttttactaagaccaatgctcgtgaccaggtattgcgagaggttggaagattgttggagaagtataaggacgaagaagttagtataactatatgtggtcatagtcttggagctgcactcgcgacgcttagtgccactgatattgtggctaatggttataaccgaccaaagagccgtcctgacaagtcttgtcctgttactgcctttgtctttgctagtcctcgtgttggggattcagactttaggaaactcttttccggattggaagatatccgagtgttacggacaaggaatctaccggacgtaattccgatctatccaccgataggttactccgaggtaggagatgagtttccaatagacacaagaaagtcaccatacatgaaatctcctggaaacctcgcaacctttcactgcttagagggttacttgcatggcgttgccgggactcaaggaacgaacaaagctgacttattcagactcgatgtggaaagagccatcggattggtcaataaatcagtggatgggttaaaagacgagtgtatggtcccagggaaatggagggttcttaaaaacaaaggtatggcccaacaagacgatggatcttgggagttagtggaccatgagattgatgataatgaagatttggatttctgatttcttggtcattttttctttgtcaagtgttgatgtttggaaacatactattttatctatttaacgttgtattttatgataattt

SEQ ID NO: 104838 - protein, 436 aa, Arabidopsis thaliana
  peptide (1)..(436): Ceres Seq. ID no. 13615864
MEEEDKKVMKCFSFKRIMKRKKKEEEEEKLIVTREFAKRWRDLSGQNHWKGMLQPLDQDLREYIIHYGEMAQAGYDTFNINTESQFAGASIYSRKDFFAKVGLEIAHPYTKYKVTKFIYATSDIHVPESFLLFPISREGWSKESNWMGYVAVTDDQGTALLGRRDIVVSWRGSVQPLEWVEDFEFGLVNAIKIFGERNDQVQIHQGWYSIYMSQDERSPFTKTNARDQVLREVGRLLEKYKDEEVSITICGHSLGAALATLSATDIVANGYNRPKSRPDKSCPVTAFVFASPRVGDSDFRKLFSGLEDIRVLRTRNLPDVIPIYPPIGYSEVGDEFPIDTRKSPYMKSPGNLATFHCLEGYLHGVAGTQGTNKADLFRLDVERAIGLVNKSVDGLKDECMVPGKWRVLKNKGMAQQDDGSWELVDHEIDDNEDLDF

SEQ ID NO: 104839 - protein, 428 aa, Arabidopsis thaliana
  peptide (1)..(428): Ceres Seq. ID no. 13615865
MKCFSFKRIMKRKKKEEEEEKLIVTREFAKRWRDLSGQNHWKGMLQPLDQDLREYIIHYGEMAQAGYDTFNINTESQFAGASIYSRKDFFAKVGLEIAHPYTKYKVTKFIYATSDIHVPESFLLFPISREGWSKESNWMGYVAVTDDQGTALLGRRDIVVSWRGSVQPLEWVEDFEFGLVNAIKIFGERNDQVQIHQGWYSIYMSQDERSPFTKTNARDQVLREVGRLLEKYKDEEVSITICGHSLGAALATLSATDIVANGYNRPKSRPDKSCPVTAFVFASPRVGDSDFRKLFSGLEDIRVLRTRNLPDVIPIYPPIGYSEVGDEFPIDTRKSPYMKSPGNLATFHCLEGYLHGVAGTQGTNKADLFRLDVERAIGLVNKSVDGLKDECMVPGKWRVLKNKGMAQQDDGSWELVDHEIDDNEDLDF

SEQ ID NO: 104840 - protein, 419 aa, Arabidopsis thaliana; identical to SEQ ID NO: 69667
  peptide (1)..(419): Ceres Seq. ID no. 13615866

SEQ ID NO: 104841 - DNA, 518 bp, Arabidopsis thaliana
  misc_feature (1)..(518): Ceres Seq. ID no. 13615867
  misc_feature (1)..(518): Ortholog of  Ceres SEQ ID NO 15170497 as cited in SEQ ID NO 52766
acttaaaccgaacagatttgtcacgaagaagaaatcagtgtagcagacaccatccatccctgagcaaagatagaagaaaagctatgactgatttgcaaatggaggtagaggtagataccaattcttctttgcaggagtctctcccgaagccgcaagtcatgtacagatgtaagaaatgtagaaggatagttgctattgaggaaaacatagtcccgcatgaaccaggaaagggtgaagaatgctttgcttggaaaaagagaagtggaaactctgaacaagtgcaatgctcttccatctttgtcgagcctatgaaatggatgcagacaatacatgatggaatggtggaagagaagcttctatgttttggatgtaacgggagattaggttatttcaactgggctgggatgcaatgtagctgtggtgcatgggttaatccggcttttcagcttaataaaagccgaatagacgagtgtaaatccgagccaaacccgaacctgaatatggaaacttgatgaaaa

SEQ ID NO: 104842 - protein, 169 aa, Arabidopsis thaliana
  peptide (1)..(169): Ceres Seq. ID no. 13615868
LNRTDLSRRRNQCSRHHPSLSKDRRKAMTDLQMEVEVDTNSSLQESLPKPQVMYRCKKCRRIVAIEENIVPHEPGKGEECFAWKKRSGNSEQVQCSSIFVEPMKWMQTIHDGMVEEKLLCFGCNGRLGYFNWAGMQCSCGAWVNPAFQLNKSRIDECKSEPNPNLNMET

SEQ ID NO: 104843 - protein, 142 aa, Arabidopsis thaliana
  peptide (1)..(142): Ceres Seq. ID no. 13615869
MTDLQMEVEVDTNSSLQESLPKPQVMYRCKKCRRIVAIEENIVPHEPGKGEECFAWKKRSGNSEQVQCSSIFVEPMKWMQTIHDGMVEEKLLCFGCNGRLGYFNWAGMQCSCGAWVNPAFQLNKSRIDECKSEPNPNLNMET

SEQ ID NO: 104844 - protein, 137 aa, Arabidopsis thaliana
  peptide (1)..(137): Ceres Seq. ID no. 13615870
MEVEVDTNSSLQESLPKPQVMYRCKKCRRIVAIEENIVPHEPGKGEECFAWKKRSGNSEQVQCSSIFVEPMKWMQTIHDGMVEEKLLCFGCNGRLGYFNWAGMQCSCGAWVNPAFQLNKSRIDECKSEPNPNLNMET

SEQ ID NO: 104845 - DNA, 3109 bp, Arabidopsis thaliana
  misc_feature (1)..(3109): Ceres Seq. ID no. 13615875
  misc_feature (1)..(3109): Ortholog of  Ceres SEQ ID NO 13658778 as cited in SEQ ID NO 66511
atccatccaaatctcaatccctaattagggttcatttctctgtttctccaaacaggggaattcgaagatgatggagtctaggtctcccatctgcaacacttgtggtgaagagattggtgtaaaatcaaacggagagttctttgtggcttgtcatgagtgtagtttcccgatctgcaaagcttgtcttgagtatgaattcaaagaaggtcgaagaatttgcttgcgttgcggcaatccttacgatgagaatgtgtttgatgatgttgagacaaagacatctaaaactcaatccattgttccaacacagaccaataacacttctcaggattcagggattcatgctagacatataagtacagtctcaacaatagacagtgaactgaatgatgaatatggcaatccaatttggaagaacagagtggagagctggaaagacaagaaagacaagaagagcaagaagaagaagaaagatccaaaagcaacaaaagctgaacaacatgaggctcagattcctacccaacagcacatggaagatacgccaccgaacacagaatctggtgctacagatgtgctttcggttgtgattcctatcccaaggacaaaaatcacttcatataggattgtcatcatcatgcggttgatcatcttggctctgttttttaactaccgtatcacgcatcctgtcgatagcgcttacggtttatggctaacatctgtgatatgtgagatttggtttgctgtttcttgggtgttggatcagttccctaaatggtctcctattaaccgagaaacttacatcgaccggttatccgcaagattcgaaagagaaggcgagcaatcacagcttgcagctgtagatttctttgttagtacggtagatccattaaaggagccacctttgataactgcaaacacggttctttcgatcctcgcgcttgattatccggtggataaagtctcttgctatgtatctgatgatggtgctgcaatgctttcgtttgagtctttggttgagacagcagattttgctaggaaatgggtacctttctgcaaaaagtactccatcgagccacgagctcccgagttttacttctcgcttaaaatcgattacttgagggataaagttcaaccttcttttgtgaaagaacgtagagccatgaaaagagattatgaagagtttaaaataagaatgaatgctttagtcgccaaggctcaaaagacaccagaagaaggatggacaatgcaagatggaacatcttggcccgggaacaacactcgtgaccatcccgggatgattcaggtttttcttggatatagcggtgctcgcgacattgaaggaaatgaacttccaagattagtttacgtctctagagagaagagacctggttatcagcatcacaaaaaggccggggcagagaacgcattggtgagggtgtctgcggttttaacgaatgctccattcattcttaaccttgattgtgatcactacgtcaacaatagcaaagccgtgcgtgaagcaatgtgctttttaatggatcctgttgttggtcaagacgtttgctttgttcagttcccacagagatttgatggaatcgacaagagtgatcgatatgctaaccgcaacattgttttcttcgatgttaatatgagagggcttgatgggattcaaggtccagtttatgttggtacaggtactgtctttagaagacaagcactttacggatacagtccaccttcaaaaccgaggattttaccgcaatcttcatcatcgtcgtgttgctgtctaaccaagaagaaacaacctcaagatccttccgagatttacaaagatgcaaagcgagaagaacttgatgctgcaatctttaatcttggggacctagacaactacgatgagtacgacagatcgatgctgatttcacaaacaagctttgagaaaacgtttggtctctctacggttttcatcgagtctactcttatggagaatggcggtgttcccgactctgtaaacccgtcaacgctcatcaaagaagctattcatgtcattagctgtggatacgaagagaaaactgaatggggaaaagaaataggatggatttacgggtcgatcaccgaagacattttgacgggtttcaagatgcattgtcgtggatggaggtcgatttactgtatgccattaagaccagcatttaaaggatctgctccaatcaatctatcagataggcttcaccaggttctacgttgggctcttggctcggttgagatcttccttagccgacattgtcctttgtggtacggttgcagcggaggccgcctcaagttgctccagagattagcttatataaacactattgtctacccattcacttctttgcctcttgttgcttactgtactcttccagctatttgccttcttaccggcaaatttatcatcccaacgctatcaaacctagcaagcatgctgtttctaggtctctttatatcaatcatcttaacgagtgtcctcgagcttcgatggagcggagtcagtatcgaagacttatggagaaacgaacagttttgggttattggaggtgtctcagctcatctctttgccgttttccaaggattcctcaaaatgctcgctggtctcgacacaaatttcacagtcacatcgaaaaccgcagatgatttagaattcggtgagctttacattgtcaaatggacaactctcttgatccctccgacgtcacttcttataatcaacttggtcggagttgttgctggattctctgacgctcttaacaaaggttatgaagcttggggacctttgtttgggaaggtatttttcgccttttgggtgattcttcatctttatccattcctcaaaggtcttatgggaagacaaaacagaacacctactattgttattctctggtctatcttgcttgcttctgtgttttcacttgtttgggttcgtatcaatcctttcgtctccaaaaccgatacgacttccctttctctgaactgtcttttgatcgattgctaagagaagatacgttatgtttgtattttgaaagattgatcatatgtgttttggttgttttataaattttcatatggttgcttgagc

SEQ ID NO: 104846 - protein, 985 aa, Arabidopsis thaliana; identical to SEQ ID NO: 24485
  peptide (1)..(985): Ceres Seq. ID no. 13615876

SEQ ID NO: 104847 - protein, 984 aa, Arabidopsis thaliana; identical to SEQ ID NO: 24486
  peptide (1)..(984): Ceres Seq. ID no. 13615877

SEQ ID NO: 104848 - protein, 832 aa, Arabidopsis thaliana; identical to SEQ ID NO: 24487
  peptide (1)..(832): Ceres Seq. ID no. 13615878

SEQ ID NO: 104849 - DNA, 897 bp, Arabidopsis thaliana
  misc_feature (1)..(897): Ceres Seq. ID no. 13615883
  misc_feature (1)..(897): Ortholog of  Ceres SEQ ID NO 14306264 as cited in SEQ ID NO 1386
  misc_feature (1)..(897): Ortholog of  Ceres SEQ ID NO 15179159 as cited in SEQ ID NO 0
aaagaacaagaaaaaagggtgttgttacgatggcatcgagtgataaggttccggtggcgtgtccggcaagcagtggagatggaaaggagccaatgggaaatccgacgaaaaccactacggcgatgctagagaaaggaacggctatgatgcaatcgatgaaaccgatcaggcaaatgagcctccacgtgtgttcattcgcttgctatagccatgatcccggtcgtcagatcgaagttcatatttacggccaccgtgtaaaccaggatttcctccaatgtgctgtctacgattccaattcctctaaggctcatctcatagggatcgaatatatagtgtcggaaaagttattcgaaagtctctcaccggaggaacaaaagctttggcactcgcatgattacgagatccaaatggctcttctagtaactccaagggtccctgagctcgttgcgaaaccggagcttaaaaatcttgccaaatcttacgggaaattttggtgtacatggcagattgaccgaggggataaattaccactaggtgtaccatcactaatggtatcgccacaagacgtgaatctcgggagaatcaaaccggagttggtgaaaaagagagatgaagaacatggaatctcgactgaatcgttgaagccgtcaagagatgggatctgtggaccagagaagaagaacctggttgctgattattgggttaggtttaggaaaggctttgcgcttgatgttgttgaaacagatatgaagagaacagctcccttcccctaacttttgtgtgtgctttttttctcagacattaattatataagttttcgtaagcttacactagatgggttgtgtacttattatgttatggagtatgataatgtcataaacatgagaattttttcgc

SEQ ID NO: 104850 - protein, 256 aa, Arabidopsis thaliana
  peptide (1)..(256): Ceres Seq. ID no. 13615884
RTRKKGVVTMASSDKVPVACPASSGDGKEPMGNPTKTTTAMLEKGTAMMQSMKPIRQMSLHVCSFACYSHDPGRQIEVHIYGHRVNQDFLQCAVYDSNSSKAHLIGIEYIVSEKLFESLSPEEQKLWHSHDYEIQMALLVTPRVPELVAKPELKNLAKSYGKFWCTWQIDRGDKLPLGVPSLMVSPQDVNLGRIKPELVKKRDEEHGISTESLKPSRDGICGPEKKNLVADYWVRFRKGFALDVVETDMKRTAPFP

SEQ ID NO: 104851 - protein, 247 aa, Arabidopsis thaliana
  peptide (1)..(247): Ceres Seq. ID no. 13615885
MASSDKVPVACPASSGDGKEPMGNPTKTTTAMLEKGTAMMQSMKPIRQMSLHVCSFACYSHDPGRQIEVHIYGHRVNQDFLQCAVYDSNSSKAHLIGIEYIVSEKLFESLSPEEQKLWHSHDYEIQMALLVTPRVPELVAKPELKNLAKSYGKFWCTWQIDRGDKLPLGVPSLMVSPQDVNLGRIKPELVKKRDEEHGISTESLKPSRDGICGPEKKNLVADYWVRFRKGFALDVVETDMKRTAPFP

SEQ ID NO: 104852 - protein, 226 aa, Arabidopsis thaliana
  peptide (1)..(226): Ceres Seq. ID no. 13615886
MGNPTKTTTAMLEKGTAMMQSMKPIRQMSLHVCSFACYSHDPGRQIEVHIYGHRVNQDFLQCAVYDSNSSKAHLIGIEYIVSEKLFESLSPEEQKLWHSHDYEIQMALLVTPRVPELVAKPELKNLAKSYGKFWCTWQIDRGDKLPLGVPSLMVSPQDVNLGRIKPELVKKRDEEHGISTESLKPSRDGICGPEKKNLVADYWVRFRKGFALDVVETDMKRTAPFP

SEQ ID NO: 104853 - DNA, 1938 bp, Arabidopsis thaliana
  misc_feature (1)..(1938): Ceres Seq. ID no. 13615887
  misc_feature (1)..(1938): Ortholog of  Ceres SEQ ID NO 15176822 as cited in SEQ ID NO 1160
  misc_feature (1)..(1938): Ortholog of  Ceres SEQ ID NO 13593889 as cited in SEQ ID NO 53305
  misc_feature (1)..(1938): Ortholog of  Ceres SEQ ID NO 13581959 as cited in SEQ ID NO 56156
gactttcttaccgaccagcttagtcttctccattacggcatcattcacctataaatttcgccgctgggtttaattctctattcattcagaaccaaaaaagaagaaacctttttgattctctttgcgatttctttgttcaatctcttctcagattgtgtgaatcgggtttaaatcggggttttagggtctctgttttcaaaagggtaccaaaaagtttggagctttactgtagaaagatttgatttttcgttgacccactccgagattttcggatacaaatcagggttttagggtttttgttggaatggaagaggattatcaacagccgaggtttacgattggtaggcaatcatcaatggcgccggagaagattccggagccgtcggttcactcagaagaagaggtgtttgaggatggagaagagatcgatggtggtgtgagactaatgtatttggctaatgaaggtgacattgaagggattaaggagcttattgattcagggattgatgctaattacagagacattgatgatcggactgctttacacgtggcggcttgtcaaggattgaaagatgttgttgagcttcttcttgatcggaaagctgaggttgatcctaaagatcgttggggaagcactccatttgcagatgcgatattttacaagaacattgatgttatcaagattcttgagatacatggagctaaacatccgatggctccaatgcacgttaagactgctcgtgaagtccctgagtatgaaataaatcctagtgagcttgatttcactcaaagcaaagagataacaaagggaacttactgtatggcaatgtggcgtggtattcaagttgcggtgaaaaagctggatgatgaagttttgagcgatgacgatcaagtgaggaagttccatgatgagcttgcattgctccaaaggcttaggcatccaaacattgtgcagtttcttggtgctgtaacccaaagtaacccaatgatgattgtgactgaatatttgcccaggggggatttgcgtgaattgctcaaacgaaaaggacaattgaaaccagctactgctgttagatatgcccttgatattgctaggggaatgagctatcttcatgagatcaaaggagaccctataatccaccgcgatcttgaaccttcaaacattctgcgggatgattcagggcatctgaaagttgcagactttggagtaagcaagcttgttactgttaaagaagacaagccttttacatgtcaagacatttcttgtcgatatatagctcccgaggttttcactagtgaagaatacgatacaaaagctgatgttttctcatttgcattgatcgttcaggagatgatcgaaggccgaatgccgtttgctgaaaaggaagacagtgaagcttctgaagcttatgctggcaaacatcggccattattcaaagctccatcaaagaattacccacatggtcttaaaacgttgatagaagaatgctggcatgagaaacctgcaaagcgaccaactttcagagagatcattaaacgacttgagtccattcttcaccacatgggtcacaagcgacaatggaggatgaggccattgacatgctttcagaatttcgagcacaagaagaaacataattgggatttgagcagccatgacggctcatcatccggttcacatttgtgattctttaaacggttaaagaaaccattcttttgtatccattccttccggtttagtttgggtttccccaaagcaaccgaatttgactttgtatatttgttgtacactgaagaactcaagaaagtcttcgtgtatacaaaaactgcattttttttattctagtatacaaaattgttgtaagatctatgattttaaccgcaatatatatttgctgttgtaatctaaaaaattggtttaagaatatttatgatttttcc

SEQ ID NO: 104854 - protein, 459 aa, Arabidopsis thaliana; identical to SEQ ID NO: 24622
  peptide (1)..(459): Ceres Seq. ID no. 13615888

SEQ ID NO: 104855 - protein, 442 aa, Arabidopsis thaliana; identical to SEQ ID NO: 24623
  peptide (1)..(442): Ceres Seq. ID no. 13615889

SEQ ID NO: 104856 - protein, 412 aa, Arabidopsis thaliana; identical to SEQ ID NO: 24624
  peptide (1)..(412): Ceres Seq. ID no. 13615890

SEQ ID NO: 104857 - DNA, 945 bp, Arabidopsis thaliana
  misc_feature (1)..(945): Ceres Seq. ID no. 13615893
  misc_feature (1)..(945): Ortholog of  Ceres SEQ ID NO 13598140 as cited in SEQ ID NO 61443
agttttggtctgcgatcgtgaaatttacgcagagagagatcagaatcgaagaaaacattgcaatataaaagagtcaccttcgagttcgtgtctcactccgataaagcaatgagtctattcgggcttggaagaaatcaaaagactttccgtcctaagaagagcgcaccatcaggaaccaagggagcagagcttcgaaagcatatagatgcaactttaggtagtggtaatcttagagaagccgtcaaacttcctccgggagaggatttaaacgaatggcttgcagttaacactgtggatttcttcaatcaggtgaatctgttatttggtacacttaccgagttttgcaccccggagaactgttctacaatgactgctggtcccaagtacgaatacagatgggccgatggtgtacaaatcaagaagcctattgaggtttcagctccaaagtatgttgaatacttgatggattggatcgagacacaactcgatgatgagaccatatttcctcaaaaacttggtgcagcttttcctccaaacttcaaggaagtggtgaagacaatctttaaacgactattccgagtttacgcacacatataccactctcatttccagaaaatagttagtctcaaagaggaagctcatctcaacacttgcttcaaacacttcatcctcttcactcatgagtttgttctcattgacaagaaagaactcgctcctcttcaagaactcatagaatctatcattgcaccttactaaaccaaacaaaacccaaatcctctgtccaattacaagacttttttttttcaatcacattcatggtaataagttttaaccccaactgtaaaaaattgctgtttctgtttgtaaaaaaagaatatgcaatacactgctgaaccttggattttatttaaatggttacattcgaaatttcactggattacatat

SEQ ID NO: 104858 - protein, 215 aa, Arabidopsis thaliana
  peptide (1)..(215): Ceres Seq. ID no. 13615894
MSLFGLGRNQKTFRPKKSAPSGTKGAELRKHIDATLGSGNLREAVKLPPGEDLNEWLAVNTVDFFNQVNLLFGTLTEFCTPENCSTMTAGPKYEYRWADGVQIKKPIEVSAPKYVEYLMDWIETQLDDETIFPQKLGAAFPPNFKEVVKTIFKRLFRVYAHIYHSHFQKIVSLKEEAHLNTCFKHFILFTHEFVLIDKKELAPLQELIESIIAPY

SEQ ID NO: 104859 - protein, 129 aa, Arabidopsis thaliana
  peptide (1)..(129): Ceres Seq. ID no. 13615895
MTAGPKYEYRWADGVQIKKPIEVSAPKYVEYLMDWIETQLDDETIFPQKLGAAFPPNFKEVVKTIFKRLFRVYAHIYHSHFQKIVSLKEEAHLNTCFKHFILFTHEFVLIDKKELAPLQELIESIIAPY

SEQ ID NO: 104860 - DNA, 1212 bp, Arabidopsis thaliana
  misc_feature (1)..(1212): Ceres Seq. ID no. 13615914
  misc_feature (1)..(1212): Ortholog of  Ceres SEQ ID NO 14303355 as cited in SEQ ID NO 59746
  misc_feature (1)..(1212): Ortholog of  Ceres SEQ ID NO 14302415 as cited in SEQ ID NO 62781
aacaacatctttcacacaacaattcacacaatttctcgtttttttttgtttatcatcaaaagttttaatctaaattacgtatcaaattccgagcaagatgactattcttgttgaacattttgttcctgattcaagagtggatgaaaagaaagtgatagaggagagggataatgaattggtgttggatggaggttttgtggttccaaaatcaaaggaaactgatgcattcgatgctcctgatatgaatttcttgggccattccttcagggattatgagaatggtgaaagcgagagacaacaaggtgttgaggaattttacaggatgcaacacattcaccagacctatgactttgtgaagaagatgaggaaagagtatggaaaacttaacaagatggaaatgagtatatgggaatgttgtgagttattgaacaatgttgttgatgaaagcgatccggatcttgatgagcctcaaattcaacaccttctccaaaccgctgaagccattcgaagggactatcccgacgaagattggctccatctcactgccctaatccatgatcttggcaaggttctccttctgccagaattcggtggtcttccccagtgggctgtcgttggcgatacatttccagttggatgtaccttcgactcagccaatattcaccacaagtatttcaaaggaaaccatgatatcaacaacccaaagtacaacacaaaaaatggagtttacactgaaggatgtggtttagacaatgttctcatgtcatggggtcatgacgactacatgtatttggtggctaagaagaatggcacgacccttcctcacgctggtctcttcattattcgatatcattccttttatccattgcacaaggcaggagcctacacacacttgatgaacgatgaggacagagatgatctcaagtggctccatgtcttcaataaatatgacctatacagtaagagcaaagttctggtagatgtcgaacaagtgaagccttactacatttcactcatcaacaagtattttccggcgaaactaaaatggtgagataaagctacgagtcaattaattaactatcttttatgaggagaacgagatcgaaggttaacgagtttctattgtatacaacggaagataaatctatctaataaaaaagttggtgtgttcatttgtaattttttcccccatcagtttaaaagttatgttgt

SEQ ID NO: 104861 - protein, 317 aa, Arabidopsis thaliana
  peptide (1)..(317): Ceres Seq. ID no. 13615915
MTILVEHFVPDSRVDEKKVIEERDNELVLDGGFVVPKSKETDAFDAPDMNFLGHSFRDYENGESERQQGVEEFYRMQHIHQTYDFVKKMRKEYGKLNKMEMSIWECCELLNNVVDESDPDLDEPQIQHLLQTAEAIRRDYPDEDWLHLTALIHDLGKVLLLPEFGGLPQWAVVGDTFPVGCTFDSANIHHKYFKGNHDINNPKYNTKNGVYTEGCGLDNVLMSWGHDDYMYLVAKKNGTTLPHAGLFIIRYHSFYPLHKAGAYTHLMNDEDRDDLKWLHVFNKYDLYSKSKVLVDVEQVKPYYISLINKYFPAKLKW

SEQ ID NO: 104862 - protein, 269 aa, Arabidopsis thaliana
  peptide (1)..(269): Ceres Seq. ID no. 13615916
MNFLGHSFRDYENGESERQQGVEEFYRMQHIHQTYDFVKKMRKEYGKLNKMEMSIWECCELLNNVVDESDPDLDEPQIQHLLQTAEAIRRDYPDEDWLHLTALIHDLGKVLLLPEFGGLPQWAVVGDTFPVGCTFDSANIHHKYFKGNHDINNPKYNTKNGVYTEGCGLDNVLMSWGHDDYMYLVAKKNGTTLPHAGLFIIRYHSFYPLHKAGAYTHLMNDEDRDDLKWLHVFNKYDLYSKSKVLVDVEQVKPYYISLINKYFPAKLKW

SEQ ID NO: 104863 - protein, 242 aa, Arabidopsis thaliana; identical to SEQ ID NO: 36749
  peptide (1)..(242): Ceres Seq. ID no. 13615917

SEQ ID NO: 104864 - DNA, 1546 bp, Arabidopsis thaliana
  misc_feature (1)..(1546): Ceres Seq. ID no. 13615918
  misc_feature (1)..(1546): Ortholog of  Ceres SEQ ID NO 13582297 as cited in SEQ ID NO 56486
  misc_feature (1)..(1546): Ortholog of  Ceres SEQ ID NO 13586936 as cited in SEQ ID NO 0
ataaagaagtaaagctttgccggagatttagcaaacacaaacacaaaaaacaaaaccaactcagacgaatgtgattttttcttcttgagtgaattgttgtaaaaaaatgatgatcggagaatctcatcgtggttttaatccaacggttcatattcctccatggccactttctgaagatctaacggtgtctgatatttacggaagtccagacggaggaagtagtatgatggaagctttggctgagttacaacgttatcttccgtcaaacgaaccggatccggattcagatccggatctctcgggtccggattcaccaatcgatgcttatacatgcgatcattttcggatgtatgagtttaaagtgagacgttgtgctcgtggccggagccatgattggacggagtgtccttacgctcatcccggagaaaaagctcgccgtcgtgatccgaggaagtttcattactccggtacggcgtgtcctgagtttcgtaaaggttgttgcaagagaggagacgcatgtgagttttctcatggtgtttttgagtgttggcttcacccggcgcgttaccggactcagccgtgtaaagacggtggtaactgtcgccgtcgtgtttgtttctttgctcattcgccggatcagattagggttttgcctaatcaaagccctgatcgtgttgattcgttcgacgttttgtctcctacgattcgtagagcgtttcagttttcgatttctccgtcgtctaactcgccgccggtgagtccacgaggtgactcggactcgtcgtgttcgttactgagtcgttcactcgggtctaatctgggaaacgacgtcgttgcgtctctcaggaatctgcaacttaataaagtgaagtcttctctttcgtcgtcatacaacaatcaaatcggaggatacggatccggattcgggtcgcctcgtggatcggttttgggtcctggtttccgtagcttaccaactacaccgacccgacctggttttatgaacatttgggagaatggcttggaggaagaaccggcgatggaacgggtcgagtcgggtcgtgaactgcgagcgcagctgttcgagaagctgagcaaagagaattgcatgggtcggattgaaccggatccggatcagggagcgggtgatactcctgatgtcgggtgggtctctgacttggttatgtgatttgaaccggattcgtaaaccggagtgtctgaaatttcgttgataaagattaattaaaggattattatcggcatgggaggttttttaatggatctcttcttaggaaaagaggagatttctctgcaagttttttttttgtatatttattatttcctaatttcgtataatctctgttccataatcgatgattcgagggagattcctcagtgtataggagttgcttaggatttttcattatgatggattcactaatattgatattgttggttattgttttttttatatattatgatgtaagatgcaagtcgcaatgtaattattaaatatcttatgaatgaaatgagaatgtaaattatttat

SEQ ID NO: 104865 - protein, 359 aa, Arabidopsis thaliana; identical to SEQ ID NO: 38897
  peptide (1)..(359): Ceres Seq. ID no. 13615919

SEQ ID NO: 104866 - protein, 358 aa, Arabidopsis thaliana; identical to SEQ ID NO: 38898
  peptide (1)..(358): Ceres Seq. ID no. 13615920

SEQ ID NO: 104867 - protein, 320 aa, Arabidopsis thaliana; identical to SEQ ID NO: 38899
  peptide (1)..(320): Ceres Seq. ID no. 13615921

SEQ ID NO: 104868 - DNA, 1274 bp, Arabidopsis thaliana
  misc_feature (1)..(1274): Ceres Seq. ID no. 13615922
  misc_feature (1)..(1274): Ortholog of  Ceres SEQ ID NO 14308571 as cited in SEQ ID NO 58921
cctccagaagcctaaaaccttcaccaccaaatcggtgcctccttgaatagtcgccgccgtcgtctatcatcgccgcttgtgactccgatgagaagctaggttattgaatcagagattatggctgcttcaatttcaagaaggatttttcgcacttttggatccttttcagctctaggacgttcctcttcaccaaatttgtctgcgaatacatctggaaatggtttagcttctcttactaatgatctaaagtatggaatggctttactttccaaccgaaagctctccacttctattttgactcctgatgattcatttccttctgatttacttaccaaaaagactgtgcttacaccagaccgaaccataggacaatatcaagacttggtcattccagtgactaattttcagaacgaggaaaagggtttcatggttttagcaggtgatgtctttgatgttccaataaggaaagatatcattcacaatgtcgtgcgatggcagcttgcgaaacgccagcagggaactcattcgaccaaaacgttaagtgaggttagtggaactggtagaaagccatggaatcagaagggtacaggtcgagctagacatggtacactacgtggtccgcagttccgaggtggttgtgtaatgcatggacccaaaccaagaagccatgccataaaaatgaataagcaggttcgacggcttggactgaaaatagcattgacagctcgagccgcagaaggaaaactcctcgtgtttgatgatttgggattgcctacgcataaaacaaagaacattgtgaactattacaaccaaatggagaacacaaagaaagtccttgttgtagaaggtggtcctattgatgaaaagctgaagctagccacccaaaatctacactatgtcaacataattccatcaatagggctaaatgtttacagcattctgctacacgatacgcttctgatgtcccgtgatgctgtgaataagatcgttgagcgtatgcacactcctattaaccgttgaagagacaacaatgtcttaaaatggcactctcaataagaatactagatcacaaggaatcccgcatgtagtatctgtaccggttcattgtttgttagctttttggtctggttttgcaacatagaatggtgaaggattgagttttaaaataatgaatggtgatactatttctatgtttttagacattctttttttaccgttttaaatatgacttaggctttcgtgtttttgaaaaggcattttgatagaaaatttct

SEQ ID NO: 104869 - protein, 300 aa, Arabidopsis thaliana; identical to SEQ ID NO: 43198
  peptide (1)..(300): Ceres Seq. ID no. 13615923

SEQ ID NO: 104870 - protein, 254 aa, Arabidopsis thaliana; identical to SEQ ID NO: 43199
  peptide (1)..(254): Ceres Seq. ID no. 13615924

SEQ ID NO: 104871 - protein, 197 aa, Arabidopsis thaliana; identical to SEQ ID NO: 43200
  peptide (1)..(197): Ceres Seq. ID no. 13615925

SEQ ID NO: 104872 - DNA, 1655 bp, Arabidopsis thaliana
  misc_feature (1)..(1655): Ceres Seq. ID no. 13615946
  misc_feature (1)..(1655): Ortholog of  Ceres SEQ ID NO 14311553 as cited in SEQ ID NO 51462
  misc_feature (1)..(1655): Ortholog of  Ceres SEQ ID NO 13599003 as cited in SEQ ID NO 0
aaggagggaaaagaagagaacaaagcgtgagagagatagagataaatccggttctagaatcccggtttaaccgccataccggtggaagattctgctttactacgctctccgcttcttcttctcctcgattcgattctcctcatgggtttatcatgaatttttaggttttgagtaattcagaaactcgagtgatgatcccgaatgatgatgatgatgcaaattctatgaagaattatccgttaaatgatgatgatgcaaattctatgaagaattatccgttaaatgatgatgatgcaaattctatggagaattatccgttaaggtcaattccgacggagctttcacacacttgttcattgataccaccttctttaccaaacccttcagaagcagcagcagacatgtccttcaattcagaactcaatcaaatcatggcaaggccttgtgatatgctccctgccaatggtggagctgttggtcataacccttttttggaaccaggattcaactgccccgagacaacagattggattccctctccactcccccatatttattttccttcgggttctcccaatctaataatggaggatggtgtcattgatgagattcacaaacaaagtgacttgccactttggtatgacgacttgattaccactgatgaagatccactcatgtctagtatcttgggcgatcttctccttgacactaatttcaactcagcttcaaaggtccagcaaccaagtatgcaatcgcagattcaacaaccccaagctgttctgcagcagccttcttcttgtgtggaattgcgcccacttgataggacagtatcctcaaacagcaacaacaatagcaacagtaataatgcagcagcagcagctaagggacgtatgcgttggacgcctgaacttcatgaggtttttgttgacgctgttaaccagctcggtggcagtaatgaagcaactcctaaaggtgtcctgaagcatatgaaagtcgaaggtttgactatttttcatgtcaaaagtcatttgcagaaatatagaacagctaaatatataccagtaccatcagaaggttcgccggaggcaaggttgacaccgcttgagcaaattacatctgatgatacgaaacgtgggatagatatcactgagactctgcgaattcagatggaacatcagaagaaactgcatgagcagcttgagagtctaagaacaatgcaacttcggatagaagagcaaggaaaggcgctgttgatgatgattgagaagcaaaatatgggtttcggcggaccagaacaaggagagaaaacaagtgcgaaaacgcctgaaaatggttcagaggagtcggaatccccgcggccaaagcgtccgagaaatgaagaatgaaggaaacctttcttcggatggtagatcataaaactgtggttttggtggagttgtagagtatgacttattaggagtagagctttcagtcttcttcaggccttttctcttttttttttctttcttaaaactctaattttctgattctcagctctctaggaagaaacaaataaagagcaattccatctttgtgatgtaattctgagtgcagagattttagatttagtgtttaggtggattttaaactagcttttatttcgagtttcttcctgt

SEQ ID NO: 104873 - protein, 397 aa, Arabidopsis thaliana
  peptide (1)..(397): Ceres Seq. ID no. 13615947
MIPNDDDDANSMKNYPLNDDDANSMKNYPLNDDDANSMENYPLRSIPTELSHTCSLIPPSLPNPSEAAADMSFNSELNQIMARPCDMLPANGGAVGHNPFLEPGFNCPETTDWIPSPLPHIYFPSGSPNLIMEDGVIDEIHKQSDLPLWYDDLITTDEDPLMSSILGDLLLDTNFNSASKVQQPSMQSQIQQPQAVLQQPSSCVELRPLDRTVSSNSNNNSNSNNAAAAAKGRMRWTPELHEVFVDAVNQLGGSNEATPKGVLKHMKVEGLTIFHVKSHLQKYRTAKYIPVPSEGSPEARLTPLEQITSDDTKRGIDITETLRIQMEHQKKLHEQLESLRTMQLRIEEQGKALLMMIEKQNMGFGGPEQGEKTSAKTPENGSEESESPRPKRPRNEE

SEQ ID NO: 104874 - protein, 386 aa, Arabidopsis thaliana
  peptide (1)..(386): Ceres Seq. ID no. 13615948
MKNYPLNDDDANSMKNYPLNDDDANSMENYPLRSIPTELSHTCSLIPPSLPNPSEAAADMSFNSELNQIMARPCDMLPANGGAVGHNPFLEPGFNCPETTDWIPSPLPHIYFPSGSPNLIMEDGVIDEIHKQSDLPLWYDDLITTDEDPLMSSILGDLLLDTNFNSASKVQQPSMQSQIQQPQAVLQQPSSCVELRPLDRTVSSNSNNNSNSNNAAAAAKGRMRWTPELHEVFVDAVNQLGGSNEATPKGVLKHMKVEGLTIFHVKSHLQKYRTAKYIPVPSEGSPEARLTPLEQITSDDTKRGIDITETLRIQMEHQKKLHEQLESLRTMQLRIEEQGKALLMMIEKQNMGFGGPEQGEKTSAKTPENGSEESESPRPKRPRNEE

SEQ ID NO: 104875 - protein, 373 aa, Arabidopsis thaliana
  peptide (1)..(373): Ceres Seq. ID no. 13615949
MKNYPLNDDDANSMENYPLRSIPTELSHTCSLIPPSLPNPSEAAADMSFNSELNQIMARPCDMLPANGGAVGHNPFLEPGFNCPETTDWIPSPLPHIYFPSGSPNLIMEDGVIDEIHKQSDLPLWYDDLITTDEDPLMSSILGDLLLDTNFNSASKVQQPSMQSQIQQPQAVLQQPSSCVELRPLDRTVSSNSNNNSNSNNAAAAAKGRMRWTPELHEVFVDAVNQLGGSNEATPKGVLKHMKVEGLTIFHVKSHLQKYRTAKYIPVPSEGSPEARLTPLEQITSDDTKRGIDITETLRIQMEHQKKLHEQLESLRTMQLRIEEQGKALLMMIEKQNMGFGGPEQGEKTSAKTPENGSEESESPRPKRPRNEE

SEQ ID NO: 104876 - DNA, 1281 bp, Arabidopsis thaliana
  misc_feature (1)..(1281): Ceres Seq. ID no. 13615969
  misc_feature (1)..(1281): Ortholog of  Ceres SEQ ID NO 12609146 as cited in SEQ ID NO 52118
  misc_feature (1)..(1281): Ortholog of  Ceres SEQ ID NO 14303397 as cited in SEQ ID NO 54614
  misc_feature (1)..(1281): Ortholog of  Ceres SEQ ID NO 13594056 as cited in SEQ ID NO 55691
  misc_feature (1)..(1281): Ortholog of  Ceres SEQ ID NO 14314186 as cited in SEQ ID NO 57457
  misc_feature (1)..(1281): Ortholog of  Ceres SEQ ID NO 13638136 as cited in SEQ ID NO 58644
  misc_feature (1)..(1281): Ortholog of  Ceres SEQ ID NO 13596868 as cited in SEQ ID NO 62806
  misc_feature (1)..(1281): Ortholog of  Ceres SEQ ID NO 12587035 as cited in SEQ ID NO 63605
  misc_feature (1)..(1281): Ortholog of  Ceres SEQ ID NO 13595885 as cited in SEQ ID NO 69265
  misc_feature (1)..(1281): Ortholog of  Ceres SEQ ID NO 12566239 as cited in SEQ ID NO 0
  misc_feature (1)..(1281): Ortholog of  Ceres SEQ ID NO 13599119 as cited in SEQ ID NO 0
  misc_feature (1)..(1281): Ortholog of  Ceres SEQ ID NO 14308987 as cited in SEQ ID NO 0
gtgaaagaatgtagcaaataataatagagagaatttgtttagggaatacttttgccttgagaaaaatataaagaagaaaagtcgtcggcggaggaagtcagtagccaataatgataagaatcaccggctgttcacatgtggattgattacctcacattcatatttattacataaactcatctctctgtttttctttcttagaatcattcatatttcagacacaaaggcagagaaacaaattcttgtaacaatggcaggcagagagattctccataagatgaaggttggattatgcggatctgacacaggcagaggtaaaaccaaggtgtggaagaacatcgcacacggttatgactttgtgaaaggcaaagcgggccatccgatggaggactatgttgtgtctgagttcaagaaagtagacggccatgatttgggtttgtttgctatctttgatggtcacttagggcatgatgtagccaagtacttgcaaaccaatctctttgataacatactcaaagagaaggatttttggactgatacgaaaaacgctataaggaatgcatacatatcaaccgatgctgtgatattagagcagtcacttaaacttggcaaaggtggatcaacggctgtaacaggcattctgatagatgggaaaacgctagtgattgctaacgttggagactcacgtgcagtgatgtcaaagaacggtgttgcttctcaactctctgttgatcatgaaccaagcaaggaacaaaaggaaatagaaagccgtggtggctttgtatcaaatattccaggggatgttccaagagttgatggacaactagcggttgctagggcgtttggagataagagcttaaagatacatctgagctcagatccagacataagagacgagaatatcgatcatgagactgagtttatccttttcgcaagtgatggagtttggaaggtgatgtcgaaccaagaagcggtggatttgatcaaaagcataaaagatccacaagcggcagccaaggagttgatagaagaagcagtctctaagcaaagcacagacgacatttcttgtatagttgtaaggttccagtgatagataaacttttgttgtctataaactttaccattccggtgtgtgtgagagggagaaacaaaagacgtataaaacgcctaagctgtgtgatcaaagtcatgtcttgcttaaacaattccattgacaataaatgttctggccacaatgtaaaatccatggttgttgatccaatactctaaatggtttctttt

SEQ ID NO: 104877 - protein, 279 aa, Arabidopsis thaliana; identical to SEQ ID NO: 35269
  peptide (1)..(279): Ceres Seq. ID no. 13615970

SEQ ID NO: 104878 - protein, 270 aa, Arabidopsis thaliana; identical to SEQ ID NO: 35270
  peptide (1)..(270): Ceres Seq. ID no. 13615971

SEQ ID NO: 104879 - protein, 235 aa, Arabidopsis thaliana; identical to SEQ ID NO: 35271
  peptide (1)..(235): Ceres Seq. ID no. 13615972

SEQ ID NO: 104880 - DNA, 1147 bp, Arabidopsis thaliana
  misc_feature (1)..(1147): Ceres Seq. ID no. 13615977
  misc_feature (1)..(1147): Ortholog of  Ceres SEQ ID NO 12593170 as cited in SEQ ID NO 63263
  misc_feature (1)..(1147): Ortholog of  Ceres SEQ ID NO 14301882 as cited in SEQ ID NO 64381
  misc_feature (1)..(1147): Ortholog of  Ceres SEQ ID NO 13597851 as cited in SEQ ID NO 64869
  misc_feature (1)..(1147): Ortholog of  Ceres SEQ ID NO 13662420 as cited in SEQ ID NO 68680
atctccaatcgctctctctctctctctctctctctcgctcggtgtgatccgtgtagagagattggatttgctgagtaacggtgcaatgtctcgctaccagtctcattcctttgatgacggagaaattaatccttttgcgaatcctacaagtgtcccagctgcaacgtcaaagctttctcctcttccccctgagccgtacgaccgtggtgccacaatggatattcctcttgactctggaaaggatctgaaagctaaggagaaggaactccgggaaaaggaggctgaattgaagaggcgggagcaggaaatcaagcggaaagaagatgctatagcacaggccggaattgtgatagaagagaaaaactggccaccgttttttcctctcatccatcatgacatttcaaatgagatacccatccatctgcagagaatccaatatgttgctttcacatcaatgctgggtcttgtggtgtgcctgttatggaacattgtcgcagttactactgcgtggattaagggagaaggtccaacaatatggtttctagctattatctatttcatatcaggggttcctggagcgtatgttatgtggtatcgccctctttatcgtgccatgaggactgatagtgctctgaagtttgggtggtttttcttcacgtatctgtttcacatagcgttttgtgtgtttgcggcggtggctcctccaattatcttcaagggaaaatcgctgacaggaatattgccggcgatcgacgtattgagtgggaatatcttggtcgggatattttacttcattgggtttgggttcttctgtctggagtcactcgtcagcatctgggttattcagcaagtgtacatgtacttcagggggagcgggaaagcagcagagatgaagcaggaggccacaagacgagcaatgatggcagctctctgaccaatgaccacatacacacaccttttaacccatctccaattttttcccatttaacatacaaacaaacagtgaacgttagatcctcttgaaggggattgattatactccgctactcacttcatttttgttttcctcccgatttcatttaactaagattccagtgaactcaacttcttacttttttttggtaaaaggtgaagtcaacttcttact

SEQ ID NO: 104881 - protein, 310 aa, Arabidopsis thaliana
  peptide (1)..(310): Ceres Seq. ID no. 13615978
SPIALSLSLSLSLGVIRVERLDLLSNGAMSRYQSHSFDDGEINPFANPTSVPAATSKLSPLPPEPYDRGATMDIPLDSGKDLKAKEKELREKEAELKRREQEIKRKEDAIAQAGIVIEEKNWPPFFPLIHHDISNEIPIHLQRIQYVAFTSMLGLVVCLLWNIVAVTTAWIKGEGPTIWFLAIIYFISGVPGAYVMWYRPLYRAMRTDSALKFGWFFFTYLFHIAFCVFAAVAPPIIFKGKSLTGILPAIDVLSGNILVGIFYFIGFGFFCLESLVSIWVIQQVYMYFRGSGKAAEMKQEATRRAMMAAL

SEQ ID NO: 104882 - protein, 282 aa, Arabidopsis thaliana
  peptide (1)..(282): Ceres Seq. ID no. 13615979
MSRYQSHSFDDGEINPFANPTSVPAATSKLSPLPPEPYDRGATMDIPLDSGKDLKAKEKELREKEAELKRREQEIKRKEDAIAQAGIVIEEKNWPPFFPLIHHDISNEIPIHLQRIQYVAFTSMLGLVVCLLWNIVAVTTAWIKGEGPTIWFLAIIYFISGVPGAYVMWYRPLYRAMRTDSALKFGWFFFTYLFHIAFCVFAAVAPPIIFKGKSLTGILPAIDVLSGNILVGIFYFIGFGFFCLESLVSIWVIQQVYMYFRGSGKAAEMKQEATRRAMMAAL

SEQ ID NO: 104883 - protein, 239 aa, Arabidopsis thaliana
  peptide (1)..(239): Ceres Seq. ID no. 13615980
MDIPLDSGKDLKAKEKELREKEAELKRREQEIKRKEDAIAQAGIVIEEKNWPPFFPLIHHDISNEIPIHLQRIQYVAFTSMLGLVVCLLWNIVAVTTAWIKGEGPTIWFLAIIYFISGVPGAYVMWYRPLYRAMRTDSALKFGWFFFTYLFHIAFCVFAAVAPPIIFKGKSLTGILPAIDVLSGNILVGIFYFIGFGFFCLESLVSIWVIQQVYMYFRGSGKAAEMKQEATRRAMMAAL

SEQ ID NO: 104884 - DNA, 1620 bp, Arabidopsis thaliana
  misc_feature (1)..(1620): Ceres Seq. ID no. 13615983
  misc_feature (1)..(1620): Ortholog of  Ceres SEQ ID NO 13596189 as cited in SEQ ID NO 68452
acaacgtgaaaacacaggttcgtgctactactccaatgatacgggtctcaaaatactcaaaactctggcatgtctcaattccacaaattattgtttaatcattctgcttcttctataactgcagaagaaagaagaaagaagaagaagaagagattagagcttgagccataatatataatcccttgatcattagtctaaagaaccacataaaaagatgggattctggtcgttgttggaggtggcttctatgccggttattcaagttcttttcatgagtcttgtgggagctttcatggcctctgatcgttgcaagctcttccctgttgaagcccgtaattccatgaacaaggtggtgtttgtactatttgcaccggctctcatgtttgccaatctagctcagacggttacacttgaagacatcatctcatggtggtttatgccggtgaacatgggacttacatttctaatcggaggacttcttgggtggttggttgttaagattttgaaaccacctccttatcttgaaggtcttattgttgcaacttgttctgcaggaaatatggggaacctaccaatcatacttgtcccagcaatctgcgatgaggacaaaagtccttttggtaaccgaagtgtatgtagaaccgtcgggctctcttacgcgtctttctccatggcgctagggggtttctacatatggacatacacattccggctgattaaagggtccgcaatgaaagttcaagccatagaagaatctgagaaaatagcaattaaatcatccaatagtgacttagaagctgatcataagacccatctcctcggtgcaccggaagacaaggaaaacaaagtggtaaaggaaaagacagggttttggagaaaaggagtagacttcctccatgagatattggaggagcttcttgcaccacctacacttggtgcaattatcggtttcattttcggtgcagtaagatggctcagaaatcttatcataggtgatgatgctcctttacgaatagtacaaagcactgcaaaacttcttggagatgggaccattccctgtatgactattatactagggggaaacctcatacaaggtttacgttcttcggcagtcaaaccgatggttgtacttggaatagtctgtgttcggtacatagctatgccaattatcggtataggcattgtactaacagctgcaaatctcggatttcttccagctgatcctttgtttcagtatgttttgatgcttcagttcaccctcccgcctgccatgaatatcggtaccatgacacagctgtacaatgttgctcaagacgaatgctcagtgctcatgctttggacctacttggtcgcgatactggccctcactgtatggtccaccatcttccttcacttgttagtctaaagaacctgcaactctgtatgagcacaagaagattctatctctctactactacagagaccgaagctctgtcaagggatcttaccattctttttgtctatcacataaaatttgatcataacttgatagatttttctggttgcatgcgtacctttctgcaaatcttcatttttctccatatcccgatttgtaaacgccaatattgtatcaagtattac

SEQ ID NO: 104885 - protein, 396 aa, Arabidopsis thaliana
  peptide (1)..(396): Ceres Seq. ID no. 13615984
MGFWSLLEVASMPVIQVLFMSLVGAFMASDRCKLFPVEARNSMNKVVFVLFAPALMFANLAQTVTLEDIISWWFMPVNMGLTFLIGGLLGWLVVKILKPPPYLEGLIVATCSAGNMGNLPIILVPAICDEDKSPFGNRSVCRTVGLSYASFSMALGGFYIWTYTFRLIKGSAMKVQAIEESEKIAIKSSNSDLEADHKTHLLGAPEDKENKVVKEKTGFWRKGVDFLHEILEELLAPPTLGAIIGFIFGAVRWLRNLIIGDDAPLRIVQSTAKLLGDGTIPCMTIILGGNLIQGLRSSAVKPMVVLGIVCVRYIAMPIIGIGIVLTAANLGFLPADPLFQYVLMLQFTLPPAMNIGTMTQLYNVAQDECSVLMLWTYLVAILALTVWSTIFLHLLV

SEQ ID NO: 104886 - protein, 385 aa, Arabidopsis thaliana
  peptide (1)..(385): Ceres Seq. ID no. 13615985
MPVIQVLFMSLVGAFMASDRCKLFPVEARNSMNKVVFVLFAPALMFANLAQTVTLEDIISWWFMPVNMGLTFLIGGLLGWLVVKILKPPPYLEGLIVATCSAGNMGNLPIILVPAICDEDKSPFGNRSVCRTVGLSYASFSMALGGFYIWTYTFRLIKGSAMKVQAIEESEKIAIKSSNSDLEADHKTHLLGAPEDKENKVVKEKTGFWRKGVDFLHEILEELLAPPTLGAIIGFIFGAVRWLRNLIIGDDAPLRIVQSTAKLLGDGTIPCMTIILGGNLIQGLRSSAVKPMVVLGIVCVRYIAMPIIGIGIVLTAANLGFLPADPLFQYVLMLQFTLPPAMNIGTMTQLYNVAQDECSVLMLWTYLVAILALTVWSTIFLHLLV

SEQ ID NO: 104887 - protein, 377 aa, Arabidopsis thaliana
  peptide (1)..(377): Ceres Seq. ID no. 13615986
MSLVGAFMASDRCKLFPVEARNSMNKVVFVLFAPALMFANLAQTVTLEDIISWWFMPVNMGLTFLIGGLLGWLVVKILKPPPYLEGLIVATCSAGNMGNLPIILVPAICDEDKSPFGNRSVCRTVGLSYASFSMALGGFYIWTYTFRLIKGSAMKVQAIEESEKIAIKSSNSDLEADHKTHLLGAPEDKENKVVKEKTGFWRKGVDFLHEILEELLAPPTLGAIIGFIFGAVRWLRNLIIGDDAPLRIVQSTAKLLGDGTIPCMTIILGGNLIQGLRSSAVKPMVVLGIVCVRYIAMPIIGIGIVLTAANLGFLPADPLFQYVLMLQFTLPPAMNIGTMTQLYNVAQDECSVLMLWTYLVAILALTVWSTIFLHLLV

SEQ ID NO: 104888 - DNA, 1285 bp, Arabidopsis thaliana
  misc_feature (1)..(1285): Ceres Seq. ID no. 13615990
  misc_feature (1)..(1285): Ortholog of  Ceres SEQ ID NO 15172958 as cited in SEQ ID NO 51206
  misc_feature (1)..(1285): Ortholog of  Ceres SEQ ID NO 15171139 as cited in SEQ ID NO 60093
  misc_feature (1)..(1285): Ortholog of  Ceres SEQ ID NO 12634262 as cited in SEQ ID NO 0
atgaatggcgatgagcttcctttcgagagtggtttcgaggtttacgctaagggaactcataagtcagagtttgactcgaatttgcttgatcctcgttctgatcctatttgggatgctataagagaagaagctaaacttgaggcagagaaagagcctattttgagtagcttcttgtatgctggtatcttagcacatgattgtttagagcaagctttagggtttgttctagccaaccgtctccaaaacccaaccttgttggcaacacaactcttggatatattttatggtgttatgatgcatgacaaaggtattcagagttcgattcgccatgatctccaggcatttaaagatcgtgatcctgcttgtctgtcgtatagttctgctattttacatctgaagggttatcatgcgttacaagcatatagggttgcgcataaactgtggaatgaagggaggaaactattagctcttgcattgcaaagccgaataagcgaggtagttggtgatcattgtcttttggttgagtcttgctggagctgcatttttgagctcaatgtctgatctatgctgtggtttctctcaggtttttggcattgacatacatccaggtagagttttgagcttcatatctctgctctcatctgtttgaacattctcagtttcccttctctgttgtaatagttgatcaggtttaccggtgaattgattgctggttatacatattacttgaattctctttctgcatagcggcaagaattggggagggaatattgttggatcatggaactggagtggtcattggtgagaccgctgtgataggcaacggtgtctcgatcttacatggtgtgactttaggaggaaccggaaaggaaactggcgatcgccacccaaagataggtgaaggtgcattgcttggagcttgtgtgactatacttggtaacataagcataggtgctggagcaatggtagctgcaggttcacttgtgttaaaagacgttccttcgcatagtgtggtggctggaaatcctgcaaaactgatcagggtcatggaagagcaagacccgtctctagcaatgaaacacgatgctactaaagagttctttcgacatgtagctgatggttacaaaggggcacaatctaacggaccatcactttcagcaggagatacagagaaaggacacactaacagcacatcatgagatctttgtatgcaaatttcttaccatcataagctaattcttgtatgctcttgcttatcatcataagctaatctcagcatttcctc

SEQ ID NO: 104889 - protein, 186 aa, Arabidopsis thaliana
  peptide (1)..(186): Ceres Seq. ID no. 13615991
MNGDELPFESGFEVYAKGTHKSEFDSNLLDPRSDPIWDAIREEAKLEAEKEPILSSFLYAGILAHDCLEQALGFVLANRLQNPTLLATQLLDIFYGVMMHDKGIQSSIRHDLQAFKDRDPACLSYSSAILHLKGYHALQAYRVAHKLWNEGRKLLALALQSRISEVVGDHCLLVESCWSCIFELNV

SEQ ID NO: 104890 - DNA, 1603 bp, Arabidopsis thaliana
  misc_feature (1)..(1603): Ceres Seq. ID no. 13615992
  misc_feature (1)..(1603): Ortholog of  Ceres SEQ ID NO 13657677 as cited in SEQ ID NO 66119
ctttttgcgatcaatcgaaagaaaacaaaaaatggggaaagttccgtcgtcgtttcgtagtatgccggcgaacttattggtcagaaaaacaacaccatctcctccagcgccgccgcgagattttcgcaacagaaccgccgtgggaggagattcagccaaacttccccagaatactcaagcccctcgcgagccctccttgaggaatccattcaagtcaccaaatctctcagacgctaaaagcctcttcaattcaatcgccgccacttcacgaatcccactcgatctcaagttccacaactctgttcttcaatcatacggttcaatcgccgtcgtcaacgatacggtgaaactctttcagcatattttgaaatcgcagcctaatttcaggccgggacgttcaacgttccttatcttgctttcacatgcttgtagagctcctgattcgtcgatttcgaatgttcatagagttcttaatctcatggttaataatggtttagagcctgatcaagtaactaccgatatcgcggtgaggtctctttgcgaaacgggtcgggttgatgaagctaaggatttgatgaaggagctcactgagaaacactctcctccggatacatatacttataactttctactgaagcatttgtgcaaatgcaaagatcttcatgttgtttatgagtttgttgatgagatgagagatgatttcgatgttaagccggatcttgttagcttcactatcttgattgataatgtttgtaactctaagaacttgagggaggcaatgtatctagttagtaagttaggtaatgctgggtttaagccggattgtttcctctataacacgattatgaaaggtttttgcacactgagtaaagggagtgaggcggttggtgtgtataagaaaatgaaggaagaaggtgttgagccagatcagattacctacaatactttgatatttggactgtcgaaagctggtagagttgaggaagctaggatgtatttgaaaactatggttgatgcggggtatgagccggatactgctacttacacatcactgatgaatggaatgtgtagaaaaggtgagtctttaggtgcgttgagtttgttagaagaaatggaagcaagagggtgtgctccaaatgattgtacttataatactttgcttcatggattgtgtaaagcaaggttgatggataaagggatggagttatatgaaatgatgaaatcaagtggtgtaaagcttgagagtaatggttatgctacacttgtgaggtctctggttaaaagtggcaaggtcgcagaggcttatgaagtgtttgattatgcagttgatagcaagagtttgtcagatgcttctgcgtactctacacttgaaactaccttgaaatggttgaaaaaagctaaagaacaaggcttggttccataaatggtatcctctagctgagctttaccgactttcttctttatgcaagtccatatttcatttttgaagtagtgttactccaaaagcaatgaatttgtttcgaaatatgctgttcgattcttaagggaccagcagtgatttataatagtaactttgttggtaatattattgtcacttgagatt

SEQ ID NO: 104891 - protein, 473 aa, Arabidopsis thaliana
  peptide (1)..(473): Ceres Seq. ID no. 13615993
FLRSIERKQKMGKVPSSFRSMPANLLVRKTTPSPPAPPRDFRNRTAVGGDSAKLPQNTQAPREPSLRNPFKSPNLSDAKSLFNSIAATSRIPLDLKFHNSVLQSYGSIAVVNDTVKLFQHILKSQPNFRPGRSTFLILLSHACRAPDSSISNVHRVLNLMVNNGLEPDQVTTDIAVRSLCETGRVDEAKDLMKELTEKHSPPDTYTYNFLLKHLCKCKDLHVVYEFVDEMRDDFDVKPDLVSFTILIDNVCNSKNLREAMYLVSKLGNAGFKPDCFLYNTIMKGFCTLSKGSEAVGVYKKMKEEGVEPDQITYNTLIFGLSKAGRVEEARMYLKTMVDAGYEPDTATYTSLMNGMCRKGESLGALSLLEEMEARGCAPNDCTYNTLLHGLCKARLMDKGMELYEMMKSSGVKLESNGYATLVRSLVKSGKVAEAYEVFDYAVDSKSLSDASAYSTLETTLKWLKKAKEQGLVP

SEQ ID NO: 104892 - protein, 463 aa, Arabidopsis thaliana; identical to SEQ ID NO: 42925
  peptide (1)..(463): Ceres Seq. ID no. 13615994

SEQ ID NO: 104893 - protein, 453 aa, Arabidopsis thaliana; identical to SEQ ID NO: 42926
  peptide (1)..(453): Ceres Seq. ID no. 13615995

SEQ ID NO: 104894 - DNA, 883 bp, Arabidopsis thaliana
  misc_feature (1)..(883): Ceres Seq. ID no. 13615999
  misc_feature (1)..(883): Ortholog of  Ceres SEQ ID NO 12635883 as cited in SEQ ID NO 0
agttacatctacttgtctacttgtcgtttcttgtatagttggagtttatagtttgtcttaacgtacaagataatttgaaaggtagacgtagacgttggatacttatttggtaggctcttaagaatcttaggtgtatctctttagtttgaaggttagattcagaatctctgtagattcattagtagctttttctgtgtgatctttgtgttgtatatatatagatcgaattgattttagctggtgaaaggtgaagttgtggtatgaatatgaagaaacagattatggatgagtctgtaaagtcattgatgctgcctcctcctccaccgcttcttcctccatctcagggatatggatcaagaaagatcgatggagacagcataaccaataaacagatcaagaagttctggagacagaagcagatcattgaagaggatcatctctattctgctattaaggctgcagctcgtgtcagagctcgtaatctctctgatgaggactacaaacgctttgaagaaagcttggacatggaggacctggaaaccgaagatcatcagggattgaaagactggtggacaaagagcaaatacgcgtacttgaaccagccggctcttggatctgcagattcactgaagagaaagaggttttcgacttatacaccaaactgtttctcgttcaagccttgcaatcctctctacgcaacttcgctcaatgtcttttgaaccatgagcagcaaactctgcaagatcaatcgtcttgcatatatgtatatatttgttcgtgtgtgtctctgtacatgtcatgtgttattgcttctatattaatggatctggactttggtgtggttgttgatttgtaactgttgaataaaatctttctatggaac

SEQ ID NO: 104895 - protein, 152 aa, Arabidopsis thaliana; identical to SEQ ID NO: 25888
  peptide (1)..(152): Ceres Seq. ID no. 13616000

SEQ ID NO: 104896 - protein, 150 aa, Arabidopsis thaliana; identical to SEQ ID NO: 25889
  peptide (1)..(150): Ceres Seq. ID no. 13616001

SEQ ID NO: 104897 - protein, 145 aa, Arabidopsis thaliana; identical to SEQ ID NO: 25890
  peptide (1)..(145): Ceres Seq. ID no. 13616002

SEQ ID NO: 104898 - DNA, 1003 bp, Arabidopsis thaliana
  misc_feature (1)..(1003): Ceres Seq. ID no. 13616003
  misc_feature (1)..(1003): Ortholog of  Ceres SEQ ID NO 12784064 as cited in SEQ ID NO 66982
  misc_feature (1)..(1003): Ortholog of  Ceres SEQ ID NO 15177907 as cited in SEQ ID NO 0
caccgtaaatcgtttctgggttcttaagaataacatggcctcgtcatcatcatcatcttatagattccaatctgggtcttaccctctttcgtcaagtccttctcttgggaatttcgtcgaacgcattaaagacgcttgtcatttccttgtctctgctgttttgggtaccattatctccgcgatcttgaccttcttcttcgcactagtgggcacattgctaggggcacttacaggagctttgataggtcaagaaactgagagtggtttcattagaggagcagcaattggagccatttcgggagctgttttctctatcgaggtctttgaatcatctctggatctctggaaatccgatgagtcgggtttcggatgttttctctacttgattgatgtcattgttagtcttctaagcgggagacttgtacgagagcgcattggtcctgcaatgctaagtgcagtgcaaagtcaaatgggagctgtggatacagcttttgatgatcacacaagcctttttgatacaggaggctcaaaaggattgacaggagaccttgttgagaaaatcccaaagatgacaatcactggcaacaataacactgatgcttctgagaacacagactcatgttctgtttgtcttcaggatttccagctcggtgaaacagttagaagcttgcctcattgtcatcacatgtttcacttaccttgcatagacaattggctccttagacacggttcttgcccgatgtgtagacgtgatatttaatctcttcatctctccatcgtccgtctctcataatgcagtttaacctcgcagttcagatatttctacagctcgtacatcaagagtctgctctgctcttcttccctcctccttgagtttcatgtaaattccagttcttttggctgtttacaattacgatacctctcttactctttcagagtcattgtaggactcctagttctctaatgtacaaagaaacacaaaaatagagtttttgttttatct

SEQ ID NO: 104899 - protein, 252 aa, Arabidopsis thaliana
  peptide (1)..(252): Ceres Seq. ID no. 13616004
TVNRFWVLKNNMASSSSSSYRFQSGSYPLSSSPSLGNFVERIKDACHFLVSAVLGTIISAILTFFFALVGTLLGALTGALIGQETESGFIRGAAIGAISGAVFSIEVFESSLDLWKSDESGFGCFLYLIDVIVSLLSGRLVRERIGPAMLSAVQSQMGAVDTAFDDHTSLFDTGGSKGLTGDLVEKIPKMTITGNNNTDASENTDSCSVCLQDFQLGETVRSLPHCHHMFHLPCIDNWLLRHGSCPMCRRDI

SEQ ID NO: 104900 - protein, 241 aa, Arabidopsis thaliana; identical to SEQ ID NO: 22201
  peptide (1)..(241): Ceres Seq. ID no. 13616005

SEQ ID NO: 104901 - DNA, 1327 bp, Arabidopsis thaliana
  misc_feature (1)..(1327): Ceres Seq. ID no. 13616018
  misc_feature (1)..(1327): Ortholog of  Ceres SEQ ID NO 12635446 as cited in SEQ ID NO 0
atgggcctgatccaaaatgcacacgtggtaactgccgccgatagagaaggagctgacgtggcgaatttaaggtcaatttgggatctagcaagtagcaatttagggttttcattttacccatttcctctctttgtacgaacaaagtgcttcgagtttttgttaacctttttctctgatctaatggcgatggaagatcaatcggcggcgagatctatcggaaaagttagttggtttagcgatggaaaaggctacggtttcattactcccgatgatggcggcgaagagctttttgttcatcaatcctcaattgtctccgatggattccgtagcttgactcttggtgaatcggttgaatacgaaatcgcgcttggaagcgacggaaagactaaggccattgaagttactgctcccggcggcggttcacttaataagaaggaaaacagctcccgtggatccggaggtaattgttttaattgcggtgaggttggtcatatggctaaggattgtgacggtggaagtggtgggaaaagctttggaggtggtggtggtcgtagatctggcggcgaaggtgaatgttacatgtgtggtgatgtgggacacttcgctagggattgtaggcaaagcggtggtggaaacagcggcggaggaggaggaggtggtcgtccgtgttacagttgcggtgaggttggtcatttggcaaaggattgtcgtggtggttctggtggaaacagatacggaggaggtggtggtcgtggatctggcggtgatggatgctacatgtgtggtggtgtgggacatttcgctagggattgtaggcaaaacggcggtggaaacgttggaggtggtggaagcacttgttatacctgtggcggagttggccacattgcgaaagtttgcaccagcaagataccttctggtggtggtggtggtggtcgtgcttgttacgaatgtggaggaactggccatttggctcgtgactgtgatcggagaggaagtggaagcagcggaggtggcggtggcagtaacaagtgcttcatctgcggcaaggaaggtcactttgcgagggaatgtacttcggttgcttaacaaaaagatgcaaagaagaagagtaatgttcataaacctcttttgttttctattaaaatctacctaatgctcctttttggtgactataatgtgattgctaaagtcgtttaggatgtttaagaatggttgttttgggagtttttgatctctctatattactcttttgactggtttatgcaacctgttcactgcttttgttgatgccataagtttgagatcttgaatgatatgtgtgcttgct

SEQ ID NO: 104902 - protein, 361 aa, Arabidopsis thaliana
  peptide (1)..(361): Ceres Seq. ID no. 13616019
MGLIQNAHVVTAADREGADVANLRSIWDLASSNLGFSFYPFPLFVRTKCFEFLLTFFSDLMAMEDQSAARSIGKVSWFSDGKGYGFITPDDGGEELFVHQSSIVSDGFRSLTLGESVEYEIALGSDGKTKAIEVTAPGGGSLNKKENSSRGSGGNCFNCGEVGHMAKDCDGGSGGKSFGGGGGRRSGGEGECYMCGDVGHFARDCRQSGGGNSGGGGGGGRPCYSCGEVGHLAKDCRGGSGGNRYGGGGGRGSGGDGCYMCGGVGHFARDCRQNGGGNVGGGGSTCYTCGGVGHIAKVCTSKIPSGGGGGGRACYECGGTGHLARDCDRRGSGSSGGGGGSNKCFICGKEGHFARECTSVA

SEQ ID NO: 104903 - protein, 301 aa, Arabidopsis thaliana; identical to SEQ ID NO: 35707
  peptide (1)..(301): Ceres Seq. ID no. 13616020

SEQ ID NO: 104904 - protein, 299 aa, Arabidopsis thaliana; identical to SEQ ID NO: 35708
  peptide (1)..(299): Ceres Seq. ID no. 13616021

SEQ ID NO: 104905 - DNA, 967 bp, Arabidopsis thaliana
  misc_feature (1)..(967): Ceres Seq. ID no. 13616022
  misc_feature (1)..(967): Ortholog of  Ceres SEQ ID NO 13599581 as cited in SEQ ID NO 0
atttacaactgtggataagccttttagtctgactcagctttctcaagatccgaaaacacactgacccaacccggttcgattttgcttaaccggacaagatacattaatctgcctaatcttcaattatttaaaagctaactaaacgttatacgtactaatcacttcttcccctataaataaacctttctaatttctcatctcaaatcacactgcatcacaaaacccaaatcggaacttaaaccaaaagacaaacaaaaacgccgtcgtttcacgatgctttcttcttccccaaccttcttcgctactccatttctctcttcttcttcttcttcttctccgtcgttctcttctacttcaccaccgtcacgcatttcccggatctcgccgtcgctttctacaaccaccgcgtcctacacctgcgccgaagatctaccgagattacgccaaatcccgcagcgattttcagcaaccgcgtctctctacgagatccttgaaattcccgtcggctcgacgagtcaagagatcaaatcagcttaccggcgactagccaggatctgtcatcccgatgtagcgagaaatagtcgggataactcgtcggcggacgatttcatgaagatccacgcagcgtattgcacgctttcggatcccgagaaacgcgccgtttatgatcggaggactcttcttcggagccggccgttaacggctggatacggcagttacggtggacggaattgggaaaccgatcagtgctggtagcgagttgactcgatgtgtcgagttggtccaaaaccattgaattggttgtaattagagcaaacccagagattctgggtggttgtgccacgtaggatcaacacggtttatcgtgccacgtaggatctgtcgcgtttttagcctttgtatccataagtagtaagtagtctgtatttagtatttaccatctaataaagaaaataaaaatttatgt

SEQ ID NO: 104906 - protein, 160 aa, Arabidopsis thaliana; identical to SEQ ID NO: 35361
  peptide (1)..(160): Ceres Seq. ID no. 13616023

SEQ ID NO: 104907 - DNA, 1099 bp, Arabidopsis thaliana
  misc_feature (1)..(1099): Ceres Seq. ID no. 13616036
  misc_feature (1)..(1099): Ortholog of  Ceres SEQ ID NO 15175591 as cited in SEQ ID NO 57544
ttcgttccctggttcgaaacagcagctagacgaaaactgtgtaatggctatatcactgaagaggaaccgtttcttcattccttatacgaatctcgtcttcttcttcttcttgtgtgtctctctgctcgataaaactgtatccatcaggatttcgaatcagatctcggatactgtcgttgattctcccgatcgtcctttgaaatctgcggttttcgctcttggaagcttctggagatcggaggcggcgtttggttgtatcaatggcgtcgtacgaacctccgccggttacgccggtggaacgaagacgaatccggagtataggaacttaggtgatcacgccgagtccgtacaggttgaatatgatccaaggataattggttatcgtcagctcttagatgtattttggtctagtcatgattctagacaagtgtttggacaaggtcctgatgtgggtaatcaatacagatcctgtattttcactaattctacagaagaattgagactggcttctaccagcaaagaaagggagcaacttaatacaagaagcagtatcgtgaccactcaaattcaacagctaggaacgttttatcgcgcagagcctgatcaccagaagttcgagctgaaacaacatccatttcttattcagctaattggaaacatggtagaagaagagcttgagagatcagctctagccacaaaactaaacggttacgcagccgagctctgcccgcctagaatccagaaacatatcgactctagagttaatgagatcattagaaaaggttggcccgtcttgagagacatctaatatataagccttgtgagatcttcgcgttcttggatttgattgcttagtctcagatgtaagttttggttcattcttttggccaggaatttggtcacaacaatgtttatgtcttactcttgccccttgagtggtgattgttcagcgttttgtcttgtttcttttaagatctctcaaatagtatatgctttttgttttcttgtaagaagattcagttagactttcattgtatcattatggtattgattaccaattcattgatattatatatatatatgatatactttgattgcc

SEQ ID NO: 104908 - protein, 268 aa, Arabidopsis thaliana
  peptide (1)..(268): Ceres Seq. ID no. 13616037
SFPGSKQQLDENCVMAISLKRNRFFIPYTNLVFFFFLCVSLLDKTVSIRISNQISDTVVDSPDRPLKSAVFALGSFWRSEAAFGCINGVVRTSAGYAGGTKTNPEYRNLGDHAESVQVEYDPRIIGYRQLLDVFWSSHDSRQVFGQGPDVGNQYRSCIFTNSTEELRLASTSKEREQLNTRSSIVTTQIQQLGTFYRAEPDHQKFELKQHPFLIQLIGNMVEEELERSALATKLNGYAAELCPPRIQKHIDSRVNEIIRKGWPVLRDI

SEQ ID NO: 104909 - protein, 254 aa, Arabidopsis thaliana
  peptide (1)..(254): Ceres Seq. ID no. 13616038
MAISLKRNRFFIPYTNLVFFFFLCVSLLDKTVSIRISNQISDTVVDSPDRPLKSAVFALGSFWRSEAAFGCINGVVRTSAGYAGGTKTNPEYRNLGDHAESVQVEYDPRIIGYRQLLDVFWSSHDSRQVFGQGPDVGNQYRSCIFTNSTEELRLASTSKEREQLNTRSSIVTTQIQQLGTFYRAEPDHQKFELKQHPFLIQLIGNMVEEELERSALATKLNGYAAELCPPRIQKHIDSRVNEIIRKGWPVLRDI

SEQ ID NO: 104910 - DNA, 1697 bp, Arabidopsis thaliana
  misc_feature (1)..(1697): Ceres Seq. ID no. 13616041
  misc_feature (1)..(1697): Ortholog of  Ceres SEQ ID NO 12612314 as cited in SEQ ID NO 51420
  misc_feature (1)..(1697): Ortholog of  Ceres SEQ ID NO 14306493 as cited in SEQ ID NO 53170
  misc_feature (1)..(1697): Ortholog of  Ceres SEQ ID NO 14311095 as cited in SEQ ID NO 53197
atcacttctaaaaccttttctcaaatctctctcactctctttcaccggaataaaattctctaggtcatcggaaattttttacttcagccgacaatgtttccttcatcagatttctctttctcaccgtcgtcgctgttctcagcgtacgcatctttaaccggattcttgatgctctttagatcgatgctccatgatttcgtaccggagaagcttcgatcttacttctccagcttactcgaccggtttttcactccgaaatcaaagtatctcactgtgatcatcgacgagaacttcggattgaaccggaatcaagtcttcgacgcggcggagatgtatctcaggagcaagatcggaccggaaacagagcggttgcgagttggtaagatcccaaaacagaagcatttcacaatctctatcgaaagaggcgaagagatcctcgatactttcgaggagtcggaggtgaaatggagttatgttcaatcggagaacgagaaaggagataaagtgaaacgttactacgagctcacattcgagaagaagcttagagacaaagtcttgaactcttatttaacccacgttgtagccgaatccgaggagatcaagaggaatctgagagtggtgaagctttatagcagagatgtgtatgctagtgatgatgatgatggaatggctggtgggaattggggatgtatcaatctcgagcatccgtctacgttcgatacgttggcgatggatccgaatgcgaagaagaagatcatcgatgatttggagaggtttttgaagaggaaggagttttacaaaagagttggtaaagcttggaaacgaggttacttgttgtatgggccaccaggaactggtaaatctagtttgattgctgcgatggcgaattatcttaagtttgatgtgtttgatcttgagcttagtagtatttatgacaatggtgagttgaagagggttttgttatctacgacgaatcgttcgattttggttattgaggatattgattgtaatgctgaagtgagagatagggaagctgagaatcaagaagatgaacaaattaagggaaaggtgactctatcagggattctgaatttcattgatggtttatggtcgagtttcggagatgagagaatcattgtgttcacgacgaatcacaaagaacggcttgatcctgctctgctacgtcctggaagaatggatgtgcatatcaacatgtcttattgtacaggtttaggatttaggacattggtctctaactaccttggtttagatggcttaaaccatcctctttgcgaggaaatcgaggcgctggtcgattctactgaagttactccagctgagttagctgaagagctgatgcaagacgatgatactgacgttgttcttcgtggagtaataagctttgttgagaagaggaaggttgagagaagcaagactaagaaggaggtttctatttgtaaagcaactgatgatgacgaaaaacagaatggttctttgggttgtgtaaagaagaagaagaaagggggtaaacagaaaggtaaagggaaaggtaaaggaaaggccaaaacttatttgatataagagataaccttgaacaatatgatctgttgtgttgtgttgtgtaacatggtaaatcaaacctgtgttcaacattatgccaaataaataaagctttgtatggttctaaacattctact

SEQ ID NO: 104911 - protein, 495 aa, Arabidopsis thaliana
  peptide (1)..(495): Ceres Seq. ID no. 13616042
MFPSSDFSFSPSSLFSAYASLTGFLMLFRSMLHDFVPEKLRSYFSSLLDRFFTPKSKYLTVIIDENFGLNRNQVFDAAEMYLRSKIGPETERLRVGKIPKQKHFTISIERGEEILDTFEESEVKWSYVQSENEKGDKVKRYYELTFEKKLRDKVLNSYLTHVVAESEEIKRNLRVVKLYSRDVYASDDDDGMAGGNWGCINLEHPSTFDTLAMDPNAKKKIIDDLERFLKRKEFYKRVGKAWKRGYLLYGPPGTGKSSLIAAMANYLKFDVFDLELSSIYDNGELKRVLLSTTNRSILVIEDIDCNAEVRDREAENQEDEQIKGKVTLSGILNFIDGLWSSFGDERIIVFTTNHKERLDPALLRPGRMDVHINMSYCTGLGFRTLVSNYLGLDGLNHPLCEEIEALVDSTEVTPAELAEELMQDDDTDVVLRGVISFVEKRKVERSKTKKEVSICKATDDDEKQNGSLGCVKKKKKGGKQKGKGKGKGKAKTYLI

SEQ ID NO: 104912 - protein, 470 aa, Arabidopsis thaliana
  peptide (1)..(470): Ceres Seq. ID no. 13616043
MLFRSMLHDFVPEKLRSYFSSLLDRFFTPKSKYLTVIIDENFGLNRNQVFDAAEMYLRSKIGPETERLRVGKIPKQKHFTISIERGEEILDTFEESEVKWSYVQSENEKGDKVKRYYELTFEKKLRDKVLNSYLTHVVAESEEIKRNLRVVKLYSRDVYASDDDDGMAGGNWGCINLEHPSTFDTLAMDPNAKKKIIDDLERFLKRKEFYKRVGKAWKRGYLLYGPPGTGKSSLIAAMANYLKFDVFDLELSSIYDNGELKRVLLSTTNRSILVIEDIDCNAEVRDREAENQEDEQIKGKVTLSGILNFIDGLWSSFGDERIIVFTTNHKERLDPALLRPGRMDVHINMSYCTGLGFRTLVSNYLGLDGLNHPLCEEIEALVDSTEVTPAELAEELMQDDDTDVVLRGVISFVEKRKVERSKTKKEVSICKATDDDEKQNGSLGCVKKKKKGGKQKGKGKGKGKAKTYLI

SEQ ID NO: 104913 - protein, 465 aa, Arabidopsis thaliana
  peptide (1)..(465): Ceres Seq. ID no. 13616044
MLHDFVPEKLRSYFSSLLDRFFTPKSKYLTVIIDENFGLNRNQVFDAAEMYLRSKIGPETERLRVGKIPKQKHFTISIERGEEILDTFEESEVKWSYVQSENEKGDKVKRYYELTFEKKLRDKVLNSYLTHVVAESEEIKRNLRVVKLYSRDVYASDDDDGMAGGNWGCINLEHPSTFDTLAMDPNAKKKIIDDLERFLKRKEFYKRVGKAWKRGYLLYGPPGTGKSSLIAAMANYLKFDVFDLELSSIYDNGELKRVLLSTTNRSILVIEDIDCNAEVRDREAENQEDEQIKGKVTLSGILNFIDGLWSSFGDERIIVFTTNHKERLDPALLRPGRMDVHINMSYCTGLGFRTLVSNYLGLDGLNHPLCEEIEALVDSTEVTPAELAEELMQDDDTDVVLRGVISFVEKRKVERSKTKKEVSICKATDDDEKQNGSLGCVKKKKKGGKQKGKGKGKGKAKTYLI

SEQ ID NO: 104914 - DNA, 1484 bp, Arabidopsis thaliana
  misc_feature (1)..(1484): Ceres Seq. ID no. 13616045
  misc_feature (1)..(1484): Ortholog of  Ceres SEQ ID NO 13595529 as cited in SEQ ID NO 56687
atttattcatcacttatcagcgatttgacgagaagagctttttggtttctgcgaatcatccaaaatccgccatggaagcaactacaagaatcttgagtacttcttctgctctcaatcgtcttcttcttctcagtaagctcaatctaaaatcagatccccgtaatatcaattccacaaatcagctactacacaatgccgttacccgaaaatcctctatctccgccgctcgtatacggtgctcttcgctccctgcgaatgcgaatctcttcagatcactcttcttcctaacgtcaacgtttcgtctcgagaacaccgccgttcacgctaatccattccgatccgaacctaacgacggcgtcgccgtctggaacagagctccacggatcgtgaacggaggtggaaacgcggcgatattcggcgggaacgaggggaaagagacgacggtggttctccttggttggctaggagcgaaagctaaacatctaaggagatacgttgagtggtacaactccaggggaattaacgccgttactttcactgttgacgttagggatttgctccggttagatcttggtcggcggcttgaacgaaggatagctgaatttgggaatgaattggttaattgggtatcggagaaagaagatgatggtagagagaaatgcttggtgtttcacagtttcagtaacactggttggcttgtatatggtgccttgctagagagcttcattggtagacaagatttagtagaaaggattaagggttgtatcattgactcgggaggagcagatcctcttgatactaagatttgggcagcggggtttaccgcggctatactgaagaagcgtagctccaccataaccacagaaccaaacagtcccataaaagaagaggatgcttcaacaccacaaaagaaggaacctttaggaatcgaaaacataatgctatcatctctggagaaactcttccccatcttcttaaaccacccagacgtcaatacgaggctaacaaaaatcattcaaaaactatatgagaaccatcctccatgtcctcagctctatctttacagctccggggacaaagttgttccatctcattccgttgagctccgcatccgagaacaacagaagattggaagaaagatacattctttcaatttcaagtcctctcctcacgtggatcattaccggaactttcctgacttgtattcctcacagcttcaaaacttcttgcaagaatgcttcacaccaacaaaacaacaagctctgtgactttggaacatctttttttgcagaatatttgtagccttggtttgtttgtttgttttctcctcaaaagttgtttattattgatgatagaacaagataatccgaaggagacagaaactccaaactgtgtcgacgagctactgagcagagatagtttctgaaactcttagattgttgttgctagtttggcttcatatgtgaaacttgaccgatgctcgg

SEQ ID NO: 104915 - protein, 421 aa, Arabidopsis thaliana
  peptide (1)..(421): Ceres Seq. ID no. 13616046
LFITYQRFDEKSFLVSANHPKSAMEATTRILSTSSALNRLLLLSKLNLKSDPRNINSTNQLLHNAVTRKSSISAARIRCSSLPANANLFRSLFFLTSTFRLENTAVHANPFRSEPNDGVAVWNRAPRIVNGGGNAAIFGGNEGKETTVVLLGWLGAKAKHLRRYVEWYNSRGINAVTFTVDVRDLLRLDLGRRLERRIAEFGNELVNWVSEKEDDGREKCLVFHSFSNTGWLVYGALLESFIGRQDLVERIKGCIIDSGGADPLDTKIWAAGFTAAILKKRSSTITTEPNSPIKEEDASTPQKKEPLGIENIMLSSLEKLFPIFLNHPDVNTRLTKIIQKLYENHPPCPQLYLYSSGDKVVPSHSVELRIREQQKIGRKIHSFNFKSSPHVDHYRNFPDLYSSQLQNFLQECFTPTKQQAL

SEQ ID NO: 104916 - protein, 398 aa, Arabidopsis thaliana
  peptide (1)..(398): Ceres Seq. ID no. 13616047
MEATTRILSTSSALNRLLLLSKLNLKSDPRNINSTNQLLHNAVTRKSSISAARIRCSSLPANANLFRSLFFLTSTFRLENTAVHANPFRSEPNDGVAVWNRAPRIVNGGGNAAIFGGNEGKETTVVLLGWLGAKAKHLRRYVEWYNSRGINAVTFTVDVRDLLRLDLGRRLERRIAEFGNELVNWVSEKEDDGREKCLVFHSFSNTGWLVYGALLESFIGRQDLVERIKGCIIDSGGADPLDTKIWAAGFTAAILKKRSSTITTEPNSPIKEEDASTPQKKEPLGIENIMLSSLEKLFPIFLNHPDVNTRLTKIIQKLYENHPPCPQLYLYSSGDKVVPSHSVELRIREQQKIGRKIHSFNFKSSPHVDHYRNFPDLYSSQLQNFLQECFTPTKQQAL

SEQ ID NO: 104917 - DNA, 822 bp, Arabidopsis thaliana
  misc_feature (1)..(822): Ceres Seq. ID no. 13616048
  misc_feature (1)..(822): Ortholog of  Ceres SEQ ID NO 14307709 as cited in SEQ ID NO 59484
  misc_feature (1)..(822): Ortholog of  Ceres SEQ ID NO 13598153 as cited in SEQ ID NO 61562
aaagaaacaaattgttggaatctcaattctcgaatctgacatctcggagaagagatatggcgacagagtcatcggaatcggaagaagaaggaaagattagtggaggaaactataagctaatcatagacgacgatctaagagagatgggtaaaaacgcagcttggagcgttagctcttgtaagcccggcaatggcgtcaccactctccgcgacgacaatctcgagacttattggcaatcagatgggttacaaccacatttgattaacattcaattccagaagaaagtgaaactgcagttagtggttttgtacgttgactttaagcttgatgagagctatacaccaagtaaaatctctattcgagctggtgatggttttcataacttaaaggagattaaaagtgtggagcttgttaaaccaactggttgggtttgcttatctttgtctggaaccgatccacgggaaacttttgtcaatacatttatgttacaaatagccattttgtcaaatcacctcaacgggagagatactcatatccgccagatcaaagtttacggccctagaccaaatcctattccgcaccaaccttttcagtttacatcgatggagtttctcacttattcaacactgagatgagaaatttgagcaggagaagtttgaagaacatggactatgaaagatactgatgttgataccacatgaagagtctataatcagattagttattgttgttgtgcaatggcttttgtttatatattacattggatataacaatcataacttcagtaagcttatcaaccaagacctccataaaacatttgac

SEQ ID NO: 104918 - protein, 210 aa, Arabidopsis thaliana
  peptide (1)..(210): Ceres Seq. ID no. 13616049
RNKLLESQFSNLTSRRRDMATESSESEEEGKISGGNYKLIIDDDLREMGKNAAWSVSSCKPGNGVTTLRDDNLETYWQSDGLQPHLINIQFQKKVKLQLVVLYVDFKLDESYTPSKISIRAGDGFHNLKEIKSVELVKPTGWVCLSLSGTDPRETFVNTFMLQIAILSNHLNGRDTHIRQIKVYGPRPNPIPHQPFQFTSMEFLTYSTLR

SEQ ID NO: 104919 - protein, 192 aa, Arabidopsis thaliana
  peptide (1)..(192): Ceres Seq. ID no. 13616050
MATESSESEEEGKISGGNYKLIIDDDLREMGKNAAWSVSSCKPGNGVTTLRDDNLETYWQSDGLQPHLINIQFQKKVKLQLVVLYVDFKLDESYTPSKISIRAGDGFHNLKEIKSVELVKPTGWVCLSLSGTDPRETFVNTFMLQIAILSNHLNGRDTHIRQIKVYGPRPNPIPHQPFQFTSMEFLTYSTLR

SEQ ID NO: 104920 - protein, 163 aa, Arabidopsis thaliana
  peptide (1)..(163): Ceres Seq. ID no. 13616051
MGKNAAWSVSSCKPGNGVTTLRDDNLETYWQSDGLQPHLINIQFQKKVKLQLVVLYVDFKLDESYTPSKISIRAGDGFHNLKEIKSVELVKPTGWVCLSLSGTDPRETFVNTFMLQIAILSNHLNGRDTHIRQIKVYGPRPNPIPHQPFQFTSMEFLTYSTLR

SEQ ID NO: 104921 - DNA, 1488 bp, Arabidopsis thaliana
  misc_feature (1)..(1488): Ceres Seq. ID no. 13616052
  misc_feature (1)..(1488): Ortholog of  Ceres SEQ ID NO 15226540 as cited in SEQ ID NO 58479
  misc_feature (1)..(1488): Ortholog of  Ceres SEQ ID NO 13581611 as cited in SEQ ID NO 59028
  misc_feature (1)..(1488): Ortholog of  Ceres SEQ ID NO 13596689 as cited in SEQ ID NO 62728
tatagcaaatcctcttttgctttaaacccaccaaataactcagagcttttttgcattttttcccattctctattttgttttgtacttttggtctcactttaaaagatcataagttgaaagatttctgcagagaacaatatgttggaaggtcttgtctctcaagaaagcttgtccttaaactctatggacatgtctgtacttgaaaggcttaaatgggtacaacagcaacaacagcaactgcaacaagttgtgtcccatagcagtaataattcacctgaacttcttcagatacttcagttccatggaagcaacaatgatgagttgttggagagtagtttcagccaatttcaaatgcttggatctggttttggaccaaactataacatgggttttggtcctccacatgaatccatttcaagaacaagtagctgccatatggaacctgtggatacaatggaggttttgttgaagaccggtgaagaaaccagagccgttgccttgaagaacaagagaaaaccagaggttaagacaagggaagagcaaaagacagagaagaagatcaaagtagaggctgagacagagtcaagcatgaaaggaaaatcaaacatgggaaacactgaagcatcttcagacacttcaaaggagacatcgaaaggagcttcagagaatcagaaattagattatatccacgtgagagctcgtcgaggccaagccactgacagacacagcttagcagaaagggcgagaagagaaaagatcagcaagaaaatgaaatatctgcaagatattgtgcctggatgcaataaggtcacaggaaaagctggtatgcttgatgagatcatcaattatgttcaatgtctccaaagacaagtcgagttcctgtcgatgaaacttgctgtcttgaacccggaactagagcttgccgtggaagatgtatccgtaaaacaggcttactttacaaatgtagttgcttcaaagcaatcaataatggttgatgtgccattgtttccgttagaccagcaaggatctctagatttgtctgcgataaacccgaaccaaacgacatctatcgaagctccatctggaagctgggaaactcaatcacagagtctctacaacacatctagcctcggttttcattactaagcaagattcattgaaacaacatggttgacatcaatcaatcatcaaaatcagaagcaaattctattacatttgctcatcaaagtagtaatttcgaaatttggttaatgcattatcctttgatccttgttttctgatatttaaaccagaagaactggagatagcaatccaatgatcttgtcaccatcaatctttgtgtatagattatatagagagatagataaatatgttttagaggagttatagatatatatcatatttgtagaagaaagagagaaaactcttgtggtaattacaattcttgtttgtttttttggatatataaatatctaagaaaattataaa

SEQ ID NO: 104922 - protein, 335 aa, Arabidopsis thaliana
  peptide (1)..(335): Ceres Seq. ID no. 13616053
MLEGLVSQESLSLNSMDMSVLERLKWVQQQQQQLQQVVSHSSNNSPELLQILQFHGSNNDELLESSFSQFQMLGSGFGPNYNMGFGPPHESISRTSSCHMEPVDTMEVLLKTGEETRAVALKNKRKPEVKTREEQKTEKKIKVEAETESSMKGKSNMGNTEASSDTSKETSKGASENQKLDYIHVRARRGQATDRHSLAERARREKISKKMKYLQDIVPGCNKVTGKAGMLDEIINYVQCLQRQVEFLSMKLAVLNPELELAVEDVSVKQAYFTNVVASKQSIMVDVPLFPLDQQGSLDLSAINPNQTTSIEAPSGSWETQSQSLYNTSSLGFHY

SEQ ID NO: 104923 - protein, 320 aa, Arabidopsis thaliana
  peptide (1)..(320): Ceres Seq. ID no. 13616054
MDMSVLERLKWVQQQQQQLQQVVSHSSNNSPELLQILQFHGSNNDELLESSFSQFQMLGSGFGPNYNMGFGPPHESISRTSSCHMEPVDTMEVLLKTGEETRAVALKNKRKPEVKTREEQKTEKKIKVEAETESSMKGKSNMGNTEASSDTSKETSKGASENQKLDYIHVRARRGQATDRHSLAERARREKISKKMKYLQDIVPGCNKVTGKAGMLDEIINYVQCLQRQVEFLSMKLAVLNPELELAVEDVSVKQAYFTNVVASKQSIMVDVPLFPLDQQGSLDLSAINPNQTTSIEAPSGSWETQSQSLYNTSSLGFHY

SEQ ID NO: 104924 - protein, 318 aa, Arabidopsis thaliana
  peptide (1)..(318): Ceres Seq. ID no. 13616055
MSVLERLKWVQQQQQQLQQVVSHSSNNSPELLQILQFHGSNNDELLESSFSQFQMLGSGFGPNYNMGFGPPHESISRTSSCHMEPVDTMEVLLKTGEETRAVALKNKRKPEVKTREEQKTEKKIKVEAETESSMKGKSNMGNTEASSDTSKETSKGASENQKLDYIHVRARRGQATDRHSLAERARREKISKKMKYLQDIVPGCNKVTGKAGMLDEIINYVQCLQRQVEFLSMKLAVLNPELELAVEDVSVKQAYFTNVVASKQSIMVDVPLFPLDQQGSLDLSAINPNQTTSIEAPSGSWETQSQSLYNTSSLGFHY

SEQ ID NO: 104925 - DNA, 1063 bp, Arabidopsis thaliana
  misc_feature (1)..(1063): Ceres Seq. ID no. 13616056
  misc_feature (1)..(1063): Ortholog of  Ceres SEQ ID NO 14307296 as cited in SEQ ID NO 53966
  misc_feature (1)..(1063): Ortholog of  Ceres SEQ ID NO 15225423 as cited in SEQ ID NO 64689
atcatcttcattttctctataggtttatgagaagctaaagctatgatgatttctttaatcaaaatagcttagggttttggagagagattactaagaaagttttaatgtttgtttaagagaaaagttatatattagggttttctttattcagaagcttcaagatcagaaaagatggaagttagagagaagaaagatgagaaaatggagatgacaagaagaaaatcatcagctctagatcatcatcgtcttcctccgtacacttactcccaaaccgccaacaaagagaaacccaccaccaaaagaaacgggtcggacccggatccggatccggatcttgatactaacccaatttctatatctcatgctccaagatcatacgctaggcctcaaactacttctccggggaaggcaaggtatagagaatgccaaaagaatcacgcggcgagctccggtggacacgttgtcgacggttgcggcgagtttatgtcttccggggaagaaggcacggtggagtctcttctttgtgcagcttgtgattgccaccggagcttccatagaaaagagatcgatggtttgtttgttgtcaatttcaatagctttggccattcacagagaccactcggaagccgccacgtgtctccgataatgatgagttttggtggtggtggtggttgtgcggcggagtcatcgacggaggatctaaacaagtttcatcaatcttttagtggttatggagtggatcagtttcatcattatcaacccaagaaacggtttaggacaaagtttaatgaagaacagaaggagaagatgatggagtttgctgagaagattggttggagaatgacaaaactagaagatgatgaagtgaatcggttttgtcgtgagattaaagttaaaagacaagtgtttaaagtttggatgcacaacaataaacaagcagcaaagaagaaggatttgtaagagatttctatatatatatatatactatttttacttctctttgttcaacattgctttaacttaaagactttgtgtttattgtataacaaattgattttagagc

SEQ ID NO: 104926 - protein, 262 aa, Arabidopsis thaliana; identical to SEQ ID NO: 26991
  peptide (1)..(262): Ceres Seq. ID no. 13616057

SEQ ID NO: 104927 - protein, 252 aa, Arabidopsis thaliana; identical to SEQ ID NO: 26992
  peptide (1)..(252): Ceres Seq. ID no. 13616058

SEQ ID NO: 104928 - protein, 250 aa, Arabidopsis thaliana; identical to SEQ ID NO: 26993
  peptide (1)..(250): Ceres Seq. ID no. 13616059

SEQ ID NO: 104929 - DNA, 1139 bp, Arabidopsis thaliana
  misc_feature (1)..(1139): Ceres Seq. ID no. 13616064
  misc_feature (1)..(1139): Ortholog of  Ceres SEQ ID NO 14312901 as cited in SEQ ID NO 57146
aaacgttactgtcactaaatgaaatctatttttctttcttaaattttgctctgacaaatatttttgattgcgtcattttctactttggaaatgtctttgatttagcatttcagttcgctcaaaacatcaaatcttaccttctttagctttcacattagattctggtaattattagcacaaaaaaaagataagccagaatacgaaacaaccaaaaaaagaggagaattcttttttttttttttctttccgatgcctccgaccaataattaccgaatctccggcgaaccaccgtctactacgccgtctcatccaccgccaaaaccgaaaacaaggattctctctctattcctcgttggtgtaatcatgttttcaatcttctttctcttcctcgttcttatcggtatcgcctctgttcttatcctccctctcctcctctcttctctccatcgtcaccaccgacgtcgtcgtcgtaatcgccgacaagaatcctcagatgggttatcttcaagattcgtgaaaaagcttcctcaattcaaattctccgaacctagcacatacacacggtacgagagcgattgtgtggtttgttttgatggattcagacaaggacaatggtgtcggaatcttcctggttgtggacacgtgtttcatcgaaagtgtgtggacacttggttgctcaaagcctcgacgtgtcctatttgcagagctagggttagattgtgggaggaagatccacaagaaggagaattatggagatgttttggtcatagaagaagtagtttgctagatttgtaatattgtgtggttatgtagacgtggactcagtctaatggatgataagaatctccaaaactgaagctacgaagaggtacaatacaagccaaggactctttcctccatagagaagtagcgggtcgatcttatggtaatatataagcactaagcagatgggcgtttgatcatataaaccctcactaccattaccaaaaagcaatagccaagagctttttttttcattttctttttgaaagccatggatcggttttcgttcttgaatgttataatggaggttgcgggtattctaaatgaatcccgcaaactctcctcaagaacaaaaagttgatgttctcagtcttggt

SEQ ID NO: 104930 - protein, 181 aa, Arabidopsis thaliana; identical to SEQ ID NO: 43079
  peptide (1)..(181): Ceres Seq. ID no. 13616065

SEQ ID NO: 104931 - protein, 143 aa, Arabidopsis thaliana; identical to SEQ ID NO: 43080
  peptide (1)..(143): Ceres Seq. ID no. 13616066

SEQ ID NO: 104932 - DNA, 1249 bp, Arabidopsis thaliana
  misc_feature (1)..(1249): Ceres Seq. ID no. 13616076
  misc_feature (1)..(1249): Ortholog of  Ceres SEQ ID NO 15169053 as cited in SEQ ID NO 53926
acacaaaaaaaaagctgaaacaaagagttcgagaaaaatttcgattctcttgctcgtaaaagcttcttttgattctctttgactctgttttgtggatagctcctgaagaagaagaagatgatggtagtgaacagctttgatctatggcaaaaagatgttttcttctctgcagctgaagaggttcaaaaatctacagatataatggagtctgcttatagattgtggattagagagaagaaagatgagatttgtaaggaacttcaagcagctttaggtacagctaaatggcagttggaggagtttgagaaggcagtgagattgagtcataaacggtgtggggataatgattcttcatccacacggcataaacagtttgttaccgctattgaaaaccagattcatcgcgtagaaacttctctgcaagaagcttatagtgaaaatgggaaaaagcctctccgttgggttgatcttaatgaagaagagcgtgatgacttagcaatgtttctctctggatcttctcgaacttcacagagttttagtggtgagagcagcatcaagtcgagagagtctactaatagttctctagttgaaaacgttatggaagtttcagctaaagtaacattcaagaaagctaaagtttatggtgatggctctgagtgtgtcatagacattgaagaaagagtgacacctggccaagcagagaaatcagttgggctgagaagaatatggagttcaccaaatttcaattctttgagaattatagttcctggtggtgataatgaagaagaaaaggagacattggtggcacaaatagaagcgacgcctaaagttaaaggaactaagtctgtattgtggatgcagagacttcctgatcataatcagctctttgacaagaccggttgctttcaaaatccgatacgcttaccgtttaatcacccgatcaagtttattgtttccttattgctaatggtgtttctactattacccttcgtagtgtatttgtcttgagaattttaccacggttcgaaactgtcaagaagctgctaaagagatcagctttcgcgtctaatggttaggattcataatcccacaagaacaaacagagattaaaaagctttacatatgttacttttaacttgttgctttggttcttcagggaacgtatagaaacattgaaacgtgtaagattaagtaaagggattagagtttatattacggctttggctaccgttgataaagatgtaaatgc

SEQ ID NO: 104933 - protein, 296 aa, Arabidopsis thaliana
  peptide (1)..(296): Ceres Seq. ID no. 13616077
MMVVNSFDLWQKDVFFSAAEEVQKSTDIMESAYRLWIREKKDEICKELQAALGTAKWQLEEFEKAVRLSHKRCGDNDSSSTRHKQFVTAIENQIHRVETSLQEAYSENGKKPLRWVDLNEEERDDLAMFLSGSSRTSQSFSGESSIKSRESTNSSLVENVMEVSAKVTFKKAKVYGDGSECVIDIEERVTPGQAEKSVGLRRIWSSPNFNSLRIIVPGGDNEEEKETLVAQIEATPKVKGTKSVLWMQRLPDHNQLFDKTGCFQNPIRLPFNHPIKFIVSLLLMVFLLLPFVVYLS

SEQ ID NO: 104934 - protein, 295 aa, Arabidopsis thaliana
  peptide (1)..(295): Ceres Seq. ID no. 13616078
MVVNSFDLWQKDVFFSAAEEVQKSTDIMESAYRLWIREKKDEICKELQAALGTAKWQLEEFEKAVRLSHKRCGDNDSSSTRHKQFVTAIENQIHRVETSLQEAYSENGKKPLRWVDLNEEERDDLAMFLSGSSRTSQSFSGESSIKSRESTNSSLVENVMEVSAKVTFKKAKVYGDGSECVIDIEERVTPGQAEKSVGLRRIWSSPNFNSLRIIVPGGDNEEEKETLVAQIEATPKVKGTKSVLWMQRLPDHNQLFDKTGCFQNPIRLPFNHPIKFIVSLLLMVFLLLPFVVYLS

SEQ ID NO: 104935 - protein, 268 aa, Arabidopsis thaliana; identical to SEQ ID NO: 73466
  peptide (1)..(268): Ceres Seq. ID no. 13616079

SEQ ID NO: 104936 - DNA, 952 bp, Arabidopsis thaliana
  misc_feature (1)..(952): Ceres Seq. ID no. 13616090
  misc_feature (1)..(952): Ortholog of  Ceres SEQ ID NO 15226909 as cited in SEQ ID NO 61336
  misc_feature (1)..(952): Ortholog of  Ceres SEQ ID NO 15179474 as cited in SEQ ID NO 0
attgttgttgttccacggaactctaaaatggagagtggcgatgagagtccggtggttctaattacgggatgttctcagggaggaattggtcacgcgctggcccgtgagttcactgagaagggatgtcgagtggtggcgacgagtcgatcacggagtacgatgacggatctggagcaagattcgaggttattcgtgaaggagcttgatgtgcaatcggaccagaatgtgagtaaggttttgtcggaggttattgataagttcggtaagatcgacgttcttgttaataacgccggagttcagtgcgttggacctctggcggagactccaatttccgccatggaaaacacattcaacaccaatgtttttggttccatgaggatgactcaagctgttgtaccacacatggtgtctaagaaaaagggaaagattgtcaacgttggaagtatcactgttatggcacctggtccatgggctggtgtctatacagctaccaaagctgctattcatgctcttaccgatactctgaggttggagcttcgtccgtttgggattgatgtcatcaatgttgtcccgggaggaataagaacaaacatagcaaactcagctgtggcaactttcaacaaaatgcctgagctgaaactatacaagccttatgaagaagctatcagagaaagggcgtttatatcacagaggatgaatccaactcctgcagaaacatttgccagagacactgtagccgcagtgctgaagaagaatccacccgcttggttctcgtcaggcaggtattcaaccctcatggcagtcatgtatcatatgcccttatggctcaaagattttttccagaagcaggttttaatgaagaagtgataatcaggttggggtttaagacagaatgtaccttaaacacgaatgtaaaagctttgttcaaattgttaattgaatctcttatgtc

SEQ ID NO: 104937 - protein, 288 aa, Arabidopsis thaliana
  peptide (1)..(288): Ceres Seq. ID no. 13616091
IVVVPRNSKMESGDESPVVLITGCSQGGIGHALAREFTEKGCRVVATSRSRSTMTDLEQDSRLFVKELDVQSDQNVSKVLSEVIDKFGKIDVLVNNAGVQCVGPLAETPISAMENTFNTNVFGSMRMTQAVVPHMVSKKKGKIVNVGSITVMAPGPWAGVYTATKAAIHALTDTLRLELRPFGIDVINVVPGGIRTNIANSAVATFNKMPELKLYKPYEEAIRERAFISQRMNPTPAETFARDTVAAVLKKNPPAWFSSGRYSTLMAVMYHMPLWLKDFFQKQVLMKK

SEQ ID NO: 104938 - protein, 279 aa, Arabidopsis thaliana
  peptide (1)..(279): Ceres Seq. ID no. 13616092
MESGDESPVVLITGCSQGGIGHALAREFTEKGCRVVATSRSRSTMTDLEQDSRLFVKELDVQSDQNVSKVLSEVIDKFGKIDVLVNNAGVQCVGPLAETPISAMENTFNTNVFGSMRMTQAVVPHMVSKKKGKIVNVGSITVMAPGPWAGVYTATKAAIHALTDTLRLELRPFGIDVINVVPGGIRTNIANSAVATFNKMPELKLYKPYEEAIRERAFISQRMNPTPAETFARDTVAAVLKKNPPAWFSSGRYSTLMAVMYHMPLWLKDFFQKQVLMKK

SEQ ID NO: 104939 - protein, 235 aa, Arabidopsis thaliana
  peptide (1)..(235): Ceres Seq. ID no. 13616093
MTDLEQDSRLFVKELDVQSDQNVSKVLSEVIDKFGKIDVLVNNAGVQCVGPLAETPISAMENTFNTNVFGSMRMTQAVVPHMVSKKKGKIVNVGSITVMAPGPWAGVYTATKAAIHALTDTLRLELRPFGIDVINVVPGGIRTNIANSAVATFNKMPELKLYKPYEEAIRERAFISQRMNPTPAETFARDTVAAVLKKNPPAWFSSGRYSTLMAVMYHMPLWLKDFFQKQVLMKK

SEQ ID NO: 104940 - DNA, 975 bp, Arabidopsis thaliana
  misc_feature (1)..(975): Ceres Seq. ID no. 13616116
  misc_feature (1)..(975): Ortholog of  Ceres SEQ ID NO 13638599 as cited in SEQ ID NO 51866
ataaatgctcctctcctccgatctctccgccataaaatctactctttcttcttctgggtgttcaaagaattagtcgttctcgcgtattcactttccatggcgggctttctctccgttgtccggcgcgtgtacctcactctctacaattggatcgtctttgctggatgggctcaggttttgtacttagcgataacgacgttgaaggaaacgggttatgagaatgtctatgacgccattgagaagcctctccagcttgctcagactgccgccgttctcgagattcttcatggattagtaggtttggtcagatctcctgtttctgcaactctgccacagataggttcaaggctatttctcacttggggcatcctatacagttttccagaggtccgatctcattttcttgttacgtcgctggtcataagctggtctatcacagagattattcgctactcattcttcggctttaaggaagctctaggctttgcaccttcatggcacttgtggctcagatacagcagctttttattgctataccctaccggtatcaccagcgaagttggtcttatctaccttgccttaccacacatcaagacatcggagatgtacagcgttaggatgcctaacatattgaacttctcatttgacttcttctatgcaacgatactcgtccttgcaatctatgtcccaggtagcccacacatgtacaggtacatgcttggtcagcgaaagagagctctctccaaatccaagagggaataaaagaaaagatttagaaagagacgaaaaagctcatcaactgttttctcctcttgtcttgttcgttcatgtactactagtctactactacaacttgtcttttgtttagcttgtttgagcttttacttcctcggcgattacttgaacttacatgcagcaggatactattaagtgtaatgtggtttctaaattaataagaaaatcattggttccttc

SEQ ID NO: 104941 - protein, 253 aa, Arabidopsis thaliana
  peptide (1)..(253): Ceres Seq. ID no. 13616117
INAPLLRSLRHKIYSFFFWVFKELVVLAYSLSMAGFLSVVRRVYLTLYNWIVFAGWAQVLYLAITTLKETGYENVYDAIEKPLQLAQTAAVLEILHGLVGLVRSPVSATLPQIGSRLFLTWGILYSFPEVRSHFLVTSLVISWSITEIIRYSFFGFKEALGFAPSWHLWLRYSSFLLLYPTGITSEVGLIYLALPHIKTSEMYSVRMPNILNFSFDFFYATILVLAIYVPGSPHMYRYMLGQRKRALSKSKRE

SEQ ID NO: 104942 - protein, 221 aa, Arabidopsis thaliana; identical to SEQ ID NO: 21867
  peptide (1)..(221): Ceres Seq. ID no. 13616118

SEQ ID NO: 104943 - DNA, 1754 bp, Arabidopsis thaliana
  misc_feature (1)..(1754): Ceres Seq. ID no. 13616122
  misc_feature (1)..(1754): Ortholog of  Ceres SEQ ID NO 15177320 as cited in SEQ ID NO 52645
  misc_feature (1)..(1754): Ortholog of  Ceres SEQ ID NO 15171359 as cited in SEQ ID NO 57279
  misc_feature (1)..(1754): Ortholog of  Ceres SEQ ID NO 14313840 as cited in SEQ ID NO 59568
  misc_feature (1)..(1754): Ortholog of  Ceres SEQ ID NO 13662245 as cited in SEQ ID NO 62708
  misc_feature (1)..(1754): Ortholog of  Ceres SEQ ID NO 14314084 as cited in SEQ ID NO 63256
  misc_feature (1)..(1754): Ortholog of  Ceres SEQ ID NO 14303091 as cited in SEQ ID NO 66369
aaagcttaacaacctccactagagactttcttgagcaaaaaagattggttataaaggaccaaccattgtcatgttattgagtgtcatttttgtgagggagagaattaagagagcaaaatgagcataaataggaatctgttgaatatcataataatcctttgtatatgtctcaatttgggttgtaacgatggagctcaagaaagagagactgattctcatactatccaagtcagctctctcctcccttcatcatcatcatcttgtgttctttctcccagagcgtctactacaaagtcttcactgcacgtgacgcatagacacggcacgtgttcgcgtctaaacaatggcaaggccacgagtccagaccatgtcgagatcctaagactcgaccaggctcgcgtaaactcaatccactcaaaactatcgaagaaactcgcaacagatcacgtcagtgaaagcaagtcaacggatctaccggctaaagacggaagcacactcggttcaggtaactacatcgtgacggtcggcctcgggacaccaaagaacgatctatcactaatcttcgacactggaagcgatttaacgtggactcagtgtcagccatgtgttcgaacttgctatgaccagaaggaaccaatctttaacccttctaagtctacttcttactacaacgtatcctgctcatcggctgcgtgtggttctctctcttctgctacaggaaacgccggaagctgttcggcttcgaattgcatctacggtattcaatacggcgatcaatcgttctccgtcggatttctcgccaaggagaagtttacactaacgaactccgacgtatttgacggcgtttatttcggttgcggcgagaacaaccaaggacttttcaccggtgtcgccggacttctcggtcttggtcgtgacaagctttcgtttccgtcgcagacggcaacggcttacaataagatcttctcttactgcctcccttcctccgctagctacaccggacatctcacattcggatccgccggaatctccagatccgttaaattcacaccaatttcaaccatcactgatggaacttccttctacggccttaatatcgtcgcaatcaccgtcggcggtcagaaattgccgattccttcaactgtattctctactccgggagctttaatcgattccggcaccgttatcactcgtctcccgccgaaagcctacgcggcgttaagaagctcgttcaaggcgaagatgtcaaagtatccgaccacgtcgggcgtctcgatcttggacacgtgtttcgatctcagcgggtttaagacggtgactatcccgaaagtggcgttctctttcagcggtggcgccgtcgtggagcttggttcgaaagggatattttacgtgtttaagatatctcaggtttgtctggcgtttgcagggaatagcgatgacagtaacgctgccatctttggaaacgttcagcagcaaacgctagaagttgtgtatgatggtgcgggtgggcgggtcgggtttgctccaaacgggtgtagttaagttagttaatgaaaaacagaacggggtaaattttaaatttatggatttggcacaaattagctttatccttaatcaagtgtgtaatttgggtaaagatcggaattcgtgatggtctttgaagtaattgtatagtaataagtgtgcatgatacaacaattacaagaacaaactgtttattgtaaaattttattccaatacaactatacaagatg

SEQ ID NO: 104944 - protein, 474 aa, Arabidopsis thaliana; identical to SEQ ID NO: 37702
  peptide (1)..(474): Ceres Seq. ID no. 13616123

SEQ ID NO: 104945 - DNA, 906 bp, Arabidopsis thaliana
  misc_feature (1)..(906): Ceres Seq. ID no. 13616132
  misc_feature (1)..(906): Ortholog of  Ceres SEQ ID NO 12616162 as cited in SEQ ID NO 63260
aatcagaaaaaagagagaaagaaaagaagaagcaaaacagagagaaaatggcaggattgtttgataaacaagccgatctataccttgacgccagacctaattacccctctgagtggttctcgaagctcgctgatctcaccgatcaccacggtttagcctgggatgctgccaccggaaatggccaagcagctctcgccgttgcagagcattacgagagtgtcgtagcaacggacgtgagtgaatcgcagctgaagctagcaacgccacatccgaaaatcaattatcgccatacgccgacgtcaatgaccgacgacgagctagtggaattaatcggaggagaaaactcagtggatctaatcacggtcgcccaaggcgtacactggttcgatctccctaggttctactcagtggccacacgactcctccgtaaaccaggcggaatcatcgctgtctggggatacaacgacgtcatagtgagtccagagttcgacgccgtccagtatcggctccacgccacaacgctgccgttttggaagtatccgtacattcagcacatcttcgattcgtacgaagcattgccgtttcctttcgaaaatgttgggatgggatcagaaggggagccattaaagctggagatgcctaaaacgacgtcgtttgaagggatcataaggatgtttaaatcatggtcggccatcgtcacggcgagagagaaaggcgtcgagttgttaccggagagtttggtgagagagcttgaaaccgcttggggaggttctgatctggttcgttccgtcgtttacaaagcttttatgattgcaggaaaagttagagtttgatatcaccaaaccatgattgattgttgttctcatttgagtttatttataaaaattggttatattgcaaaaattc

SEQ ID NO: 104946 - protein, 276 aa, Arabidopsis thaliana
  peptide (1)..(276): Ceres Seq. ID no. 13616133
SEKREKEKKKQNREKMAGLFDKQADLYLDARPNYPSEWFSKLADLTDHHGLAWDAATGNGQAALAVAEHYESVVATDVSESQLKLATPHPKINYRHTPTSMTDDELVELIGGENSVDLITVAQGVHWFDLPRFYSVATRLLRKPGGIIAVWGYNDVIVSPEFDAVQYRLHATTLPFWKYPYIQHIFDSYEALPFPFENVGMGSEGEPLKLEMPKTTSFEGIIRMFKSWSAIVTAREKGVELLPESLVRELETAWGGSDLVRSVVYKAFMIAGKVRV

SEQ ID NO: 104947 - protein, 261 aa, Arabidopsis thaliana
  peptide (1)..(261): Ceres Seq. ID no. 13616134
MAGLFDKQADLYLDARPNYPSEWFSKLADLTDHHGLAWDAATGNGQAALAVAEHYESVVATDVSESQLKLATPHPKINYRHTPTSMTDDELVELIGGENSVDLITVAQGVHWFDLPRFYSVATRLLRKPGGIIAVWGYNDVIVSPEFDAVQYRLHATTLPFWKYPYIQHIFDSYEALPFPFENVGMGSEGEPLKLEMPKTTSFEGIIRMFKSWSAIVTAREKGVELLPESLVRELETAWGGSDLVRSVVYKAFMIAGKVRV

SEQ ID NO: 104948 - protein, 176 aa, Arabidopsis thaliana; identical to SEQ ID NO: 30953
  peptide (1)..(176): Ceres Seq. ID no. 13616135

SEQ ID NO: 104949 - DNA, 1039 bp, Arabidopsis thaliana
  misc_feature (1)..(1039): Ceres Seq. ID no. 13616140
  misc_feature (1)..(1039): Ortholog of  Ceres SEQ ID NO 15176379 as cited in SEQ ID NO 59735
aaaaaactctccactcaactctctctggtcagctgtctcttccccattctctagggttttcaagctcaacctcaagctccactacgatctcttcttcttctctaatctcagttgacagttgaaagatgcaaggtgtgattcgatccttcgtctccggtggaaatgttgtgaaaggctctgtgctgcaacatctccgtgtgattaacccggcgattcagccttctgtgttttgttcacgctctgaatcaactcaacctgcacgtatggaggaatctggattcgagagcacaactatttccgatgtcatgaaatccaaaggcaaaagtgctgatggatcttggctttggtgtactactgatgacactgtttatgatgctgttaaatccatgacacaacacaatgttggtgccttggtggttgtgaaacctggtgagcaacaagctcttgctggtatcattacagagagagattatctacggaagatcattgtgcaagggagatcatccaaatcaacaaaagttggagacattatgactgaagagaataagcttatcactgtgacaccggagaccaaggtcttgcgtgctatgcaactgatgacagataaccgaatcaggcatattccggtaatcaaagacaagggcatgattggaatggtgtccataggagatgttgtccgtgcagtggttcatgagcatagagaggagcttcaacgcctaaatgcgtatattcagggaggttactagatcttgaataatggaaagaaaagagttccctgttgtgtcgtctggtcttgtgctgctgaatctgaaaagcttccagatcagtgtaaatatgcagtcctcgttgttattgttgttgttgttgtgtttgatgttttgtgttgtttcgttgtttaacttgtcaaaactaaggccttgtgctgcttctcttcttgcgcttacttagcaagagaataaaaccaaaaatatgatgtttgtttttgttatcaaatcttgcgtcaagtatccatgtgtgttatgaaataatagaattactt

SEQ ID NO: 104950 - protein, 206 aa, Arabidopsis thaliana; identical to SEQ ID NO: 25658
  peptide (1)..(206): Ceres Seq. ID no. 13616141

SEQ ID NO: 104951 - protein, 160 aa, Arabidopsis thaliana; identical to SEQ ID NO: 25659
  peptide (1)..(160): Ceres Seq. ID no. 13616142

SEQ ID NO: 104952 - protein, 146 aa, Arabidopsis thaliana; identical to SEQ ID NO: 25660
  peptide (1)..(146): Ceres Seq. ID no. 13616143

SEQ ID NO: 104953 - DNA, 1433 bp, Arabidopsis thaliana
  misc_feature (1)..(1433): Ceres Seq. ID no. 13616147
  misc_feature (1)..(1433): Ortholog of  Ceres SEQ ID NO 13654989 as cited in SEQ ID NO 63117
  misc_feature (1)..(1433): Ortholog of  Ceres SEQ ID NO 13584744 as cited in SEQ ID NO 69137
atgtgttatgtcccttactacacaagaatctccttctcctcaaccttctgctttcactcccgccttatctcctgattatcaacagagagagaaggaattgcataaacaagagagtaacaacatgagactggttatttcactagcagctacattttccttagttggtataatcttactttgctctctgctttattggttttgccataggagaagaaacctcaagagctcaggttgtgggtgtagtggaatcacattcttgaatcggtttagtcgctcaaaaacattagacaagagaactacaaagcagggaacagtgtcattgatcgattacaatatactagaagaaggaactagtggtttcaaggagagtaacattttgggtcaaggtggatttggatgtgtatattctgccacattagagaacaacatttcagctgcggttaagaagctagactgtgccaatgaagatgcagcaaaggaatttaagagtgaggttgagatattgagtaagctccagcacccgaatataatatcccttttgggttatagcacgaatgatactgcgagattcattgtctatgagctgatgccaaacgtttctctggaatctcatttacacggatcttctcagggttcggcgatcacatggcctatgaggatgaagattgctcttgatgtaacaaggggattagaatatttgcatgaacattgtcatccagcaatcattcacagggacttgaaatcatccaacatcttattagatagcaatttcaatgctaagatttcagattttggtctagctgttgttgatgggccaaagaacaagaaccataaactttccgggacagttggctacgttgcaccagagtatcttctcaacggccaattgacagaaaagagcgacgtgtatgcttttggagtagtgttattagagcttttactcgggaaaaaacctgtggagaaactagctcccggtgaatgccaatccatcatcacttgggcaatgccttatctcactgatagaaccaagttaccaagcgtcatagatcctgcgattaaagatacgatggacttgaaacacctttaccaggtagcggcagtggcgattttgtgcgtgcagccagaaccgagttatagaccgttgattacagacgtcttgcattctcttatacctttggttccaatggaacttggtggaaccttaaaaaccatcaaatgtgcttcaatggatcactgttaaacaccatagaaaaccggtgtttttttttatagaaattcggtttaatattgaccggtaggtggttttgatgtgtatattgggttagaagttgtaaccggaacattacagtatccttttgaaatgcttacttgcgcactgttgatgaactcttttctcatgtgatttctatttacgaaaacaaatgaaaattatt

SEQ ID NO: 104954 - protein, 412 aa, Arabidopsis thaliana
  peptide (1)..(412): Ceres Seq. ID no. 13616148
CVMSLTTQESPSPQPSAFTPALSPDYQQREKELHKQESNNMRLVISLAATFSLVGIILLCSLLYWFCHRRRNLKSSGCGCSGITFLNRFSRSKTLDKRTTKQGTVSLIDYNILEEGTSGFKESNILGQGGFGCVYSATLENNISAAVKKLDCANEDAAKEFKSEVEILSKLQHPNIISLLGYSTNDTARFIVYELMPNVSLESHLHGSSQGSAITWPMRMKIALDVTRGLEYLHEHCHPAIIHRDLKSSNILLDSNFNAKISDFGLAVVDGPKNKNHKLSGTVGYVAPEYLLNGQLTEKSDVYAFGVVLLELLLGKKPVEKLAPGECQSIITWAMPYLTDRTKLPSVIDPAIKDTMDLKHLYQVAAVAILCVQPEPSYRPLITDVLHSLIPLVPMELGGTLKTIKCASMDHC

SEQ ID NO: 104955 - protein, 410 aa, Arabidopsis thaliana
  peptide (1)..(410): Ceres Seq. ID no. 13616149
MSLTTQESPSPQPSAFTPALSPDYQQREKELHKQESNNMRLVISLAATFSLVGIILLCSLLYWFCHRRRNLKSSGCGCSGITFLNRFSRSKTLDKRTTKQGTVSLIDYNILEEGTSGFKESNILGQGGFGCVYSATLENNISAAVKKLDCANEDAAKEFKSEVEILSKLQHPNIISLLGYSTNDTARFIVYELMPNVSLESHLHGSSQGSAITWPMRMKIALDVTRGLEYLHEHCHPAIIHRDLKSSNILLDSNFNAKISDFGLAVVDGPKNKNHKLSGTVGYVAPEYLLNGQLTEKSDVYAFGVVLLELLLGKKPVEKLAPGECQSIITWAMPYLTDRTKLPSVIDPAIKDTMDLKHLYQVAAVAILCVQPEPSYRPLITDVLHSLIPLVPMELGGTLKTIKCASMDHC

SEQ ID NO: 104956 - protein, 372 aa, Arabidopsis thaliana
  peptide (1)..(372): Ceres Seq. ID no. 13616150
MRLVISLAATFSLVGIILLCSLLYWFCHRRRNLKSSGCGCSGITFLNRFSRSKTLDKRTTKQGTVSLIDYNILEEGTSGFKESNILGQGGFGCVYSATLENNISAAVKKLDCANEDAAKEFKSEVEILSKLQHPNIISLLGYSTNDTARFIVYELMPNVSLESHLHGSSQGSAITWPMRMKIALDVTRGLEYLHEHCHPAIIHRDLKSSNILLDSNFNAKISDFGLAVVDGPKNKNHKLSGTVGYVAPEYLLNGQLTEKSDVYAFGVVLLELLLGKKPVEKLAPGECQSIITWAMPYLTDRTKLPSVIDPAIKDTMDLKHLYQVAAVAILCVQPEPSYRPLITDVLHSLIPLVPMELGGTLKTIKCASMDHC

SEQ ID NO: 104957 - DNA, 1199 bp, Arabidopsis thaliana
  misc_feature (1)..(1199): Ceres Seq. ID no. 13616161
  misc_feature (1)..(1199): Ortholog of  Ceres SEQ ID NO 14311543 as cited in SEQ ID NO 51619
  misc_feature (1)..(1199): Ortholog of  Ceres SEQ ID NO 14302378 as cited in SEQ ID NO 67409
agttcagtcctacatccatggctgctcacagaatctaaagagaactaaaaagctcataagactattacttagaagagaatcgatcagatatgattttagcgcatcttccaagattccatctctcaatcctcgcgaaaccttctttctctctctcttcttcgcatttcagtttcttaaaccctaagccttcggtaacagtatctcgaacccttttctcattcgcgtctaaatcgaatctcgccactgttgaacccataccattatcggtctcagattcaaccgatttggatgatgcacctgtcgagattgcgctcgacaagctttttattccgccggagaccgatatatccggtgaagactcggcgagtttaacgacgaggatacttaagggttcgaatattgtgctgagcaagtacgcgagggacgcacaggtggttcaggctgattatgtgaagagtagtgtcaagacggaggattgtccggccgatgggttgccggagtttgcgcttgttgggagatccaatgttgggaaatcatcgcttctcaattcgttggtgaggaggaaacgccttgccttgacttctaagaaacctggaaagacgcaatgcattaatcatttccggatcaacgacaagtggtacttggtagatttgcctggttacgggtatgcatcagcaccgcatgaactcaaacaagactggaacaaattcaccaaagactattttctaaatcgatcaacattggtctcggtgtttttactagttgatgccagcattcctgtaaagccaatcgatctcgagtatgcaagctggcttggtcaaaaccaggttccaatgactttgatattcacaaaatgcgacaagagaaagaagaagaaaaatggagggaagaaaccggaggcgaacataaaggagttccaagacttgatccaagggttctttgagacaacaccgccatggattatgaccagcagtgtgacgaatcaaggtcgggacgagatattgttgcatatggctcagctaagaaactactggctcaaacactgagaaccaaaacaacacttctccatattatctttttataaggagacttatataacagttagtgtaaaacgacaaaactaacagttagtgtaccaattatttgggcactgtctttgattaatgcaacgctgagattttgtttaatgtatttgtgtt

SEQ ID NO: 104958 - protein, 318 aa, Arabidopsis thaliana; identical to SEQ ID NO: 22124
  peptide (1)..(318): Ceres Seq. ID no. 13616162

SEQ ID NO: 104959 - DNA, 1549 bp, Arabidopsis thaliana
  misc_feature (1)..(1549): Ceres Seq. ID no. 13616163
  misc_feature (1)..(1549): Ortholog of  Ceres SEQ ID NO 12625388 as cited in SEQ ID NO 63299
  misc_feature (1)..(1549): Ortholog of  Ceres SEQ ID NO 15179860 as cited in SEQ ID NO 66716
atttcttcattcgtaaacaaacacacacgaagcaaaaacaaaaatgaaaactactcatttctcttcctcttcttcttccgatcgcaggatcggtgctctgctccgtcatctcaattccggctcagattcggacaacctgagctctctttatgcatctccgacatcgggaggcaccggtggttctgttttctctcatcttgttcaagctccagaggatcctattcttggggtgacagttgcatacaacaaagatcctagcccagttaagctgaatttaggagttggtgcttaccgaactgaggagggaaaacctttggttcttaatgttgtgaggaaagctgagcagcagcttatcaatgacagaacaagaatcaaggagtatcttcccattgttggattggttgagttcaacaagttaagcgctaagctcatactaggcgctgacagtcctgctattcgggagaatcggattaccaccgtggagtgtttgtctggtactggttctctgagagttggaggagagtttttggctaaacattatcatcagaaaacaatttacatcactcagccaacatggggaaatcatccaaagattttcacgctcgctggtttgacagtgaaaacttaccgatactacgatccagcgacgcgtgggttgaactttcaaggtttattagaagaccttggtgctgccgcacctggttctatagtgcttctccatgcctgtgcccataaccctactggtgttgatccaaccattcaacaatgggagcaaatcaggaagttgatgcgatcaaagggattgatgcccttcttcgatagtgcttatcagggctttgcaagtggaagtcttgatacagatgcgaaacctattaggatgtttgttgctgatggcggagaatgcctcgttgctcaaagttatgcgaagaacatgggactctatggagaacgagttggagctctcagcattgtatgcaaatcagcagatgttgcggggagagttgaaagccaactgaaactagtgataaggccaatgtactcgagtcctccaatccatggtgcatcaatcgtggctgtaatcctccgtgacaagaatttgttcaacgaatggactctggaactgaaggccatggctgatcgtatcatcagcatgaggaaacagcttttcgaggcattacgtactcgaggcactcctggagactggagtcacatcataaagcagattggtatgtttaccttcacagggttaaacccagctcaagtctccttcatgactaaagagtaccacatctacatgacatctgacgggaggataagcatggctggtctgagttcgaagactgtacctcaccttgcagacgctatccatgctgttgtcaccaaagccgtctgagaaactgaacaccaccatgacaccaaagcttcataataaagattttgttcttttctttctattatagcatttccggcagtgacaagataaatgtcgttactattattattgtttcatcccagtatcaataaagtacgcaagaaagcttttgtgctc

SEQ ID NO: 104960 - protein, 449 aa, Arabidopsis thaliana; identical to SEQ ID NO: 36484
  peptide (1)..(449): Ceres Seq. ID no. 13616164

SEQ ID NO: 104961 - DNA, 1032 bp, Arabidopsis thaliana
  misc_feature (1)..(1032): Ceres Seq. ID no. 13616173
  misc_feature (1)..(1032): Ortholog of  Ceres SEQ ID NO 12623011 as cited in SEQ ID NO 67651
aagaataaaccgcgtcgcgtctcttttctggaaaaaacgagaaactgtgatcttggcccttttattacccctatcctcttcttcttcaatctctccgatcaaaatccttttaagctctgtagacccaggttacgcagagaagaagaacagaacaaggaattatataatcattggcttgatcaatctgaattgcagttcatggcgctaaaccctcaattactacccaatgggatgcctgttccctttgttaatgaaatgttcgtcctagtccgagatggtgttgagtttgaagtcgacaagatccctggagggcatggaggtcatgttaaggccaagggggtgatttacttgtctaatatacggatggtctttgtttcaagcaagcctgttgacaactttgttgcttttgacatgcccctgctttacatccatgccgagaaatttaatcagccaatatttcactgcaacaatattgctggacaagtggagcctgtggtgccagaaaatgagcatagagctctatattcaacacacagtttcaagatcctatttaaggaaggtggttgtgggacatttgttcctctcttcttgaatctcatatcatcagtgagacaatacaacagacaaatgcaacaagcagcagaagcagcagcggcagctcctcatgttgatcctcttcaagccgctcagacacctgtggacgaaatgatgagacatgcgtacgtggaccctaatgatccaacgaggatatatctgcaacagccatcaggggaatctcagttgaggcgtagagcttaccattcgggtgcggcggaacattgagatacacggaaaaaaaaaatacaaaggctatgaatacagaaacagcaacagattagtgttgctaataagcaaaacgtgttgtttgtttgtttaaagttgaaaactaaaagtctaaaaccatctgtgtaaagaaagatgagacttgtttggtgtgtggatgtatctggtaaaattggagtcgtaataatcataagtttggttcatatattg

SEQ ID NO: 104962 - protein, 273 aa, Arabidopsis thaliana; identical to SEQ ID NO: 25736
  peptide (1)..(273): Ceres Seq. ID no. 13616174

SEQ ID NO: 104963 - protein, 207 aa, Arabidopsis thaliana; identical to SEQ ID NO: 25737
  peptide (1)..(207): Ceres Seq. ID no. 13616175

SEQ ID NO: 104964 - protein, 196 aa, Arabidopsis thaliana; identical to SEQ ID NO: 25738
  peptide (1)..(196): Ceres Seq. ID no. 13616176

SEQ ID NO: 104965 - DNA, 705 bp, Arabidopsis thaliana
  misc_feature (1)..(705): Ceres Seq. ID no. 13616177
  misc_feature (1)..(705): Ortholog of  Ceres SEQ ID NO 12611141 as cited in SEQ ID NO 55992
aaaacaaattgtaacactcactaggcatagcattctagttagttctgcagaaatttatagcgacactggtccaaattaggaggagcgagagcgaaggtacgagtgaggatttacaattgtcgatcgttttcacctagaaaccctaatttcgggggctcgcacgccctctctgattagaagcgacttcattatcggtcactagaatctgctgcttcttttctgaaactagcattgtcaggaacatggacactaagaagaaatctaaggaacatggcctataccgtatagtcaatgctatcggttatgcatttggagcgggagctgttggaggttctgtatatcatttcgtgagaggggcatacaattccccaataggtgctcgatatgttggaggaacacaagcggctagcatgaatgctcctcgcttgggaggcacttttgctgtatttggaggattgctctcaacatttgactatgcattggtgcgcatcaggaagaaggaagatccatggaactccatcgtagcgggtgctgctacaggtggagttctgtctatccgaaaaggggttgttgcagcttcaacatcagcggttatgtttggtttttttttggctgtactcaaccctccgttcgggagcaagtaagctttttgggttgtctttgatgagaatgtcatttagactttcatgataattgccttttcgt

SEQ ID NO: 104966 - protein, 133 aa, Arabidopsis thaliana; identical to SEQ ID NO: 26809
  peptide (1)..(133): Ceres Seq. ID no. 13616178

SEQ ID NO: 104967 - protein, 77 aa, Arabidopsis thaliana; identical to SEQ ID NO: 26810
  peptide (1)..(77): Ceres Seq. ID no. 13616179

SEQ ID NO: 104968 - DNA, 1168 bp, Arabidopsis thaliana
  misc_feature (1)..(1168): Ceres Seq. ID no. 13616184
  misc_feature (1)..(1168): Ortholog of  Ceres SEQ ID NO 13596208 as cited in SEQ ID NO 68507
caacgcggaagggaaaaaaaaaaaaggcgcaattgaaagaaaaaaattgataatcggtaagatttgatgtcccggcgtccgtcgttttgatcaccgtgagaaatggattcttcgaattgttgttctgagtaaaactcactcaccgtcaccggagaagaaagtgtaaatggattccgaagaaacgacgtcgtcggtaacgactacaaagaagcaaaagagggttttctcttcgttagctttgcgattccgtacagtgatagttttctcgatcattagcttcgtcgtcttgtcgtttctattaggaatcttagtgattttcatcggtgaattgtgggtttattcttcttcatctgcttctgcttctcttcattctcgctgcaaaattgtttccagctctgttgatcttaggtcttctaaagtgtgtggcattggactattgaacgtcaaagcacaacatgtgttttacccttttgagagagataaattcagatgtcgttatgattactactgggcttctgtcttcaaggtagagtataaagataacttaatgggtcaaacacggttagcgttttcagaagcaccaaatgaagctcttcctcctgagtgcagacctaactttggtgctgcattacttaccaaagataacttcaaggttaatgagacttacgattgctggtacacattagggattccaaagataaagctttatcgggatagctttttcggttgccaagcagatgatctttctttcactgacattgctaagcaatactctattgtaatctctaaacttttacagtcatggcttaatggagaatcaacaccaaagtactggaaatatgatgtgatcgctggcattgtctctggcttcgcaacttccataatcacagtcttcatcataaggatcttaagacatgcaaaatcttggttccctcaagcttgttgttcagttaagagacagttttctaaggtgaatatattggtacaagtgaaacgtgcatgtttgcttcttgtttacttctcggttctcggatggatggctacacaatacttaaaaattctttttccaaatgcttaggaaaaaacattacttgagagtcagtgagtatgtaatgattcgtagacagttgtgtgatgtaatcttaaatcatttacagaaaaagaaagc

SEQ ID NO: 104969 - protein, 303 aa, Arabidopsis thaliana
  peptide (1)..(303): Ceres Seq. ID no. 13616185
MDSEETTSSVTTTKKQKRVFSSLALRFRTVIVFSIISFVVLSFLLGILVIFIGELWVYSSSSASASLHSRCKIVSSSVDLRSSKVCGIGLLNVKAQHVFYPFERDKFRCRYDYYWASVFKVEYKDNLMGQTRLAFSEAPNEALPPECRPNFGAALLTKDNFKVNETYDCWYTLGIPKIKLYRDSFFGCQADDLSFTDIAKQYSIVISKLLQSWLNGESTPKYWKYDVIAGIVSGFATSIITVFIIRILRHAKSWFPQACCSVKRQFSKVNILVQVKRACLLLVYFSVLGWMATQYLKILFPNA

SEQ ID NO: 104970 - protein, 176 aa, Arabidopsis thaliana
  peptide (1)..(176): Ceres Seq. ID no. 13616186
MGQTRLAFSEAPNEALPPECRPNFGAALLTKDNFKVNETYDCWYTLGIPKIKLYRDSFFGCQADDLSFTDIAKQYSIVISKLLQSWLNGESTPKYWKYDVIAGIVSGFATSIITVFIIRILRHAKSWFPQACCSVKRQFSKVNILVQVKRACLLLVYFSVLGWMATQYLKILFPNA

SEQ ID NO: 104971 - DNA, 918 bp, Arabidopsis thaliana
  misc_feature (1)..(918): Ceres Seq. ID no. 13616191
  misc_feature (1)..(918): Ortholog of  Ceres SEQ ID NO 13587227 as cited in SEQ ID NO 513
  misc_feature (1)..(918): Ortholog of  Ceres SEQ ID NO 13594494 as cited in SEQ ID NO 51293
  misc_feature (1)..(918): Ortholog of  Ceres SEQ ID NO 13595538 as cited in SEQ ID NO 59858
  misc_feature (1)..(918): Ortholog of  Ceres SEQ ID NO 12598249 as cited in SEQ ID NO 61073
  misc_feature (1)..(918): Ortholog of  Ceres SEQ ID NO 13582815 as cited in SEQ ID NO 68106
atccatatatatccttctccattagcttttgttcttctgttccaattccaattccttctgaaatattcatcgcaattcgtatcggtttaaagtaaaaaagcaatgggaggtggtaaagacaagcatcatgatgagcaagagaaaggatttcatggttttccaggaggtggacattacccacctgctcaaggaggttaccctcctcaaggttacccaccacaacaagggtatcctccagctggaggctacccacctgccggatatcctcctggtgcttaccctgctgcgcccggtggttatcctcctgcacctggaggttaccctcctgctggctatcctgcacctggagctcaccattcaggacattctggtggtggactcggaggcatgatagcaggtgcagctggtgcagccgcagcagcttatggagctcaccatgttggtcacgcctctcacaacccttacgggcatgctgtaggacatggagggtatggccatgcccctgctcatggctttggccatggtggtcatggtaaattcaagcacggaaagcatggaggcaaattcaagcacggaaagcatggaaagcacgggaaacatggcatgtttggaggaggaggcaaattcaagaagtggaagtaatctcaaaaaccccacctttgatcctctcctccagtatagtctcattacctgaccgatgtttctaataatcccccttcaaacatatttcattttaactatgtcggtttagagattactggttgaggaaataattggagagtgctagtataaaccttatggtatctgcagcagaggtttctttaatctctcaatagtagatgctttgaaacttatctataatttggtattgtaatgacagtttgtgtttggttttttcttcagtatcttctttgtttg

SEQ ID NO: 104972 - protein, 179 aa, Arabidopsis thaliana; identical to SEQ ID NO: 27992
  peptide (1)..(179): Ceres Seq. ID no. 13616192

SEQ ID NO: 104973 - DNA, 1625 bp, Arabidopsis thaliana
  misc_feature (1)..(1625): Ceres Seq. ID no. 13616193
  misc_feature (1)..(1625): Ortholog of  Ceres SEQ ID NO 13656404 as cited in SEQ ID NO 65806
  misc_feature (1)..(1625): Ortholog of  Ceres SEQ ID NO 12779935 as cited in SEQ ID NO 66774
  misc_feature (1)..(1625): Ortholog of  Ceres SEQ ID NO 13598695 as cited in SEQ ID NO 67368
  misc_feature (1)..(1625): Ortholog of  Ceres SEQ ID NO 13591174 as cited in SEQ ID NO 68289
ctgcttccgccattgctcgaaaatcgcgtcttctgacaatgtgctgaaactgagtcatcgtccgagttagcaaagtgaaacttcgaagtttctcttacactaatctcaggtttgggattttgtaagaaaccgcgtttacaaaatgttcaagttgaagcaatggttgatttatttggtgtgttcgttagtaataatgaacacagaaggactgtttgtcaatattacatttgttcgaaacgcagtcgctaaaggggccgtttgtttagatggaagtccaccagcttatcatttggatagaggttctggaactggaatcaatagttggttgatacagcttgagggaggaggatggtgcaataatgtaacaaattgcgttagtcggatgcatactcgattaggttcatcgaagaaaatggtggagaaccttgctttctcagctattcttagcaataagaaacaatataatcctgatttttacaattggaatagagtgaaagttagatactgtgacggggcatcattcacaggagatgtagaagcagtgaaccctgctactaatcttcacttcagaggtgctcgagtttggttagccgttatgcaagagctgctagctaaaggcatgataaacgccgagaatgctgttttgtctggctgttctgctggcgggttagcttcgctgatgcattgtgatagtttccgtgctctattaccgatgggaaccaaagtaaaatgtctttcagatgctggtttttttctcaacacaagagacgtctcaggagttcaatacattaaaacatacttcgaagatgttgttactcttcatggatcagcaaagaacttgccgaggtcatgcacatcaagattaactcctgcaatgtgtttctttccgcaatatgtggctcgccagattagaactcctctgttcattcttaatgccgcttatgactcttggcagataaagaacattttggctccgcgagcagctgatccttacggaaaatggcaaagttgtcaactagacatcaagaattgccatccaagtcagatcaaagttatgcaagatttcaggttagagttcttgagtgcagtgataggtttagggagatcttcatcaagagggatgttcatagattcttgctacactcactgccaaaccgagacacaaacttcatggttctggcaagattctccaattctaaaccgaacgacaatagcaaaagctgttggagattgggtttatgacagaacattgtttcagaagatagattgtccttacccttgtaaccctacttgccaccacagggttttcactcctctagatgctcctccaatttaagtgattctaccatatacagtatagatttattattattttgaaaagaaaatttgcttataaatgattcatttgttagatacatatagtgaaatattcctagggtttagctatagaagatgaaaaagaaaaagagtgtgattaattcttgagtgttgagaataagcaataggagtaattttcttcagcacttgtcttgtgtgctgtttaaattgctctgtttctcttctattctgatgtaaaatgcaaattgttacctttatcctatcaaataaagtataattcttttctc

SEQ ID NO: 104974 - protein, 397 aa, Arabidopsis thaliana
  peptide (1)..(397): Ceres Seq. ID no. 13616194
MFKLKQWLIYLVCSLVIMNTEGLFVNITFVRNAVAKGAVCLDGSPPAYHLDRGSGTGINSWLIQLEGGGWCNNVTNCVSRMHTRLGSSKKMVENLAFSAILSNKKQYNPDFYNWNRVKVRYCDGASFTGDVEAVNPATNLHFRGARVWLAVMQELLAKGMINAENAVLSGCSAGGLASLMHCDSFRALLPMGTKVKCLSDAGFFLNTRDVSGVQYIKTYFEDVVTLHGSAKNLPRSCTSRLTPAMCFFPQYVARQIRTPLFILNAAYDSWQIKNILAPRAADPYGKWQSCQLDIKNCHPSQIKVMQDFRLEFLSAVIGLGRSSSRGMFIDSCYTHCQTETQTSWFWQDSPILNRTTIAKAVGDWVYDRTLFQKIDCPYPCNPTCHHRVFTPLDAPPI

SEQ ID NO: 104975 - protein, 380 aa, Arabidopsis thaliana
  peptide (1)..(380): Ceres Seq. ID no. 13616195
MNTEGLFVNITFVRNAVAKGAVCLDGSPPAYHLDRGSGTGINSWLIQLEGGGWCNNVTNCVSRMHTRLGSSKKMVENLAFSAILSNKKQYNPDFYNWNRVKVRYCDGASFTGDVEAVNPATNLHFRGARVWLAVMQELLAKGMINAENAVLSGCSAGGLASLMHCDSFRALLPMGTKVKCLSDAGFFLNTRDVSGVQYIKTYFEDVVTLHGSAKNLPRSCTSRLTPAMCFFPQYVARQIRTPLFILNAAYDSWQIKNILAPRAADPYGKWQSCQLDIKNCHPSQIKVMQDFRLEFLSAVIGLGRSSSRGMFIDSCYTHCQTETQTSWFWQDSPILNRTTIAKAVGDWVYDRTLFQKIDCPYPCNPTCHHRVFTPLDAPPI

SEQ ID NO: 104976 - protein, 317 aa, Arabidopsis thaliana; identical to SEQ ID NO: 28624
  peptide (1)..(317): Ceres Seq. ID no. 13616196

SEQ ID NO: 104977 - DNA, 1981 bp, Arabidopsis thaliana
  misc_feature (1)..(1981): Ceres Seq. ID no. 13616205
  misc_feature (1)..(1981): Ortholog of  Ceres SEQ ID NO 14315430 as cited in SEQ ID NO 57618
  misc_feature (1)..(1981): Ortholog of  Ceres SEQ ID NO 13623344 as cited in SEQ ID NO 0
gttctttcctttctcgcgtttcttctcctagggttagggttcgacgaacgcagctgttccacgcgtttagtttcaattctccatcgaagaagccataatccgattcctaaagagcttacatttgttactcaactttaaagttttgacgctagagattactatcctcttgctgggaactcaacgtgaccagactgtgtttgaaagatagcaatggctggagtattagctggggattgttcattcggtgagagtggtgtttcatcttactccaggaattccaatgaaaagcaggacgaggttgcccgctggtattttggaagaaaagaaattgaagaaaattcaccttcaaggttggatagtattgacttaaagaaggaaacatacctccgcaagtcatactgtacatttttgcaggatttaggcatgagattaaaagttcctcaggttacaatagctaccgcaattatcttctgtcatcgattcttcattcgccagtcacatgctaggaatgacagaaggacgattgctacagtctgcatgttccttgcgggaaaagtggaagaaactcctaggccgttaaaagatgttattgttgtctcctatgagataatacacaagaaggatcctactactgcacagaaaatcaagcaaaaggaagtatatgagcaacaaaaagagcttatactaaatggagaaaagattgtactttctacgctgggatttgacttcaatgtttatcatccttataagcctcttgtagaagcgataaagaaatttaaggtcgcacagaatgctctggcccaagttgcatggaattttgttaacgatggtctgcggacgtcactctgcctgcaatttaagcctcaccacattgcggcgggagcaatttttcttgctgcgaagttccttaaagtgaaattaccatcagatggagagaaggtctggtggcaagaatttgatgtcacacctcgacaactagaggatgttagcaaccaaatgcttgagctctatgagcaaaaccgtgttcctgcatctcaagtaagcgaagtcgaaagtagtgtaggtggaggatcagctcatcatgttgggtctaggccatcagcacgtctaactcatgaacattcaaattctgataatctcgggggctcgacaaaagctacacaaaaccggagcaatgataatgggagtggtgaggcaggtagtgtcatcaccgagcagaagggggaaagagatacagaaacgaaagatagcatgcatactgaaagtcatccagcccataagtctagatcgggagttgaggcacctggggaggataaaatagagaaagcaggtgcacattttccagaagatgataaatctagaattgttggtacagctgatgtcacggtcagccaatccccaaaagacataaaaatgtttagagataaggtgaaggccaaactagaggcgaagaaggtccaaggtgaaaagacgagaaagaaggatttggtggatgaggatgatttgatagaaagagaactggaagacgtggaattagctgttgaggatgacaaagatatacaaaacaaaagctccatgggtacagaacatggcgagattcttgatggaaacaacttggtggtcaataccgaggaaggtgaaatgatagatgatgtttcttcaacaatgcctagccggaagagaaaaatggaaagtccttgtgaaaaacagttaggagaaggaaagagacgacacgacaacagtgagaatgtggaagaaggtcagaagacaaacccaggaggaagtagtcatagttatggtgacagagagccaagaagacactcccaagagaggtagatgatcaaaaccttctcatggtctattagagacatttcccaaccatgatgcgaaatgagtccactgtatttacaatgttggttatcttttcattttccttggcacttgtattcaacagttgagaaactaaatcaggtttccatcc

SEQ ID NO: 104978 - protein, 541 aa, Arabidopsis thaliana
  peptide (1)..(541): Ceres Seq. ID no. 13616206
MAGVLAGDCSFGESGVSSYSRNSNEKQDEVARWYFGRKEIEENSPSRLDSIDLKKETYLRKSYCTFLQDLGMRLKVPQVTIATAIIFCHRFFIRQSHARNDRRTIATVCMFLAGKVEETPRPLKDVIVVSYEIIHKKDPTTAQKIKQKEVYEQQKELILNGEKIVLSTLGFDFNVYHPYKPLVEAIKKFKVAQNALAQVAWNFVNDGLRTSLCLQFKPHHIAAGAIFLAAKFLKVKLPSDGEKVWWQEFDVTPRQLEDVSNQMLELYEQNRVPASQVSEVESSVGGGSAHHVGSRPSARLTHEHSNSDNLGGSTKATQNRSNDNGSGEAGSVITEQKGERDTETKDSMHTESHPAHKSRSGVEAPGEDKIEKAGAHFPEDDKSRIVGTADVTVSQSPKDIKMFRDKVKAKLEAKKVQGEKTRKKDLVDEDDLIERELEDVELAVEDDKDIQNKSSMGTEHGEILDGNNLVVNTEEGEMIDDVSSTMPSRKRKMESPCEKQLGEGKRRHDNSENVEEGQKTNPGGSSHSYGDREPRRHSQER

SEQ ID NO: 104979 - protein, 470 aa, Arabidopsis thaliana
  peptide (1)..(470): Ceres Seq. ID no. 13616207
MRLKVPQVTIATAIIFCHRFFIRQSHARNDRRTIATVCMFLAGKVEETPRPLKDVIVVSYEIIHKKDPTTAQKIKQKEVYEQQKELILNGEKIVLSTLGFDFNVYHPYKPLVEAIKKFKVAQNALAQVAWNFVNDGLRTSLCLQFKPHHIAAGAIFLAAKFLKVKLPSDGEKVWWQEFDVTPRQLEDVSNQMLELYEQNRVPASQVSEVESSVGGGSAHHVGSRPSARLTHEHSNSDNLGGSTKATQNRSNDNGSGEAGSVITEQKGERDTETKDSMHTESHPAHKSRSGVEAPGEDKIEKAGAHFPEDDKSRIVGTADVTVSQSPKDIKMFRDKVKAKLEAKKVQGEKTRKKDLVDEDDLIERELEDVELAVEDDKDIQNKSSMGTEHGEILDGNNLVVNTEEGEMIDDVSSTMPSRKRKMESPCEKQLGEGKRRHDNSENVEEGQKTNPGGSSHSYGDREPRRHSQER

SEQ ID NO: 104980 - protein, 432 aa, Arabidopsis thaliana
  peptide (1)..(432): Ceres Seq. ID no. 13616208
MFLAGKVEETPRPLKDVIVVSYEIIHKKDPTTAQKIKQKEVYEQQKELILNGEKIVLSTLGFDFNVYHPYKPLVEAIKKFKVAQNALAQVAWNFVNDGLRTSLCLQFKPHHIAAGAIFLAAKFLKVKLPSDGEKVWWQEFDVTPRQLEDVSNQMLELYEQNRVPASQVSEVESSVGGGSAHHVGSRPSARLTHEHSNSDNLGGSTKATQNRSNDNGSGEAGSVITEQKGERDTETKDSMHTESHPAHKSRSGVEAPGEDKIEKAGAHFPEDDKSRIVGTADVTVSQSPKDIKMFRDKVKAKLEAKKVQGEKTRKKDLVDEDDLIERELEDVELAVEDDKDIQNKSSMGTEHGEILDGNNLVVNTEEGEMIDDVSSTMPSRKRKMESPCEKQLGEGKRRHDNSENVEEGQKTNPGGSSHSYGDREPRRHSQER

SEQ ID NO: 104981 - DNA, 1156 bp, Arabidopsis thaliana
  misc_feature (1)..(1156): Ceres Seq. ID no. 13616224
  misc_feature (1)..(1156): Ortholog of  Ceres SEQ ID NO 13582350 as cited in SEQ ID NO 56734
  misc_feature (1)..(1156): Ortholog of  Ceres SEQ ID NO 12476493 as cited in SEQ ID NO 58163
  misc_feature (1)..(1156): Ortholog of  Ceres SEQ ID NO 12578315 as cited in SEQ ID NO 62451
  misc_feature (1)..(1156): Ortholog of  Ceres SEQ ID NO 12615466 as cited in SEQ ID NO 62761
  misc_feature (1)..(1156): Ortholog of  Ceres SEQ ID NO 13597295 as cited in SEQ ID NO 63743
  misc_feature (1)..(1156): Ortholog of  Ceres SEQ ID NO 12617090 as cited in SEQ ID NO 64005
  misc_feature (1)..(1156): Ortholog of  Ceres SEQ ID NO 13597439 as cited in SEQ ID NO 64081
  misc_feature (1)..(1156): Ortholog of  Ceres SEQ ID NO 13597233 as cited in SEQ ID NO 64370
  misc_feature (1)..(1156): Ortholog of  Ceres SEQ ID NO 13599438 as cited in SEQ ID NO 0
agaatcagttcatccatggaaacagcgtcgagagtggaactgattgttaaaggcaacttaccggagttccttctcagtacaatccagccaaccggaagctcgacctaatctcccattaccacggcgatgaagcttcgatcccaaccgtcgatctctcgagctccgattccgcgagagaagccatcggtgaccttgtcgcgactggggagccttccacgtaatcaaccatggtgttccaatccatctccttgatcggatgaggtctttaggtctctctttcttccaagactctcccatggaagagaagctacgttacgcctgcgactctacctccgccgcatctgaaggttacggtagccgtatgttgcttggtgctaaagatgacgtcgttttggattggagagattactttgatcatcacacgtttccttcctctcgtcgtaacccttctcattggccgattcatccttctgactacagacaagttgttggagaatatggtgatgagatgaagaaactagctcagatgctattagggctaatctcagagagtttgggtcttccttgttcatctatagaagaagcagtaggtgaaatctatcagaacattactgtaaccaattaccctccttgtcctcagcctgacctcactcttggtcttcagtctcattccgattttggtgccattactctcttgattcaagatgatgttgaaggtcttcagctttacaaggatgctcaatggctcactgttcctcctatctctgatgctattctcattcttattgccgatcaaaccgagatcattaccaatggaagatacaaaagtgctcaacatagagctgtgactaatgcgaatcgggcgcggttatcagtcgctacctttcatgatccctccaagactgcaaggatagcaccagtttctcaactctccccaccgtcttacaaggaagttgtgtatggtcaatatgtttcttcctggtactctaaaggtcctgagggtaaacgaaacctcgatgctcttctctactaagtttatgctaatgagtatgtggacgccaattgccacggctgaaaagtggtttcacaatagtggctgtaaaaactcaaaagacacaaacgataaataataataaactgaatgaatcctagtcgc

SEQ ID NO: 104982 - protein, 258 aa, Arabidopsis thaliana
  peptide (1)..(258): Ceres Seq. ID no. 13616225
MRSLGLSFFQDSPMEEKLRYACDSTSAASEGYGSRMLLGAKDDVVLDWRDYFDHHTFPSSRRNPSHWPIHPSDYRQVVGEYGDEMKKLAQMLLGLISESLGLPCSSIEEAVGEIYQNITVTNYPPCPQPDLTLGLQSHSDFGAITLLIQDDVEGLQLYKDAQWLTVPPISDAILILIADQTEIITNGRYKSAQHRAVTNANRARLSVATFHDPSKTARIAPVSQLSPPSYKEVVYGQYVSSWYSKGPEGKRNLDALLY

SEQ ID NO: 104983 - protein, 245 aa, Arabidopsis thaliana
  peptide (1)..(245): Ceres Seq. ID no. 13616226
MEEKLRYACDSTSAASEGYGSRMLLGAKDDVVLDWRDYFDHHTFPSSRRNPSHWPIHPSDYRQVVGEYGDEMKKLAQMLLGLISESLGLPCSSIEEAVGEIYQNITVTNYPPCPQPDLTLGLQSHSDFGAITLLIQDDVEGLQLYKDAQWLTVPPISDAILILIADQTEIITNGRYKSAQHRAVTNANRARLSVATFHDPSKTARIAPVSQLSPPSYKEVVYGQYVSSWYSKGPEGKRNLDALLY

SEQ ID NO: 104984 - protein, 223 aa, Arabidopsis thaliana
  peptide (1)..(223): Ceres Seq. ID no. 13616227
MLLGAKDDVVLDWRDYFDHHTFPSSRRNPSHWPIHPSDYRQVVGEYGDEMKKLAQMLLGLISESLGLPCSSIEEAVGEIYQNITVTNYPPCPQPDLTLGLQSHSDFGAITLLIQDDVEGLQLYKDAQWLTVPPISDAILILIADQTEIITNGRYKSAQHRAVTNANRARLSVATFHDPSKTARIAPVSQLSPPSYKEVVYGQYVSSWYSKGPEGKRNLDALLY

SEQ ID NO: 104985 - DNA, 1624 bp, Arabidopsis thaliana
  misc_feature (1)..(1624): Ceres Seq. ID no. 13616228
  misc_feature (1)..(1624): Ortholog of  Ceres SEQ ID NO 12611829 as cited in SEQ ID NO 56771
  misc_feature (1)..(1624): Ortholog of  Ceres SEQ ID NO 15171735 as cited in SEQ ID NO 57234
  misc_feature (1)..(1624): Ortholog of  Ceres SEQ ID NO 13597018 as cited in SEQ ID NO 64288
  misc_feature (1)..(1624): Ortholog of  Ceres SEQ ID NO 14305124 as cited in SEQ ID NO 0
aattgatgctatgacaaacaacaacagcaagaaatttgtgtgagagtagagagtcttgcttcagttgaatcaaagattggtcctttttttttcgttttctctttcctgctttttttgtttgtagtttctgatctctcaggaaggctttttataaatttgccctcaatttctccgtccctactactctttttgatcaatttctacgggaaaaagcaccaatctttaaacccgggcatgtccttgtaatcgagtatgttgtgtaagtgatgaatttgtggtgagatctggtgagaagtttcctcttttttctcagattgcggtaaaaaaaaagagtttttaataaggaagagattgagattagattttatcgcttttgtttgtgtgatatgggtaacgtgaacgccaaaagaaaaccgaaatagtaacaacgcttctgctgttgaaagacgaagacgctgagatttgttcctcgtgaagctatgtctgctgcttctgatggtaaccatgtcgctcctcctgagcttatgggtcaatctcctcctcatagccctcgagctactcagtctcctctcatgtttgctcctcaggttccggtgcttccacttcaaagacctgatgaaattcatatccctaatccttcgtggatgcaatcgccatcttcgttgtatgaagaagcttctaacgaacaaggaatccctacgatgatcacttggtgtcatggaggcaaggagattgctgtggagggatcatgggataattggaagacaagaagtcggctgcagagatctgggaaggacttcactatcatgaaagtgttaccttcaggagtctatgagtacaggttcattgtggatggacagtggaggcatgcccctgagctccccttagctagagatgatgctgggaacactttcaacattttggatcttcaggactatgttcctgaagacattcaaagcatatctgggtttgaccctccgcaatctccagagaatagttacagcaacttgcttctcggagctgaggactactctaaagaaccgcctgtggttcccccgcacctacaaatgacactgctgaacttgccggcagccaatcctgacattccatctccgctgccgagacctcagcatgtcattctcaatcatctttacatgcagaagggcaaaagtggtccttctgtggttgcgcttggttccactcaccgatttctagcaaagtatgtaactgtggtgctctacaaatccctgcagaggtgagtgaagatgatgcaattccaatgggtagttagcatgtggatcctcggcatgctcttatctattttggtgttaaaacgttaactcatggagtatgggtgaggctatatagaaaggagacacacgaagagagttatttccaggcaaagtattccctcgatacagcgaattttgttgtctttaaaagttgtcaataaggtttaccaacagaatgaagatgcagtattcagtcagtgtctgtgtaatcttttgatttgaagacttcatcatctgttttttttttagcatagaagaatgcaggaacgacttcacttgtaaaaccggcaaatcttttttatggttttgttttggggctttcaagttttcac

SEQ ID NO: 104986 - protein, 259 aa, Arabidopsis thaliana
  peptide (1)..(259): Ceres Seq. ID no. 13616229
MSAASDGNHVAPPELMGQSPPHSPRATQSPLMFAPQVPVLPLQRPDEIHIPNPSWMQSPSSLYEEASNEQGIPTMITWCHGGKEIAVEGSWDNWKTRSRLQRSGKDFTIMKVLPSGVYEYRFIVDGQWRHAPELPLARDDAGNTFNILDLQDYVPEDIQSISGFDPPQSPENSYSNLLLGAEDYSKEPPVVPPHLQMTLLNLPAANPDIPSPLPRPQHVILNHLYMQKGKSGPSVVALGSTHRFLAKYVTVVLYKSLQR

SEQ ID NO: 104987 - protein, 244 aa, Arabidopsis thaliana
  peptide (1)..(244): Ceres Seq. ID no. 13616230
MGQSPPHSPRATQSPLMFAPQVPVLPLQRPDEIHIPNPSWMQSPSSLYEEASNEQGIPTMITWCHGGKEIAVEGSWDNWKTRSRLQRSGKDFTIMKVLPSGVYEYRFIVDGQWRHAPELPLARDDAGNTFNILDLQDYVPEDIQSISGFDPPQSPENSYSNLLLGAEDYSKEPPVVPPHLQMTLLNLPAANPDIPSPLPRPQHVILNHLYMQKGKSGPSVVALGSTHRFLAKYVTVVLYKSLQR

SEQ ID NO: 104988 - protein, 228 aa, Arabidopsis thaliana
  peptide (1)..(228): Ceres Seq. ID no. 13616231
MFAPQVPVLPLQRPDEIHIPNPSWMQSPSSLYEEASNEQGIPTMITWCHGGKEIAVEGSWDNWKTRSRLQRSGKDFTIMKVLPSGVYEYRFIVDGQWRHAPELPLARDDAGNTFNILDLQDYVPEDIQSISGFDPPQSPENSYSNLLLGAEDYSKEPPVVPPHLQMTLLNLPAANPDIPSPLPRPQHVILNHLYMQKGKSGPSVVALGSTHRFLAKYVTVVLYKSLQR

SEQ ID NO: 104989 - DNA, 2843 bp, Arabidopsis thaliana
  misc_feature (1)..(2843): Ceres Seq. ID no. 13616241
  misc_feature (1)..(2843): Ortholog of  Ceres SEQ ID NO 14310452 as cited in SEQ ID NO 54426
  misc_feature (1)..(2843): Ortholog of  Ceres SEQ ID NO 15169663 as cited in SEQ ID NO 64659
  misc_feature (1)..(2843): Ortholog of  Ceres SEQ ID NO 13656177 as cited in SEQ ID NO 64997
  misc_feature (1)..(2843): Ortholog of  Ceres SEQ ID NO 15225015 as cited in SEQ ID NO 0
tttctttaacatcattatacaaagttacaacaacttgaaaaaattaattatataagcccattaaatcttgtatcataagcccagcccaaagttataaacttttcaaaatgcaaggagctaaaaaacaagttggttttgttggtttcaaatcaaaccaaaccgtttttttaagattacgaatcgaatggtttatttttgctaaatcggttcggttttttctccagacctattagtaaacctcttgcttcgattaggcggtcgtctctctgaaattttctgaaacctcttaaaccctagcaatgccgtcgagtttcttctttgaggatgctagtgacgacgagctcgaattaatacgcaatcaagaggacagtagtgaggaagacgtaaaggaaggcgaagcagaagagcatgaagctggagaagacgaagatggagaagaggaatatgaagaagaagatgacgacgaagaagaagaagatgagaagcggaaacgagatgctgatgctcaatctccttgggattttgcatcttactcaagctccgttggtgaagaacacgcccgccgtcacacaacgtctattgatgaaaagatctctaaagctattcagcatcgtccagttcccatttcaataaatgaagaagaagaagaggaagaagaagaagaagatgcctccgatgctgaaactgacaaacaagaggagtatctttcggaagacgatgaggcagctgagtacaaaccagaagatgctactcccaagccgttcttctctacagtggatggagtttcatttcatgctgatactttcatggagcttaatctctctcgtccattgcttcgagcttgtgaaactctcggatacaagaaacctactccgattcaggcagcttgtatacctttagcacttacagggcgtgatctttgtgccagtgccatcactgggtcagggaagactgctgcattcgctttacctactcttgagaggttgctgttccgtcccaagcgggtctttgctactagagttcttattctcactccgactagggagttggccgtccagattcacagtatgattcagaatcttgcacagtttactgatatcaagtgtggattgattgtaggagggctttctgtaagggagcaagaggtggttctgaggtctatgccagatattgttgtggcgactcctggacgtatgatagatcatttgcgtaattctatgtctgttgatttggatgatctagcggttttaatccttgatgaggcagaccgccttctacagactgggtttgccactgaaatcacagagctggttcgcttatgtcccaagagaaggcaaacaatgctcttctcagccacaatgactgaagaagttaaagagctagtcaaactttccttgaacaaaccgttgcggctctcagctgatccatcagctagaaggccaccaggcttgactgaggaggtggtaagaatacgcaggactcgtgaggcaaatcaggaagctgttcttctatcattgtgcacaaggacttttaaatcaaaagtcattatctttagtggaacaaaacaagctgcacatagactgaaaattttattcggattagctggcctcaaagcagctgagcttcatggaaacctaactcaagcacaacgtcttgattctctggagcttttcagaaagcaggaggtcgattttctcattgctaccgatgtagccgctcgaggacttgacatcattggtgttcaaacagttataaattatgcttgtcctcgggaaatagacagttatgttcacagagttggtagaacagctagggctggaagggaaggttatgctgtaacgtttgtgactgatagtgaccgatcccttttgaaagtcattgcaaagaaggtgggttcaaagttgaagagccgagtcatcccagagcagtcaatcgtcaagtggtctcagataatcgatgaaatggaagatcaatattccgctgttatttcagcagagagggatgagcgagctctaaggaaagctgaaatggaatttgcaaaggcggagaacatgcttgagcacagagatgaaatatatgcacgcccaaaaaggacttggttcatgacagagaaggagaagaagctcgtggcacaggctgaaaaggattctgcagggaaccctgctggaggcgaactagttagtgctgatagagcagaggacctcaagatgaaggagaagagaaaacgtgaacgcgagaagaatcttcctaggaaaaaacgtagaaagctagaagctgccagagagatgctagaagataacgaaggagaagaagaggaagaagacgaagaaggagacgaaaagagaggaagatcaagagggaaagacaagaaaaaacaggagacagataagaagggattgacactaaaggatcttggttacatgagagcaaaagcggtgaaagcaaaacagagagcaattgattccggtaagatggagagaccaaagccggacaagaaacaaagccggagtaaaccaagaaaccagcctcgtggtgaagagatgaaagatctgttcaagagtgatatgggcgagaagaaacagggcagaggcggtgccgcggctgcagcaaaacctcggacgaagtcgaagaactcattcaagagcaaagccagatataagcgtaggtaaaaggaaaaagcatttttgagaagatatcgaaggacaatcccacgagaagaaggacatttcattgagaagggtttaaacaatttaaattattgttgtaatatcataatttagaacaaaactggttaagatgttcgaaattttgttttctttgtcctatggtttttataatctttc

SEQ ID NO: 104990 - protein, 789 aa, Arabidopsis thaliana; identical to SEQ ID NO: 100733
  peptide (1)..(789): Ceres Seq. ID no. 13616242

SEQ ID NO: 104991 - protein, 620 aa, Arabidopsis thaliana; identical to SEQ ID NO: 100734
  peptide (1)..(620): Ceres Seq. ID no. 13616243

SEQ ID NO: 104992 - protein, 533 aa, Arabidopsis thaliana; identical to SEQ ID NO: 100735
  peptide (1)..(533): Ceres Seq. ID no. 13616244

SEQ ID NO: 104993 - DNA, 1251 bp, Arabidopsis thaliana
  misc_feature (1)..(1251): Ceres Seq. ID no. 13616245
  misc_feature (1)..(1251): Ortholog of  Ceres SEQ ID NO 14310880 as cited in SEQ ID NO 55342
  misc_feature (1)..(1251): Ortholog of  Ceres SEQ ID NO 14313451 as cited in SEQ ID NO 62474
acgcaggcaaatgtctcgtaatttaatctatagaagaaacagagctctctgttttgttttaatcttgttctgcttcccttaccggtttggcgctagaaacacgccggaggcggaacaatccacagcaaaagcaactcaaataatacacgtcagcaattccacgtggcatgatttctctcgtcttgtagatgtccaaataggtagccacgtcagcggcgtatcagagctcaaaagatacctccaccgattcggttacgtcaatgatggctccgaaatattttccgacgtgttcgatggtcctctggaatcggcaatctctctgtatcaagaaaatctcggtttaccaataaccggaagactcgacacgagtacagttactctcatgtcgttaccgcgatgtggcgttagcgatacgcacatgaccatcaacaacgatttcctccacacaacggcgcattatacgtatttcaacggtaaaccgaaatggaaccgtgatacgctaacctacgctatctccaaaactcacaaactcgattacttgacgtcagaagacgtcaaaaccgttttccggcgagctttttcacagtggtcaagcgtgattccggtgagtttcgaggaagtcgacgatttcacgacggctgatttaaagatcggattctacgctggtgatcacggtgacgggcttccgtttgacggtgtacttggaactttagcacacgcttttgcgccggagaacgggaggcttcacctcgacgcggcggagacgtggatcgtcgacgatgacttgaaaggatcttcagaggtggccgttgacttggagtctgtggcgactcacgagatcggtcacttgttgggattaggacatagctcgcaggagtcggcggttatgtatccgagtctccgaccgaggaccaagaaagttgaccttacggttgatgacgtggcaggtgtacttaagctatatggtccgaatcctaaactacggttggattcactaacgcagtcggaagattctattaaaaacggcaccgtatcacatagattcttgtcggggaattttatcggttatgttctgttggttgttggtttgattcttttcctataggtttataggcataaaaaatactgtttttattcatttatttttaattaaatgtacatatatttttcaactatgtaaatgtaaatatatagttgaacaaaaaaagatgtacatatatagttaggcttataattaggtttatggtcttg

SEQ ID NO: 104994 - protein, 367 aa, Arabidopsis thaliana
  peptide (1)..(367): Ceres Seq. ID no. 13616246
RRQMSRNLIYRRNRALCFVLILFCFPYRFGARNTPEAEQSTAKATQIIHVSNSTWHDFSRLVDVQIGSHVSGVSELKRYLHRFGYVNDGSEIFSDVFDGPLESAISLYQENLGLPITGRLDTSTVTLMSLPRCGVSDTHMTINNDFLHTTAHYTYFNGKPKWNRDTLTYAISKTHKLDYLTSEDVKTVFRRAFSQWSSVIPVSFEEVDDFTTADLKIGFYAGDHGDGLPFDGVLGTLAHAFAPENGRLHLDAAETWIVDDDLKGSSEVAVDLESVATHEIGHLLGLGHSSQESAVMYPSLRPRTKKVDLTVDDVAGVLKLYGPNPKLRLDSLTQSEDSIKNGTVSHRFLSGNFIGYVLLVVGLILFL

SEQ ID NO: 104995 - protein, 364 aa, Arabidopsis thaliana
  peptide (1)..(364): Ceres Seq. ID no. 13616247
MSRNLIYRRNRALCFVLILFCFPYRFGARNTPEAEQSTAKATQIIHVSNSTWHDFSRLVDVQIGSHVSGVSELKRYLHRFGYVNDGSEIFSDVFDGPLESAISLYQENLGLPITGRLDTSTVTLMSLPRCGVSDTHMTINNDFLHTTAHYTYFNGKPKWNRDTLTYAISKTHKLDYLTSEDVKTVFRRAFSQWSSVIPVSFEEVDDFTTADLKIGFYAGDHGDGLPFDGVLGTLAHAFAPENGRLHLDAAETWIVDDDLKGSSEVAVDLESVATHEIGHLLGLGHSSQESAVMYPSLRPRTKKVDLTVDDVAGVLKLYGPNPKLRLDSLTQSEDSIKNGTVSHRFLSGNFIGYVLLVVGLILFL

SEQ ID NO: 104996 - protein, 240 aa, Arabidopsis thaliana; identical to SEQ ID NO: 29469
  peptide (1)..(240): Ceres Seq. ID no. 13616248

SEQ ID NO: 104997 - DNA, 932 bp, Arabidopsis thaliana
  misc_feature (1)..(932): Ceres Seq. ID no. 13616249
  misc_feature (1)..(932): Ortholog of  Ceres SEQ ID NO 13599613 as cited in SEQ ID NO 0
  misc_feature (1)..(932): Ortholog of  Ceres SEQ ID NO 15179570 as cited in SEQ ID NO 0
gttaaaaggtgagatagtgtaaaagcattgatcaagattcatgcaatgggaggagaaggtggtgctgagcccgtaattcactttgtgtttgttcatggagccagtcacggagcttggtgttggtataaactcaccactcttctcgacgccgccgggttcaaatcaacctccgtagatctcaccggcgctggcatcagcctcatagactctaacatcgtcttcgactccgaccaatataaccgtcctctcttctctctcttgtccgatctccctcctcaccacaaagtcatactcgttggacatagcatcggtggaggaagtgtcaccgaagctctttgcaagttcactgacaaaatctccatggccatttacctcgcggcttccatggttcaacccggatccatcccttctccgcatctttcaaacatacatgtgggagaagaagatatatgggagtacacatatggtgaaggtaccgataaaccacccaccggagtcctcatgaaaccggagtttatacgccattattactatagccaaagccctcttgaggacgtaactttgtcatctaagctgttgcgtcctgctcctatgagggcctttcaagatcttgataagctacctccaaatcccgaggccgagaaagttcctcgagtttacatcaagactgctaaggataatctatttgattctgtgcgtcaagaccttttggtggagaattggccaccttctcagctgtatgtcttggaggatagtgaccattctgctttcttctctgtcccaactaccttattcgcgtatctcctccgtgcggtttcttttcttcaacgataaacttcaacttatccttcatacattccgatctagataacaaactaattgggaataattagatgatttgtttggaaggtgattgatatgatattatgatt

SEQ ID NO: 104998 - protein, 262 aa, Arabidopsis thaliana
  peptide (1)..(262): Ceres Seq. ID no. 13616250
MGGEGGAEPVIHFVFVHGASHGAWCWYKLTTLLDAAGFKSTSVDLTGAGISLIDSNIVFDSDQYNRPLFSLLSDLPPHHKVILVGHSIGGGSVTEALCKFTDKISMAIYLAASMVQPGSIPSPHLSNIHVGEEDIWEYTYGEGTDKPPTGVLMKPEFIRHYYYSQSPLEDVTLSSKLLRPAPMRAFQDLDKLPPNPEAEKVPRVYIKTAKDNLFDSVRQDLLVENWPPSQLYVLEDSDHSAFFSVPTTLFAYLLRAVSFLQR

SEQ ID NO: 104999 - protein, 157 aa, Arabidopsis thaliana
  peptide (1)..(157): Ceres Seq. ID no. 13616251
MAIYLAASMVQPGSIPSPHLSNIHVGEEDIWEYTYGEGTDKPPTGVLMKPEFIRHYYYSQSPLEDVTLSSKLLRPAPMRAFQDLDKLPPNPEAEKVPRVYIKTAKDNLFDSVRQDLLVENWPPSQLYVLEDSDHSAFFSVPTTLFAYLLRAVSFLQR

SEQ ID NO: 105000 - protein, 149 aa, Arabidopsis thaliana
  peptide (1)..(149): Ceres Seq. ID no. 13616252
MVQPGSIPSPHLSNIHVGEEDIWEYTYGEGTDKPPTGVLMKPEFIRHYYYSQSPLEDVTLSSKLLRPAPMRAFQDLDKLPPNPEAEKVPRVYIKTAKDNLFDSVRQDLLVENWPPSQLYVLEDSDHSAFFSVPTTLFAYLLRAVSFLQR

SEQ ID NO: 105001 - DNA, 1622 bp, Arabidopsis thaliana
  misc_feature (1)..(1622): Ceres Seq. ID no. 13616257
  misc_feature (1)..(1622): Ortholog of  Ceres SEQ ID NO 14302216 as cited in SEQ ID NO 66456
aaaaagacagagagaggagagacgagagctcgtcgaaccagatctctttctctttcttctctctaattttgatttttttgaattttcttctgcaaagcaaaatcgcagaagtcgtcgtgtgtccgcgttgcatcgaaccacttgttcgattctctttcgtcatcctctcttatatcatcagcaacaacaacccttgtttcaaatttcttcatttccgccggatttataatcgcagattgattctgatcgatagagatagggttattcaaggagagacctcgattgacttcaattgtcttcctgattcgatagataagatttagggttagcttgacgttgacgttgatataggggaatggagacggacaatgggaaggggttgatactagctgtagcgtcaagtgttttcattggttccagcttcattcttaagaagaaaggtcttaagcgagctggtgctattggcacccgagcaggatatggaggctatacttatttattagagccgctttggtgggcagggatggttactatgattgttggagaagctgcaaactttgtggcttacatttatgcaccagctgtactcgttactcctctcggtgcattaagtataatcatcagtgctgttttggcacatttcttattgaaggaaaaacttaagaaaatgggggttctcggatgtgtgtcttgcattgttgggtctgttgttattgttatacacgcacctaaggaacagactcctaattccgttgaggaaatatggaatctggctactcagccagcttttctaatctacgtagccataaccatgtcgattgtccttgctttaattctgcattttgaacccctgtgcggccaaacaaacattctggtttatattggaatctgttcgttaatgggtgctctcactgttatgagcataaaagctattggaattgcgataaaattaacaatggagggagtaagccagatcgggtatccacagacatggctttttgtcatggttgcagtaacttgtgtcgttacacaattgatttacctaaataaggctttggacacattcaacgcagccattgtttctccagtatactatgtaatgttcacaaccctcacaattgttgctagtgcaataatgttcaaggactggtctgggcaagacgcagccagcgtagcctctgagttatgtggattcatcactgtgctcacagggacaatgatactccatggcacaagagaagaggaacaacaacaagcttcttcagaacatgtaagatggtacgactcgagaaagagcatgaacgaagaacatttggtaagcctgtacagtcctgaatactaggaagaagaagatgcaatatctctaggctctcaatagattgaatgaaatttgccaaaaacaagcctcatgagtcttaaaactggatcaatcaacaaatctgcggtcgggttcatttttgtattgttttatggtcactgtacagacaaaaaagtttgtctagttaaaaaaacttcacattctttagttttgatctttgtgtctctcttcttagtacagtacaggtcttcttcttatctggactcttttgtccaaatttacactgttatatatttatatatgt

SEQ ID NO: 105002 - protein, 328 aa, Arabidopsis thaliana; identical to SEQ ID NO: 25040
  peptide (1)..(328): Ceres Seq. ID no. 13616258

SEQ ID NO: 105003 - protein, 272 aa, Arabidopsis thaliana; identical to SEQ ID NO: 25041
  peptide (1)..(272): Ceres Seq. ID no. 13616259

SEQ ID NO: 105004 - protein, 269 aa, Arabidopsis thaliana; identical to SEQ ID NO: 25042
  peptide (1)..(269): Ceres Seq. ID no. 13616260

SEQ ID NO: 105005 - DNA, 757 bp, Arabidopsis thaliana
  misc_feature (1)..(757): Ceres Seq. ID no. 13616261
  misc_feature (1)..(757): Ortholog of  Ceres SEQ ID NO 15171235 as cited in SEQ ID NO 52469
  misc_feature (1)..(757): Ortholog of  Ceres SEQ ID NO 15172705 as cited in SEQ ID NO 56069
  misc_feature (1)..(757): Ortholog of  Ceres SEQ ID NO 12627215 as cited in SEQ ID NO 60976
  misc_feature (1)..(757): Ortholog of  Ceres SEQ ID NO 13654980 as cited in SEQ ID NO 63094
  misc_feature (1)..(757): Ortholog of  Ceres SEQ ID NO 15178542 as cited in SEQ ID NO 65410
  misc_feature (1)..(757): Ortholog of  Ceres SEQ ID NO 15174852 as cited in SEQ ID NO 67166
  misc_feature (1)..(757): Ortholog of  Ceres SEQ ID NO 12589584 as cited in SEQ ID NO 0
  misc_feature (1)..(757): Ortholog of  Ceres SEQ ID NO 12635657 as cited in SEQ ID NO 0
  misc_feature (1)..(757): Ortholog of  Ceres SEQ ID NO 12635879 as cited in SEQ ID NO 0
  misc_feature (1)..(757): Ortholog of  Ceres SEQ ID NO 13599649 as cited in SEQ ID NO 0
  misc_feature (1)..(757): Ortholog of  Ceres SEQ ID NO 14309205 as cited in SEQ ID NO 0
  misc_feature (1)..(757): Ortholog of  Ceres SEQ ID NO 14309404 as cited in SEQ ID NO 0
  misc_feature (1)..(757): Ortholog of  Ceres SEQ ID NO 15177492 as cited in SEQ ID NO 0
aaatatcttctcttcgtcctcaacagcttctccagaaaatctaggtcacacacttttaaaatcctcgttcccaaaatcgaacaacaacaatggcgtcgcatcctaaagttttcttcgacatgaccatcggcggtgcaccagcggggaagatcgtgatggagctttacaccgacaagacaccaaagacggcggagaatttcagagctctatgcaccggagagaaaggcgtcggacgtagcggaaagccacttcacttcaaaggatcttcgtttcaccgcgtgatcccaaatttcatgtgccaaggaggagatttcaccaaaggtaacggaactggtggcgaatcgatctacggagccaaatttgaggatgagaatttcgagaggaagcacacaggacctgggattttgtcgatggctaacgctggtgctaacactaatggatctcagtttttcatctgtacggtgaagactgattggcttgatggtaagcatgtggtgtttggtcaggtggttgaaggcttggacgttgttaaggctattgagaagatcggatcttcttctggaaagccgacgaagcctgttgtgatcgctgattgtggtgagatctcttcttagattccggttgtggtggtgacggtttcaatttctatgtttctagaagtttcttcttagctaattatggactgtgatctttgctctgtttctgcttttgcgtattttcctaattaagcaccattaataataagaaagttttaagg

SEQ ID NO: 105006 - protein, 174 aa, Arabidopsis thaliana; identical to SEQ ID NO: 23152
  peptide (1)..(174): Ceres Seq. ID no. 13616262

SEQ ID NO: 105007 - protein, 164 aa, Arabidopsis thaliana; identical to SEQ ID NO: 23153
  peptide (1)..(164): Ceres Seq. ID no. 13616263

SEQ ID NO: 105008 - protein, 152 aa, Arabidopsis thaliana; identical to SEQ ID NO: 23154
  peptide (1)..(152): Ceres Seq. ID no. 13616264

SEQ ID NO: 105009 - DNA, 1201 bp, Arabidopsis thaliana
  misc_feature (1)..(1201): Ceres Seq. ID no. 13616265
  misc_feature (1)..(1201): Ortholog of  Ceres SEQ ID NO 15179023 as cited in SEQ ID NO 0
atatcttctttctcctctactagttacatatcttcaacaaagtgaatctcatgaggatattaccgaaaagcggaggaggtgctctttgcctcctctttgtgtttgctctttgttcggtggctcattcccttagctgtgacgtcaaggttgttggcgatgtcgaagtcattggctactcagaaatcagcaaaatcaagatccccaatgcattctcaggacttcgagttacgatagaatgcaaggcggccgattcaaaaggccattttgtaacgaggggaagcggagaagtggacgaaacaggaaagtttcatcttaatattcctcatgacattgtcggtgatgacggaactctaaaagaagcttgctatgctcatcttcaaagtgccttcggcaacccttgtccggcccacgatggccttgaggcctccaagatcgtgtttctatcgaaatccggccaaaaccacgttttgggtctcaaaaaaagtcttaaattctcaccagaagtttgcatctcaaagttcttttggcatatgcctaagttccctttacctcctccgcttaatctcccaccgttaacgtttcctaagatcaagaagccttgtcccccaatttacaaaccaccggtggtgatccctaagaagccgtgtccaccaaagattgcacataaacccatctacaagccgccggttcccatctacaagcctccagtgcctatctacaagccaccagtggttatccccaagaaaccgtgtccaccaaagatacacaagcccatctacaagccacccgtgcctatctacaagcctccagtggtgatcccaaagaagacatttcctccacttcacaagccgatctacaagcacccggttcctatctacaaaccaatcttcaagccgccagtggtggtgattccaaagaaaccatgtccaccacttcccaagtttccacacttcccacctaaatacattccacaccctaagttcggaaaatggcctcctttcccttctcatccttgataaagatgcaaaatcctctgtctttcttaatttaagaaaagtgatcgagtgatgccacaaaagaatgttcctttgttgctttgttgaattctacgtagatgtttcatgtttatgtatcgtaaattccagccaatcatatttgtaattttttaccgttagaataaatctgtaatctcgtttctgtt

SEQ ID NO: 105010 - protein, 321 aa, Arabidopsis thaliana
  peptide (1)..(321): Ceres Seq. ID no. 13616266
MRILPKSGGGALCLLFVFALCSVAHSLSCDVKVVGDVEVIGYSEISKIKIPNAFSGLRVTIECKAADSKGHFVTRGSGEVDETGKFHLNIPHDIVGDDGTLKEACYAHLQSAFGNPCPAHDGLEASKIVFLSKSGQNHVLGLKKSLKFSPEVCISKFFWHMPKFPLPPPLNLPPLTFPKIKKPCPPIYKPPVVIPKKPCPPKIAHKPIYKPPVPIYKPPVPIYKPPVVIPKKPCPPKIHKPIYKPPVPIYKPPVVIPKKTFPPLHKPIYKHPVPIYKPIFKPPVVVIPKKPCPPLPKFPHFPPKYIPHPKFGKWPPFPSHP

SEQ ID NO: 105011 - protein, 161 aa, Arabidopsis thaliana; identical to SEQ ID NO: 49377
  peptide (1)..(161): Ceres Seq. ID no. 13616267

SEQ ID NO: 105012 - DNA, 1082 bp, Arabidopsis thaliana
  misc_feature (1)..(1082): Ceres Seq. ID no. 13616268
  misc_feature (1)..(1082): Ortholog of  Ceres SEQ ID NO 14307424 as cited in SEQ ID NO 54228
  misc_feature (1)..(1082): Ortholog of  Ceres SEQ ID NO 13664279 as cited in SEQ ID NO 61603
  misc_feature (1)..(1082): Ortholog of  Ceres SEQ ID NO 13584254 as cited in SEQ ID NO 63465
agtgtgaaagagcaaaagcataaatagcatcgagagagacactgttctcattcattcgcaaattcgttgaccatatttgatagaatcaagcgatgatgaatcttagggttttgttcctcgctctccttctccttgcatctcctctgcttcaagttgctagatgtcaatcggatgccgaggatcattcaagtcttgttgacgatgttgtgggagaaaacactgatgatgcggttgaggaagatgaccatgatttggatatgaacttgtcctcatttccaggagttgagactgtttgtgttttccccaaaaacagtgccaaattggttccagctggagaagagactgagctccttgttggtcttaaaaatgaagggaaaactagagtaggtgtgatgggaattagggccagcgttcatcttccttatgatcataagttgttggttcagaatctaaccatgttgagacttaacaatgcatccatcccaacgtctcttcaagcaacattcccatacatctttgcagtcagccagtacttgcagcctggagcatttgatctggtgggttatatcatatacgatgtggaaggaaagccataccagagtgtcttctacaatggaaccatagaggtagttgaatctggaggtcttctcagcggcgaatctgttttccttttaacactcggaatcggtctcctcctcctcctcggtctatgggcatacagccaagttcagcgtctcaccaagaaaaccaaaaaggtttccaaggtggaagtaggaactaggtctaccgaggcatcactcgatgaatggctcgagggaactactttggccaagacatcgtctgggaaaacaaagaacaagaagaactaaagtagagctgttttgctccttccagttgttatagactcagcttcggcgttttgaaagagtttccaagtttaaagttcagtcttgaggaaatttagggttttaaacgacactttttttgttccagcattgtactctttagacaatctttacttcttgtcataaatattctcctcatgaaacaagttaacttataaatggtttagatctgttttt

SEQ ID NO: 105013 - protein, 258 aa, Arabidopsis thaliana; identical to SEQ ID NO: 20928
  peptide (1)..(258): Ceres Seq. ID no. 13616269

SEQ ID NO: 105014 - protein, 257 aa, Arabidopsis thaliana; identical to SEQ ID NO: 20929
  peptide (1)..(257): Ceres Seq. ID no. 13616270

SEQ ID NO: 105015 - protein, 203 aa, Arabidopsis thaliana; identical to SEQ ID NO: 20930
  peptide (1)..(203): Ceres Seq. ID no. 13616271

SEQ ID NO: 105016 - DNA, 1101 bp, Arabidopsis thaliana
  misc_feature (1)..(1101): Ceres Seq. ID no. 13616275
  misc_feature (1)..(1101): Ortholog of  Ceres SEQ ID NO 13656486 as cited in SEQ ID NO 69202
gtcgtcacttaaccgagaaagcaaaagagaagaagaagaaggaatcgaaaaatgaagactccgatccacgcggtttcgacatgggtgaggaggcagcctccaaaggtgaaagctttccttgccgtcgtatctggcatggcggctcttgttctcctcaaactcatcgttcacgatcacgacaatctcttcgttgccgccgaagctgttcattctattggaatctctgttcttatctataaactcatgaaggagaagacttgtgctggattgtcattgaaatctcaggagcttacggcgatatttctagctgtgaggctttattgcagttttgtaatggaatatgatatacataccattctggacttggctactttgggaacaactctctgggttatatatatgatccgttttaacctcaaaactacttacatggaggaaaaagacaacttcgctctctattatgtgctggcgccctgtgttgtgctagctgtatggattcatccatcaacgtcacacaatatattgaatagaatatcctggggattctgtgtttacctcgaagctgtttcagtactgccacagttgagagtgatgcagaacacaaagattgtcgaacccttcacggctcattatgtttttgcacttggagtagcaagattttttagctgtgcacactgggttttacagatgatggacacgcacggacgactgcttgtagtgctgggttatggactatggccatcgatggttataatctcagaaatagtccaaacattcatattggcagatttctgttactactacgttaaaagtgttttcggtggccagcttgttctaaggcttccatctggggttgtgtaagttataaaggaaaaaagataagacacattatgacgaaatttgttacacgaagatagatctcagcttggtgtaatctgagtagcctctggttactctcaagttactccctcaggccaagtcctaattctattaactgtgttgtatatttttgtgtgggtcatcatcatagacagtcccttggatattattgacatgattttttccactgcatttgtgctaaattatccttggttcccacgg

SEQ ID NO: 105017 - protein, 269 aa, Arabidopsis thaliana
  peptide (1)..(269): Ceres Seq. ID no. 13616276
MKTPIHAVSTWVRRQPPKVKAFLAVVSGMAALVLLKLIVHDHDNLFVAAEAVHSIGISVLIYKLMKEKTCAGLSLKSQELTAIFLAVRLYCSFVMEYDIHTILDLATLGTTLWVIYMIRFNLKTTYMEEKDNFALYYVLAPCVVLAVWIHPSTSHNILNRISWGFCVYLEAVSVLPQLRVMQNTKIVEPFTAHYVFALGVARFFSCAHWVLQMMDTHGRLLVVLGYGLWPSMVIISEIVQTFILADFCYYYVKSVFGGQLVLRLPSGVV

SEQ ID NO: 105018 - protein, 241 aa, Arabidopsis thaliana; identical to SEQ ID NO: 42097
  peptide (1)..(241): Ceres Seq. ID no. 13616277

SEQ ID NO: 105019 - protein, 205 aa, Arabidopsis thaliana; identical to SEQ ID NO: 42098
  peptide (1)..(205): Ceres Seq. ID no. 13616278

SEQ ID NO: 105020 - DNA, 1165 bp, Arabidopsis thaliana
  misc_feature (1)..(1165): Ceres Seq. ID no. 13616283
  misc_feature (1)..(1165): Ortholog of  Ceres SEQ ID NO 12474685 as cited in SEQ ID NO 88
  misc_feature (1)..(1165): Ortholog of  Ceres SEQ ID NO 13638574 as cited in SEQ ID NO 51223
  misc_feature (1)..(1165): Ortholog of  Ceres SEQ ID NO 12610790 as cited in SEQ ID NO 56123
  misc_feature (1)..(1165): Ortholog of  Ceres SEQ ID NO 13655636 as cited in SEQ ID NO 63519
  misc_feature (1)..(1165): Ortholog of  Ceres SEQ ID NO 13655896 as cited in SEQ ID NO 64970
  misc_feature (1)..(1165): Ortholog of  Ceres SEQ ID NO 12627322 as cited in SEQ ID NO 67162
acactgagaaactctcaatctgagcagatatttacccaatcagggattcaggaagagaagcagagaaagaaatggagataacactgaacagtggcttcaagatgccgatcgtcggcttaggagtatggagaatggagaaggaagggattcgagaccttatcctcaatgccatcaagatcggctatcgccatctcgactgtgctgctgattataggaatgagaccgaagttggtgatgctcttacagaagcattcaagactggtctggttaagagggaggatctcttcattacaaccaagctatggaattcagaccatggccatgtcattgaggcctgcaaagacagtctcaagaaacttcaacttgattacctcgatctcttcctcgttcattttcccgtagcaacgaaacacaccggagtagggacaaccgatagtgctttgggcgatgacggggtattggacatagacacgaccatctctctggaaactacatggcacgacatggaaaagcttgtttctatgggtttagtccgcagcattggaatcagtaactatgatgtctttctaacgagagattgcttggcttactccaagatcaaacctgctgtgaatcagatcgagacacatccttacttccaacgtgattctcttgtcaaattctgccagaaacatggtatctgtgtcactgctcatactcctctcggaggtgccacagccaatgccgagtggtttggcaccgtgtcatgcctggatgatccagttctcaaagatgtggccgagaagtacaaaaagacagtggcacaagttgtcctgaggtggggaatccagagaaaaacggtggtgataccaaagacatcaaagcctgcgagattggaagagaactttcaggttttcgacttcgaactatcgaaagaggacatggaagtgatcaaaagcatggagaggaaataccgcacgaaccaaccagccaagttttggaacattgatctctacgcttgatcacactctctctatctacatgaataaatgaagcttaagaagataaacaacgagaagaagccatagctttacctgaaacattctcaaatgtttgtgagcctatctttcatacataaactcatgttgttaaacagattatgatttcttaagtactacaatatcac

SEQ ID NO: 105021 - protein, 309 aa, Arabidopsis thaliana; identical to SEQ ID NO: 25625
  peptide (1)..(309): Ceres Seq. ID no. 13616284

SEQ ID NO: 105022 - protein, 299 aa, Arabidopsis thaliana; identical to SEQ ID NO: 25626
  peptide (1)..(299): Ceres Seq. ID no. 13616285

SEQ ID NO: 105023 - protein, 289 aa, Arabidopsis thaliana; identical to SEQ ID NO: 25627
  peptide (1)..(289): Ceres Seq. ID no. 13616286

SEQ ID NO: 105024 - DNA, 1088 bp, Arabidopsis thaliana
  misc_feature (1)..(1088): Ceres Seq. ID no. 13616287
  misc_feature (1)..(1088): Ortholog of  Ceres SEQ ID NO 12474685 as cited in SEQ ID NO 88
  misc_feature (1)..(1088): Ortholog of  Ceres SEQ ID NO 13638574 as cited in SEQ ID NO 51223
  misc_feature (1)..(1088): Ortholog of  Ceres SEQ ID NO 12610790 as cited in SEQ ID NO 56123
  misc_feature (1)..(1088): Ortholog of  Ceres SEQ ID NO 13655636 as cited in SEQ ID NO 63519
  misc_feature (1)..(1088): Ortholog of  Ceres SEQ ID NO 13655896 as cited in SEQ ID NO 64970
  misc_feature (1)..(1088): Ortholog of  Ceres SEQ ID NO 12627322 as cited in SEQ ID NO 67162
atactgggaaactctcaattctgagcagatatctacccaatcacggattgaggagagaagcaagaagaagaaatggagattacactgaacagtggcttcaaaatgccgatcatcggcttaggagtttggagaatggagaaagaagagcttcgagaccttatcatcgatgccatcaagatcggttatcgtcatctcgactgtgctgctaattataagaacgaagctgaagttggtgaggctcttacagaagcattcacgacaggtcttgtcaagagggaggatctcttcattacgactaagctatggagttcagaccatggccatgttattgaggcatgcaaagacagtctcaagaaacttcaacttgattacctcgaccttttcctcgttcatatacccatagctacaaaacacacgggaataggaacaaccgatagtgctttgggggatgatggggtattggacatagatacaacaatctctctggaaactacatggcacgacatggaaaagcttgtttctatgggtttagtccgcagcattggaatcagtaactatgatgtctttctaacgagagattgcttggcttactccaagatcaaacctgctgtgaatcagatcgagacacatccttacttccaacgcgattctctagtcaaattctgccagaaacatggtatctgtgtcactgctcatactcctctgggaggtgccacagccaatgccgaatggtttggcaccgtgtcatgtctggatgacccagttctcaaagatgtggccgagaagtacaaacagacagtggcacagattgtcctgaggtggggaattcagaggaacacggtggtgataccaaagacatcgaagcctgaaagattggaagagaattttcaggttttcgacttccaactatcgaaagaggacatggaagtgatcaaaagcatggagaggaattaccgcacgcaccaaacagccaagttttggggcattgagctctacgcttgatcacacacacactctctctctctatctatctatatgaataaatgaagcttaagaatataatatcagataacttcaacttttttaag

SEQ ID NO: 105025 - protein, 309 aa, Arabidopsis thaliana
  peptide (1)..(309): Ceres Seq. ID no. 13616288
MEITLNSGFKMPIIGLGVWRMEKEELRDLIIDAIKIGYRHLDCAANYKNEAEVGEALTEAFTTGLVKREDLFITTKLWSSDHGHVIEACKDSLKKLQLDYLDLFLVHIPIATKHTGIGTTDSALGDDGVLDIDTTISLETTWHDMEKLVSMGLVRSIGISNYDVFLTRDCLAYSKIKPAVNQIETHPYFQRDSLVKFCQKHGICVTAHTPLGGATANAEWFGTVSCLDDPVLKDVAEKYKQTVAQIVLRWGIQRNTVVIPKTSKPERLEENFQVFDFQLSKEDMEVIKSMERNYRTHQTAKFWGIELYA

SEQ ID NO: 105026 - protein, 299 aa, Arabidopsis thaliana
  peptide (1)..(299): Ceres Seq. ID no. 13616289
MPIIGLGVWRMEKEELRDLIIDAIKIGYRHLDCAANYKNEAEVGEALTEAFTTGLVKREDLFITTKLWSSDHGHVIEACKDSLKKLQLDYLDLFLVHIPIATKHTGIGTTDSALGDDGVLDIDTTISLETTWHDMEKLVSMGLVRSIGISNYDVFLTRDCLAYSKIKPAVNQIETHPYFQRDSLVKFCQKHGICVTAHTPLGGATANAEWFGTVSCLDDPVLKDVAEKYKQTVAQIVLRWGIQRNTVVIPKTSKPERLEENFQVFDFQLSKEDMEVIKSMERNYRTHQTAKFWGIELYA

SEQ ID NO: 105027 - protein, 289 aa, Arabidopsis thaliana
  peptide (1)..(289): Ceres Seq. ID no. 13616290
MEKEELRDLIIDAIKIGYRHLDCAANYKNEAEVGEALTEAFTTGLVKREDLFITTKLWSSDHGHVIEACKDSLKKLQLDYLDLFLVHIPIATKHTGIGTTDSALGDDGVLDIDTTISLETTWHDMEKLVSMGLVRSIGISNYDVFLTRDCLAYSKIKPAVNQIETHPYFQRDSLVKFCQKHGICVTAHTPLGGATANAEWFGTVSCLDDPVLKDVAEKYKQTVAQIVLRWGIQRNTVVIPKTSKPERLEENFQVFDFQLSKEDMEVIKSMERNYRTHQTAKFWGIELYA

SEQ ID NO: 105028 - DNA, 1324 bp, Arabidopsis thaliana
  misc_feature (1)..(1324): Ceres Seq. ID no. 13616294
  misc_feature (1)..(1324): Ortholog of  Ceres SEQ ID NO 13596554 as cited in SEQ ID NO 62818
aaaaccgtaaactcttgcgcgtcgtataaaacaacaaacctgaagtagaatcgagagatattgttgcccccatttacatttctgcacgatcatcatcatggtgaaagagactgaatactacgagatcttaggcgtcaaaactgatgcttcagatgctgagattaaaaaggcttactacttaaaagcaaggaaagttcatccagacaagaaccctggagaccctcaagctgctaaaaactttcaggttttaggtgaggcttatcaggttctaagcaatccggataagcgagcagcttatgacaaatatggcaaagaaggggtccaacaggatgcaatggttgatcctgcagctgtatttggtatgcttttcggaagcgaagtctttgaagaatacgttggccagcttgcacttgcttatttggcatctatcgaagctgacttagaatcacatgaccctgaaatcagaaagcaaatgcttcaagacaagatcaaagctcttcaaaaggagagggaagacaagctcgccgctacattgaaaaacaaacttgaaccctttgtggaaagacaaacagatgaatttatcgaatgggcaaacgaagaggcaaagcggctttcttctgccggttttggcgaggcaatgatgcatactattggttacatttacacaagaaaagctgctaaagaaatcgggaaagacaagcgatatatgaaagtaccattcttagctgaatgggtgcgtgacaaaggccaccatatgaaatctcaagtgatggctgcttctggtgcggtttcgttacttcagttgcaggatgaagtaaacaagttgaatgaacaccaaggagagaacaaagaggaacatattcagaaagctattgaagctaaaatggatgctttgcttcaatctctttggcaaatcaatgttctcgacatcgaatccacgctatctcgtgtttgccaatctgtgcttaaagatccaagtgtttcgaaggatgttcttcgagctcgtgccataggactgaagaaacttggaacgatcttccagggtgctaagaagccgtacacgagaggaagcagcttgcgtcgggaagccaccaccgtgaaaatggacaccggaggttcttcaaaggcgacgtcttgaaactccggaacttaaaatgctgtttcttttattggttgaagttggatttgtccttcgttttttactttccccagttttgtagagattgctttctatgttaacttttttttcgtgtagatgttacatttaaggtggtgcattactgcattctcattaaaatcttttcgtcacattattcaaatttct

SEQ ID NO: 105029 - protein, 346 aa, Arabidopsis thaliana; identical to SEQ ID NO: 42809
  peptide (1)..(346): Ceres Seq. ID no. 13616295

SEQ ID NO: 105030 - protein, 267 aa, Arabidopsis thaliana; identical to SEQ ID NO: 42810
  peptide (1)..(267): Ceres Seq. ID no. 13616296

SEQ ID NO: 105031 - protein, 258 aa, Arabidopsis thaliana; identical to SEQ ID NO: 42811
  peptide (1)..(258): Ceres Seq. ID no. 13616297

SEQ ID NO: 105032 - DNA, 972 bp, Arabidopsis thaliana
  misc_feature (1)..(972): Ceres Seq. ID no. 13616298
  misc_feature (1)..(972): Ortholog of  Ceres SEQ ID NO 14311859 as cited in SEQ ID NO 51658
  misc_feature (1)..(972): Ortholog of  Ceres SEQ ID NO 13638685 as cited in SEQ ID NO 51871
  misc_feature (1)..(972): Ortholog of  Ceres SEQ ID NO 13599200 as cited in SEQ ID NO 0
aaaaaacggattcttgtgatattgagcgtcgtcttctcttccttagccaaagccagatctgcttctttttcgctgcgtcgtcgagaggtctctctttgaggaagctaattccttcttcttcttcaccatccgtttcaagaataacaatggaaggaagcggtggtgacagtggttcgatggctacgcctgtacaaaagaaagtacatgaggcatggagggtttaccaatattatctggacaagactacacctcattcaactaacaggtggatcggaacacttgttttctttcttatctactgtttgagggtttactctattcacggattctacatcatctcctatggtcttggaatctacctcctgaatctgcttatcgggtttttgtctcctcttgttgatcctgagctcgaggtatctgatggagctactctgcctactcgaggttctgatgagttcaagccatttatccgccgtctcccggagtttaaattctggtactccatgactaaggcattctgcatagcctttcttatgacattcttctcggtgtttgatgttcccgtcttctggcccatactgctttgctactgggtcgttctctttgtcctcaccatgagacgccaaatagcccacatgatcaagcacaagtacattcctttcagcatcggaaaacagaaatatagcggccggaaatcttctgcgaacagcggcggcggctctcgtgctgattgatttcaacttgcagccacattttctgcagaaaaagaatgaaaaaaagttgggttttcacgttggaacgttttgtagtgatgaattactagtattgttatgcttctacaatgaagaagaaggaaacagaaaagggtcattagtttttatgttgcaggaatattgttctttgttagttccctttaatccaagtacctctgctgtaaatataattcaattttatttcgaaacaaattcattc

SEQ ID NO: 105033 - protein, 243 aa, Arabidopsis thaliana
  peptide (1)..(243): Ceres Seq. ID no. 13616299
KTDSCDIERRLLFLSQSQICFFFAASSRGLSLRKLIPSSSSPSVSRITMEGSGGDSGSMATPVQKKVHEAWRVYQYYLDKTTPHSTNRWIGTLVFFLIYCLRVYSIHGFYIISYGLGIYLLNLLIGFLSPLVDPELEVSDGATLPTRGSDEFKPFIRRLPEFKFWYSMTKAFCIAFLMTFFSVFDVPVFWPILLCYWVVLFVLTMRRQIAHMIKHKYIPFSIGKQKYSGRKSSANSGGGSRAD

SEQ ID NO: 105034 - protein, 195 aa, Arabidopsis thaliana
  peptide (1)..(195): Ceres Seq. ID no. 13616300
MEGSGGDSGSMATPVQKKVHEAWRVYQYYLDKTTPHSTNRWIGTLVFFLIYCLRVYSIHGFYIISYGLGIYLLNLLIGFLSPLVDPELEVSDGATLPTRGSDEFKPFIRRLPEFKFWYSMTKAFCIAFLMTFFSVFDVPVFWPILLCYWVVLFVLTMRRQIAHMIKHKYIPFSIGKQKYSGRKSSANSGGGSRAD

SEQ ID NO: 105035 - protein, 185 aa, Arabidopsis thaliana
  peptide (1)..(185): Ceres Seq. ID no. 13616301
MATPVQKKVHEAWRVYQYYLDKTTPHSTNRWIGTLVFFLIYCLRVYSIHGFYIISYGLGIYLLNLLIGFLSPLVDPELEVSDGATLPTRGSDEFKPFIRRLPEFKFWYSMTKAFCIAFLMTFFSVFDVPVFWPILLCYWVVLFVLTMRRQIAHMIKHKYIPFSIGKQKYSGRKSSANSGGGSRAD

SEQ ID NO: 105036 - DNA, 1892 bp, Arabidopsis thaliana
  misc_feature (1)..(1892): Ceres Seq. ID no. 13616306
  misc_feature (1)..(1892): Ortholog of  Ceres SEQ ID NO 14303109 as cited in SEQ ID NO 66330
aacacaaaacagtaatctctcagactacaactttactcacttcaccagctctctctcacttgatgacaatgggcgactctgacctccgtaaacctaccaatttcggcaccggacatctatctcgccgacgatcatggtgttgctctttcgccgtacctccagcgagtcctgatactcgttcgatttcatctcgtaaccacattccagctaaatctcagcagcagagacctaaactggttccttgctcaccgcaaagctctaaatctgctttaaacatcgtaaatcggatcgacccgcgtcggatcttatcaccgggtcgggtttcacccatagattcggatccgaccgtcactacaatgcaagagaccgagaccactcaggaagaagaagatgatgcggttgttgtagattcgacaccaaatcttcgttctgagagttttagagctccgaagattgaggttacgggttcgggtttgagtgagggttacgatgctaggttgagtttgaagggaagaaatggtggtggggttctggtgttggagcttagcttggaggttttggctgcgaattctgatgtgttctcgggtttgattgcggaggagaagaagtgttcttcttcttcatcgtctttaggattgaagaacacatgcaggattgaagtatgtgatgtggagaatcttggtgtttttagggaaactgttgagctcatgtttgaggaaagtaatgttattatcaagaagtttatgacaatgggagtctacagagccattgatgtacttgaggtagcggctggaatcaaattttcaagagctgtcttatcgtgtctgaaatatcttgaagctgttccttggacagaggatgaagaggaaaaactgaggagacttcttggaatttatagctttgatgatgatgcagttagtgaaattttggcaagatttaattcaaacgagacagaaaacttgcaagacagtttatcgaagaaactggtttggtcaattacttcctgcagtgatgtaaatcctagaaacgagctcaaatctctggtgaagggtcttctttgcaaaagctcagtgtacgagaaagaacagcctgagatcaacaaggaagacatatatagagcaggcaagtgttgtgtggattcattagctaagttgtttgaagagggcagtagtagtagtagtagcaagaaagaaaagccattgattgaaagtatttcgagggaggttgagaacataaactggctgctggagatcatgatagatcgggaaatagcagaagaatttgtggaaatatgggggaagcaaagaaggctagtggagatgcatgagagagtgtcaccaatggtgaggtatgaagtaagcagagtaacaggagcgatatttattgcaatggggaaaaggagagtgcaatgcggaggagaagcaagggcggggctagtagaagcgtggttcaagccaatgttagtagattttgggtggctacagagatgcaagaaaggactagacatgagggaagtagaagaagggatggggcaaacgcttttaacgctaccagtaaaagagcagtatcaagtgttcatggaatggttcaggtggttctcaaagcatgggactgagtgccctaatctcagcaaggcgtttcagatatggtggcgtaggtcattccttagaggtgtagaatcatctacttgtaggtaaacaaattattccaagtgttcaagaggctattatgtatgttaggttttagcttttgtggaaatttagactgtaatataactctctctccttttgtctccacccgcatgatatgttcgtttcggatgttttttggagctaaattagtcgtaaggtttgaaaaagcaacaagtacaaaacacaaaatggtactttctt

SEQ ID NO: 105037 - protein, 564 aa, Arabidopsis thaliana
  peptide (1)..(564): Ceres Seq. ID no. 13616307
HKTVISQTTTLLTSPALSHLMTMGDSDLRKPTNFGTGHLSRRRSWCCSFAVPPASPDTRSISSRNHIPAKSQQQRPKLVPCSPQSSKSALNIVNRIDPRRILSPGRVSPIDSDPTVTTMQETETTQEEEDDAVVVDSTPNLRSESFRAPKIEVTGSGLSEGYDARLSLKGRNGGGVLVLELSLEVLAANSDVFSGLIAEEKKCSSSSSSLGLKNTCRIEVCDVENLGVFRETVELMFEESNVIIKKFMTMGVYRAIDVLEVAAGIKFSRAVLSCLKYLEAVPWTEDEEEKLRRLLGIYSFDDDAVSEILARFNSNETENLQDSLSKKLVWSITSCSDVNPRNELKSLVKGLLCKSSVYEKEQPEINKEDIYRAGKCCVDSLAKLFEEGSSSSSSKKEKPLIESISREVENINWLLEIMIDREIAEEFVEIWGKQRRLVEMHERVSPMVRYEVSRVTGAIFIAMGKRRVQCGGEARAGLVEAWFKPMLVDFGWLQRCKKGLDMREVEEGMGQTLLTLPVKEQYQVFMEWFRWFSKHGTECPNLSKAFQIWWRRSFLRGVESSTCR

SEQ ID NO: 105038 - protein, 544 aa, Arabidopsis thaliana
  peptide (1)..(544): Ceres Seq. ID no. 13616308
MTMGDSDLRKPTNFGTGHLSRRRSWCCSFAVPPASPDTRSISSRNHIPAKSQQQRPKLVPCSPQSSKSALNIVNRIDPRRILSPGRVSPIDSDPTVTTMQETETTQEEEDDAVVVDSTPNLRSESFRAPKIEVTGSGLSEGYDARLSLKGRNGGGVLVLELSLEVLAANSDVFSGLIAEEKKCSSSSSSLGLKNTCRIEVCDVENLGVFRETVELMFEESNVIIKKFMTMGVYRAIDVLEVAAGIKFSRAVLSCLKYLEAVPWTEDEEEKLRRLLGIYSFDDDAVSEILARFNSNETENLQDSLSKKLVWSITSCSDVNPRNELKSLVKGLLCKSSVYEKEQPEINKEDIYRAGKCCVDSLAKLFEEGSSSSSSKKEKPLIESISREVENINWLLEIMIDREIAEEFVEIWGKQRRLVEMHERVSPMVRYEVSRVTGAIFIAMGKRRVQCGGEARAGLVEAWFKPMLVDFGWLQRCKKGLDMREVEEGMGQTLLTLPVKEQYQVFMEWFRWFSKHGTECPNLSKAFQIWWRRSFLRGVESSTCR

SEQ ID NO: 105039 - protein, 542 aa, Arabidopsis thaliana
  peptide (1)..(542): Ceres Seq. ID no. 13616309
MGDSDLRKPTNFGTGHLSRRRSWCCSFAVPPASPDTRSISSRNHIPAKSQQQRPKLVPCSPQSSKSALNIVNRIDPRRILSPGRVSPIDSDPTVTTMQETETTQEEEDDAVVVDSTPNLRSESFRAPKIEVTGSGLSEGYDARLSLKGRNGGGVLVLELSLEVLAANSDVFSGLIAEEKKCSSSSSSLGLKNTCRIEVCDVENLGVFRETVELMFEESNVIIKKFMTMGVYRAIDVLEVAAGIKFSRAVLSCLKYLEAVPWTEDEEEKLRRLLGIYSFDDDAVSEILARFNSNETENLQDSLSKKLVWSITSCSDVNPRNELKSLVKGLLCKSSVYEKEQPEINKEDIYRAGKCCVDSLAKLFEEGSSSSSSKKEKPLIESISREVENINWLLEIMIDREIAEEFVEIWGKQRRLVEMHERVSPMVRYEVSRVTGAIFIAMGKRRVQCGGEARAGLVEAWFKPMLVDFGWLQRCKKGLDMREVEEGMGQTLLTLPVKEQYQVFMEWFRWFSKHGTECPNLSKAFQIWWRRSFLRGVESSTCR

SEQ ID NO: 105040 - DNA, 1258 bp, Arabidopsis thaliana
  misc_feature (1)..(1258): Ceres Seq. ID no. 13616314
  misc_feature (1)..(1258): Ortholog of  Ceres SEQ ID NO 13590691 as cited in SEQ ID NO 66290
gagaaagatcttctttaacctctttgcaacaaatctactcaaaaccctaacccctttttcaaattacttccatctttagatcgaatcaaatcaatgtccgtcgacgatctccctccgtcgtcggcctccgccgtaacgccactaggctcctccgtgattccgattgtgaacaagctccaagacatattcgctcagctaggaagtcaatcgacgatcgctcttccgcaagtagctgtcgtcggaagtcaaagcagtggcaaatccagcgttctagaagctctcgtcggccgtgactttcttcctcgtggcaatgatatttgcacgcgccgacctctccgtctccagcttgttcagacgaaacctagctctgatggtggatccgatgaagagtggggcgagtttcttcaccacgatcctgttagacgtatctacgatttctctgagattcgccgtgagattgaggcggagactaatagagtatcaggagagaacaaaggtgtatcagatattccgattggtttgaagatattttcacctaatgttttggatattagtcttgtggatcttcctggtatcactaaggttcctgttggtgatcagccaagtgatatcgaagcgcgtataagaacgatgatcttgacttacattaaggaacctagttgcttgatacttgctgttagccctgctaatactgatttagcaaattcagatgcattacaaatcgcaggaaatgctgatcctgatggtcatagaaccataggtgtaatcacaaagttggatattatggacagaggtactgatgctcggaatcaccttctgggaaaaacaattcctcttcgacttggatacgtgggagttgtaaatcgtagtcaagaggatattttgatgaaccgtagcatcaaggatgctcttgttgcagaggaaaagttctttcgtagtcgtccagtttacagcggtctcacagatcgtttgggtgtccctcaactggcaaagaaattaaatcaggtccttgttcaacacatcaaggcactgcttcctagtttaaagtcacgtatcaacaatgcattgtttgctacagcaaaggagtatgagagctatggggatataacagagtctagggtatgtgggttttggccagttttagccttatatataccatccattctcaatgatggcattgctatttgctttttttgcgttgtatgatttcttgctcagttttcgtatttgaatataattttattcatttttgtgatcc

SEQ ID NO: 105041 - protein, 370 aa, Arabidopsis thaliana
  peptide (1)..(370): Ceres Seq. ID no. 13616315
MSVDDLPPSSASAVTPLGSSVIPIVNKLQDIFAQLGSQSTIALPQVAVVGSQSSGKSSVLEALVGRDFLPRGNDICTRRPLRLQLVQTKPSSDGGSDEEWGEFLHHDPVRRIYDFSEIRREIEAETNRVSGENKGVSDIPIGLKIFSPNVLDISLVDLPGITKVPVGDQPSDIEARIRTMILTYIKEPSCLILAVSPANTDLANSDALQIAGNADPDGHRTIGVITKLDIMDRGTDARNHLLGKTIPLRLGYVGVVNRSQEDILMNRSIKDALVAEEKFFRSRPVYSGLTDRLGVPQLAKKLNQVLVQHIKALLPSLKSRINNALFATAKEYESYGDITESRVCGFWPVLALYIPSILNDGIAICFFCVV

SEQ ID NO: 105042 - protein, 191 aa, Arabidopsis thaliana
  peptide (1)..(191): Ceres Seq. ID no. 13616316
MILTYIKEPSCLILAVSPANTDLANSDALQIAGNADPDGHRTIGVITKLDIMDRGTDARNHLLGKTIPLRLGYVGVVNRSQEDILMNRSIKDALVAEEKFFRSRPVYSGLTDRLGVPQLAKKLNQVLVQHIKALLPSLKSRINNALFATAKEYESYGDITESRVCGFWPVLALYIPSILNDGIAICFFCVV

SEQ ID NO: 105043 - DNA, 1066 bp, Arabidopsis thaliana
  misc_feature (1)..(1066): Ceres Seq. ID no. 13616325
  misc_feature (1)..(1066): Ortholog of  Ceres SEQ ID NO 13596358 as cited in SEQ ID NO 68333
ggaaggcttttaaaaccctagctggtaccaatcttaaacccctctccgattttgatttctgcttgaaattgttttccccgagatctcaatttcgataatcggaaaacgaaaaagatggtttggtttcaatgcgaagactgtggagagagtctgaagaagccaaaggtcccgtctcacttcaagatgtgcagagccaacaagttatcgtgcatcgattgtggagaaatgtttgggagagatactgtgcaaggacataaccaatgcattactgaagctgagaagtatggtccaaaagggcagtcaaagtcagctaatggaacacctgcaaagccaaaggacatctctaagcaagagcctgactttgatattaatgtcggcttatcaaaccgatatccatggttttgcagtttatgtaacacaaaggctactagccagcagactttgcttgcccatgcggatgggaagaagcaccgaggaaaagctaaagccttccatgctaggcaacaacaagaacaatccacgactttggataacaaggatggaagtgaaaatgcgtctaatgttgattcagaacagaagaaagtagatttacctgcctcctcaggtgttgcgaatggagaatcgcatcctgagaaaaagagaaagctagagactttggatgaaacgagtgaaggcgaagaagcaaaaggaagtgatctaaagaaagcaaagaagcaggaccatgagaagaaaatcaattggaagaagttgatcacatcggctttgaagtctaacgaagataaaactttgaagatgaagaaactgaagaagctcgttctggaatctattgtggattcaggccgagacaaatctgagcttaaggcagagctagaactaaaggtgaatttgagctccagattcacagttgatgggaagtatgtgaaacttgtggctaaagattgaatctaattcttgagtccagcaacagtatcatgtctccgactgtcacagttttggcatatgattcattactattaatgtctgtaccaaatttggaattttggaatctcatcaaacattattcgta

SEQ ID NO: 105044 - protein, 275 aa, Arabidopsis thaliana
  peptide (1)..(275): Ceres Seq. ID no. 13616326
MVWFQCEDCGESLKKPKVPSHFKMCRANKLSCIDCGEMFGRDTVQGHNQCITEAEKYGPKGQSKSANGTPAKPKDISKQEPDFDINVGLSNRYPWFCSLCNTKATSQQTLLAHADGKKHRGKAKAFHARQQQEQSTTLDNKDGSENASNVDSEQKKVDLPASSGVANGESHPEKKRKLETLDETSEGEEAKGSDLKKAKKQDHEKKINWKKLITSALKSNEDKTLKMKKLKKLVLESIVDSGRDKSELKAELELKVNLSSRFTVDGKYVKLVAKD

SEQ ID NO: 105045 - protein, 252 aa, Arabidopsis thaliana
  peptide (1)..(252): Ceres Seq. ID no. 13616327
MCRANKLSCIDCGEMFGRDTVQGHNQCITEAEKYGPKGQSKSANGTPAKPKDISKQEPDFDINVGLSNRYPWFCSLCNTKATSQQTLLAHADGKKHRGKAKAFHARQQQEQSTTLDNKDGSENASNVDSEQKKVDLPASSGVANGESHPEKKRKLETLDETSEGEEAKGSDLKKAKKQDHEKKINWKKLITSALKSNEDKTLKMKKLKKLVLESIVDSGRDKSELKAELELKVNLSSRFTVDGKYVKLVAKD

SEQ ID NO: 105046 - protein, 238 aa, Arabidopsis thaliana; identical to SEQ ID NO: 40554
  peptide (1)..(238): Ceres Seq. ID no. 13616328

SEQ ID NO: 105047 - DNA, 1370 bp, Arabidopsis thaliana
  misc_feature (1)..(1370): Ceres Seq. ID no. 13616334
  misc_feature (1)..(1370): Ortholog of  Ceres SEQ ID NO 14306059 as cited in SEQ ID NO 52249
  misc_feature (1)..(1370): Ortholog of  Ceres SEQ ID NO 15170479 as cited in SEQ ID NO 52835
  misc_feature (1)..(1370): Ortholog of  Ceres SEQ ID NO 13596087 as cited in SEQ ID NO 68336
aaaaaaaacaaacacaaaacacgcttctcttgttgagaagctagcaaaacaacactaaacctgaaacaaacgtaaatccgccgcaacaacccagttttttccgacggcgtacaagcttcctccgccgtaacgccgtcgtttaataccaagaagcttgattaggtttccgtagtgtgtgatttgtgagattcttttaaggttctgaacactgatgtcaaacccattgaaagagtcaagagaggatattgcaaattctactcctcacatgagggataatgagtatgttcggctagttgtggctcatgaagcctccccagctgaaaccgtgttgtctctatcgcaatcagaggtgcagagtaagaaatttatgtggtggttaaaagctttgggaatatgtgcagttgctctcttgcttacgcttgttttcggaaaatggggagttccgtttgtgtttcaaaaggttcttattccaattttgcaatgggaagcaactgcgtttggccgtcctatgctcgcgattgtccttgttgtttccttggctttgtttcctgtgttcttgataccttctggtccttccatgtggttagctgggatgatttttggttatggtctcggttttgttattatcatggttggaaccaccattggcatggttctcccttacttaatcgggcttatgttccgtgatcgcctccatcaatggttaaaaagatggcctcgtcaagctgctgttctaagactagctgcagaaggaagctggttccatcaattcagagtcgtggcaatctttcgggtttccccatttccttacacgatttttaactacgcaatcgtcgtgacaagcatgagattctggccttacttcttcggatccatagcaggaatgataccagaagctttcatctacatttacagcggtcggttaatcagaacattcgcagatgtgcaatacggacatcaacgtttgacaacagtggagattgtgtacaatgtaatctccttagtcattgcggttgtgaccactgttgctttcactgtgtacgcgaaaagagctttgagagagcttcaaaacgcagaagctaatgaagatgaagaagttcaagtaagaaaagtgagattcgagatgaagaacgtagttcagcacgaagaagataatcatcagcgtttgccttagccgaaagttgacacaaagctaagataggtttgtataaagctttgaacgttgacatgttcttcagcaggatttagagtaaataacaaaaggggtaaaaaaagtctgatatagtaggaagactaagactagtcaagattggatttatattagtgtgactgattccaattattgaaacaaataaaagaagcatttaggc

SEQ ID NO: 105048 - protein, 320 aa, Arabidopsis thaliana; identical to SEQ ID NO: 77403
  peptide (1)..(320): Ceres Seq. ID no. 13616335

SEQ ID NO: 105049 - protein, 302 aa, Arabidopsis thaliana; identical to SEQ ID NO: 77404
  peptide (1)..(302): Ceres Seq. ID no. 13616336

SEQ ID NO: 105050 - protein, 268 aa, Arabidopsis thaliana; identical to SEQ ID NO: 77405
  peptide (1)..(268): Ceres Seq. ID no. 13616337

SEQ ID NO: 105051 - DNA, 1262 bp, Arabidopsis thaliana
  misc_feature (1)..(1262): Ceres Seq. ID no. 13616342
  misc_feature (1)..(1262): Ortholog of  Ceres SEQ ID NO 14314434 as cited in SEQ ID NO 52401
  misc_feature (1)..(1262): Ortholog of  Ceres SEQ ID NO 14303939 as cited in SEQ ID NO 54286
  misc_feature (1)..(1262): Ortholog of  Ceres SEQ ID NO 14307760 as cited in SEQ ID NO 54741
  misc_feature (1)..(1262): Ortholog of  Ceres SEQ ID NO 15179003 as cited in SEQ ID NO 0
gatcggtcccttttgttttatcgttttagggtttgtagctcctttctctttttttcttttctcaatttcccccaaattaaaaaaaaactctctctttcagagatttacaaatttcatttctccaaatccgaaaccccaaagtgaatatttttccttctgggtttcttttgtttgcctggaaacatttgtctcagattttgattttgaccggagtactcatattctccggcgatttctccggcgacatcgtttgtgaaatggagggaattactcatccaatacctcgtactgttgaagaggtctttagcgacttcagaggtcgacgagctggtcttattaaagctctcactaatgatatggtgaagttttaccaaacgtgtgatcctgagaaggagaatttgtgtctctatggacttccaaatgagacatgggaggttaatctacccgttgaggaagttcctcctgagcttcctgaaccagctttaggcatcaatttcgctagagacggaatgcaagaaaaggactgggtatctttggtcgcagttcacagtgattcatggctgctttctgttgcattttactttggtgcacgtttcggatttggcaagaatgagaggaagaggctgttccagatgattaatgagctgccaaccattttcgaagttgtgagcggcaatgcaaagcagtccaaggatctatctgttaacaacaataatagcaaaagcaaacctagtggcgtcaagtctcgccaatccgaatctctctcaaaggttgcaaagatgtcatctccaccgccaaaagaagaagaagaagaagaagatgagagtgaagatgagagtgaagacgatgaacaaggtgcggtttgtggtgcttgtggagacaactacggtacagatgagttctggatttgctgcgacgcgtgtgagaaatggttccatggaaaatgtgtgaagataacacctgcaaaagcagaacacatcaagcattacaaatgcccaacttgcagtaacaagagagctagaccttgaagttaaataaccaaattatgaaaaggtaaagcgagttaggagaaaattatgaaagaagaaggtgaagtttccagtttataagaaatgccagtaaaagggacttagaagatgtaagcaggtaaaaaaaaaaattgtattgcttagtctttattgttggattgagactatctacagttggtgatgtcttttcttttctttttttggatttttgttgttgttaatgttaattctact

SEQ ID NO: 105052 - protein, 256 aa, Arabidopsis thaliana
  peptide (1)..(256): Ceres Seq. ID no. 13616343
MEGITHPIPRTVEEVFSDFRGRRAGLIKALTNDMVKFYQTCDPEKENLCLYGLPNETWEVNLPVEEVPPELPEPALGINFARDGMQEKDWVSLVAVHSDSWLLSVAFYFGARFGFGKNERKRLFQMINELPTIFEVVSGNAKQSKDLSVNNNNSKSKPSGVKSRQSESLSKVAKMSSPPPKEEEEEEDESEDESEDDEQGAVCGACGDNYGTDEFWICCDACEKWFHGKCVKITPAKAEHIKHYKCPTCSNKRARP

SEQ ID NO: 105053 - protein, 223 aa, Arabidopsis thaliana
  peptide (1)..(223): Ceres Seq. ID no. 13616344
MVKFYQTCDPEKENLCLYGLPNETWEVNLPVEEVPPELPEPALGINFARDGMQEKDWVSLVAVHSDSWLLSVAFYFGARFGFGKNERKRLFQMINELPTIFEVVSGNAKQSKDLSVNNNNSKSKPSGVKSRQSESLSKVAKMSSPPPKEEEEEEDESEDESEDDEQGAVCGACGDNYGTDEFWICCDACEKWFHGKCVKITPAKAEHIKHYKCPTCSNKRARP

SEQ ID NO: 105054 - protein, 172 aa, Arabidopsis thaliana
  peptide (1)..(172): Ceres Seq. ID no. 13616345
MQEKDWVSLVAVHSDSWLLSVAFYFGARFGFGKNERKRLFQMINELPTIFEVVSGNAKQSKDLSVNNNNSKSKPSGVKSRQSESLSKVAKMSSPPPKEEEEEEDESEDESEDDEQGAVCGACGDNYGTDEFWICCDACEKWFHGKCVKITPAKAEHIKHYKCPTCSNKRARP

SEQ ID NO: 105055 - DNA, 1714 bp, Arabidopsis thaliana
  misc_feature (1)..(1714): Ceres Seq. ID no. 13616358
  misc_feature (1)..(1714): Ortholog of  Ceres SEQ ID NO 12582229 as cited in SEQ ID NO 58499
gagaaacgcgacaaaaccaatcgtcctcttccgatagccacaaaacaaaaatcagacaagaagaaagaagaacgtttcttctaacagatagagattacaatcaaattgactcttaatttctcaattccgtatctctcatttcatcttcttcttcttctcctttacttaaggatctctggtttctctttctctcctctgtcttatcttctccaaagttacgctttttttcaatgaaaacattttcttgattcctgatttcaaatttcacaatctggatttcgtgtttcgaattcactttgaagaaaaagtttctcaatttcgcctgaaaacccacatgggattggaactaaacactagactgacaagaagaagaagagtaatcatcatcgagtgtttattacgattatgtccttaacgaaatcttcagaatcagttttcactgaagaagaagaagaagattcctttagcggtcgatacacgttatggatcaaagaagcattagaggagcttccacacaatttcacaatcaccgacccgtttatttcgggtcacccgattgttttcgcgagcttagggtttttgaaaatgactggctattcacgagaagaagtgatcggaagaaacggtaaagtttttcaaggacctaagactaatcgaagatcgatcatggagattcgtgaagcgattcgtgaagagagatcagtgcaagtgagcttgttgaattatcgtaaatctgggtctccgttttggatgttgtttcatatgtgtcctgtttttgggaaagatgatggtaaagtcaccaattttgtggcggttcaggtcccgatttcgggacgagaacatcatcggaagaagttgagaaatgtcggagatttgtcgtcggatacttctccgacatttggttcttgtcgaagagaggtttgttttggtaatttcgtgtgtcaggatcgagctttaccagtggaatgtgatgatgatgaacaaggattagaggattgggaacagtgtgaagcgagtgagtccgagaagctgaaagctacggaagctattaacaatgtgttatctatcttagtgcattacagcgagttgagtggtagattagtctgcggaaagcggtactgcttgcgaggagtagattgtctaagctcgtcgttagttatttctctcggtagaatcaaacaaagtttcgtattaaccaatccatgcttaccagacatgcctatcatttatgcgagtgatgcctttttgacactgaccggttacaagagacaggaagtgttgggacaaaactgtagatttctgagtggggttgatactgattcctcagtactatacgagatgaaggaatgcatcttaaagggacaatcatgcacagtgcaaatactaaattacagaaaagataagagctcattttggaatcttcttcacatctcaccagttcgtaatgcttcaggcaagacagcatattttgtgggtgttcaagtagaagcaagttgtagaaatactgaaattaaagagctgagaccagagacgagacaactgagtgttgtcggtgcggttagagttgcggttagaagctcattgatggtgacatgctaatatacgccagaaagaaaatgcgtcgacttagagaagagtctaaagtgaattggacatacatctttactatatgtataatcatttgacatactacattaatataagtctttatttt

SEQ ID NO: 105056 - protein, 397 aa, Arabidopsis thaliana
  peptide (1)..(397): Ceres Seq. ID no. 13616359
MSLTKSSESVFTEEEEEDSFSGRYTLWIKEALEELPHNFTITDPFISGHPIVFASLGFLKMTGYSREEVIGRNGKVFQGPKTNRRSIMEIREAIREERSVQVSLLNYRKSGSPFWMLFHMCPVFGKDDGKVTNFVAVQVPISGREHHRKKLRNVGDLSSDTSPTFGSCRREVCFGNFVCQDRALPVECDDDEQGLEDWEQCEASESEKLKATEAINNVLSILVHYSELSGRLVCGKRYCLRGVDCLSSSLVISLGRIKQSFVLTNPCLPDMPIIYASDAFLTLTGYKRQEVLGQNCRFLSGVDTDSSVLYEMKECILKGQSCTVQILNYRKDKSSFWNLLHISPVRNASGKTAYFVGVQVEASCRNTEIKELRPETRQLSVVGAVRVAVRSSLMVTC

SEQ ID NO: 105057 - protein, 337 aa, Arabidopsis thaliana
  peptide (1)..(337): Ceres Seq. ID no. 13616360
MTGYSREEVIGRNGKVFQGPKTNRRSIMEIREAIREERSVQVSLLNYRKSGSPFWMLFHMCPVFGKDDGKVTNFVAVQVPISGREHHRKKLRNVGDLSSDTSPTFGSCRREVCFGNFVCQDRALPVECDDDEQGLEDWEQCEASESEKLKATEAINNVLSILVHYSELSGRLVCGKRYCLRGVDCLSSSLVISLGRIKQSFVLTNPCLPDMPIIYASDAFLTLTGYKRQEVLGQNCRFLSGVDTDSSVLYEMKECILKGQSCTVQILNYRKDKSSFWNLLHISPVRNASGKTAYFVGVQVEASCRNTEIKELRPETRQLSVVGAVRVAVRSSLMVTC

SEQ ID NO: 105058 - protein, 310 aa, Arabidopsis thaliana
  peptide (1)..(310): Ceres Seq. ID no. 13616361
MEIREAIREERSVQVSLLNYRKSGSPFWMLFHMCPVFGKDDGKVTNFVAVQVPISGREHHRKKLRNVGDLSSDTSPTFGSCRREVCFGNFVCQDRALPVECDDDEQGLEDWEQCEASESEKLKATEAINNVLSILVHYSELSGRLVCGKRYCLRGVDCLSSSLVISLGRIKQSFVLTNPCLPDMPIIYASDAFLTLTGYKRQEVLGQNCRFLSGVDTDSSVLYEMKECILKGQSCTVQILNYRKDKSSFWNLLHISPVRNASGKTAYFVGVQVEASCRNTEIKELRPETRQLSVVGAVRVAVRSSLMVTC

SEQ ID NO: 105059 - DNA, 829 bp, Arabidopsis thaliana
  misc_feature (1)..(829): Ceres Seq. ID no. 13616362
  misc_feature (1)..(829): Ortholog of  Ceres SEQ ID NO 13661994 as cited in SEQ ID NO 60568
  misc_feature (1)..(829): Ortholog of  Ceres SEQ ID NO 12584790 as cited in SEQ ID NO 62648
atcgctcggtgaattcgaggatcctcgagctttttgatcggagactttttctctcatcgtcgttgtttgaattctccggctgagagatgcttgcttgacgacgaatctccaccgatcttttaccttttcgcacaacaagtaagagaaggatgtcgactccagcgaggaagagattgatgagggatttcaagaggttgcagcaagacccacctgcaggaattagtggtgctccacaagacaacaatatcatgttgtggaatgctgttatattcgggcctgatgataccccttgggatggaggtactttcaaattgtcactgcagttttcggaagattatccaaataaaccaccaacagtgcggtttgtttcacggatgttccatccaaacatttatgctgatgggagtatatgcttggacattctccaaaaccaatggagtccaatatacgatgtcgctgctatactaacctccattcagtcattgctatgtgatcctaatccgaattctcctgcaaattcggaagctgcacgaatgttcagtgaaagcaagcgcgagtacaacagaagagtccgcgaggttgtcgaacaaagctggactgccgactagtaattatatcattgtagcatttgtcttcaaataacattaaacctcctctcttgtatctgatttcgaccatcacatctctgagagaagtttactctccctaccactctcttttatgtctttctgtgtttttcaaactctgtgatttgttgctcttcatgttttttttctttgtattttcgtaaccacattcatcttcataattatcatatgtatttcagtcg

SEQ ID NO: 105060 - protein, 152 aa, Arabidopsis thaliana
  peptide (1)..(152): Ceres Seq. ID no. 13616363
MSTPARKRLMRDFKRLQQDPPAGISGAPQDNNIMLWNAVIFGPDDTPWDGGTFKLSLQFSEDYPNKPPTVRFVSRMFHPNIYADGSICLDILQNQWSPIYDVAAILTSIQSLLCDPNPNSPANSEAARMFSESKREYNRRVREVVEQSWTAD

SEQ ID NO: 105061 - protein, 143 aa, Arabidopsis thaliana
  peptide (1)..(143): Ceres Seq. ID no. 13616364
MRDFKRLQQDPPAGISGAPQDNNIMLWNAVIFGPDDTPWDGGTFKLSLQFSEDYPNKPPTVRFVSRMFHPNIYADGSICLDILQNQWSPIYDVAAILTSIQSLLCDPNPNSPANSEAARMFSESKREYNRRVREVVEQSWTAD

SEQ ID NO: 105062 - protein, 119 aa, Arabidopsis thaliana
  peptide (1)..(119): Ceres Seq. ID no. 13616365
MLWNAVIFGPDDTPWDGGTFKLSLQFSEDYPNKPPTVRFVSRMFHPNIYADGSICLDILQNQWSPIYDVAAILTSIQSLLCDPNPNSPANSEAARMFSESKREYNRRVREVVEQSWTAD

SEQ ID NO: 105063 - DNA, 933 bp, Arabidopsis thaliana
  misc_feature (1)..(933): Ceres Seq. ID no. 13616377
  misc_feature (1)..(933): Ortholog of  Ceres SEQ ID NO 13638567 as cited in SEQ ID NO 51303
  misc_feature (1)..(933): Ortholog of  Ceres SEQ ID NO 12610031 as cited in SEQ ID NO 55811
  misc_feature (1)..(933): Ortholog of  Ceres SEQ ID NO 12610896 as cited in SEQ ID NO 55861
  misc_feature (1)..(933): Ortholog of  Ceres SEQ ID NO 12619664 as cited in SEQ ID NO 66048
  misc_feature (1)..(933): Ortholog of  Ceres SEQ ID NO 12635952 as cited in SEQ ID NO 0
catcaccttcaccttcaacatcaaacatcacatctctttctcttttatctctttttctcggtcttcaaagagtttcttagttaccaaatcaatggcaggtatcaaagttttcggacacccagcttccacttccaccaggagagtcctcatcgccctccatgagaaaaacctcgactttgagctcgttcatgttgaactcaaagacggtgagcacaagaaggagcctttcctctcccgcaacccttttggtcaagttccagcctttgaagatggagacctcaagctcttcgaatcaagagcgattactcagtacatagctcaccgatacgaaaaccaaggaaccaaccttctcccagctgactccaagaacatagctcagtatgcaatcatgtccattggaatacaagtagaagctcatcagttcgatcccgtggcttcaaagcttgcttgggaacaagtattcaagttcaactatggcttgaacacagaccaagccgttgttgcagaagaagaagctaagttagccaaggtccttgatgtctacgaggctaggctgaaggagttcaagtatttggctggtgaaactttcactttgaccgatcttcaccacattcccgtgattcaatacctgctcggaactcccaccaagaagctcttcacggagcgtccacgtgtcaacgagtgggtggctgagatcaccaagaggccagcttcagagaaggttctgtgagaaatttctaaaaggacaaaagtggttttgcttcagtcacagtaataatgctacaagtaaataagcgtctgcctcattgcccagtttctcagtactttctttctgttgtatcctctgtttttgtttcagcttatgtgagtgtgtgtacgttcttgagagtatcttaggcaaaaactatatatctaatcttcaagctcttctaa

SEQ ID NO: 105064 - protein, 242 aa, Arabidopsis thaliana
  peptide (1)..(242): Ceres Seq. ID no. 13616378
ITFTFNIKHHISFSFISFSRSSKSFLVTKSMAGIKVFGHPASTSTRRVLIALHEKNLDFELVHVELKDGEHKKEPFLSRNPFGQVPAFEDGDLKLFESRAITQYIAHRYENQGTNLLPADSKNIAQYAIMSIGIQVEAHQFDPVASKLAWEQVFKFNYGLNTDQAVVAEEEAKLAKVLDVYEARLKEFKYLAGETFTLTDLHHIPVIQYLLGTPTKKLFTERPRVNEWVAEITKRPASEKVL

SEQ ID NO: 105065 - protein, 212 aa, Arabidopsis thaliana
  peptide (1)..(212): Ceres Seq. ID no. 13616379
MAGIKVFGHPASTSTRRVLIALHEKNLDFELVHVELKDGEHKKEPFLSRNPFGQVPAFEDGDLKLFESRAITQYIAHRYENQGTNLLPADSKNIAQYAIMSIGIQVEAHQFDPVASKLAWEQVFKFNYGLNTDQAVVAEEEAKLAKVLDVYEARLKEFKYLAGETFTLTDLHHIPVIQYLLGTPTKKLFTERPRVNEWVAEITKRPASEKVL

SEQ ID NO: 105066 - DNA, 1372 bp, Arabidopsis thaliana
  misc_feature (1)..(1372): Ceres Seq. ID no. 13616380
  misc_feature (1)..(1372): Ortholog of  Ceres SEQ ID NO 13596625 as cited in SEQ ID NO 62876
ctcttcttcttcttcttcatctttttttttttaacagatctggtggaaattttatcttttgaccaccactggatctctctatatacacattcatctgagtaatagagtaaaaacgaaacacaagaagcaattatgaagaattgtgagagatttgctaatctcgctctcgcaggtttgacattggcaccactcgttgtgagagtaaatccaaatttgaatgttattctcacagcatgtatcactgtttatgtgggttgctttcgttcggtcaaggatactcctccaacggagacgatgtcaaaagaacatgccatgcgtttcccattggttgggagtgctatgcttctctcacttttcttattgttcaagtttctctcaaaggacttggttaatgctgtgctaacagcttacttctttgttcttgggattgtcgctctttcagcgacattgttaccagccatcagaagatttttaccaaatccttggaatgacaatcttatcgtctggcgttttccttatttcaagtctttggaggtagagttcacaaagtcccaagttgttgcgggaatccctggaacattcttctgtgcgtggtatgcgtggaaaaaacattggctggctaacaatatcctcggcctttccttctgcattcagggaattgagatgctctctctcggatcattcaagactggtgccatccttttggcaggactatttttctatgatatcttctgggttttctttactccagttatggttagtgttgccaaatccttcgatgctccaattaagctcttattccctacgggtgatgctctaagaccctattctatgcttggtcttggtgacattgtcattccgggtattttcgttgcactagctctaagatttgatgtgtcaagacgtagacaaccacaatacttcacaagtgcatttatcggatacgctgttggtgtgatcctcacgattgtagtcatgaactggtttcaagcagcacagcctgctttgttatacattgtcccagccgtaattgggttcttggcttctcactgcatttggaacggtgacatcaaaccgttgttggcgtttgatgaatcaaagacagaggaagcaacgactgatgaatcaaagactagtgaggaggttaataaagctcatgatgaatgaggaaaaatcgagaaagaagggcagaggagaaatatatacacataaatgtgtcttaatatatggaacaagaaggaaaacaattttgtttccaaatgatcatcaatcagtcccttctaaccccttttttgtttttttagattttcaaactttcttttggccaagacttgtgtaagttactataagttacaacaaattttctttgact

SEQ ID NO: 105067 - protein, 344 aa, Arabidopsis thaliana; identical to SEQ ID NO: 24100
  peptide (1)..(344): Ceres Seq. ID no. 13616381

SEQ ID NO: 105068 - protein, 290 aa, Arabidopsis thaliana; identical to SEQ ID NO: 24101
  peptide (1)..(290): Ceres Seq. ID no. 13616382

SEQ ID NO: 105069 - protein, 284 aa, Arabidopsis thaliana; identical to SEQ ID NO: 24102
  peptide (1)..(284): Ceres Seq. ID no. 13616383

SEQ ID NO: 105070 - DNA, 1439 bp, Arabidopsis thaliana
  misc_feature (1)..(1439): Ceres Seq. ID no. 13616384
  misc_feature (1)..(1439): Ortholog of  Ceres SEQ ID NO 15168502 as cited in SEQ ID NO 60095
  misc_feature (1)..(1439): Ortholog of  Ceres SEQ ID NO 14314084 as cited in SEQ ID NO 63256
  misc_feature (1)..(1439): Ortholog of  Ceres SEQ ID NO 15169466 as cited in SEQ ID NO 66135
atggcttcttcttcttcttcttctttattatttcctttctttcttattcttttttcatgtttaatctcggtttcatcgtcaagaagatcattaatcgaccgtactcttccgaaaaaccttccgagatccggttttcgattgagtcttcgacatgtggattccggtaaaaacctcaccaagatccaaaagattcagagagggattaaccgtggattccatagattaaacagattaggagctgtagctgttttagctgtagcctctaagcctgatgatactaataacattaaagcacctactcatggaggaagcggtgagtttcttatggagttgtctattggaaacccggcggttaaatactctgctattgttgataccggaagtgaccttatttggactcaatgcaagccttgcactgaatgttttgatcaaccaactccgatttttgacccggagaaatcttcctcttactcgaaagtaggatgctcttctggtctttgtaacgcattgcctcgatcaaactgtaacgaagataaagatgcttgtgagtatttgtatacttatggagattactcatctacaagagggctcttggccacggaaacgttcactttcgaggacgagaactcgatttctggtatcgggtttgggtgtggggttgagaacgaaggcgacgggttctctcaagggtcaggtcttgtaggtcttggtcgcggaccgctctcgcttatttctcagctcaaagagactaagttttcttattgcttgacctcgattgaggatagtgaagcatctagctcgttgtttattggatctttagcctcgggtatcgtcaacaaaacaggtgcaagtttagatggtgaagtcaccaaaacgatgtctttgctacgaaatccagatcagccttcgttctattaccttgagttacaaggcatcaccgttggagcaaaacgcctttctgttgaaaagtctacttttgaactagccgaagatggaaccggaggtatgatcatagactcaggcacgaccatcacgtatctcgaggagaccgcgtttaaagtgttgaaagaggagtttacttctcggatgagtttaccagtagatgactctggatccacgggacttgacttgtgcttcaagttacctgatgctgccaagaatattgctgttcctaagatgatttttcattttaaaggtgctgatttggagcttcccggagagaactacatggtggcggattcaagcaccggcgttttgtgtttggccatgggaagttctaatgggatgtctattttcggaaatgttcaacagcagaattttaatgtacttcatgatcttgagaaagaaacggtgtcgtttgttcccactgaatgtggaaaattgtagatttttaatttgttttttttttcttttattataaatgaaatttatactttgtg

SEQ ID NO: 105071 - protein, 461 aa, Arabidopsis thaliana
  peptide (1)..(461): Ceres Seq. ID no. 13616385
MASSSSSSLLFPFFLILFSCLISVSSSRRSLIDRTLPKNLPRSGFRLSLRHVDSGKNLTKIQKIQRGINRGFHRLNRLGAVAVLAVASKPDDTNNIKAPTHGGSGEFLMELSIGNPAVKYSAIVDTGSDLIWTQCKPCTECFDQPTPIFDPEKSSSYSKVGCSSGLCNALPRSNCNEDKDACEYLYTYGDYSSTRGLLATETFTFEDENSISGIGFGCGVENEGDGFSQGSGLVGLGRGPLSLISQLKETKFSYCLTSIEDSEASSSLFIGSLASGIVNKTGASLDGEVTKTMSLLRNPDQPSFYYLELQGITVGAKRLSVEKSTFELAEDGTGGMIIDSGTTITYLEETAFKVLKEEFTSRMSLPVDDSGSTGLDLCFKLPDAAKNIAVPKMIFHFKGADLELPGENYMVADSSTGVLCLAMGSSNGMSIFGNVQQQNFNVLHDLEKETVSFVPTECGKL

SEQ ID NO: 105072 - protein, 353 aa, Arabidopsis thaliana; identical to SEQ ID NO: 91535
  peptide (1)..(353): Ceres Seq. ID no. 13616386

SEQ ID NO: 105073 - DNA, 983 bp, Arabidopsis thaliana
  misc_feature (1)..(983): Ceres Seq. ID no. 13616389
  misc_feature (1)..(983): Ortholog of  Ceres SEQ ID NO 12784040 as cited in SEQ ID NO 66597
catcgctgtctggaacagtcctcttgtctttgatcttttgtacactttctctggattttctgaattcgaactttggaagaagaagaagctttgatcaatcatggaaattgcaaccgatacagcaaagcagatgagagacgaagagttgttcaaagcagcggaatggggagattcatcgttgttcatgtcattatctgaagaacagctctctaaatctctcaatttcagaaacgaagatggtcgctctctcctccatgtcgctgcttccttcggccattctcaaatagtgaagttgttatcaagttcagatgaagcaaagactgtaatcaatagcaaggatgatgaaggatgggctcctttgcattccgctgctagcatcggtaatgctgagctcgttgaggtgcttttgaccagaggtgctgatgtcaatgccaaaaataacggtggtcgcactgctcttcactatgctgctagcaaaggccggttggagattgctcagcttttattaacacacggtgcaaagattaacatcacagacaaggttggttgcactccgcttcacagggcagcaagcgtgggaaagttagaagtttgtgaatttcttattgaagaaggagcagagatcgatgctacggataaaatgggtcaaactgcactcatgcattcagttatctgcgatgacaaacaggttgcgttcctgcttataagacatggtgcagatgtggatgtagaagacaaggaaggctacactgttctaggccgagctaccaatgaattccgacctgcacttatcgatgctgctaaggccatgcttgaaggataaaatgactctggattactttaaaacttactaactctgagagttgtttagttacttaaaaggatttttctttactgtatcatgtttgcaaaatgtttctgccttatcaattcatgttctgtctttagaaattttctcaaaagcaattttggaaacaagtgag

SEQ ID NO: 105074 - protein, 240 aa, Arabidopsis thaliana
  peptide (1)..(240): Ceres Seq. ID no. 13616390
MEIATDTAKQMRDEELFKAAEWGDSSLFMSLSEEQLSKSLNFRNEDGRSLLHVAASFGHSQIVKLLSSSDEAKTVINSKDDEGWAPLHSAASIGNAELVEVLLTRGADVNAKNNGGRTALHYAASKGRLEIAQLLLTHGAKINITDKVGCTPLHRAASVGKLEVCEFLIEEGAEIDATDKMGQTALMHSVICDDKQVAFLLIRHGADVDVEDKEGYTVLGRATNEFRPALIDAAKAMLEG

SEQ ID NO: 105075 - protein, 230 aa, Arabidopsis thaliana
  peptide (1)..(230): Ceres Seq. ID no. 13616391
MRDEELFKAAEWGDSSLFMSLSEEQLSKSLNFRNEDGRSLLHVAASFGHSQIVKLLSSSDEAKTVINSKDDEGWAPLHSAASIGNAELVEVLLTRGADVNAKNNGGRTALHYAASKGRLEIAQLLLTHGAKINITDKVGCTPLHRAASVGKLEVCEFLIEEGAEIDATDKMGQTALMHSVICDDKQVAFLLIRHGADVDVEDKEGYTVLGRATNEFRPALIDAAKAMLEG

SEQ ID NO: 105076 - protein, 212 aa, Arabidopsis thaliana
  peptide (1)..(212): Ceres Seq. ID no. 13616392
MSLSEEQLSKSLNFRNEDGRSLLHVAASFGHSQIVKLLSSSDEAKTVINSKDDEGWAPLHSAASIGNAELVEVLLTRGADVNAKNNGGRTALHYAASKGRLEIAQLLLTHGAKINITDKVGCTPLHRAASVGKLEVCEFLIEEGAEIDATDKMGQTALMHSVICDDKQVAFLLIRHGADVDVEDKEGYTVLGRATNEFRPALIDAAKAMLEG

SEQ ID NO: 105077 - DNA, 1376 bp, Arabidopsis thaliana
  misc_feature (1)..(1376): Ceres Seq. ID no. 13616405
  misc_feature (1)..(1376): Ortholog of  Ceres SEQ ID NO 13595464 as cited in SEQ ID NO 59792
  misc_feature (1)..(1376): Ortholog of  Ceres SEQ ID NO 14316416 as cited in SEQ ID NO 60078
acttccctttgttcagacgtttctttattcttcttccttccttcttctccttcttcttgatcgtgttcagaaatcatattcatcacctctctctctctatgtctctatatttggattctttataacatgtgagatcgatctatttttgatcagagacagagagaagactagaagaagcaaagaatatttcaagaatgatgaagatgaatacaggaacatcgccgtcggtcatcggcggcgggactagtggtaatgagtgggagtctcgacctggaggaatggttgttcaacgtcggacagatcagaactccgatgtgccacgtgtctttcgtgttcgggttaaatacgggtcggtttatcacgagatcaacatcaattcccaatcttccttcggagagttgaagaagatgttgtctgatcaagtgggacttcaccatgaagacatgaaggttttgtacaaagacaaagagagagattcaaagatgtttcttgatctttgtggagttaaagatcggtcaaagcttgttgttaaagaagatccaatttctcaggagaaacgtctccttgcaaaaaggaaaaacgccgccattgaaaaagcttctaaatctatctctgatattagtttcgaagtcgacagactcgccggacaggtgtcggcgtttgagacggtgattaataaaggaggtaaagttgaagagaagagtcttgtgaatctgatagagatgttgatgaatcagttattgagacttgatgctattattgctgatggtgatgtcaaattgatgaggaagatgcaggtgcaaagagttcagaagtacgttgaggcactcgacctcttgaaagtcaaaaactctgccaaaaaagttgaagtcaacaagtccgtccgccacaaaccgcaaacgcaaacgcgatttgagcaacgcgatttgttatcgtttgtggaggaagaggaggaggagcctaggaattccaatgcatcatcctcatcaggtactccggcggttgtagcttcaaaatgggaaatgtttgattccgcatcgacggccaaggcggctgaaacggttaaaccggtccctccgcgattcaaatgggaattcttcgattaagatgaacactatatatacatacatgataaatatgtcttttttttctccggtttcatatgtgatttgttttgtttttcatctcaactgagatgtgtatgatttgtgatttgatcttggctattttttgaggctttgtctagaatatcttttggttggactcccttttaagtcaatcaaaaataataggggagtttcaacaattactatcattgtaatacctaaagatttggattttctttactattacaataaaaagctatcaaaaagatg

SEQ ID NO: 105078 - protein, 300 aa, Arabidopsis thaliana; identical to SEQ ID NO: 28839
  peptide (1)..(300): Ceres Seq. ID no. 13616406

SEQ ID NO: 105079 - protein, 303 aa, Arabidopsis thaliana; identical to SEQ ID NO: 28837
  peptide (1)..(303): Ceres Seq. ID no. 13616407

SEQ ID NO: 105080 - protein, 302 aa, Arabidopsis thaliana; identical to SEQ ID NO: 28838
  peptide (1)..(302): Ceres Seq. ID no. 13616408

SEQ ID NO: 105081 - DNA, 1776 bp, Arabidopsis thaliana
  misc_feature (1)..(1776): Ceres Seq. ID no. 13616417
  misc_feature (1)..(1776): Ortholog of  Ceres SEQ ID NO 14314404 as cited in SEQ ID NO 57421
  misc_feature (1)..(1776): Ortholog of  Ceres SEQ ID NO 13493536 as cited in SEQ ID NO 58515
  misc_feature (1)..(1776): Ortholog of  Ceres SEQ ID NO 12618461 as cited in SEQ ID NO 64349
ttatttgattttgagtctctgttttgtctcttctcttgagattgcgataatgagagaacggattattacattcgtttcgctgcttcttgtagctttgctttcgtttcccagtgttagctactgtgacgaccaaacgatcctgtatgaatcgtttgacgagccttttgatggtcgctgggtcgtttcagagaaagctgaataccaaggtgtgtggaagcacgagaagagtgaagggcatgatgattatggacttctagtgagtgagaaagctaagaagtacggaatagttaaagagcttgatgttgatgagcctctaaaccttaacgaaggaactgttgttcttcaatacgaggctcgtttccaagaagggcttgagtgtggtggtgcttacttaaagtatcttcgtcctcaagaagctggatgggttcctcaagggtttgataatgattctccttactctatcatgtttggacctgataagtgtggtgctaccaacaaggttcatttcatcttgaagcataagaatcccaagagtggcgagtttgttgagcaccatctcaagttccctccttctgttccgtttgacatgctttctcatgtctacactgcggtcttgaaatctgataatgaggtgaggattttggtcgatggtgaggagaagaagaagggtaatttactgtctgctgaagactttgagcctccgttgattccttccaagaccatccctgatccagaggacaagaagccagaagactgggatgagagagccaagattcctgatcctaatgctgtgaagcctgatgactgggatgaggatgcacccatggagattgaagatgaggaagctgagaaacccgaaggatggttggatgatgagcctgtagaggttgaagaccccgaggcaagcaagccagaagattgggatgacgaggaagatggtgagtgggaggctcctaaggtttccaacaccaagtgtgaggcagcacccggatgtggcgaatggaagagaccgatgaagaggaaccctgcttacaagggcaaatggagctcacctctcatagataacccagcttacaagggaatctggaaaccaagagacattccaaatcctgattattttgagcttgagaggccgaatttggagcccattgctgccattggtattgagatatggacaatgcaagacggtatcttatttgacaacatcttgatatctaaagacgagaaggttgctgaaacttacagacaaagcacttggaagcccaagtttgatgtggagaaagagaaacaaaaggcagaggatgaagctgctggtgaggcagatggtctcaagagttaccagaagaaggtgttcgacctcttgtacaaggttgcagacatttctttccttagtgcgtacaagtcaaagattatggaacttattgagaaagctgaaacacagccaaacttaaccatcggtgtgctcatttccatcgtgatcgtcttcctctctctcttcttcaagctcatatttggtggtgcaaaggctaaggtagaaaagaagaaaccggaaacagctgcagagacctcgacaagcgaggcaaagacagaggagaaagcagaagcggtggctgcaccacgaaagaggcagacgaggcgtgagagttagataaaaagaggattagattttgatttttggggctttttgttttgatttatcaccgtatagacaaacagtagtggacctgatattaagacgattattgtaacatgttttttttgtatgcttttagtttc

SEQ ID NO: 105082 - protein, 548 aa, Arabidopsis thaliana
  peptide (1)..(548): Ceres Seq. ID no. 13616418
YLILSLCFVSSLEIAIMRERIITFVSLLLVALLSFPSVSYCDDQTILYESFDEPFDGRWVVSEKAEYQGVWKHEKSEGHDDYGLLVSEKAKKYGIVKELDVDEPLNLNEGTVVLQYEARFQEGLECGGAYLKYLRPQEAGWVPQGFDNDSPYSIMFGPDKCGATNKVHFILKHKNPKSGEFVEHHLKFPPSVPFDMLSHVYTAVLKSDNEVRILVDGEEKKKGNLLSAEDFEPPLIPSKTIPDPEDKKPEDWDERAKIPDPNAVKPDDWDEDAPMEIEDEEAEKPEGWLDDEPVEVEDPEASKPEDWDDEEDGEWEAPKVSNTKCEAAPGCGEWKRPMKRNPAYKGKWSSPLIDNPAYKGIWKPRDIPNPDYFELERPNLEPIAAIGIEIWTMQDGILFDNILISKDEKVAETYRQSTWKPKFDVEKEKQKAEDEAAGEADGLKSYQKKVFDLLYKVADISFLSAYKSKIMELIEKAETQPNLTIGVLISIVIVFLSLFFKLIFGGAKAKVEKKKPETAAETSTSEAKTEEKAEAVAAPRKRQTRRES

SEQ ID NO: 105083 - protein, 532 aa, Arabidopsis thaliana; identical to SEQ ID NO: 28155
  peptide (1)..(532): Ceres Seq. ID no. 13616419

SEQ ID NO: 105084 - protein, 394 aa, Arabidopsis thaliana; identical to SEQ ID NO: 28156
  peptide (1)..(394): Ceres Seq. ID no. 13616420

SEQ ID NO: 105085 - DNA, 1233 bp, Arabidopsis thaliana
  misc_feature (1)..(1233): Ceres Seq. ID no. 13616421
  misc_feature (1)..(1233): Ortholog of  Ceres SEQ ID NO 13594037 as cited in SEQ ID NO 55666
atccagaaaaaacaaaaaaaaacaaaaaaataataaaacaaaaaaatatcttttttttttctaataaaaaaaaaataataaataaatatgagatacacaaatgtgtccattttattaggcatgttggtgatctttgtttcaccaatggtgttcgcagatgatttgacaccaatcccagagggcaaaccccaagtggtgcagtggttcaatacccacgttggtccattggctcaacgtaaaggcttagatcctgctctcgtagctgctgaggctgctccacgtatcatcaacgtgaatccaaagggaggtgaattcaaaacactaacagacgcaataaagagcgttcccgcagggaacacaaagcgggtgatcataaagatggctcatggtgagtacagagagaaggtcactatcgacaggaacaaacccttcattacattgatgggacaacccaatgccatgcctgttatcacctacgacggtaccgccgccaagtatggaaccgttgatagtgcctctctcattatcttatccgactatttcatggccgttaacatcgtcgttaagaacactgcaccggcaccagatggtaaaactaagggagcacaagccttatccatgagaatctccggaaactttgctgctttctacaactgcaaattctacggtttccaagatacaatctgtgatgataccggaaaccatttcttcaaggattgttacgtcgaaggaacattcgatttcatcttcggaagtggaacctctatgtacttgggaacacaattgcacgtggttggagacggtattagagtgatcgcagcgcatgcaggaaagagcgcagaagaaaagagtggatactctttcgtgcactgcaaggtgactggaactggaggaggaatctatttgggaagagcatggatgagccaccctaaggttgtctatgcctacaccgagatgaccagcgttgtcaaccccaccggatggcaagaaaacaagactcccgcacatgacaagaccgtgttctacggagagtacaagtgttcaggaccagggtcacacaaagccaagagagtgccattcacacaagacatcgacgacaaagaagctaactgtttcctatccctcggctacatccaaggatccaagtggcttctcccaccacccgctttgtaaattctttaatatcaacctattaaaattaaaattaaaacgtaaaactaaaattaaaacttc

SEQ ID NO: 105086 - protein, 361 aa, Arabidopsis thaliana
  peptide (1)..(361): Ceres Seq. ID no. 13616422
MRYTNVSILLGMLVIFVSPMVFADDLTPIPEGKPQVVQWFNTHVGPLAQRKGLDPALVAAEAAPRIINVNPKGGEFKTLTDAIKSVPAGNTKRVIIKMAHGEYREKVTIDRNKPFITLMGQPNAMPVITYDGTAAKYGTVDSASLIILSDYFMAVNIVVKNTAPAPDGKTKGAQALSMRISGNFAAFYNCKFYGFQDTICDDTGNHFFKDCYVEGTFDFIFGSGTSMYLGTQLHVVGDGIRVIAAHAGKSAEEKSGYSFVHCKVTGTGGGIYLGRAWMSHPKVVYAYTEMTSVVNPTGWQENKTPAHDKTVFYGEYKCSGPGSHKAKRVPFTQDIDDKEANCFLSLGYIQGSKWLLPPPAL

SEQ ID NO: 105087 - protein, 350 aa, Arabidopsis thaliana
  peptide (1)..(350): Ceres Seq. ID no. 13616423
MLVIFVSPMVFADDLTPIPEGKPQVVQWFNTHVGPLAQRKGLDPALVAAEAAPRIINVNPKGGEFKTLTDAIKSVPAGNTKRVIIKMAHGEYREKVTIDRNKPFITLMGQPNAMPVITYDGTAAKYGTVDSASLIILSDYFMAVNIVVKNTAPAPDGKTKGAQALSMRISGNFAAFYNCKFYGFQDTICDDTGNHFFKDCYVEGTFDFIFGSGTSMYLGTQLHVVGDGIRVIAAHAGKSAEEKSGYSFVHCKVTGTGGGIYLGRAWMSHPKVVYAYTEMTSVVNPTGWQENKTPAHDKTVFYGEYKCSGPGSHKAKRVPFTQDIDDKEANCFLSLGYIQGSKWLLPPPAL

SEQ ID NO: 105088 - protein, 342 aa, Arabidopsis thaliana
  peptide (1)..(342): Ceres Seq. ID no. 13616424
MVFADDLTPIPEGKPQVVQWFNTHVGPLAQRKGLDPALVAAEAAPRIINVNPKGGEFKTLTDAIKSVPAGNTKRVIIKMAHGEYREKVTIDRNKPFITLMGQPNAMPVITYDGTAAKYGTVDSASLIILSDYFMAVNIVVKNTAPAPDGKTKGAQALSMRISGNFAAFYNCKFYGFQDTICDDTGNHFFKDCYVEGTFDFIFGSGTSMYLGTQLHVVGDGIRVIAAHAGKSAEEKSGYSFVHCKVTGTGGGIYLGRAWMSHPKVVYAYTEMTSVVNPTGWQENKTPAHDKTVFYGEYKCSGPGSHKAKRVPFTQDIDDKEANCFLSLGYIQGSKWLLPPPAL

SEQ ID NO: 105089 - DNA, 826 bp, Arabidopsis thaliana
  misc_feature (1)..(826): Ceres Seq. ID no. 13616425
  misc_feature (1)..(826): Ortholog of  Ceres SEQ ID NO 13638658 as cited in SEQ ID NO 51921
  misc_feature (1)..(826): Ortholog of  Ceres SEQ ID NO 14306522 as cited in SEQ ID NO 53365
  misc_feature (1)..(826): Ortholog of  Ceres SEQ ID NO 15175175 as cited in SEQ ID NO 0
aaacaatacacttaacaatggattcttctctgaaaactcaggaacctcaagtagtggaaacttctccttctccggtagctcaggagcctcctcaagtagctgacaaacctgcgattgttccttctccgatagctcaagagccagacaacgatgttccggcgccgggaaacgagtttgctgagttcgccgccggttgtttctggggagtggagcttgctttccagagaatccctggcgtgaccgtgactgaggtcggttacactcatgggatctctcacaatccgtcttatgaagatgtctgtacgaacaccacgaaccatgcagaagttgtcagggttcaatatgatcctaaagaatgcacttatgagacacttcttgatttgttttggtctagacataatcctaccaccttgaatcgtcagggagaacttttgggagcacaataccgatcaggtatatatttctacacaccggagcaagagaaactagcacgcgagtctctagagaaagagcagaaaaaactggaggataagattgtgactgagatcttaccggcaaagaaattctacaaagctgaagaataccatcagcagtaccttgtcaaaggtgggatgcatggaaacgctcaatcacctgcaaagagctgcaaggaccctatccgctgctatggctaatcaaaagcctttgttcctcttctcccaaaacagaggattctcccagaggacctctttacctgttgctttgttggtttgtgtgtgtgcgtgtgtttatatgtacttgtcatctcatcatacataataaaagatgtgggatcatctcacctttg

SEQ ID NO: 105090 - protein, 223 aa, Arabidopsis thaliana
  peptide (1)..(223): Ceres Seq. ID no. 13616426
TIHLTMDSSLKTQEPQVVETSPSPVAQEPPQVADKPAIVPSPIAQEPDNDVPAPGNEFAEFAAGCFWGVELAFQRIPGVTVTEVGYTHGISHNPSYEDVCTNTTNHAEVVRVQYDPKECTYETLLDLFWSRHNPTTLNRQGELLGAQYRSGIYFYTPEQEKLARESLEKEQKKLEDKIVTEILPAKKFYKAEEYHQQYLVKGGMHGNAQSPAKSCKDPIRCYG

SEQ ID NO: 105091 - protein, 218 aa, Arabidopsis thaliana
  peptide (1)..(218): Ceres Seq. ID no. 13616427
MDSSLKTQEPQVVETSPSPVAQEPPQVADKPAIVPSPIAQEPDNDVPAPGNEFAEFAAGCFWGVELAFQRIPGVTVTEVGYTHGISHNPSYEDVCTNTTNHAEVVRVQYDPKECTYETLLDLFWSRHNPTTLNRQGELLGAQYRSGIYFYTPEQEKLARESLEKEQKKLEDKIVTEILPAKKFYKAEEYHQQYLVKGGMHGNAQSPAKSCKDPIRCYG

SEQ ID NO: 105092 - DNA, 1399 bp, Arabidopsis thaliana
  misc_feature (1)..(1399): Ceres Seq. ID no. 13616439
  misc_feature (1)..(1399): Ortholog of  Ceres SEQ ID NO 13582619 as cited in SEQ ID NO 56520
  misc_feature (1)..(1399): Ortholog of  Ceres SEQ ID NO 14314632 as cited in SEQ ID NO 59923
  misc_feature (1)..(1399): Ortholog of  Ceres SEQ ID NO 13660872 as cited in SEQ ID NO 60830
  misc_feature (1)..(1399): Ortholog of  Ceres SEQ ID NO 12616221 as cited in SEQ ID NO 63291
acctttctagttcctctgcgtctccttaatctctctccctaacttctctttcacctttactctctctatctctcttacatatatctatatatattccctgaacccatctcttgaaaacattcaagatcaaatctttctcgatctattcaaagaaaaactatttaagaaacatatgttttggatcaagtaagggtttgatcttgtaccggaatcaggtttttgcttttcttctagggtttaaggttatttaaaaacagatggaaactttcggtgtgtttcacaaggaagatgatgagcagatggatttgcctcctggttttaggtttcatccaacagacgaagaactcataacccactatctccacaagaaggttcttgaccttggtttctcggctaaagctattggtgaggttgatttgaacaaagctgagccatgggagttgccatataaagcaaaaattggtgagaaagaatggtactttttctgtgtgagggatagaaagtatccgactggtctgaggactaaccgagcaactcaagccggttattggaaggcgacagggaaggataaagagatcttccgaggcaaatcgcttgttggtatgaagaaaacacttgttttctacagaggaagagctcctaaaggccagaaaacaaattgggtgatgcatgagtataggctagatggaaaactctctgctcacaacttgcctaaaaccgctaagaatgaatgggtgatctgcagggtatttcataaaactgctggaggtaagaagatcccgatttcgacgttaatccgaatcggttcttacggaaccgggtctagtttaccacctttaactgattcttcaccatacaacgacaaaaccaagaccgaaccagtttacgtgccctgcttctccaaccaagctgaaactagaggaacaatactcaattgcttcagcaacccttcccttagctccatccaaccagattttctccagatgattccactctaccaacctcaatctctcaacatttccgagagttccaatccggttcttacgcaagaacaatcagttttacaagcgatgatggaaaacaacagaaggcagaacttcaaaacattgagcatctcgcaagaaaccggggtttcgaacaccgataactcatcggtttttgaatttgggaggaagcgatttgatcatcaagaagttccatctccctcttccggtccggttgatcttgaacctttctggaattactgaagattcagaacctgaaaagtctattaatttaggtcacaagtaagaaaatctttgcaaagttttatccttttagcgtggtgtgctaagcttgtatagattattgacactacttcctgtattagtgttttatattattatattcaactaaagtt

SEQ ID NO: 105093 - protein, 329 aa, Arabidopsis thaliana; identical to SEQ ID NO: 23927
  peptide (1)..(329): Ceres Seq. ID no. 13616440

SEQ ID NO: 105094 - protein, 315 aa, Arabidopsis thaliana; identical to SEQ ID NO: 23928
  peptide (1)..(315): Ceres Seq. ID no. 13616441

SEQ ID NO: 105095 - protein, 214 aa, Arabidopsis thaliana; identical to SEQ ID NO: 23929
  peptide (1)..(214): Ceres Seq. ID no. 13616442

SEQ ID NO: 105096 - DNA, 1789 bp, Arabidopsis thaliana
  misc_feature (1)..(1789): Ceres Seq. ID no. 13616443
  misc_feature (1)..(1789): Ortholog of  Ceres SEQ ID NO 12605517 as cited in SEQ ID NO 20422
aggaaagttatcaaaagttttgagagctttggatagtgaagctcaaagaactaaacaatgggcttcagagtttgtgttattgtcgtcttcttgggttgtcttcttctagtccctgagaaaacaatggctcaagaaatgaaacgtgcatcgatcgttatccaaggagctcgacgagtttgtgagaccgatgagaactttgtctgtgcgacattggactggtggcctcatgacaagtgcaactatgaccaatgtccttggggttactcttcagttatcaatatggatttaacgcgtccccttcttactaaagctattaaagctttcaagccgttgaggataagaattggtggttcgctgcaagatcaagttatttacgacgtaggaaatctcaaaactccttgccgtccattccaaaaaatgaacagcggtttgtttggattctctaaaggatgcttgcacatgaaacgatgggacgagctcaacagtttcctaaccgcaaccggagcggtagtgacattcggtttaaacgctttgcgtgggagacacaaactccgcggaaaggcgtggggtggtgcatgggatcacataaacactcaagatttcttaaactacacagtctcgaagggttacgttattgattcttgggaattcggaaacgagctgagtggaagcggagttggtgcgagcgtgagcgcagagctttacgggaaagacttgattgtacttaaagatgtaatcaacaaagtttataaaaattcttggttacacaagcctatacttgtcgctcctggagggttctatgaacaacaatggtacaccaaacttcttgaaatttccggtcctagtgttgtcgacgttgtgactcatcatatatacaatcttggttcaggaaatgatcccgcgctggtgaagaagataatggatccgagttatttaagccaggtatcaaaaacattcaaggacgtgaaccagacgattcaagaacatggaccgtgggcttctccttgggttggagaatctggtggagcttacaatagtggtggccgtcatgtttctgacacattcatagatagcttctggtatctagatcagcttggaatgtcagcgagacacaacactaaagtttactgcagacagactttggttggagggttttacggcttgctcgaaaagggaacgtttgttccaaatcctgattactatagcgcgctgctttggcatcgtttaatgggaaaaggggttcttgcggtgcagacagatggaccgccacagctacgggtttacgcacattgttcaaaaggaagagccggtgtgacattgctactgataaatctaagcaatcaatcggattttacggttagtgtcagcaatggcataaacgtggttttgaatgcggaatcaaggaagaagaagtcattgttggatactttaaaaagaccattttcttggattggaagcaaagcttctgatggatatttgaatagagaagagtatcatctgacaccagaaaacggtgtgttgcgcagcaaaacaatggtcttgaatggtaaatcgttaaaaccgacggcaacaggagatatcccgagccttgaaccggtcctccgtagtgtgaactctccgcttaatgtcttgccattgtcgatgtcgttcattgtgttacctaattttgatgcttctgcttgttcatgatgttaatggggtctctctttgcttattgggaaaaaataaataaaaataaagaatagttgtaatttttttggtaattgtatctaatgctggtgataaatgt

SEQ ID NO: 105097 - protein, 543 aa, Arabidopsis thaliana
  peptide (1)..(543): Ceres Seq. ID no. 13616444
MGFRVCVIVVFLGCLLLVPEKTMAQEMKRASIVIQGARRVCETDENFVCATLDWWPHDKCNYDQCPWGYSSVINMDLTRPLLTKAIKAFKPLRIRIGGSLQDQVIYDVGNLKTPCRPFQKMNSGLFGFSKGCLHMKRWDELNSFLTATGAVVTFGLNALRGRHKLRGKAWGGAWDHINTQDFLNYTVSKGYVIDSWEFGNELSGSGVGASVSAELYGKDLIVLKDVINKVYKNSWLHKPILVAPGGFYEQQWYTKLLEISGPSVVDVVTHHIYNLGSGNDPALVKKIMDPSYLSQVSKTFKDVNQTIQEHGPWASPWVGESGGAYNSGGRHVSDTFIDSFWYLDQLGMSARHNTKVYCRQTLVGGFYGLLEKGTFVPNPDYYSALLWHRLMGKGVLAVQTDGPPQLRVYAHCSKGRAGVTLLLINLSNQSDFTVSVSNGINVVLNAESRKKKSLLDTLKRPFSWIGSKASDGYLNREEYHLTPENGVLRSKTMVLNGKSLKPTATGDIPSLEPVLRSVNSPLNVLPLSMSFIVLPNFDASACS

SEQ ID NO: 105098 - protein, 521 aa, Arabidopsis thaliana
  peptide (1)..(521): Ceres Seq. ID no. 13616445
MAQEMKRASIVIQGARRVCETDENFVCATLDWWPHDKCNYDQCPWGYSSVINMDLTRPLLTKAIKAFKPLRIRIGGSLQDQVIYDVGNLKTPCRPFQKMNSGLFGFSKGCLHMKRWDELNSFLTATGAVVTFGLNALRGRHKLRGKAWGGAWDHINTQDFLNYTVSKGYVIDSWEFGNELSGSGVGASVSAELYGKDLIVLKDVINKVYKNSWLHKPILVAPGGFYEQQWYTKLLEISGPSVVDVVTHHIYNLGSGNDPALVKKIMDPSYLSQVSKTFKDVNQTIQEHGPWASPWVGESGGAYNSGGRHVSDTFIDSFWYLDQLGMSARHNTKVYCRQTLVGGFYGLLEKGTFVPNPDYYSALLWHRLMGKGVLAVQTDGPPQLRVYAHCSKGRAGVTLLLINLSNQSDFTVSVSNGINVVLNAESRKKKSLLDTLKRPFSWIGSKASDGYLNREEYHLTPENGVLRSKTMVLNGKSLKPTATGDIPSLEPVLRSVNSPLNVLPLSMSFIVLPNFDASACS

SEQ ID NO: 105099 - protein, 517 aa, Arabidopsis thaliana
  peptide (1)..(517): Ceres Seq. ID no. 13616446
MKRASIVIQGARRVCETDENFVCATLDWWPHDKCNYDQCPWGYSSVINMDLTRPLLTKAIKAFKPLRIRIGGSLQDQVIYDVGNLKTPCRPFQKMNSGLFGFSKGCLHMKRWDELNSFLTATGAVVTFGLNALRGRHKLRGKAWGGAWDHINTQDFLNYTVSKGYVIDSWEFGNELSGSGVGASVSAELYGKDLIVLKDVINKVYKNSWLHKPILVAPGGFYEQQWYTKLLEISGPSVVDVVTHHIYNLGSGNDPALVKKIMDPSYLSQVSKTFKDVNQTIQEHGPWASPWVGESGGAYNSGGRHVSDTFIDSFWYLDQLGMSARHNTKVYCRQTLVGGFYGLLEKGTFVPNPDYYSALLWHRLMGKGVLAVQTDGPPQLRVYAHCSKGRAGVTLLLINLSNQSDFTVSVSNGINVVLNAESRKKKSLLDTLKRPFSWIGSKASDGYLNREEYHLTPENGVLRSKTMVLNGKSLKPTATGDIPSLEPVLRSVNSPLNVLPLSMSFIVLPNFDASACS

SEQ ID NO: 105100 - DNA, 833 bp, Arabidopsis thaliana
  misc_feature (1)..(833): Ceres Seq. ID no. 13616447
  misc_feature (1)..(833): Ortholog of  Ceres SEQ ID NO 13659393 as cited in SEQ ID NO 67047
  misc_feature (1)..(833): Ortholog of  Ceres SEQ ID NO 12635162 as cited in SEQ ID NO 0
ctaaaagttatcagaatagaaatctctctctctcaacaagtctaacagtgccatttgtatctctgaactccaaccatggctcctctggttctctaccttctcactctcctcatggctggccataccagtgcctcatggtgtgtgtgcaaaacagggctgagtgactcagtgctacaaaagacattagactatgcttgtggaaatggagctgactgtaacccaactcacccaaaaggctcttgcttcaatcctgacaatgttagggctcattgcaactatgcagtcaatagcttcttccaaaagaaaggtcaagcttctgagtcttgtaacttcactggtactgccactcttaccaccaccgatcccagctatacaggatgtgcattcccttctagtgctagtggttctagtggaagcggtagcaccaccgtgacgccaggcaaaaacagtccaaaaggaagcaacagcatcaccacatttcccggcggaaacagtccatactctggcacaccatccaccggcttattaggaggcaatatcactgatgctactggaaccgggttgaacccggattactcaaccgaaagcagtggatttgcgctctattactccaacaaccttctgttaaccggcttttgttctctcgtgatgatgctctgaactgaagaagaatcactgtcttcttttagtttatgcttagtcaaaaaatatgttatttatatgttcttgttgttttagagataatttaatctggatttcggttcttttttactttccggttttaagaaaacacttatcaatgtaaaaccaaatctactatcgatcggtttggt

SEQ ID NO: 105101 - protein, 194 aa, Arabidopsis thaliana; identical to SEQ ID NO: 22354
  peptide (1)..(194): Ceres Seq. ID no. 13616448

SEQ ID NO: 105102 - protein, 182 aa, Arabidopsis thaliana; identical to SEQ ID NO: 22355
  peptide (1)..(182): Ceres Seq. ID no. 13616449

SEQ ID NO: 105103 - DNA, 695 bp, Arabidopsis thaliana
  misc_feature (1)..(695): Ceres Seq. ID no. 13616450
  misc_feature (1)..(695): Ortholog of  Ceres SEQ ID NO 15177923 as cited in SEQ ID NO 0
cggtttaataatccttcgatttcgattcgaactttggtttcatctccccaaatcgaagcgaaggtctctcaacaatggcgaaatcagtgtcgacggcggcttcctcgcttgtgcaaaaccttaggcggtacatcaagaagccatggcagatcaccggaccttgcgctcacccagaatacctcgaagctgttccaaaggcgacggagtatcgtctccgatgccccgctacgattgatgaagaagcaatcgtgccttcctcggatccagagaccgtatacaacatcgtataccacggcagagatcagcgcagaaaccgcccaccgatccggcgatacgtattgacgaaggacaacgtggttcagatgatgaacgagaagaagagttttgacgtctcggacttccctaaggtttacttgaccaccacagtcgaggaggatttggatacgcgtggtggaggctacgagaaataatcaggttttttgctcatctcgtctttctcttgtaacgtactgatgggggaaagactgcgcgtgacacatctctaccgacaaaaaatatctcccttgtttgattattcaataagatatctagtagctttatgaactacaaaacacttcattttccttcacaagaaacagattgttgttcagttgtattccctatctttatgatgaacccgtgatcgtgattgtttc

SEQ ID NO: 105104 - protein, 131 aa, Arabidopsis thaliana; identical to SEQ ID NO: 26292
  peptide (1)..(131): Ceres Seq. ID no. 13616451

SEQ ID NO: 105105 - protein, 113 aa, Arabidopsis thaliana
  peptide (1)..(113): Ceres Seq. ID no. 13616452
RFNNPSISIRTLVSSPQIEAKVSQQWRNQCRRRLPRLCKTLGGTSRSHGRSPDLALTQNTSKLFQRRRSIVSDAPLRLMKKQSCLPRIQRPYTTSYTTAEISAETAHRSGDTY

SEQ ID NO: 105106 - DNA, 1335 bp, Arabidopsis thaliana
  misc_feature (1)..(1335): Ceres Seq. ID no. 13616453
  misc_feature (1)..(1335): Ortholog of  Ceres SEQ ID NO 14301568 as cited in SEQ ID NO 66744
aaacgaatttttttaaagaaaataaaaatcaagtctttctcttcgtctatctctctctctgctcagactctctggtgttgaagactaatcactgaagcagatctattatacggaggacgaagaagatgtatgagcagcagcaacatttcatggatttgcaaagcgattctgggtttggggacgatagctcctggctcgccggcgatgacgatcttcgtctctctcctcaccaatctgccgccggtacgaactccggcaatgagaatctagatcgtcgtctcttaaaagatctcgtcgagatggttccccttatcgagcattacatggaacataaagaaaggagttcgtttaagcggcgtggttccatgatctacactaagatgccttcaaaagaatccttgtcccgaaggggaagaaatgcttctcaaacagtcccaggaagaaagaagagagaccaagagggaaatgacgatgttatgaacaattctagggaagatgatgaaaacgcaaaggctttggctggtgcagaaaaggaagaaatgagtagactaagagagcaagtgaatgacttgcagacaaaattatcggagaaagaagaggttttaaagtcaatggagatgtcaaagaatcaggtaaacgagatacaagaaaagcttgaagcaacaaatcgattggttgctgagaaggatatgttgatcaagtctatgcagttacaattatcggacacaaagatcaaacttgctgacaagcaagcagcccttgagaagactcaatgggaagcaaagacaacaggaacaagagcaatcaagcttcaagaacagctagatgctgttgaaggagacatctctacattcacacgggtgttcgaaactttggcaaaaactgattccaagaaacccgatagggattatgatgcagtcccatatgaatttgatcatcttccatatttagacgatgtagatgaaactgacctgaggaaaatggaagaagcaagattagcttatgtagcagcagtgaataccgcaaaggaacgagaagatgaagaatctctggtcatggctgctcaagctcgagcttacctgcaatcactagcctttacatattaatcatcttcaggtacttacttctttataggatatttctctccttgggttgttttaggagtatgtagatttgtaccatgaagaaattggagaagaaaagcttatgtgagaaacataaagttatggttttcccctaaaccaatgaacgcaactctgagtttttgtttcttcatttgagcatgtatgtatctatatgatcttctacattattgggaacataaaatcagattgt

SEQ ID NO: 105107 - protein, 326 aa, Arabidopsis thaliana; identical to SEQ ID NO: 27481
  peptide (1)..(326): Ceres Seq. ID no. 13616454

SEQ ID NO: 105108 - protein, 318 aa, Arabidopsis thaliana; identical to SEQ ID NO: 27482
  peptide (1)..(318): Ceres Seq. ID no. 13616455

SEQ ID NO: 105109 - protein, 268 aa, Arabidopsis thaliana; identical to SEQ ID NO: 27483
  peptide (1)..(268): Ceres Seq. ID no. 13616456

SEQ ID NO: 105110 - DNA, 1631 bp, Arabidopsis thaliana
  misc_feature (1)..(1631): Ceres Seq. ID no. 13616457
  misc_feature (1)..(1631): Ortholog of  Ceres SEQ ID NO 14315241 as cited in SEQ ID NO 52516
  misc_feature (1)..(1631): Ortholog of  Ceres SEQ ID NO 13594349 as cited in SEQ ID NO 58161
  misc_feature (1)..(1631): Ortholog of  Ceres SEQ ID NO 13663419 as cited in SEQ ID NO 66561
  misc_feature (1)..(1631): Ortholog of  Ceres SEQ ID NO 15177892 as cited in SEQ ID NO 0
ctgctcttcatttcgataaataattgaaaagaacaaaagaaacaaaagagacgagaaagagttttggcgatgaagaagaacgcactttggctactgtgcattctggtgttaccggcgatagcctgtggtaggaaaccggagaagaaggtaacaatttcatcctctgggaggaaggaagatgaccttgtaaccggtttgcccggccaaccaccggttaacttcaaacactacgccggttacgtgaatctggggcctgaacagaagcaaaaggcacttttctattggttcttcgaagctcaacaaaactcttctcgtcgtcctctcgtcctttggctcaatggaggaccgggttgctcatcaatagcctatggagctgcacaagaactaggcccttttcttgttcacgacaacggtggcaaacttacctacaatcatttctcttggaacaaagaggccaatatgttgttcttggaagcgccggttggggttgggttctcgtataccaataactcaatggatcttcaaaagcttggagatgaagttactgcatcggactctcttgctttcctgatcaactggttcatgaaattccccgagttccgatccagcgagttctacatctctggcgagagttacgccggtcactatgttcctcagctcgcggaggtaatttacgacaggaacaagaaggttacgaaagactctagcattaatctcaagggattcatgatagggaacgcggtgatcaatgaggcaacagacatggcaggactagtggactacgcatggagccacgctataatatcggacgaggtccacaccagcatccatggctcgtgcagttttgaggaagataccaccaacaagaccgaacaatgctacaacaatttcaaagggttcatggatgcttacaatgatatcgatatatacagtatctacactcccgtttgcctctcctctttgttgtcatcttctccaagaaaacctaaaatcgtcgtgtctcctcgtctccttacttttgacgatttgtgggacaagtttccggccgggtacgatccatgcactgaaagttatgccgagaattactttaaccggaaagatgtgcaggttgcactccatgcgaacgtcaccaaccttccttatccgtactctccttgcagcggagtaataaagagatggagtgatgctccatccaccatgattcccatcatacaaaagcttttgacgggtggcctccgtatctggatctatagtggagatacggatgggagagttccggtaacatctacacgttatagcataaaaaagatgggacttaaggtcgagtcaccgtggaggtcatggttccacaagagtcaagtagctggatgggttgagacttatgccggtggactaaattttgtcacggtgagaggagccggtcaccaggttccggccttggctccggcgcaatctctcacattattctctcacttcatttcttctgtccccttgccttcaaaacggttctgatatcagtaccgtcaagtcatgatggcaagttgttgttgttgttttggaaccttcgtttagcactctcccaattgattttatgaatttcaattgatgaataaagattcttcaacttttag

SEQ ID NO: 105111 - protein, 480 aa, Arabidopsis thaliana; identical to SEQ ID NO: 24868
  peptide (1)..(480): Ceres Seq. ID no. 13616458

SEQ ID NO: 105112 - protein, 350 aa, Arabidopsis thaliana; identical to SEQ ID NO: 24869
  peptide (1)..(350): Ceres Seq. ID no. 13616459

SEQ ID NO: 105113 - protein, 332 aa, Arabidopsis thaliana; identical to SEQ ID NO: 24870
  peptide (1)..(332): Ceres Seq. ID no. 13616460

SEQ ID NO: 105114 - DNA, 1753 bp, Arabidopsis thaliana
  misc_feature (1)..(1753): Ceres Seq. ID no. 13616469
  misc_feature (1)..(1753): Ortholog of  Ceres SEQ ID NO 14315146 as cited in SEQ ID NO 52929
  misc_feature (1)..(1753): Ortholog of  Ceres SEQ ID NO 14302263 as cited in SEQ ID NO 64701
  misc_feature (1)..(1753): Ortholog of  Ceres SEQ ID NO 13584538 as cited in SEQ ID NO 64739
  misc_feature (1)..(1753): Ortholog of  Ceres SEQ ID NO 15169643 as cited in SEQ ID NO 64826
  misc_feature (1)..(1753): Ortholog of  Ceres SEQ ID NO 15169647 as cited in SEQ ID NO 64930
aaacaagggttcttgctccgacacgacaacaaatccagattttgagcttagggaaacttgagaaggagaaaaaaatgtcgaacatagacatagaagggatcttgaaggagctacctaatgatgggaggatcccaaagacgaagatagtttgcacattaggaccagcttctcgcactgtttccatgatcgaaaagcttttgaaagccggtatgaatgtggctcgcttcaacttctcacatggaagccatgaataccatcaagagacactcgacaacctccgctctgctatgcataataccggcattctcgctgctgtcatgcttgatactaaggggcctgagattcgtactggtttcttgaaagatgggaaccctatacaactgaaggaaggtcaagagattactataaccactgattatgacattcaaggagacgaatcaacgatatccatgagctataaaaagctgcctttggatgtgaagcccggaaacaccatactctgtgcagatggaagcataagtctagctgtcttgtcatgtgatcctgagtctggaactgttaggtgccggtgtgaaaactcggcgatgcttggtgaaagaaagaatgtgaatcttcctggcgttgttgttgatcttcccactttgacagataaggatattgaagatattctcggttggggtgttccgaacagcattgatatgattgctctttcgtttgtccgtaaaggttcggatcttgttaatgtccgcaaggttcttggatctcatgctaaaagcataatgctcatgtcaaaggttgagaaccaggaaggtgtgattaactttgatgagatcttgcgtgaaacagatgcgttcatggttgcccgtggtgatctcgggatggagattccgatagagaagatcttcttggctcaaaagttgatgatctacaagtgtaaccttgcgggtaaaccggtggtcacagccactcagatgctggagtcaatgatcaaatcacctcggccaacccgagctgaagccacagatgttgcaaatgctgttcttgatggtactgactgtgtgatgcttagcggtgagagtgcagcaggagcttatccggaaatagctgtgaaagtcatggctaagatctgcattgaagccgaatcctcgcttgattacaacacaatctttaaagagatgatccgagcaactccacttccaatgagcccactcgagagtcttgcatcatccgctgtacggactgctaacaaagcgagggcaaaactcatcattgtgttgacacgtggaggttcaactgctaatctcgtggctaaatacagaccggctgttccgattctgtcagtggttgtcccggttatgaccactgattcctttgactggtcttgtagtgacgagtcacctgcaaggcatagtctgatatacagaggtctaatccctatgttggctgaaggatctgcaaaggcaacagatagtgaagccaccgaagttatcattgaagctgctctgaagtcggctactcagagaggactgtgcaaccgtggtgatgcaatcgtggcgctgcaccgtattggagctgcctcagttattaagatctgtgtggttaagtgagattacagacttctttcaatacctcaaatcttggattgttggtaatcgtaactgagattttgctttgtagcatgaaataaagaaaacaggtcacaatagttcctgaaactctgttacttttaagatatctctctctcttttttttt

SEQ ID NO: 105115 - protein, 534 aa, Arabidopsis thaliana
  peptide (1)..(534): Ceres Seq. ID no. 13616470
TRVLAPTRQQIQILSLGKLEKEKKMSNIDIEGILKELPNDGRIPKTKIVCTLGPASRTVSMIEKLLKAGMNVARFNFSHGSHEYHQETLDNLRSAMHNTGILAAVMLDTKGPEIRTGFLKDGNPIQLKEGQEITITTDYDIQGDESTISMSYKKLPLDVKPGNTILCADGSISLAVLSCDPESGTVRCRCENSAMLGERKNVNLPGVVVDLPTLTDKDIEDILGWGVPNSIDMIALSFVRKGSDLVNVRKVLGSHAKSIMLMSKVENQEGVINFDEILRETDAFMVARGDLGMEIPIEKIFLAQKLMIYKCNLAGKPVVTATQMLESMIKSPRPTRAEATDVANAVLDGTDCVMLSGESAAGAYPEIAVKVMAKICIEAESSLDYNTIFKEMIRATPLPMSPLESLASSAVRTANKARAKLIIVLTRGGSTANLVAKYRPAVPILSVVVPVMTTDSFDWSCSDESPARHSLIYRGLIPMLAEGSAKATDSEATEVIIEAALKSATQRGLCNRGDAIVALHRIGAASVIKICVVK

SEQ ID NO: 105116 - protein, 510 aa, Arabidopsis thaliana; identical to SEQ ID NO: 40331
  peptide (1)..(510): Ceres Seq. ID no. 13616471

SEQ ID NO: 105117 - protein, 474 aa, Arabidopsis thaliana; identical to SEQ ID NO: 40332
  peptide (1)..(474): Ceres Seq. ID no. 13616472

SEQ ID NO: 105118 - DNA, 1432 bp, Arabidopsis thaliana
  misc_feature (1)..(1432): Ceres Seq. ID no. 13616473
  misc_feature (1)..(1432): Ortholog of  Ceres SEQ ID NO 14314300 as cited in SEQ ID NO 57386
  misc_feature (1)..(1432): Ortholog of  Ceres SEQ ID NO 14311993 as cited in SEQ ID NO 60371
  misc_feature (1)..(1432): Ortholog of  Ceres SEQ ID NO 13596509 as cited in SEQ ID NO 62004
  misc_feature (1)..(1432): Ortholog of  Ceres SEQ ID NO 13500385 as cited in SEQ ID NO 67583
attatacacacatgcgtgtgtattggatctcacgatttcttatcaatggaactcgcttctctttctcagatccccatccaaatcgttttataggtagattagatagataaactacggatatactcgaactctatccatttacggtattgatttggaaatatggacaagtatgacgttgtcaaggatctgggagctggaaatttcggtgtggctcgccttctcaggcacaaggacaccaaagagcttgttgccatgaaatacatcgagagaggtcgcaagatagatgagaacgtggcgagagagattattaatcacagatcacttaaacatcctaatatcatccggttcaaggaggtgatcctgacacctactcatcttgctattgtgatggagtatgcttctggaggagagctctttgatcgaatctgtactgccggtagatttagtgaagctgaggctaggtacttctttcaacagctgatttgtggtgttgattactgccattccttgcaaatatgtcatagagacctgaagcttgagaacacactgctcgatgggagccctgctccgcttttgaaaatctgtgattttggttactctaagtcatctatactacattctaggcctaaatcaactgttggaactccagcttacatagcacctgaagttctttcacggagagaatatgatggcaagcacgcggatgtgtggtcatgtggagtaaccctttatgtgatgctggtgggagcttacccgtttgaggaccctaatgatccaaaaaacttcaggaaaacaatccagcgcataatggctgtacaatacaagatcccggactatgttcacatatctcaggaatgcaaacatcttctctctcgcatattcgtcactaactctgctaagagaatcacacttaaggagatcaagaatcatccgtggtacttgaagaatttgccaaaggagctgctagagtcggctcaagcggcgtattacaagagagacacaagcttctctcttcaaagcgtagaggacataatgaagatagttggagaagcaaggaatccagctccatcaactagtgctgtcaaaagctcgggctcaggagctgatgaagaagaggaagaggacgttgaagctgaagtggaagaggaagaagatgatgaagacgaatacgagaagcatgtcaaagaggcacagtcttgtcaagagtctgacaaagcttaaaaagaaaaatgctctctgtttctcttactttatttcttcttcaagaacactccttggtgagttggtgacttgcttctggtaaaaagaaaaacacatttgtcaaagccaaaggctgtaaactacgtgctggttgtttcacttttagattgatgtcgttgtactgagtaatgagcatgaaacagaaggtttatattattatatgatactatac

SEQ ID NO: 105119 - protein, 353 aa, Arabidopsis thaliana
  peptide (1)..(353): Ceres Seq. ID no. 13616474
MDKYDVVKDLGAGNFGVARLLRHKDTKELVAMKYIERGRKIDENVAREIINHRSLKHPNIIRFKEVILTPTHLAIVMEYASGGELFDRICTAGRFSEAEARYFFQQLICGVDYCHSLQICHRDLKLENTLLDGSPAPLLKICDFGYSKSSILHSRPKSTVGTPAYIAPEVLSRREYDGKHADVWSCGVTLYVMLVGAYPFEDPNDPKNFRKTIQRIMAVQYKIPDYVHISQECKHLLSRIFVTNSAKRITLKEIKNHPWYLKNLPKELLESAQAAYYKRDTSFSLQSVEDIMKIVGEARNPAPSTSAVKSSGSGADEEEEEDVEAEVEEEEDDEDEYEKHVKEAQSCQESDKA

SEQ ID NO: 105120 - protein, 322 aa, Arabidopsis thaliana
  peptide (1)..(322): Ceres Seq. ID no. 13616475
MKYIERGRKIDENVAREIINHRSLKHPNIIRFKEVILTPTHLAIVMEYASGGELFDRICTAGRFSEAEARYFFQQLICGVDYCHSLQICHRDLKLENTLLDGSPAPLLKICDFGYSKSSILHSRPKSTVGTPAYIAPEVLSRREYDGKHADVWSCGVTLYVMLVGAYPFEDPNDPKNFRKTIQRIMAVQYKIPDYVHISQECKHLLSRIFVTNSAKRITLKEIKNHPWYLKNLPKELLESAQAAYYKRDTSFSLQSVEDIMKIVGEARNPAPSTSAVKSSGSGADEEEEEDVEAEVEEEEDDEDEYEKHVKEAQSCQESDKA

SEQ ID NO: 105121 - protein, 277 aa, Arabidopsis thaliana
  peptide (1)..(277): Ceres Seq. ID no. 13616476
MEYASGGELFDRICTAGRFSEAEARYFFQQLICGVDYCHSLQICHRDLKLENTLLDGSPAPLLKICDFGYSKSSILHSRPKSTVGTPAYIAPEVLSRREYDGKHADVWSCGVTLYVMLVGAYPFEDPNDPKNFRKTIQRIMAVQYKIPDYVHISQECKHLLSRIFVTNSAKRITLKEIKNHPWYLKNLPKELLESAQAAYYKRDTSFSLQSVEDIMKIVGEARNPAPSTSAVKSSGSGADEEEEEDVEAEVEEEEDDEDEYEKHVKEAQSCQESDKA

SEQ ID NO: 105122 - DNA, 1677 bp, Arabidopsis thaliana
  misc_feature (1)..(1677): Ceres Seq. ID no. 13616477
  misc_feature (1)..(1677): Ortholog of  Ceres SEQ ID NO 13596216 as cited in SEQ ID NO 68515
agtccaaacaaaaatctgaaacggaagctcagagagacaaggatgagatttttctcttcctttgataaatcccaatacctaattcccaaattcccttacttttaggcgccgaaagatagagagaaacatagatacgcattggttttttcttttttgaagattctcgcttcttactacatgtgtatcaatcgatctctacccagattctccggaggagctttgagtcttgtcgtatagatgcagtgaaggtcctttgttagatgggaaaacttgttcttgagttgtcaaaaggtattttctatgtttttggagtagaactgtttacaaggaagcagccaatatggagtttgattttggagaaatgtttttagtgttgttgtgaagaaatatcagttttgattgtttttggatttgatgggtaaagagaatcagttggagactaccgattgtggagtcagtgatcacggttctccacctatcaagaatgaagaacatgaggcaccacgttacagttcagacaaagacacgggtttaccaacttgccgtgtatgccagtgtgcagaatctgatagaagaggagatgctgctttagggtttttgggaattactcctccggtttcagaacctcgtagaagcaatgcgggtgaagaaaccgttgatcagagaagctcggttgtcaaatctagcggattcatcgaactgataagtcctgatggagaagtttttgtttgtgcaaacgacgatatagaaatgggagcgtggcagcatcgagataagttgctagaacttggatgttcttgcaagaatgatctcgctttggtacactatgcttgtgcattgaaatggtttgtcaaccacggatcaactgtttgtgagatatgcggaaaaaccacggagaatataagaacagttgatttcaacaaagtggttatcgccttaaaagattacgcagcgctaagagaaagaacagcggatggagatccaaatcctgtagtggttaacaacaacaccagttcgtcagggattgatcctgatgcagttgcagccattcgaaggcaacgacttagtgagatatcgttatggtttggtcctcattgttcaaccaacaacaacaatagtagtaattccgctgctgcagggacggcttcttctcaggttacatctgaacaacctgtgggtatagtaaactttgatatcttgcctatggaaagccgtgcgactaaatgggcggtggaaggtaccggaatactacttgcaaccggattactcacagttactttggcttggctcattgctcctcgtgtcggaaagagaactgcaaagagtggtctacacatacttctaggtggtctctgtgctttaacagtagtcatcttcttcagattcgttgtgctgacaagaatcaggtacggaccagcacgttactgggcaatattgttcgtcttctggtttcttgtgtttggcatttgggcttcacgttcacacgcttctcactcctccacatgataaattctccatcatccttcaagacacaaaatgtactctttttggtctctgtcaatatcatgtacgttattctctttcaagacacaaaatgtacaattaattactcttatcaaaaagaaaaaaaggggtgaaactgaatgttatcatctcacaacaaagtctcttggtcgt

SEQ ID NO: 105123 - protein, 363 aa, Arabidopsis thaliana; identical to SEQ ID NO: 25729
  peptide (1)..(363): Ceres Seq. ID no. 13616478

SEQ ID NO: 105124 - protein, 251 aa, Arabidopsis thaliana; identical to SEQ ID NO: 25730
  peptide (1)..(251): Ceres Seq. ID no. 13616479

SEQ ID NO: 105125 - DNA, 858 bp, Arabidopsis thaliana
  misc_feature (1)..(858): Ceres Seq. ID no. 13616508
  misc_feature (1)..(858): Ortholog of  Ceres SEQ ID NO 13574766 as cited in SEQ ID NO 33
aaattcgatcgatagtgacgagaaagatcctaagatggcgaccgcaagcgagagttcttcatctaagagatggcttccacttgaatctaacccagatgttatgaatcagtatctctggggacttggtcttgcccctgatgaagcagagtgcaatgatgtgtatgggttagacgatgaacttctagagatggttccaaagcctgttcttgctgttctcttcctttacccaatcaccaaaaagagtgaagaagagagaatcgagcaagacaaggaaattaaggaaaaggtgcatagcgataaagtttactttatgaaacaaactgttggtaatgcttgtggaaccattggtcttcttcatgctattgggaatattacctctgaaatcaaactctccgacggatcgttcttggatagattcttcaaatccactgccaacatgactcctatggagcgtgccaagtttctcgagaatgacagtcaaatagaagatgctcattctgtagctgttatagctggtgatacacctgcttcagaagacgcagacacgcatttcatttgtttagcttgtgtagaaggtgagctctatgaacttgatggaagaaaggcaggaccgatttcacacggtgcttcctctccagctaccctcctgaaggacgcaacaaaagtgataaagaagatgatcgagaagaatccgggctctctcaacttcaacctgatagccatctctaagagaacctgagggtcttttaaataaccgaaactcctaagtcttgtttttgagtttgtgactattttatatcttcggattctgtttttcaatgttctgaacaaattacagttgatgatcatggtttagag

SEQ ID NO: 105126 - protein, 245 aa, Arabidopsis thaliana
  peptide (1)..(245): Ceres Seq. ID no. 13616509
NSIDSDEKDPKMATASESSSSKRWLPLESNPDVMNQYLWGLGLAPDEAECNDVYGLDDELLEMVPKPVLAVLFLYPITKKSEEERIEQDKEIKEKVHSDKVYFMKQTVGNACGTIGLLHAIGNITSEIKLSDGSFLDRFFKSTANMTPMERAKFLENDSQIEDAHSVAVIAGDTPASEDADTHFICLACVEGELYELDGRKAGPISHGASSPATLLKDATKVIKKMIEKNPGSLNFNLIAISKRT

SEQ ID NO: 105127 - protein, 234 aa, Arabidopsis thaliana; identical to SEQ ID NO: 43967
  peptide (1)..(234): Ceres Seq. ID no. 13616510

SEQ ID NO: 105128 - protein, 212 aa, Arabidopsis thaliana; identical to SEQ ID NO: 43968
  peptide (1)..(212): Ceres Seq. ID no. 13616511

SEQ ID NO: 105129 - DNA, 968 bp, Arabidopsis thaliana
  misc_feature (1)..(968): Ceres Seq. ID no. 13616516
  misc_feature (1)..(968): Ortholog of  Ceres SEQ ID NO 13599585 as cited in SEQ ID NO 988
  misc_feature (1)..(968): Ortholog of  Ceres SEQ ID NO 13594624 as cited in SEQ ID NO 55765
  misc_feature (1)..(968): Ortholog of  Ceres SEQ ID NO 15177682 as cited in SEQ ID NO 0
agaaccactagttgtgatttgtgaaactctgaagtaaagaagaaaccacaacaatggcgttgttctccccgccaatctcttcttcatctcttcaaaatcccaatttcattcccaaattttcattctccctcctctccagtaaccgcttctctctcctctccgtcactcgagcttcctccgacagtggatcaacctctcccaccgccgccgtctccgtggaggctcctgagcccgtggaagtgatagttaaagagcctccgcaatcaacaccggcggttaaaaaggaagaaaccgccaccgctaaaaatgtcgccgtcgaaggtgaagagatgaaaacaacggagagtgttgtcaaattccaggatgcgagatggattaatggaacttgggatctgaaacagttcgagaaagatggaaaaaccgattgggattctgtaatcgttgctgaggcaaagagaagaaaatggctagaagagaatccagaaacaacgagtaacgacgaaccagtgcttttcgatacatcgattattccatggtgggcttggattaagagataccacttacctgaagctgaactcttaaatggtcgtgcggcgatgataggattctttatggcttactttgtcgatagtcttaccggagtaggacttgttgatcaaatggggaatttcttctgcaagacactattgtttgtggctgtggctggagttttgtttattcgtaagaatgaggatgtggataaactcaagaacttgtttgatgagactacattgtatgataagcaatggcaagcagcttggaaaaatgatgatgatgagtcattgggttctaagaagaagtgataacaaagattcttgctttctttttttgttgttgttgtaattaggagatgaacttaccaaatgtaatatcaagagatttgaacaatgtttcctcagattaccgttaatcatgtctagtctctactt

SEQ ID NO: 105130 - protein, 262 aa, Arabidopsis thaliana
  peptide (1)..(262): Ceres Seq. ID no. 13616517
MALFSPPISSSSLQNPNFIPKFSFSLLSSNRFSLLSVTRASSDSGSTSPTAAVSVEAPEPVEVIVKEPPQSTPAVKKEETATAKNVAVEGEEMKTTESVVKFQDARWINGTWDLKQFEKDGKTDWDSVIVAEAKRRKWLEENPETTSNDEPVLFDTSIIPWWAWIKRYHLPEAELLNGRAAMIGFFMAYFVDSLTGVGLVDQMGNFFCKTLLFVAVAGVLFIRKNEDVDKLKNLFDETTLYDKQWQAAWKNDDDESLGSKKK

SEQ ID NO: 105131 - protein, 170 aa, Arabidopsis thaliana
  peptide (1)..(170): Ceres Seq. ID no. 13616518
MKTTESVVKFQDARWINGTWDLKQFEKDGKTDWDSVIVAEAKRRKWLEENPETTSNDEPVLFDTSIIPWWAWIKRYHLPEAELLNGRAAMIGFFMAYFVDSLTGVGLVDQMGNFFCKTLLFVAVAGVLFIRKNEDVDKLKNLFDETTLYDKQWQAAWKNDDDESLGSKKK

SEQ ID NO: 105132 - DNA, 2958 bp, Arabidopsis thaliana
  misc_feature (1)..(2958): Ceres Seq. ID no. 13616523
  misc_feature (1)..(2958): Ortholog of  Ceres SEQ ID NO 15168977 as cited in SEQ ID NO 20587
agagaagagaatcttccaaaaatgttaaatcttgtgaaacaaataaagcatagcaaagcaaagtccaaagtccaatgagctaaaacaaaatcaaaaaggtttctttatgtttttttttttgaagtaagaaaaaaaaagagtttataaagaaacagtggagaaataaatagcagaacaaagagaaagatcggagaaaagaatctttttaggctctctctcgcagacttcgcactcacacactcacttccattgctccaaaaaaacattgtatctacttcacttgctgtagagatatggtatcaagatcttattcaaacctcttggatcttgcttctggtaacttccattcgttttctcgagaaaagaagaggtttccaagagtagcaactgtcactggtgtcttatctgagctagatgatgataacaacagcaacagtgtctgctctgatgctccttcttccgtcacacaagatcgaatcatcatcgttggaaaccagcttcctattaaatcacatcggaactctgctggtaaattgagttttagttgggacaatgactcgcttctcttgcagcttaaagatggtatgcgtgaagatatggaagttgtctacattggttgccttaaggaacagattgatacagttgagcaagatgatgtttctcaaaggttgcttgagaatttcaaatgtgttcctgcttatatcccacctgagctattcactaagtactatcatggattctgtaagcaacatctatggcctttgtttcactacatgcttcccttaactcctgatcttggtggtagatttgatcgttctttatggcaagcttatctttcggttaacaagatctttgctgataaagtgatggaagtgattagtcctgatgatgattttgtttgggttcatgactatcacttaatggttttgcctacatttctaaggaagaggtttaatagagtaaagcttggttttttccttcatagcccgttcccttcctctgagatttaccgtactcttccagtgagaaatgagctcttacgtgcactcctcaacgctgatttgattggctttcatacctttgactatgcaagacacttcctttcttgttgtagcaggatgcttggtttatcctatcagtccaaacgtggaaccatagggcttgagtattatggtcgaacggttagtatcaagattcttcctgtggggattcatatcagccagcttcagtcaattttaaacctcccagagactcagaccaaagttgctgagctaagagatcagttcttggatcagaaagttcttctcggtgttgatgacatggacatcttcaaaggaatcagcctcaaactcttggcaatggaacaacttctcacacagcatcccgagaagagaggtcgagttgtacttgtccagattgcaaaccctgcaagaggtcgtgggaaagacgttcaggaggttcagtctgaaactgaagccacggttaaaaggatcaatgaaatgtttggaaggccgggctaccaacccgtggttctgattgatacaccgcttcaattctttgagaggattgcttactatgtcattgcagagtgttgtcttgttacagcggtaagagatggtatgaatcttataccttatgagtacattatctgcaggcaaggtaatccgaaactcaacgagactataggccttgacccttctgctgcaaagaagagtatgcttgttgtctctgagtttattggttgttctccttctttaagcggcgccattagagtaaatccgtggaacattgatgctgtgactgaagcaatggactatgcattgatagtttcagaagcagagaagcaaatgcgtcacgagaagcatcacaaatatgttagcacacatgatgttgcttattgggcgcgtagctttatacaagatcttgaaagggcttgcggggatcatgtgaggaagaggtgttgggggattggattcgggttaggctttagagttgtggcgcttgatccgagttttaaaaagctttcgattgagcacattgtctcagcttataagagaaccaagaaccgagccattttgttggattatgatggcacaatggtgcagccaggttccattaggacaacaccaacccgcgaaacaatcgaaatcttgaacaacctgtctagtgatcccaagaatatcgtgtacctcgtcagtgggaaagacagaaggacactaactgaatggttttcttcatgtgacgatctcggtttgggtgcagagcacgggtattttataaggccaaatgatggaacagactgggaaacgtcgagtttggtatcaggttttgagtggaaacaaatagcagagccagtgatgagactttacactgagactacagatggatcaacaatagagactaaagagactgctctcgtttggaattaccaattcgcagatcctgattttggatcttgtcaagccaaagagcttatggaacacctcgaaagcgtgcttaccaatgatccagtctctgtcaagactggacaacaactcgttgaagttaaaccacagggtgtgaacaaaggtcttgtggcagagaggcttctaacaacgatgcaagaaaaagggaaacttttggatttcattctctgcgtcggtgatgatcggtctgatgaggatatgtttgaggtgataatgagtgctaaagatggtccagctttgtctcctgtggctgagatattcgcttgcaccgttggacaaaagccaagcaaagcaaaatactatttagacgatactgcggagataatcagaatgctggacggtctagccgctaccaacacaactatctctgatcaaactgattcaaccgccactgttccaactaaagatctgttttaaggatttgtgaacgaaagttttagtgggtttgttgttgtgatttgtgaatgctttttcaaatataatggattaaggt

SEQ ID NO: 105133 - protein, 862 aa, Arabidopsis thaliana; identical to SEQ ID NO: 38304
  peptide (1)..(862): Ceres Seq. ID no. 13616524

SEQ ID NO: 105134 - protein, 765 aa, Arabidopsis thaliana; identical to SEQ ID NO: 38305
  peptide (1)..(765): Ceres Seq. ID no. 13616525

SEQ ID NO: 105135 - protein, 761 aa, Arabidopsis thaliana; identical to SEQ ID NO: 38306
  peptide (1)..(761): Ceres Seq. ID no. 13616526

SEQ ID NO: 105136 - DNA, 1058 bp, Arabidopsis thaliana
  misc_feature (1)..(1058): Ceres Seq. ID no. 13616527
  misc_feature (1)..(1058): Ortholog of  Ceres SEQ ID NO 15169191 as cited in SEQ ID NO 58440
  misc_feature (1)..(1058): Ortholog of  Ceres SEQ ID NO 13597523 as cited in SEQ ID NO 64778
aaattcaatctttctccgtcattcagatttcgaggagacagagacagagaaaaggattcgtgtaaggaaaagcttttaaacttctctttctatttatccctcctttcttctatctctctctctctcgatatcgatacaagagagatggagaaagaagaaggagaaacaacaacaacgatcggcgttgttccggcggcgccggcgaaattaccgactccgatatattctctgagcttttgggaggtcacggcagcttccggcgtcgttttagggtttattttgggtcttgtttgcgtttatctcacaatgcctcaatctgattacagctttctcaagctacctcgtaatctcgaagatcttcagattcttagagataatcttgagatatacacaagtgattacacagttcaagttcttgttggatattgtctggtgtacgtttttatgcagacgttcatgattcctggaactgtgttcatgtctttgcttgctggtgctctctttggagttgtcaaaggaatggctcttgttgtctccactgcaacagctggtgcttcctcttgttatttcctctctaagctcattggtagacctttactcttctcgctttggcctgacaagctcgtattcttccaagatcaggttgcgagaagaaaagatcggttgctgaattatatgctgttcttgaggctaacaccaacattgcctaacactttcattaatgttgcttctccaattgttgatgttccttatcatatcttcttcctagctacattcatcggtctgattcctgctgcatttgtcactgtccgggctgggcttgctcttggagagctaaaatcattgggagatctctatgacttcagctccatggcgactctgtgtctcattggtgtgctctctgtgactccaaccctaattggcaagaaacaagcatagaagatgaagatcaatacgatgatgatgatgaaaacagagcatttcaacagcctctttgtgtatatatcatgtagaatgttaagaacttaagatcaatcaatcataaaactctgttctct

SEQ ID NO: 105137 - protein, 312 aa, Arabidopsis thaliana
  peptide (1)..(312): Ceres Seq. ID no. 13616528
KFNLSPSFRFRGDRDREKDSCKEKLLNFSFYLSLLSSISLSLDIDTREMEKEEGETTTTIGVVPAAPAKLPTPIYSLSFWEVTAASGVVLGFILGLVCVYLTMPQSDYSFLKLPRNLEDLQILRDNLEIYTSDYTVQVLVGYCLVYVFMQTFMIPGTVFMSLLAGALFGVVKGMALVVSTATAGASSCYFLSKLIGRPLLFSLWPDKLVFFQDQVARRKDRLLNYMLFLRLTPTLPNTFINVASPIVDVPYHIFFLATFIGLIPAAFVTVRAGLALGELKSLGDLYDFSSMATLCLIGVLSVTPTLIGKKQA

SEQ ID NO: 105138 - protein, 264 aa, Arabidopsis thaliana
  peptide (1)..(264): Ceres Seq. ID no. 13616529
MEKEEGETTTTIGVVPAAPAKLPTPIYSLSFWEVTAASGVVLGFILGLVCVYLTMPQSDYSFLKLPRNLEDLQILRDNLEIYTSDYTVQVLVGYCLVYVFMQTFMIPGTVFMSLLAGALFGVVKGMALVVSTATAGASSCYFLSKLIGRPLLFSLWPDKLVFFQDQVARRKDRLLNYMLFLRLTPTLPNTFINVASPIVDVPYHIFFLATFIGLIPAAFVTVRAGLALGELKSLGDLYDFSSMATLCLIGVLSVTPTLIGKKQA

SEQ ID NO: 105139 - protein, 210 aa, Arabidopsis thaliana
  peptide (1)..(210): Ceres Seq. ID no. 13616530
MPQSDYSFLKLPRNLEDLQILRDNLEIYTSDYTVQVLVGYCLVYVFMQTFMIPGTVFMSLLAGALFGVVKGMALVVSTATAGASSCYFLSKLIGRPLLFSLWPDKLVFFQDQVARRKDRLLNYMLFLRLTPTLPNTFINVASPIVDVPYHIFFLATFIGLIPAAFVTVRAGLALGELKSLGDLYDFSSMATLCLIGVLSVTPTLIGKKQA

SEQ ID NO: 105140 - DNA, 842 bp, Arabidopsis thaliana
  misc_feature (1)..(842): Ceres Seq. ID no. 13616539
  misc_feature (1)..(842): Ortholog of  Ceres SEQ ID NO 13599448 as cited in SEQ ID NO 521
  misc_feature (1)..(842): Ortholog of  Ceres SEQ ID NO 13596408 as cited in SEQ ID NO 62028
aaagagagagagagtctaaaagctcgtcgtcgtcttcaatggtgaatctcaaaccaattggataaataaaacaaaacaaaaaaaacttcacaaaaaaaaaaaaaagatccaaattacaaccatgccttcggagttaacaccagaagaacgatcggaactaaaaaactcaatcgccgagttccacacataccaactcgatccaggaagctgttcatcactccacgcgcaacgaatccacgcgcctccggaactcgtctggtcaatcgtacgacgattcgacaaaccacaaacatacaaacacttcatcaaatcctgctccgtcgaacaaaacttcgagatgcgcgtcggatgcacgcgcgacgtgatcgtcatcagtggattaccggcgaacacatcaacggaaagactcgatatactcgacgacgaacggagagttaccggattcagtatcatcggaggcgaacataggctgacgaattacaaatccgttacgacggtgcatcggttcgagaaagagaatcggatctggacggtggttttggaatcttacgtcgttgatatgccggaaggtaactcggaggatgatactcgtatgtttgctgatacggttgtgaagcttaatttgcagaaactcgcgacggttgctgaagctatggctcgtaactccggtgacggaagtggttctcaggtgacgtgaaaatgaagaaaaaaatatgatttaatttcttttattaaaaacaaaatccagaaatgttatttatgttgcttcgtataagattctcttcttcttttgtctgtttttgcttttttaacctcatatagtcatatttttaccattttct

SEQ ID NO: 105141 - protein, 191 aa, Arabidopsis thaliana; identical to SEQ ID NO: 26957
  peptide (1)..(191): Ceres Seq. ID no. 13616540

SEQ ID NO: 105142 - protein, 119 aa, Arabidopsis thaliana; identical to SEQ ID NO: 26958
  peptide (1)..(119): Ceres Seq. ID no. 13616541

SEQ ID NO: 105143 - DNA, 1057 bp, Arabidopsis thaliana
  misc_feature (1)..(1057): Ceres Seq. ID no. 13616542
  misc_feature (1)..(1057): Ortholog of  Ceres SEQ ID NO 15168525 as cited in SEQ ID NO 58192
atcatcactctctgagatcgaagagaaagcaaaatcaaagttgtgatgaaatctctattgatgagaaccggttcgatgccggttcttcaaaaccggttaatttcaggtggttcatcgcggaagatgacgcctatctccaggaccaactccgtcgaatcattatccagctacggcgagagattcgccggcgggaagatttcgatcgaggttaaggctaatgtagggatgcggagggtgttatcggaaagtgatgtgattagatctgagagaatgttgaaaagagttggatctaagccttcgccggcgagaatcccggaggatgatgaagcgggggaggaagaaattaggtttgcagatggttgggggtctatgatctccggtggtttacctgtggaggagaaatgtttcacgggtggcggtgttggtggtggatctggttatagcggcggttatggaaacggaggaggaggcggttatgaagataagagcaagatcggtgattattatcgagagatgttgagatctaatcctaataattcgcttcttctgatgaattacggcaagtttttgtatgaggtggagaaagatgcagagggagctgaagagtactatggaagagcaatactggagaatccaggagatggagaagctttatccatgtatggaagattgatatgggaaacgaagagagatgagaagagagctcaaggttactttgatcaagctgttaatgcttctcctaatgattgtatggttttgggatcatatgcacgtttcatgtgggaggcagaggatgatgatgatgatgatgaagaagaagaagaagaagaatggatggctgcatcaccactcatggtttctgcagtttagagactaacacgacgaagatgaagaagaagtaatggagactaagattatgtatcaagtatcaaccttttttttgtctatttcactgtctttttactaacttttgttgtaataacctgaagagtaatgaaaacatgtatgtgaaagaaaacgaatgtaaccttattataagagaataaaagtgcttttg

SEQ ID NO: 105144 - protein, 274 aa, Arabidopsis thaliana
  peptide (1)..(274): Ceres Seq. ID no. 13616543
MKSLLMRTGSMPVLQNRLISGGSSRKMTPISRTNSVESLSSYGERFAGGKISIEVKANVGMRRVLSESDVIRSERMLKRVGSKPSPARIPEDDEAGEEEIRFADGWGSMISGGLPVEEKCFTGGGVGGGSGYSGGYGNGGGGGYEDKSKIGDYYREMLRSNPNNSLLLMNYGKFLYEVEKDAEGAEEYYGRAILENPGDGEALSMYGRLIWETKRDEKRAQGYFDQAVNASPNDCMVLGSYARFMWEAEDDDDDDEEEEEEEWMAASPLMVSAV

SEQ ID NO: 105145 - protein, 269 aa, Arabidopsis thaliana
  peptide (1)..(269): Ceres Seq. ID no. 13616544
MRTGSMPVLQNRLISGGSSRKMTPISRTNSVESLSSYGERFAGGKISIEVKANVGMRRVLSESDVIRSERMLKRVGSKPSPARIPEDDEAGEEEIRFADGWGSMISGGLPVEEKCFTGGGVGGGSGYSGGYGNGGGGGYEDKSKIGDYYREMLRSNPNNSLLLMNYGKFLYEVEKDAEGAEEYYGRAILENPGDGEALSMYGRLIWETKRDEKRAQGYFDQAVNASPNDCMVLGSYARFMWEAEDDDDDDEEEEEEEWMAASPLMVSAV

SEQ ID NO: 105146 - protein, 264 aa, Arabidopsis thaliana
  peptide (1)..(264): Ceres Seq. ID no. 13616545
MPVLQNRLISGGSSRKMTPISRTNSVESLSSYGERFAGGKISIEVKANVGMRRVLSESDVIRSERMLKRVGSKPSPARIPEDDEAGEEEIRFADGWGSMISGGLPVEEKCFTGGGVGGGSGYSGGYGNGGGGGYEDKSKIGDYYREMLRSNPNNSLLLMNYGKFLYEVEKDAEGAEEYYGRAILENPGDGEALSMYGRLIWETKRDEKRAQGYFDQAVNASPNDCMVLGSYARFMWEAEDDDDDDEEEEEEEWMAASPLMVSAV

SEQ ID NO: 105147 - DNA, 1294 bp, Arabidopsis thaliana
  misc_feature (1)..(1294): Ceres Seq. ID no. 13616548
  misc_feature (1)..(1294): Ortholog of  Ceres SEQ ID NO 13582332 as cited in SEQ ID NO 59890
  misc_feature (1)..(1294): Ortholog of  Ceres SEQ ID NO 13598278 as cited in SEQ ID NO 68456
atatttctccttcaggtttctatgatggaactagaatcagaaactcaagaactccatcttcacgtaaatggcgaacctgaagggaaattttcaacagaagagagaagtcacaagtactcttggaggttaagagtgtctctctatgtcactctcctcttagctggagagacaatagccactctcttaggtagactttactacgaaaaaggcggtaaaagcacatggctcgaaaccttggttcagcttgtagggtttcctttaacccttccttgctattattacttaaagcctgagccgtccaagactaaaaccattaccaaaaaaactacttcttccttcttgacactatctttagtgtatattggacttggcttgcttgttgctggacattgtattttgtactcatttgggctactttaccttcctgtctcaactttctctttgatctctgcgtcgcaattggcttttaacgccgtcttctcttacttcctaaactcacaaaaaatcacaccatttatactcaattcacttgttctcttaaccatatcttctacacttcttgttatccaacatgaaccagaatctccctcttctacttcaaagtccgcagccaagtccaagtatgtgattggatacatctgcgcggtcggtagctcagctggttattctctggtgctttctttaacagattacgcgttcgaaaagattctaaagaaatacacattcaaggctattttagacatggccacatatccgtctatggtagctacttgtgtagttgtggtaggactttttggaagtggtgggtggaaaaagctgagtacagaaatggaagagtttcaactagggaaaagctcatacattttgataaacatcggttcaacgatatcatggcaagcttgtttgattggaagtgttggtttgattatcgaagtttcatcgcttttttccaatgtcataagcactctttgtttaccagttgtgcctgttcttgctgttgtcttcttccgtgatgagatgagtggaatcaagttggttgcaatgtttttggccatctggggatttgtttcttatggttatcagcattatgtcaatgatagaaagccagaagaagaccaagagcttcctcagtctaaagaagaagaagaacaaaaacaagtagataccattcatgtccaagcttaggcaaagatccaagaaaaccaaaagcttttgtaatttgaaccagtttaatctaaaataaaaatgagttatatatattgtaggcactacaaataaaattggtaagtgtctc

SEQ ID NO: 105148 - protein, 394 aa, Arabidopsis thaliana
  peptide (1)..(394): Ceres Seq. ID no. 13616549
IFLLQVSMMELESETQELHLHVNGEPEGKFSTEERSHKYSWRLRVSLYVTLLLAGETIATLLGRLYYEKGGKSTWLETLVQLVGFPLTLPCYYYLKPEPSKTKTITKKTTSSFLTLSLVYIGLGLLVAGHCILYSFGLLYLPVSTFSLISASQLAFNAVFSYFLNSQKITPFILNSLVLLTISSTLLVIQHEPESPSSTSKSAAKSKYVIGYICAVGSSAGYSLVLSLTDYAFEKILKKYTFKAILDMATYPSMVATCVVVVGLFGSGGWKKLSTEMEEFQLGKSSYILINIGSTISWQACLIGSVGLIIEVSSLFSNVISTLCLPVVPVLAVVFFRDEMSGIKLVAMFLAIWGFVSYGYQHYVNDRKPEEDQELPQSKEEEEQKQVDTIHVQA

SEQ ID NO: 105149 - protein, 387 aa, Arabidopsis thaliana
  peptide (1)..(387): Ceres Seq. ID no. 13616550
MMELESETQELHLHVNGEPEGKFSTEERSHKYSWRLRVSLYVTLLLAGETIATLLGRLYYEKGGKSTWLETLVQLVGFPLTLPCYYYLKPEPSKTKTITKKTTSSFLTLSLVYIGLGLLVAGHCILYSFGLLYLPVSTFSLISASQLAFNAVFSYFLNSQKITPFILNSLVLLTISSTLLVIQHEPESPSSTSKSAAKSKYVIGYICAVGSSAGYSLVLSLTDYAFEKILKKYTFKAILDMATYPSMVATCVVVVGLFGSGGWKKLSTEMEEFQLGKSSYILINIGSTISWQACLIGSVGLIIEVSSLFSNVISTLCLPVVPVLAVVFFRDEMSGIKLVAMFLAIWGFVSYGYQHYVNDRKPEEDQELPQSKEEEEQKQVDTIHVQA

SEQ ID NO: 105150 - protein, 386 aa, Arabidopsis thaliana
  peptide (1)..(386): Ceres Seq. ID no. 13616551
MELESETQELHLHVNGEPEGKFSTEERSHKYSWRLRVSLYVTLLLAGETIATLLGRLYYEKGGKSTWLETLVQLVGFPLTLPCYYYLKPEPSKTKTITKKTTSSFLTLSLVYIGLGLLVAGHCILYSFGLLYLPVSTFSLISASQLAFNAVFSYFLNSQKITPFILNSLVLLTISSTLLVIQHEPESPSSTSKSAAKSKYVIGYICAVGSSAGYSLVLSLTDYAFEKILKKYTFKAILDMATYPSMVATCVVVVGLFGSGGWKKLSTEMEEFQLGKSSYILINIGSTISWQACLIGSVGLIIEVSSLFSNVISTLCLPVVPVLAVVFFRDEMSGIKLVAMFLAIWGFVSYGYQHYVNDRKPEEDQELPQSKEEEEQKQVDTIHVQA

SEQ ID NO: 105151 - DNA, 1185 bp, Arabidopsis thaliana
  misc_feature (1)..(1185): Ceres Seq. ID no. 13616568
  misc_feature (1)..(1185): Ortholog of  Ceres SEQ ID NO 13594341 as cited in SEQ ID NO 57917
  misc_feature (1)..(1185): Ortholog of  Ceres SEQ ID NO 13656441 as cited in SEQ ID NO 65703
aattaaaaacattcagacacaaatttagtttcttcttcttttggttctgtctgaatccaattttcttatattttatttcctccaccaccgtgagatatgatcgccgccggagctaaatcgctattagggctttcgatggcttctccaaaagggattttcgatagcaattcaatgagtaattcaagatctgttgttgttgttcgtgcttgtgtttctatggatggatctcaaactctgagtcataacaaaaatggatctattcctgaggttaaatccattaacggtcacacgggacaaaagcaaggacctttgtctacggtcggaaactcgacaaatataaagtggcatgaatgttctgttgagaaagttgatagacagagattgcttgatcagaaaggatgtgtgatttgggtcaccggtcttagtggttcagggaagagtactttggcttgtgctttgaatcagatgttgtatcaaaaggggaagctttgttatattcttgatggtgataatgttaggcatggcttaaaccgtgatcttagctttaaagctgaggatcgtgcagagaatattcgtagagttggagaggttgctaagctttttgcggatgctggaataatctgcattgcgagtttgatatctccttatagaacagatagggacgcttgtcgaagtttgctccccgagggagattttgttgaggtgttcatggatgtaccgcttagtgtttgcgaggcgagggatccaaagggtctttacaagcttgctcgtgcaggaaagatcaaaggttttaccgggatcgatgacccttacgagccaccattgaactgcgagatttctctaggacgtgaaggaggaacttctcctatcgaaatggcggaaaaggtcgtcggatacttagataacaagggttatcttcaagcataacatacttctagatacacaaatttgttatctcacggtcttagttctattttacgagccaaagtataaaagtaagcaaatccatggctgttttatggaatcacaagttcgacaaaataaatataaatctcataatttttcttgtccctttttttttgtatcataaatcttgatgttatggttctgtatataatatgtgtgaaataaggttaagcctactaaccattttatatgatctataatacaatatactttgtatgc

SEQ ID NO: 105152 - protein, 276 aa, Arabidopsis thaliana; identical to SEQ ID NO: 29479
  peptide (1)..(276): Ceres Seq. ID no. 13616569

SEQ ID NO: 105153 - protein, 263 aa, Arabidopsis thaliana; identical to SEQ ID NO: 29480
  peptide (1)..(263): Ceres Seq. ID no. 13616570

SEQ ID NO: 105154 - protein, 251 aa, Arabidopsis thaliana; identical to SEQ ID NO: 29481
  peptide (1)..(251): Ceres Seq. ID no. 13616571

SEQ ID NO: 105155 - DNA, 629 bp, Arabidopsis thaliana
  misc_feature (1)..(629): Ceres Seq. ID no. 13616572
  misc_feature (1)..(629): Ortholog of  Ceres SEQ ID NO 14302679 as cited in SEQ ID NO 0
atggcggaaaaagcaccgtcctcctcctcctcctcttctccgccgaaagaagttgcagatgaaacacaagactggatactcggagccgggtcgggttgggtcgaagctcgtaaaacttgcgatcacttgaacactttatctcccgatttacttcacttaccaactcctgatactccttgttctaggtgccaaaacccggtagagaactggttatgcctttgttgtaaagaggttctatgcagccgtttcgtgaataggcatatgctgatgcatcatcaacaaaccggtcactgccttgcactaagctatagtgacttgtcggtatggtgcttctgctgtgaagcgtatcttgatgctcagatcattttgcagctgagaccaattcaccaagctgcttacattcttaaatttggcgaggctcctcctttaccccaactttgataacaccaaagagctctctttttctgtacctatctgtctctctagatgtgttagtgaagaaagtttggtacattgagttctttgtttttgtttttttttaggttccaatgagatttattaagtttctaaatcactatattacatatcatctcacgaaccaatattatcaagagttaaattataatttc

SEQ ID NO: 105156 - protein, 146 aa, Arabidopsis thaliana
  peptide (1)..(146): Ceres Seq. ID no. 13616573
MAEKAPSSSSSSSPPKEVADETQDWILGAGSGWVEARKTCDHLNTLSPDLLHLPTPDTPCSRCQNPVENWLCLCCKEVLCSRFVNRHMLMHHQQTGHCLALSYSDLSVWCFCCEAYLDAQIILQLRPIHQAAYILKFGEAPPLPQL

SEQ ID NO: 105157 - DNA, 1624 bp, Arabidopsis thaliana
  misc_feature (1)..(1624): Ceres Seq. ID no. 13616589
  misc_feature (1)..(1624): Ortholog of  Ceres SEQ ID NO 13660287 as cited in SEQ ID NO 67316
aagattggatatgatctaaaaaatcagaggcaaatcaatcaagattaagaagacgacaatggaagagccatttcttccgagagacgagcagttagtctcttgtaaatccacatggcaaagtggtcaggtcaccgtcgagctgaagaaagtgagccgcttggccgctcctatggccaccgtaaccatagctcagtacttattgcctgtcatctcagtcatggtcgccggccacatcggcgagttggagctcgccggtgtcgcgcttgccacgtctttcacaaacgtttccggcttcagcataatgtttgggttagttggtgcattggaaactctttgtggccaagcctatggagcagaacaatacgaaaaaatcggaacctatacatactctgcaatggcttccaacataccaatttgtttcatcatatcaattctatggatttacatcgaaaagctcttgatcactctcgggcaagagcctgacatctctagagtcgctggctcctactcattgtggctcgtaccggctttgtttgcccatgctattttcttaccactgactcggtttctgctagcacaagggttggttatttccctgctatactctgccatgaccacccttttgttccatattgcggtttgctggactttggttttcgcgcttggtcttggaagcaatggagctgctattgctattagtttgtctttctggttttacgctgtgatactctcatgtcatgtgagatttttcagctcttgcgagaagactcgcggatttgtatcaaatgattttatgtctagtatcaagcagtacttccagtacggagtcccatccgctggattgatttgcttagaatggtggctgtttgagctactcatactctgctcaggtcttctcccaaacccaaaactcgagacatctgttctttcgatttgtcttacaataggaactttacactatgtgattccatctggagtcgcggcggctgtgagcacacgagtgtcaaacaaattgggagctggaaatcctcaagttgctagggtttccgtattggcagggctttgtctctggcttgtagagtcagctttctttagcacacttctcttcacctgccgaaacatcataggctacacattcagcaacagcaaagaagttgttgactatgttgctgacatatctcctttgctctgtctctccttcatcctcgacggattaacggcagttctaaatggagtggctaggggatgtgggtggcaacacattggagctttgatcaacgtggtggcttattatcttgtaggagctcctgttggagtttacttagctttcagtcgtgagtggaatggaaaaggactctggtgcggtgttatggttggatccgcggtgcaagccactttactggctatcgtcacagcctccatgaactggaaggaacaggctgagaaagcaaggaagagaataatctctactgaaaatggattggtttaaataaaggttgttcctaagagctatctcaaagtatttgcaagtcatgtgcaaaaaaacatgtaatgttattttgatgggttataatatttttttgtaaaacttttatccaggatttatacattttttcttgagttg

SEQ ID NO: 105158 - protein, 476 aa, Arabidopsis thaliana; identical to SEQ ID NO: 22024
  peptide (1)..(476): Ceres Seq. ID no. 13616590

SEQ ID NO: 105159 - protein, 439 aa, Arabidopsis thaliana; identical to SEQ ID NO: 22025
  peptide (1)..(439): Ceres Seq. ID no. 13616591

SEQ ID NO: 105160 - protein, 423 aa, Arabidopsis thaliana; identical to SEQ ID NO: 22026
  peptide (1)..(423): Ceres Seq. ID no. 13616592

SEQ ID NO: 105161 - DNA, 795 bp, Arabidopsis thaliana
  misc_feature (1)..(795): Ceres Seq. ID no. 13616605
  misc_feature (1)..(795): Ortholog of  Ceres SEQ ID NO 14306406 as cited in SEQ ID NO 1412
  misc_feature (1)..(795): Ortholog of  Ceres SEQ ID NO 14309488 as cited in SEQ ID NO 52755
  misc_feature (1)..(795): Ortholog of  Ceres SEQ ID NO 15178824 as cited in SEQ ID NO 0
acactcctaatccctcccatttttcaaaccactctctctttctctttctctaagtctttaacaatggcgcgccttctcttccgtcttctccaagaagccaattctacatctccggctgaagcttctccgcctttcaactccgacctcgtcctcatccttgcggttcttctttgtgcactgacatgtatcatcggcttaatagccgtctctcgatgcgcttggctccgccgtatcgcctcaagaaacagatcggatcaaactcatccaccgccggtagctgcagccaacaaaggattgaaaaagaaagtcctccggtcgttaccgaaactcacctactcgccggattctccgccggcggagaaactcgtggagtgtgctatctgtttaacggaattcgccgccggagacgagcttagggtgttgccgcagtgtggacatggtttccacgtatcgtgtatcgacacgtggcttggatcacactcttcttgtccttcttgccgtcaaatcttggtggttaccaggtgtcataaatgtggcgggttacccggtagctcaagttcaggacccgaacccgatacccgaatcaaacaacgtgaagatggtcctgataacttgccttgattcttttctttagacatatcccattttattttttataaagggaattcgattaaacaaagatataatattaattaaaaagtgttctttatcattttaaaggataatgttactctgtcatgtatatatttaattatctattgtaaatctatcatggaatggaaactttatgtcatt

SEQ ID NO: 105162 - protein, 206 aa, Arabidopsis thaliana
  peptide (1)..(206): Ceres Seq. ID no. 13616606
TLLIPPIFQTTLSFSFSKSLTMARLLFRLLQEANSTSPAEASPPFNSDLVLILAVLLCALTCIIGLIAVSRCAWLRRIASRNRSDQTHPPPVAAANKGLKKKVLRSLPKLTYSPDSPPAEKLVECAICLTEFAAGDELRVLPQCGHGFHVSCIDTWLGSHSSCPSCRQILVVTRCHKCGGLPGSSSSGPEPDTRIKQREDGPDNLP

SEQ ID NO: 105163 - protein, 185 aa, Arabidopsis thaliana; identical to SEQ ID NO: 20825
  peptide (1)..(185): Ceres Seq. ID no. 13616607

SEQ ID NO: 105164 - DNA, 1017 bp, Arabidopsis thaliana
  misc_feature (1)..(1017): Ceres Seq. ID no. 13616612
  misc_feature (1)..(1017): Ortholog of  Ceres SEQ ID NO 12617197 as cited in SEQ ID NO 63406
  misc_feature (1)..(1017): Ortholog of  Ceres SEQ ID NO 13597804 as cited in SEQ ID NO 64182
  misc_feature (1)..(1017): Ortholog of  Ceres SEQ ID NO 13598565 as cited in SEQ ID NO 65250
  misc_feature (1)..(1017): Ortholog of  Ceres SEQ ID NO 13598597 as cited in SEQ ID NO 65496
  misc_feature (1)..(1017): Ortholog of  Ceres SEQ ID NO 13596284 as cited in SEQ ID NO 68273
  misc_feature (1)..(1017): Ortholog of  Ceres SEQ ID NO 14308995 as cited in SEQ ID NO 0
aaagagcatcctattaagttgctaaagagagagacgccaatggctgtaaagcaaaaggtctgtgttactggtgcaggagggtttattgcttcatggctcgtcaagtttcttctctctcgtggctacactgtccatggaaccgttcgagatccttgtgatgaaaagaatgaccatttgaggaaactggataatgcttcaaaaaatctgaaacttttcaaggcagatttgtttgatgatgaaggtcttttctcagccattgatggttgctctggcgttttccatatcgcttctcctgtgccttttgaaggagttcctctcacagaggaagaactgattaaaccagctctcactggcaccaagaatgttctagaagcatgcacagaaaccaaagtgcagaaagttgtggttgtatcatcaatcgctgcagttgtttacaatccaaaatggcctcaagatgttgctaaggacgaggattgttggtcagacactcaataccttcactcacttgagggttattggcgttattactatcttgccaaaacattaacggaacgtgaagctttagagtggagtaagagaaactttgctgatgttgttacgctctgtccgtctgtcattataggccctaggcttcaatccacgcttaactctagtagtttgggacttctcaagttcataaaaggtggtataaagtccttgttgagcgatgaactgtatcttgtggatgtgcgtgatgttgcggatgcgcttttgttggtgtatgaaaatcgagaagcaacaggaagatacatatgtaattctcattcactttacactgattctcttatggagaagctcaagaatatgtatcctaaacgcaacttccctgaaagtttcacggaggtaaaagagaaggaagtgaggcctctaagtgcagagaagttgaaaaacttggggtggaagtttaggccattagaagaaaccattgatgattctgttgtgagctttgaagcagctggtgatcttccaaaggcataa

SEQ ID NO: 105165 - protein, 338 aa, Arabidopsis thaliana
  peptide (1)..(338): Ceres Seq. ID no. 13616613
KEHPIKLLKRETPMAVKQKVCVTGAGGFIASWLVKFLLSRGYTVHGTVRDPCDEKNDHLRKLDNASKNLKLFKADLFDDEGLFSAIDGCSGVFHIASPVPFEGVPLTEEELIKPALTGTKNVLEACTETKVQKVVVVSSIAAVVYNPKWPQDVAKDEDCWSDTQYLHSLEGYWRYYYLAKTLTEREALEWSKRNFADVVTLCPSVIIGPRLQSTLNSSSLGLLKFIKGGIKSLLSDELYLVDVRDVADALLLVYENREATGRYICNSHSLYTDSLMEKLKNMYPKRNFPESFTEVKEKEVRPLSAEKLKNLGWKFRPLEETIDDSVVSFEAAGDLPKA

SEQ ID NO: 105166 - protein, 325 aa, Arabidopsis thaliana
  peptide (1)..(325): Ceres Seq. ID no. 13616614
MAVKQKVCVTGAGGFIASWLVKFLLSRGYTVHGTVRDPCDEKNDHLRKLDNASKNLKLFKADLFDDEGLFSAIDGCSGVFHIASPVPFEGVPLTEEELIKPALTGTKNVLEACTETKVQKVVVVSSIAAVVYNPKWPQDVAKDEDCWSDTQYLHSLEGYWRYYYLAKTLTEREALEWSKRNFADVVTLCPSVIIGPRLQSTLNSSSLGLLKFIKGGIKSLLSDELYLVDVRDVADALLLVYENREATGRYICNSHSLYTDSLMEKLKNMYPKRNFPESFTEVKEKEVRPLSAEKLKNLGWKFRPLEETIDDSVVSFEAAGDLPKA

SEQ ID NO: 105167 - DNA, 1227 bp, Arabidopsis thaliana
  misc_feature (1)..(1227): Ceres Seq. ID no. 13616619
  misc_feature (1)..(1227): Ortholog of  Ceres SEQ ID NO 13639514 as cited in SEQ ID NO 55736
  misc_feature (1)..(1227): Ortholog of  Ceres SEQ ID NO 13662804 as cited in SEQ ID NO 65394
  misc_feature (1)..(1227): Ortholog of  Ceres SEQ ID NO 13656519 as cited in SEQ ID NO 69226
atgtgaattataaaacgtattgagtattatcgtgaccgacttcaaaaaacaagaaaaacctcaacttctctttttcagctatagccgccgcctcctcccactaaactcaaatcctctcatagtcttttcaatcaaatctgctcttcttcactgttgaagctggctatcaaaactcacaataactatgggaccgatgatgatgagagcagaagaagataactacaatctaaatcctccaccatggctaatcccaatgctaagagcaaactacttcatcccttgttcaatccacgccgcttccaacaaaagcgagtgcaacatgttctgtcttgactgttcttctgaggccttttgctcttactgtttgctcaatcacagaaaccatcgtgtcctccagatacggagatcatcgtaccacaacgttgtgagagtaaacgagattcagaagtacatagacatatcttgtgttcagacatatataatcaacagcgcaaggatcgttttcttgaacgaacgtcctcagccaagaatcggcaaaggagtcaccaatacttgtgaaatctgttgcagaagccttctcgattctttccgtttctgctctctcggttgcaaacttggaggaatgaagcgtgatccaagtctaaccttctctttgagagggaagcatggaagagagtacgaaggtgagtgggaatctgatgaagcgactacaccaactaagatacgcaagacatgtgctttcaaccgtctgatgagtggtctttccatctccaccgttaaatgtgattacttgtcaggagatcaaccgtcttcgagctccggtgatgagagcggttttaaactttctccggggacaccgccgatatataatcaccggaattcaagtagacggaagggcgtcccacaccgtgctcctttctaaaattaatactaacggaagctaattatatagtgtagattatagaaaatgtggttgttatgttgtaactaaatggttagtagtttttaaccttttgagctaggaatatacatattgtaagacatattacttacaggtattgtttggtttttctttttatagtacatatagaaattaggtatatactgtactcaaagggattgaaatatgttttcatatagtttttttgctgtaaatatacgtttgaaggaggtatgtttcttcaacttgtttgtatcgtatactgtgtactatcttcacaataaaat

SEQ ID NO: 105168 - protein, 245 aa, Arabidopsis thaliana
  peptide (1)..(245): Ceres Seq. ID no. 13616620
MGPMMMRAEEDNYNLNPPPWLIPMLRANYFIPCSIHAASNKSECNMFCLDCSSEAFCSYCLLNHRNHRVLQIRRSSYHNVVRVNEIQKYIDISCVQTYIINSARIVFLNERPQPRIGKGVTNTCEICCRSLLDSFRFCSLGCKLGGMKRDPSLTFSLRGKHGREYEGEWESDEATTPTKIRKTCAFNRLMSGLSISTVKCDYLSGDQPSSSSGDESGFKLSPGTPPIYNHRNSSRRKGVPHRAPF

SEQ ID NO: 105169 - protein, 242 aa, Arabidopsis thaliana
  peptide (1)..(242): Ceres Seq. ID no. 13616621
MMMRAEEDNYNLNPPPWLIPMLRANYFIPCSIHAASNKSECNMFCLDCSSEAFCSYCLLNHRNHRVLQIRRSSYHNVVRVNEIQKYIDISCVQTYIINSARIVFLNERPQPRIGKGVTNTCEICCRSLLDSFRFCSLGCKLGGMKRDPSLTFSLRGKHGREYEGEWESDEATTPTKIRKTCAFNRLMSGLSISTVKCDYLSGDQPSSSSGDESGFKLSPGTPPIYNHRNSSRRKGVPHRAPF

SEQ ID NO: 105170 - protein, 241 aa, Arabidopsis thaliana
  peptide (1)..(241): Ceres Seq. ID no. 13616622
MMRAEEDNYNLNPPPWLIPMLRANYFIPCSIHAASNKSECNMFCLDCSSEAFCSYCLLNHRNHRVLQIRRSSYHNVVRVNEIQKYIDISCVQTYIINSARIVFLNERPQPRIGKGVTNTCEICCRSLLDSFRFCSLGCKLGGMKRDPSLTFSLRGKHGREYEGEWESDEATTPTKIRKTCAFNRLMSGLSISTVKCDYLSGDQPSSSSGDESGFKLSPGTPPIYNHRNSSRRKGVPHRAPF

SEQ ID NO: 105171 - DNA, 1867 bp, Arabidopsis thaliana
  misc_feature (1)..(1867): Ceres Seq. ID no. 13616635
  misc_feature (1)..(1867): Ortholog of  Ceres SEQ ID NO 15168366 as cited in SEQ ID NO 60199
acaaccttcgtcttctcttgaaactctcctcatctctctcaagaaagattcaagttcgagtcttagctatgtctggaaactcagaaggactgttagagagctcaggcggcggcgtgggaggttccgtcgaggaggaaaaagatatgaagatggaggaaaccggtgaaggagccggcagcggaggaaaccggtggccaagaccagagactttagctctattgagaatacgttcagagatggataaagcttttcgtgactctactctcaaagctcccttatgggaagaaatttccaggaaaatgatggagcttggttacaagagaagttcaaagaaatgcaaggagaagttcgagaacgtgtacaagtaccacaaacgtaccaaagaaggtcgtaccgggaaatccgaaggcaaaacttaccggtttttcgaagagttagaagctttcgagactctcagttcctatcaacctgaacctgagtcgcaacccgcgaaatcttctgcagtgatcacgaacgcgcccgcaacctcttccttgataccatggattagctctagcaatccatcaaccgaaaaaagttcttcaccgttgaaacatcatcatcaggttagtgtacaacccatcaccacaaaccctaccttcctcgccaagcaaccatcttccacgacgccttttcctttttatagcagcaacaatactactactgttagccagccgccaatttcaaatgacttgatgaacaatgtttcatcgctgaatcttttctcgagctcaacttcttcatctactgcatctgacgaggaagaagatcatcatcaggttaagagctcgagaaagaagaggaagtattggaaagggttgtttacgaagttgacaaaagagttaatggagaaacaagagaagatgcaaaaaaggttcttggaaacactggagtatcgtgagaaagagagaatctcaagagaagaagcttggagggtccaagagatagggagaatcaacagagaacacgaaacattaatccatgagaggtccaatgctgcagctaaagacgctgcaatcatatccttcttacacaaaatctcaggaggacaaccacaacaaccgcaacaacataatcataaaccatcacaaaggaaacaatatcaaagcgatcattcaataacgtttgagagtaaagagccgagggcggttctattggatacaacaataaagatggggaattacgataacaatcattcggtgtctcctagttcttcaagatggcctaaaaccgaggtcgaggccttgataaggataagaaagaatcttgaagctaactatcaagaaaacggtactaagggaccattatgggaagagatctctgcagggatgagaagattgggatacaatagaagcgcgaaacgctgcaaagagaagtgggaaaacatcaacaagtactttaagaaagtcaaagaaagcaacaagaaacgtccccttgattccaagacttgcccttattttcaccagctcgaagctttgtacaacgagaggaacaaaagtggggcaatgccattgccattgcctctaatggtgactccacagagacagttgcttctctcgcaagaaacccagaccgagtttgagactgatcagagggaaaaagttggtgataaagaagatgaagaagaaggagagagtgaagaagatgaatacgatgaagaagaagagggagaaggagacaatgagacaagtgagttcgagattgtgttgaacaaaacatcttcacctatggacattaacaataatcttttcacctaagtggttttataatcattttattatatacactttcctgtaaaatggggttgaaggaaaaaaaaaaagcatat

SEQ ID NO: 105172 - protein, 597 aa, Arabidopsis thaliana; identical to SEQ ID NO: 26626
  peptide (1)..(597): Ceres Seq. ID no. 13616636

SEQ ID NO: 105173 - protein, 575 aa, Arabidopsis thaliana; identical to SEQ ID NO: 26627
  peptide (1)..(575): Ceres Seq. ID no. 13616637

SEQ ID NO: 105174 - protein, 550 aa, Arabidopsis thaliana; identical to SEQ ID NO: 26628
  peptide (1)..(550): Ceres Seq. ID no. 13616638

SEQ ID NO: 105175 - DNA, 851 bp, Arabidopsis thaliana
  misc_feature (1)..(851): Ceres Seq. ID no. 13616643
  misc_feature (1)..(851): Ortholog of  Ceres SEQ ID NO 15171426 as cited in SEQ ID NO 51543
  misc_feature (1)..(851): Ortholog of  Ceres SEQ ID NO 14311780 as cited in SEQ ID NO 59241
  misc_feature (1)..(851): Ortholog of  Ceres SEQ ID NO 13584630 as cited in SEQ ID NO 65282
agatttgagaaaacttttgatttcgagagtgcttcggagcagaagaacgagcaaagctagggtttccatctatcaaatccagctacaatcgaacctattcatcgaaattagggttttttttttggtcccttaatttttcccttctagtagcttctgatccttcgatttccatggcggatgggtactggaaccagcagcgacagcaacatcatcctcctggtggtcctatgaaacgtccccgttccgatttcgaagctccatcatcaacaatgactatagggcacggtggtggttattatccgcgagatgaggatctcgatgttcccgatactagaactatcggttcagcttacgatcgctatctccagagcgtgcaatcaggagaaggtggttctgtttccatgggaagatcaggaggaggaggaggaggaggaggaggtaacgttcaaaccatagatgattttatgttgagacgtggtggagttctccctttagaccatggtccaaatggtcacaccattggttttgatcccccagaacctgttggtaggcgtaacctaccttcagatgcatccaacactttatatgttgaaggacttccttctaattgctctaggagggaagtagctcgatacagagaagtgagacttgtgaccaaagactccaaacatcggaacggagatcctattgttctttgctttgttgattttacaaaccctgcctgtgctgcgactgctctgagcgccttacaaggctatcgaatggacgaaaacgagtctgattccaagttcctgcggctccagttttctaggaaaccaggttcaagaccaggacaaagaggaagaaggtga

SEQ ID NO: 105176 - protein, 226 aa, Arabidopsis thaliana
  peptide (1)..(226): Ceres Seq. ID no. 13616644
MADGYWNQQRQQHHPPGGPMKRPRSDFEAPSSTMTIGHGGGYYPRDEDLDVPDTRTIGSAYDRYLQSVQSGEGGSVSMGRSGGGGGGGGGNVQTIDDFMLRRGGVLPLDHGPNGHTIGFDPPEPVGRRNLPSDASNTLYVEGLPSNCSRREVARYREVRLVTKDSKHRNGDPIVLCFVDFTNPACAATALSALQGYRMDENESDSKFLRLQFSRKPGSRPGQRGRR

SEQ ID NO: 105177 - protein, 207 aa, Arabidopsis thaliana
  peptide (1)..(207): Ceres Seq. ID no. 13616645
MKRPRSDFEAPSSTMTIGHGGGYYPRDEDLDVPDTRTIGSAYDRYLQSVQSGEGGSVSMGRSGGGGGGGGGNVQTIDDFMLRRGGVLPLDHGPNGHTIGFDPPEPVGRRNLPSDASNTLYVEGLPSNCSRREVARYREVRLVTKDSKHRNGDPIVLCFVDFTNPACAATALSALQGYRMDENESDSKFLRLQFSRKPGSRPGQRGRR

SEQ ID NO: 105178 - protein, 193 aa, Arabidopsis thaliana
  peptide (1)..(193): Ceres Seq. ID no. 13616646
MTIGHGGGYYPRDEDLDVPDTRTIGSAYDRYLQSVQSGEGGSVSMGRSGGGGGGGGGNVQTIDDFMLRRGGVLPLDHGPNGHTIGFDPPEPVGRRNLPSDASNTLYVEGLPSNCSRREVARYREVRLVTKDSKHRNGDPIVLCFVDFTNPACAATALSALQGYRMDENESDSKFLRLQFSRKPGSRPGQRGRR

SEQ ID NO: 105179 - DNA, 1170 bp, Arabidopsis thaliana
  misc_feature (1)..(1170): Ceres Seq. ID no. 13616647
  misc_feature (1)..(1170): Ortholog of  Ceres SEQ ID NO 13654583 as cited in SEQ ID NO 68599
agaagaaaaaacttgttcgaggcttcgaagaatgtcgatgttaatggctgtcaaaacaacttcactctgttgtagcagcttaaaccttacagcttcaccaacattccgacggaacccacgcgcggcgagattggtgaatccgacagcgagaatccaaacacgttttcatcgcctgattgaagaacaaggcattgtgcttatgcctggatgctacgatgccttatccgcggctattgtgcagcaaaccggattctccgctggttttatatccggttacgccttatccgcttctctcctgggaaaacccgatttcggtttgctaacaccaccggagatggctgcgacggcaaggtcggtgtgtgcgtcagctcctaatatacccatcattgcagatgctgataccggtggaggaaatgcgctaaacattcaaagaaccgtaaaggatttgattgcagctggtgctgctggttgcttccttgaggaccaagcatggccaaagaagtgtggtcatatgcgtggtaaacaggtgataccagcagaagaacatgccgcaaaaatagcatcagctcgagatgctattggagactctgacttcttccttgtcgcaagaacagacgtgcgtgctacttctgcaaaatcagggcttgaagacgccattgcacgtgttaatctatacatggaggcaggagctgatgcttcctttgtagaggcaccaagagacgacgatgagctcaaggaaattggaaaacgcacaaaaggttatagagtttgcaacatgattgaaggaggagtcacaccattacacacgcctgatgagcttaaagaaatgggattccacttgatagttcacccccttaccgcactctatgcatcgactcgagctctggtcgatgttctcaagactcttaaagaaaacggtagcactcgagatcacttgcaaaagatggctacttttgaggaattcaatagtttggtggatttagattcgtggtttgagcttgaagctcgctattcaaacctcagaaacgctcttgggacaaccaaatcatgaagatagggacatttttttttttttttggaactctctcaagcaatggtctcatcaataatgtaactattgccgttgttagaaaaacgtatttaagtatattaatgggccttaatggtgtt

SEQ ID NO: 105180 - protein, 349 aa, Arabidopsis thaliana; identical to SEQ ID NO: 28907
  peptide (1)..(349): Ceres Seq. ID no. 13616648

SEQ ID NO: 105181 - protein, 339 aa, Arabidopsis thaliana; identical to SEQ ID NO: 28908
  peptide (1)..(339): Ceres Seq. ID no. 13616649

SEQ ID NO: 105182 - protein, 337 aa, Arabidopsis thaliana; identical to SEQ ID NO: 28909
  peptide (1)..(337): Ceres Seq. ID no. 13616650

SEQ ID NO: 105183 - DNA, 1397 bp, Arabidopsis thaliana
  misc_feature (1)..(1397): Ceres Seq. ID no. 13616651
  misc_feature (1)..(1397): Ortholog of  Ceres SEQ ID NO 15177750 as cited in SEQ ID NO 57772
  misc_feature (1)..(1397): Ortholog of  Ceres SEQ ID NO 13596581 as cited in SEQ ID NO 62420
  misc_feature (1)..(1397): Ortholog of  Ceres SEQ ID NO 13591273 as cited in SEQ ID NO 65904
  misc_feature (1)..(1397): Ortholog of  Ceres SEQ ID NO 13623086 as cited in SEQ ID NO 0
acatcacaatcacacaaaactaacaaaagatcaaaagcaagttcttcactgttgataatgtctaccaccggacagattattcgatgcaaagctgctgtggcatgggaagccggaaagccactggtgatcgaggaagtggaggttgctccaccgcagaaacacgaagttcgtatcaagattctcttcacttctctctgtcacaccgatgtttacttctgggaagctaagggacaaacaccgttgtttccacgtatcttcggccatgaagctggagggattgttgagagtgttggagaaggagtgactgatcttcagccaggagatcatgtgttgccgatctttaccggagaatgtggggagtgtcgtcattgccactcggaggaatcaaacatgtgtgatcttctcaggatcaacaccgagcgaggagggatgattcacgatggtgaatcaagattctccattaatggcaaaccaatttaccatttccttgggacttccacgttcagtgagtacacagtggttcactctggtcaggttgctaagatcaatccggatgctcctcttgacaaggtctgtattgtcagttgtggtttgtctactgggttaggagcaactttgaatgtggctaaacccaagaaaggtcaaagtgttgccatttttggtcttggtgctgttggtttaggcgctgcagaaggtgctagaatcgctggtgcttctaggatcatcggtgttgattttaactctaaaagattcgaccaagctaaggaattcggtgtgaccgagtgtgtgaacccgaaagaccatgacaagccaattcaacaggtgatcgctgagatgacggatggtggggtggacaggagtgtggaatgcaccggaagcgttcaggccatgattcaagcatttgaatgtgtccacgatggctggggtgttgcagtgctggtgggtgtgccaagcaaagacgatgccttcaagactcatccgatgaatttcttgaatgagaggactcttaagggtactttcttcgggaactacaaacccaaaactgacattcccggggttgtggaaaagtacatgaacaaggagctggagcttgagaaattcatcactcacacagtgccattctcggaaatcaacaaggcctttgattacatgctgaagggagagagtattcgttgcatcatcaccatgggtgcttgaagccattctctcgcagatgatgttcactttgtgttttacttcctttatgcattcacagcaataaaagaaagaaatctccatcgcttttggttttcttctctgtcttaagttagtcgttttcgtgtctaatctattacttatcattgtaatagactcttcttctattgagatttgaatataaactaaaacacattccattt

SEQ ID NO: 105184 - protein, 398 aa, Arabidopsis thaliana; identical to SEQ ID NO: 26842
  peptide (1)..(398): Ceres Seq. ID no. 13616652

SEQ ID NO: 105185 - protein, 379 aa, Arabidopsis thaliana; identical to SEQ ID NO: 26843
  peptide (1)..(379): Ceres Seq. ID no. 13616653

SEQ ID NO: 105186 - protein, 268 aa, Arabidopsis thaliana; identical to SEQ ID NO: 26844
  peptide (1)..(268): Ceres Seq. ID no. 13616654

SEQ ID NO: 105187 - DNA, 973 bp, Arabidopsis thaliana
  misc_feature (1)..(973): Ceres Seq. ID no. 13616661
  misc_feature (1)..(973): Ortholog of  Ceres SEQ ID NO 13595166 as cited in SEQ ID NO 56250
  misc_feature (1)..(973): Ortholog of  Ceres SEQ ID NO 13599417 as cited in SEQ ID NO 0
gagatcccatttcttttgttggcttacttctctcgaatttacgcaggaagatcattagcagagaattctcatctgattcagtccatggctgccacggctcttttccgatcgattcgccgacgcgacgtcgtctccgcgcctctttccgtttacaaatcccttgctggtaatgctcaaccttcctggggtagttcatacattggtcagaactatgcaagtttctccagagctttcgggtcaaaacctgttgtgaatgacattcttggtactggtttgggcactaacaatgccattagagaggagagagagaagtcaaaatctactgaagctgcaattgttggtgctcaattgactcgatctttccgtgctcttgatgtgggaacatcgaaacgattgttttctacaatctcaggggatataaagacaacacaggaggaaccaaaaatcaaaagctttcgccctttatctcctcacctttctgtttaccagcctcagatgaactccatgctatcgattttcaacagaatctcaggggtttacttgaccggtgtcactttcgctggctaccttctctacctgaagatgggtatgatctgcctcacctacccgagtttctaccaagtcctttaccatacacaacagcaacttccagtcatcacctcggttactgcattagccgctatttatcatactatcaagagtactcactcactcttgacccattaaaaacctttaccaaagctctttcgatgaagccgccaaagtctccagtaagagtttctttgagatgattaataaggagacaagaaaacatttgttaaactctgtcttgaaaaggtaaagatttagcacctgtttctttggattcgaggcttttttgggggtatgtttgttgcttttctttgttctcagaccttttttgaatgatgtaataaatgtttaccaaagttctgttgctacgttactctttttg

SEQ ID NO: 105188 - protein, 241 aa, Arabidopsis thaliana; identical to SEQ ID NO: 37868
  peptide (1)..(241): Ceres Seq. ID no. 13616662

SEQ ID NO: 105189 - protein, 213 aa, Arabidopsis thaliana; identical to SEQ ID NO: 37869
  peptide (1)..(213): Ceres Seq. ID no. 13616663

SEQ ID NO: 105190 - DNA, 1167 bp, Arabidopsis thaliana
  misc_feature (1)..(1167): Ceres Seq. ID no. 13616664
  misc_feature (1)..(1167): Ortholog of  Ceres SEQ ID NO 15170881 as cited in SEQ ID NO 54654
aatttcagttctagggttttaatttgatacgaggtcagcgaatccggcgacgaatatccgccactagtaactctagctcaggtaaggatttgtgtccatggcagctttgcaaacgcttcgtgaatggatcggtatccagcagttcccacctgctactcaatctaaattgctcgagatccttgggaagtataaagaagaggatgtgagctcgctaacggtccttgtaatggggaaaggtggtgttggaaagtcatcaactgtgaattcagttataggcgagaaagctgctgcagttagtactttccagtctgaaggactgaggcctaccttggtctctcgcacaagatcgggatttacattgaatatcatcgacactcctggtcttattgagggaggatatgtgaatgatcaagccatcaacattataaaacgatttctcctcaacatgactatagatgtgctactatacgtagaccgtttggatgtgtaccgggtggatgaccttgataggcaagttgtcggtgctataactgatgcatttggtaaagagatatggaagaagtctgctcttgttctcacccatgctcagttctctccaccagacgggttaaattataaccactttgtctccaaaagatctaatgctcttctaaaagttatccagacaggcgctcaactgaagaaacaggatttgcagggtttttctattcctgtcattcttgttgagaacagcggaagatgccataagaacgaaagcgatgaaaagattcttccatgcgggactagttggattcccaatctgttcaacaaaatcacagagatctcttttaatggcaacaaggcgattcatgttgacaagaaactggtcgaagggccaaacccaaacgaaagaggaaaaaaactgattcctttaatgtttgcattccaatacttgctggtgatgaagccattggttcgagcaatcaagtccgatgtttcgagagagagtaaaccggcgtgggagctgcgagactccggtttagcaagtcgaaggtcttgagttgtggacacgagttttgtttggtttgtttgtctatctgagagattgttctgtagttgaaattgtgatacaactcgagaaatgtggttcacagataattactgtcgcaaagttctctcatcttaatt

SEQ ID NO: 105191 - protein, 313 aa, Arabidopsis thaliana; identical to SEQ ID NO: 98100
  peptide (1)..(313): Ceres Seq. ID no. 13616665

SEQ ID NO: 105192 - protein, 270 aa, Arabidopsis thaliana; identical to SEQ ID NO: 98101
  peptide (1)..(270): Ceres Seq. ID no. 13616666

SEQ ID NO: 105193 - protein, 197 aa, Arabidopsis thaliana; identical to SEQ ID NO: 27602
  peptide (1)..(197): Ceres Seq. ID no. 13616667

SEQ ID NO: 105194 - DNA, 1299 bp, Arabidopsis thaliana
  misc_feature (1)..(1299): Ceres Seq. ID no. 13616684
  misc_feature (1)..(1299): Ortholog of  Ceres SEQ ID NO 13648449 as cited in SEQ ID NO 171
  misc_feature (1)..(1299): Ortholog of  Ceres SEQ ID NO 15176325 as cited in SEQ ID NO 52802
  misc_feature (1)..(1299): Ortholog of  Ceres SEQ ID NO 15176313 as cited in SEQ ID NO 52831
aaagtttggatatttattgaaccgagtggtttctttcgttgactcgcccaccatggaagctgaaagtacccaagatatcatcatcgtcggagctggaatctccggccttgccactgcacttgggctccacaggcttgggatcagaagcatagtgctggaatcttctgagcagctgagagcaacaggatttgcactttcattatattttaatgcttggaaggccatggaagctctcggtatttctcagcatattcgcagtctcggtgatcgctttcaaggatgggtggtcagacccatttctgcaggagatcctcctaaagaaatgttatttccagaatctgaagaatatgaggttcgatgcgtacagaggaagctcttgttagacgctctagcgggcgaattgcctcaagggaccatacggttctcatctaagcttgttcacatcgaattgtccggacactacaagatggttcatctctccgacgggactatacttaaaaccaaggttttggtagggtgtgatggagtgaagtcagtggttggtaagtggctaggcttcaagaatccggttaaaacttcccgtgtagcaatccgcgggatcgctcatttccagacaggccacgaattagggagaaggttctttcagttttatggcaacggtgttcgttccggtttcatctcatgtgaccaaaacactgtctactggttcctaacccacacctctactgatttagataagaaaaatcatcagaagatcaaacagtttgtgctgaccaagatcaaagacttgcctgacaacatcaagagtatcctggagaccactgatcttgatagtttggtgatgaatccactcatgtatcgacctccctgggaacttctttgggcaaacattgcaaaagacaacgtatgtgttgcaggggatgcacttcacccaatgactcctgatattggacaaggtggttgctcggcgatggaggacggagttatcctcgctcgttgtctcggtgaagcaatgaaagctaagaatatgaaaggtgaaacagaagatgagaacgagagttataggcggattgaagatggtttgaagaagtatgcaggatcgaggaaatggagaagcattgatcttataactacatcatatacagtaggtttcatacagcagagcagaggcaagtggatgaccctgtttagagacaagttcatgtcctctttcctttcttggttgcgtgtgaaaaagtctcatttcaactgtggaagacttagccatgaatgattctcaatgagcaagcacaatgttag

SEQ ID NO: 105195 - protein, 423 aa, Arabidopsis thaliana
  peptide (1)..(423): Ceres Seq. ID no. 13616685
KFGYLLNRVVSFVDSPTMEAESTQDIIIVGAGISGLATALGLHRLGIRSIVLESSEQLRATGFALSLYFNAWKAMEALGISQHIRSLGDRFQGWVVRPISAGDPPKEMLFPESEEYEVRCVQRKLLLDALAGELPQGTIRFSSKLVHIELSGHYKMVHLSDGTILKTKVLVGCDGVKSVVGKWLGFKNPVKTSRVAIRGIAHFQTGHELGRRFFQFYGNGVRSGFISCDQNTVYWFLTHTSTDLDKKNHQKIKQFVLTKIKDLPDNIKSILETTDLDSLVMNPLMYRPPWELLWANIAKDNVCVAGDALHPMTPDIGQGGCSAMEDGVILARCLGEAMKAKNMKGETEDENESYRRIEDGLKKYAGSRKWRSIDLITTSYTVGFIQQSRGKWMTLFRDKFMSSFLSWLRVKKSHFNCGRLSHE

SEQ ID NO: 105196 - protein, 406 aa, Arabidopsis thaliana
  peptide (1)..(406): Ceres Seq. ID no. 13616686
MEAESTQDIIIVGAGISGLATALGLHRLGIRSIVLESSEQLRATGFALSLYFNAWKAMEALGISQHIRSLGDRFQGWVVRPISAGDPPKEMLFPESEEYEVRCVQRKLLLDALAGELPQGTIRFSSKLVHIELSGHYKMVHLSDGTILKTKVLVGCDGVKSVVGKWLGFKNPVKTSRVAIRGIAHFQTGHELGRRFFQFYGNGVRSGFISCDQNTVYWFLTHTSTDLDKKNHQKIKQFVLTKIKDLPDNIKSILETTDLDSLVMNPLMYRPPWELLWANIAKDNVCVAGDALHPMTPDIGQGGCSAMEDGVILARCLGEAMKAKNMKGETEDENESYRRIEDGLKKYAGSRKWRSIDLITTSYTVGFIQQSRGKWMTLFRDKFMSSFLSWLRVKKSHFNCGRLSHE

SEQ ID NO: 105197 - protein, 349 aa, Arabidopsis thaliana
  peptide (1)..(349): Ceres Seq. ID no. 13616687
MEALGISQHIRSLGDRFQGWVVRPISAGDPPKEMLFPESEEYEVRCVQRKLLLDALAGELPQGTIRFSSKLVHIELSGHYKMVHLSDGTILKTKVLVGCDGVKSVVGKWLGFKNPVKTSRVAIRGIAHFQTGHELGRRFFQFYGNGVRSGFISCDQNTVYWFLTHTSTDLDKKNHQKIKQFVLTKIKDLPDNIKSILETTDLDSLVMNPLMYRPPWELLWANIAKDNVCVAGDALHPMTPDIGQGGCSAMEDGVILARCLGEAMKAKNMKGETEDENESYRRIEDGLKKYAGSRKWRSIDLITTSYTVGFIQQSRGKWMTLFRDKFMSSFLSWLRVKKSHFNCGRLSHE

SEQ ID NO: 105198 - DNA, 2010 bp, Arabidopsis thaliana
  misc_feature (1)..(2010): Ceres Seq. ID no. 13616688
  misc_feature (1)..(2010): Ortholog of  Ceres SEQ ID NO 14314144 as cited in SEQ ID NO 54403
  misc_feature (1)..(2010): Ortholog of  Ceres SEQ ID NO 15225015 as cited in SEQ ID NO 0
atgccgtcattgcaaggttactgcaaggttaaagcgggaagtgagcaacgagaggcagcggcggccgtcatggattcatcggcgaacataaacaaagctctaacggagacgcgtttctccgacctcgaacctccactctccggagatatcattgaggctcttaatcagtctgatttcgagttctgcactccggttcaagccgcgacgatccctttactctgtagttacaaggatgttgccgtcgacgctgccactggttctggaaaaaccctagctttcgtcgttcccctcgtagaaatcctccgtcgatccacctcattccctccgaagcctcaccaggtcatgggggtgattatatcgccaacgagagagctatcaacgcagatatataatgtcgcacaaccatttgtttcgactttggcaaatgtgaactctgtgttgcttgttggaggccgagaggtgaaagctgacatgaagattattgaagaagaaggatgcaatgtcttgattggtacacctggaagactttctgatattatggaacgaatggagattctggattttcgaaatcttgagattcttattctagatgaggcagataggcttttggagatggggttccaaaggcaggtgaattacattatctcacgcttgccaaagcagaggaggactggcctcttttcagctacacaaacagagggcgttgaagagctcgccaaggctgggcttaggaaccctgtgagagttgaagttcgagctaagtcgaagtcggaatcatcccagcaattgacaaactcgaaaaccccttctggtcttcatcttgagtatatggaatgcgaagcagataaaaaatcatcacaactagttgatctcctcatcaagaacagtgataaaaagcttatagtattcttcatgacctgtgcttctgttgactactggggactcgtactttcaaaaattcctgccctgaagtccatatctttaattcctatccatggggatatgaagcagaatgcaagagacaaggcattagcttcgtttactaaagcatcaagtggtgcccttctgtgcacagacgttgctgcacgtggacttgatattccaggcattgattatgttgttcagtatgatcccccacaagacccaaatatgttcaaccacagggccggcagaactgcaagattaggaagacaagggagggccattgtgtttttactgcccaaggaagaagcctatgtagagtttatgcgcataagaagagtccctttggaagagagaaaatgctctgaggacgcatccgatgtcatcccgattatacgttcagctgccatgaaggaccgagcagtgatggagaagggattaaaggcatttgtttcctttgtccgtgcttataaggagcatcactgctctttcattttcagatggaaagaccttgagattggaaagttagccatgggatatggcctcttgtatcttccttcaatgtctgaagttaaacaacacagactttccagtgagggtttcacaccagttgaaggtgtcaagtttgaagaaataaaattcaaggacaaatatcgggagaaacaaagacagcaaaacttacaagtaaggaaagagaaacggcaagaagagaaaaaagagaaaggcaagagaaaaagggttgatgcttctgctagtaatgatcctaagaaagcgtcgagaaagttaacggggaaacaaagacaaactattcaaactgctgaagatgaagaagtgatggatcgagattataagttgatgataaaagtaaagaaagggttaattaaagaagatgaatatgaaagacttacaggagatgatgatttattctgatgagaagaaacaaaacctgcatgctgagattggactaagcttagtgtctttctactctcatatcatatgtgattctgttaatttttttttttttttttgggtgagaattaatatcggatcatgttatgtcctttttcgttctacgagtctcacttttat

SEQ ID NO: 105199 - protein, 616 aa, Arabidopsis thaliana
  peptide (1)..(616): Ceres Seq. ID no. 13616689
MPSLQGYCKVKAGSEQREAAAAVMDSSANINKALTETRFSDLEPPLSGDIIEALNQSDFEFCTPVQAATIPLLCSYKDVAVDAATGSGKTLAFVVPLVEILRRSTSFPPKPHQVMGVIISPTRELSTQIYNVAQPFVSTLANVNSVLLVGGREVKADMKIIEEEGCNVLIGTPGRLSDIMERMEILDFRNLEILILDEADRLLEMGFQRQVNYIISRLPKQRRTGLFSATQTEGVEELAKAGLRNPVRVEVRAKSKSESSQQLTNSKTPSGLHLEYMECEADKKSSQLVDLLIKNSDKKLIVFFMTCASVDYWGLVLSKIPALKSISLIPIHGDMKQNARDKALASFTKASSGALLCTDVAARGLDIPGIDYVVQYDPPQDPNMFNHRAGRTARLGRQGRAIVFLLPKEEAYVEFMRIRRVPLEERKCSEDASDVIPIIRSAAMKDRAVMEKGLKAFVSFVRAYKEHHCSFIFRWKDLEIGKLAMGYGLLYLPSMSEVKQHRLSSEGFTPVEGVKFEEIKFKDKYREKQRQQNLQVRKEKRQEEKKEKGKRKRVDASASNDPKKASRKLTGKQRQTIQTAEDEEVMDRDYKLMIKVKKGLIKEDEYERLTGDDDLF

SEQ ID NO: 105200 - protein, 593 aa, Arabidopsis thaliana; identical to SEQ ID NO: 40741
  peptide (1)..(593): Ceres Seq. ID no. 13616690

SEQ ID NO: 105201 - protein, 502 aa, Arabidopsis thaliana; identical to SEQ ID NO: 40742
  peptide (1)..(502): Ceres Seq. ID no. 13616691

SEQ ID NO: 105202 - DNA, 1384 bp, Arabidopsis thaliana
  misc_feature (1)..(1384): Ceres Seq. ID no. 13616696
  misc_feature (1)..(1384): Ortholog of  Ceres SEQ ID NO 12636774 as cited in SEQ ID NO 372
  misc_feature (1)..(1384): Ortholog of  Ceres SEQ ID NO 14310917 as cited in SEQ ID NO 53231
  misc_feature (1)..(1384): Ortholog of  Ceres SEQ ID NO 15175492 as cited in SEQ ID NO 56277
  misc_feature (1)..(1384): Ortholog of  Ceres SEQ ID NO 13582350 as cited in SEQ ID NO 56734
  misc_feature (1)..(1384): Ortholog of  Ceres SEQ ID NO 12476493 as cited in SEQ ID NO 58163
  misc_feature (1)..(1384): Ortholog of  Ceres SEQ ID NO 14310807 as cited in SEQ ID NO 58696
  misc_feature (1)..(1384): Ortholog of  Ceres SEQ ID NO 12578315 as cited in SEQ ID NO 62451
  misc_feature (1)..(1384): Ortholog of  Ceres SEQ ID NO 12615466 as cited in SEQ ID NO 62761
  misc_feature (1)..(1384): Ortholog of  Ceres SEQ ID NO 13597295 as cited in SEQ ID NO 63743
  misc_feature (1)..(1384): Ortholog of  Ceres SEQ ID NO 12617090 as cited in SEQ ID NO 64005
  misc_feature (1)..(1384): Ortholog of  Ceres SEQ ID NO 15226458 as cited in SEQ ID NO 64042
  misc_feature (1)..(1384): Ortholog of  Ceres SEQ ID NO 13597439 as cited in SEQ ID NO 64081
  misc_feature (1)..(1384): Ortholog of  Ceres SEQ ID NO 13597233 as cited in SEQ ID NO 64370
  misc_feature (1)..(1384): Ortholog of  Ceres SEQ ID NO 13598327 as cited in SEQ ID NO 68040
agccgatttctagattctcctccaccaccattttacccttcttttaaattccttccttcaatcaaaattagaattatttctcaaacctcttctttatatactaaaacgtctcacatgaacaagaagaataaatagaaacaaagaagatgaacaagaacaagattgatgttaagatcgagacgaagaaaggatcgatggatgagtggcctgagccaatcgtccgagtccagtccttagccgagagcaacctctcctctctccccgaccgttacatcaaaccagcgtctctacgccccaccacgaccgaagacgctcctaccgcgaccaacatcccaatcatagaccttgaaggactcttctcggaagaagggttgtctgatgacgtcatcatggctcggatatcggaggcttgccgtgggtgggggttcttccaggtggtgaaccacggggtcaaaccggagctgatggacgcggctagggagaattggagagagtttttccatatgccggttaatgccaaagagacttactcaaactcaccaagaacctacgaaggctatggaagtagactaggtgttgagaaaggagcaagtcttgattggagtgattattactttctccatcttcttcctcatcatttgaaagacttcaacaagtggccttcttttcctcccaccataagagaagtgatcgatgaatacggcgaagagctagtgaagctaagtgggagaattatgagggtattatcgacaaacttgggactaaaagaggataagtttcaagaagcatttggaggtgaaaacattggggcgtgtttgagggttaattattacccaaaatgccctcgaccggagctggctcttggtctctctccacactccgatcctggcggtatgaccattctcttaccggacgatcaagtcttcggtctccaggttcgtaaagatgacacgtggatcaccgtcaagcctcatccccatgctttcatcgtcaatattggtgatcaaatacagatactaagcaactcaacatacaagagtgtggagcatagagtgatagtgaactcggacaaggagagagtttcacttgccttcttctacaatcctaaaagcgatattccgatccaaccattacaagaacttgtatcaactcataatcctcctttataccctcccatgacctttgatcagtatagactctttatcagaactcaaggtccacaaggcaaatcccatgttgaatctcatatttctcctcgttgattgtttttcttttatttcttcccttaaagaaaaattaatgttttgttatttttatgatattacgtctgacttgtatatgtgtacaatcatttatattttgaattttcaaaggatgatttgcc

SEQ ID NO: 105203 - protein, 371 aa, Arabidopsis thaliana; identical to SEQ ID NO: 29095
  peptide (1)..(371): Ceres Seq. ID no. 13616697

SEQ ID NO: 105204 - protein, 355 aa, Arabidopsis thaliana; identical to SEQ ID NO: 29096
  peptide (1)..(355): Ceres Seq. ID no. 13616698

SEQ ID NO: 105205 - protein, 290 aa, Arabidopsis thaliana; identical to SEQ ID NO: 29097
  peptide (1)..(290): Ceres Seq. ID no. 13616699

SEQ ID NO: 105206 - DNA, 1702 bp, Arabidopsis thaliana
  misc_feature (1)..(1702): Ceres Seq. ID no. 13616704
  misc_feature (1)..(1702): Ortholog of  Ceres SEQ ID NO 13638402 as cited in SEQ ID NO 60300
  misc_feature (1)..(1702): Ortholog of  Ceres SEQ ID NO 12618349 as cited in SEQ ID NO 64838
  misc_feature (1)..(1702): Ortholog of  Ceres SEQ ID NO 15176161 as cited in SEQ ID NO 0
agaaaaaataaattagttaaaaaaggaaagagaagtgttgttgcagctttagcccaaagatctctcctttttgcagagcttcttcttcttcttctccaaaaatcccaactttcttctctttcccggtttcttcgtctccagcattttcgcgtgttgtaacctaatccaaatcttacccattgatggaataacatcatcacgacgcgtcaaaattctgtatcggaggaccgagagatctccatctcctgtccagattcgattcccaccaatcccaatttcgtgaaattcgttagggttttagtttgaatctcatctcatcagatcgagtcgacccaggattaggaagaagaaaagcgatgaagatggcgacgaatggccggtttttcacaatcgggctagtcgcgtcttggtactcatcgaacattggtgtattgttgctgaacaagtacttgcttagcaattacggattcaagtacccgatctttctcaccatgtgtcacatgacggcttgttcgttactcagctacgtcgccattgcttggttgaagatggttccgatgcagacgattcgatccagagttcagttctttaagatcgcagctctaagtctcgttttttgtgtgtcggtggtctttggtaacatctctctccgctttcttcctgtttcgtttaaccaagccattggtgctacgacgccgtttttcaccgccgtgtttgcttacctgatgacgcgtaagaaagaggcttggttgacttacttcactctcgtccctgtcgtcaccggagttgttattgctagtgggggtgagccaagctttcacctgtttggattccttatgtgcattgcagcaacagctgcgagagcacttaaatcagtgcttcaaggaattttgctttcttctgaaggggaaaagctgaactccatgaatctcctcctttacatggctccaatagctgtcgtgctccttctgcctgctactcttatcatggagaaaaatgttgtcggcattacaattgcacttgcaagagatgatttcagaatcgtttggtatcttctattcaattcagcgctcgcctatttagtcaacttgacaaatttcttagtcacaaaccacactagcgccctgactttacaggtgctaggaaacgccaaaggagcagtagcagtggtggtctctattctaatcttcaagaatccggtgtcagtgaccggaatgctgggttactccctcaccgtctgtggagttatcctgtacagcgaagccaagaaacgaaacaaaaattagaacactaaacacacacaaagcttttacttcttcttcatcattcccccctatatatatgttttatattttctcccctatggatatacaggcaagtagtctcttttgctgggccaaactgactcttgtcttaatgaaaagctgggccaaaaacatctcttttttttggcagaaacagagaagcaaagccacacaaagattgattaccaaaggcaagaatttagagaacttcctcctatgaataagtaacctttttgtttttcatttttgttctttcttctcggattctcttgcctttcctctgtaggttgtttgttgaattaggtttgtttcttcgattctttacattttagttttgtgatgtcaacattttacaacaacacggattgattcatttaatcgaaagagagaaagttcct

SEQ ID NO: 105207 - protein, 309 aa, Arabidopsis thaliana
  peptide (1)..(309): Ceres Seq. ID no. 13616705
MKMATNGRFFTIGLVASWYSSNIGVLLLNKYLLSNYGFKYPIFLTMCHMTACSLLSYVAIAWLKMVPMQTIRSRVQFFKIAALSLVFCVSVVFGNISLRFLPVSFNQAIGATTPFFTAVFAYLMTRKKEAWLTYFTLVPVVTGVVIASGGEPSFHLFGFLMCIAATAARALKSVLQGILLSSEGEKLNSMNLLLYMAPIAVVLLLPATLIMEKNVVGITIALARDDFRIVWYLLFNSALAYLVNLTNFLVTNHTSALTLQVLGNAKGAVAVVVSILIFKNPVSVTGMLGYSLTVCGVILYSEAKKRNKN

SEQ ID NO: 105208 - protein, 307 aa, Arabidopsis thaliana
  peptide (1)..(307): Ceres Seq. ID no. 13616706
MATNGRFFTIGLVASWYSSNIGVLLLNKYLLSNYGFKYPIFLTMCHMTACSLLSYVAIAWLKMVPMQTIRSRVQFFKIAALSLVFCVSVVFGNISLRFLPVSFNQAIGATTPFFTAVFAYLMTRKKEAWLTYFTLVPVVTGVVIASGGEPSFHLFGFLMCIAATAARALKSVLQGILLSSEGEKLNSMNLLLYMAPIAVVLLLPATLIMEKNVVGITIALARDDFRIVWYLLFNSALAYLVNLTNFLVTNHTSALTLQVLGNAKGAVAVVVSILIFKNPVSVTGMLGYSLTVCGVILYSEAKKRNKN

SEQ ID NO: 105209 - protein, 264 aa, Arabidopsis thaliana; identical to SEQ ID NO: 42381
  peptide (1)..(264): Ceres Seq. ID no. 13616707

SEQ ID NO: 105210 - DNA, 1518 bp, Arabidopsis thaliana
  misc_feature (1)..(1518): Ceres Seq. ID no. 13616712
  misc_feature (1)..(1518): Ortholog of  Ceres SEQ ID NO 14316025 as cited in SEQ ID NO 65242
actgaactttcttttcctttcaagtttcacctctaatgcgacgaacacagccacgggaactggccgtcactggtttatcggagaatctccaaggatgtgttttccgcacggtgaaacgagcagttctgatcggaaacggctgcgccggcgcggagaatcaatgcatcggtctccttcgatccttaggcctcttcgatcgccacctctattatagagtagctaaaccaagaggtggaatccttcaatggcttcctatctctctctacaaacgaattcatcgttttatcagcactatctgtgccggattatccattaacgctactggaatcacgaatgtgtttgaagtagatgatgcgaagcagattgctgctatggctcgtaaaacgtttgaaaagaatggcccgttgttagtcgtggcgtctggtagtgatactatttccgtcgcaagctcaataagacgactggctatggaaaatgtttttgttgttcaggtgcaacatccaaggtcgcatcttgagagatttgatctagtgatcacacctcaacacgattatttttctttaacacctgaagggaagaggcaaattcctttctttctcagaccatgggtaactccacgtgaacatccaggtagaaatgtgtttctcactactggagctcttcattacgccgacgcttctactctaagaaatgctacatcggaatggaaaaacgagtttgcttcgctgccaaagcctttggttgtagttaatattggaggacctacaaggaactgtttgtatggtgttgatcttgctaaacagttgtgtggtatgcttcagagtatcctctggagctgtggaagcctaagaatatctttctcaagaagaacaccaaagaaggttgtagaagtcataactggagaattgagctctaactctaaggtctacatttgggatggaaaagaccctaatccgcatttgggacatctagctttagccaatacttttatcataactgctgactctataagtatgttgagcgaggcatgtagtaccgggaaacccgtttatgttgtgggtgctgaacggtgtacatggaaattttctgacttccagaagactctccatggtagaggagctgttcgacctttgaccggcaaagaagatatgtgtgagaagtggagttactctcctcttaacgataatgtagaagctgcgaggcgtgtgattcaagatctggccaagcgtggctgggaaatcgaggcatgaccgttctttccctccacaagttttccagagtactactctcttttccctatatagtctacagttattattttcgtactgggaattatcctccatagaagttaaatgctctagtcgaactcagggtcatatacttagctcatcgtttgaactattagtctattaacgattggtttttgttagttctttggttttttccatttggtttgtagtctcatgtatcaagctcatcatctgtaaaggaacgaataaaagctgcgtgctctgacct

SEQ ID NO: 105211 - protein, 404 aa, Arabidopsis thaliana; identical to SEQ ID NO: 38696
  peptide (1)..(404): Ceres Seq. ID no. 13616713

SEQ ID NO: 105212 - protein, 292 aa, Arabidopsis thaliana; identical to SEQ ID NO: 38697
  peptide (1)..(292): Ceres Seq. ID no. 13616714

SEQ ID NO: 105213 - protein, 260 aa, Arabidopsis thaliana; identical to SEQ ID NO: 38698
  peptide (1)..(260): Ceres Seq. ID no. 13616715

SEQ ID NO: 105214 - DNA, 1061 bp, Arabidopsis thaliana
  misc_feature (1)..(1061): Ceres Seq. ID no. 13616716
  misc_feature (1)..(1061): Ortholog of  Ceres SEQ ID NO 12472003 as cited in SEQ ID NO 143
atctctctccgtccaatttccgtctctctctctttttatctcaccgtctgatcgcttagaagcaaccatgcctcagggagattacatagatttgcacaggaagaggaatggatatcgcctcgaccacttcgagagaaagcgcaagaaggaggcgcgtgaagttcacaagcactccaccatggctcaaaagtctctaggtatcaagggtaagatgattgctaagaaaaactatgctgagaaagctctcatgaagaaaacattgaaaatgcatgaagagtcatcatcaaggcgtaaggctgatgagaatgttcaggaaggagctgttcctgcttatcttcttgatcgtgaagacaccactcgtgccaaggttcttagcaacaccattaaacaaaagaggaaagagaaagctggcaaatgggaggtccctcttccaaaggtccgtccagttgctgaagatgaaatgtttagagtgatccgatctggaaaaaggaaaactaaacaatggaagcggatggttacaaaagctacatttgttggacctgctttcacaaggaagcctccaaagtacgagcgtttcatccgtccatctggtcttcgtttcaccaaggcccacgtcactcaccctgaactaaaatgcactttctgtctcgagatcatcgggattaagaagaatcctaacggtcccatgtatacatcactcggtgtgatgaccaggggaacaatcatcgaggtcaatgtgagtgagcttggtcttgttacaccagctggaaaggttgtctggggaaaatacgctcaagtgacaaacaatccagagaacgacggatgtataaatgctgttttacttgtgtaaccaaatgtccggcactgtcgtagaagtatggatagagacgagaggaaggcgagaatcatgttggctagttttattttgttttctcctgaaacaattttgtgttatttcaagtttttttatgaatgtgtggttggtcttctcttcacattaactagctgctatgttagctttataagtatcccacattatgaaatttgttgcttctaatgtt

SEQ ID NO: 105215 - protein, 282 aa, Arabidopsis thaliana; identical to SEQ ID NO: 37416
  peptide (1)..(282): Ceres Seq. ID no. 13616717

SEQ ID NO: 105216 - protein, 260 aa, Arabidopsis thaliana; identical to SEQ ID NO: 29738
  peptide (1)..(260): Ceres Seq. ID no. 13616718

SEQ ID NO: 105217 - protein, 223 aa, Arabidopsis thaliana; identical to SEQ ID NO: 29739
  peptide (1)..(223): Ceres Seq. ID no. 13616719

SEQ ID NO: 105218 - DNA, 1081 bp, Arabidopsis thaliana
  misc_feature (1)..(1081): Ceres Seq. ID no. 13616720
  misc_feature (1)..(1081): Ortholog of  Ceres SEQ ID NO 14305022 as cited in SEQ ID NO 53586
  misc_feature (1)..(1081): Ortholog of  Ceres SEQ ID NO 12506279 as cited in SEQ ID NO 55440
  misc_feature (1)..(1081): Ortholog of  Ceres SEQ ID NO 13654847 as cited in SEQ ID NO 62459
  misc_feature (1)..(1081): Ortholog of  Ceres SEQ ID NO 15174357 as cited in SEQ ID NO 0
cttaacgacaaaggaaagaaagcatggagattgaaaacggaagccatttctagcaaaacaattctctcttttgtcttgaagataagtttcacaaaaaggtctgcttcgcctcttctacgacgttgcagaaactaagaagagatgggtcttctctccaacagaatcgatagatcgagtttgaaacctggagatcatatctactcctggaggactgcttacatctatgcccatcacggcatctatgttggagatgatagagtcatccatttcactagacgaggccaagaagttggaaccgggactgttctagatctcatactagtcagctcaggtccatcccgaaaccacacccactgtccaacctgtgttccacctaacgaaggtcacggtgttgtttcctcatgccttaactgtttcctagccggtggtgtcttgtaccggtttgagtactcagtcaacgctgctcacttcctcgtcaaagccagaggaggaacttgcacactcgctgtcgctgaccctaatgagattgttgttcaccgggccaaacacctccttcaaaacggatttggatgttatgacgttttcaagaacaactgtgaggatttcgctatatattgcaaaaccgcattgctggttcttgagggaaggacaatgggacagagcggtcaggcggtttcgattataggtgggccgattgctgcggttttgtccacgccaatgcggcttctgactacaaacgtgtatgggatggctgctacagcgattggtgtgtattgtgcgagtagatacgctactgatatcggaatgagagctgacgtcgcgaaagttgaagcagaggacctcacaagaaggctgtcttcaggacttttccaagtacttgatcctccattggcagccatagctttaccaagcacgagttgataagcttaagcttcaccagcttatcccactgttgtattttctatttgtcccttagcttctataaatgttctaataagaacactccttgcacaattgatctcggtgtgattcaaacttatataattatgtacaataataggtaaaaaagggtaccagttac

SEQ ID NO: 105219 - protein, 259 aa, Arabidopsis thaliana; identical to SEQ ID NO: 40915
  peptide (1)..(259): Ceres Seq. ID no. 13616721

SEQ ID NO: 105220 - DNA, 991 bp, Arabidopsis thaliana
  misc_feature (1)..(991): Ceres Seq. ID no. 13616722
  misc_feature (1)..(991): Ortholog of  Ceres SEQ ID NO 13661767 as cited in SEQ ID NO 61423
atttccctcgccgcacgccggcggatggagggtagtttagtcttttaacctttttctctgtttttgtcccaaaagataaaacgaaaatgacttcttttgaaaaggagagaaggcatatatcgcgtggatttgaagacgaagaggaatcataaaaagcctaacgaagaagacgaagaagaagaggaacaaacaaccatgggtgaagtggttaaggatggaagagaagaagtgatccaggcatggtatatggatgatagcgaagaggatcagagacttcctcaccacaaggatcctaaggagtttctatctttggacaaacttgcagagctgggagtacttagctggagacttgatgctgataactatgaaaccgatgaggatttgaaaaagatccgcgaatctcgtggttactcttacatggacttttgtgaggtatgcccggaaaagcttccaaactatgaagtgaaagtgaagagctttttcgaagaacatttgcacactgatgaagagatccgttactgcgttgcaggaagcggttactttgatgtgagggatcgcaatgaagcttggattagagtatgggtaaagaagggaggtatgatagtcttacctgctggaatatatcatcgcttcaccgtagactcagacaactatatcaaggcaatgcggcttttcgttggtgaaccggtctggacaccatacaatcgcccacacgaccacctccctgcaaggaaagagtacatcgataatttcgtgaaggtgaatgaaggtggtgtcatagacgcgtcagcctagaggattctcagtcttatgcatcagatttctataaactaagcatacaataaagagagctttctgtctcatgttggatattatgtcatctacagatccacttgtgaagaaactttgattcgtgtggctttggcattatggttgtgttgtaactgtatttatagtttatactccagaaatcaaactgtgttacattatc

SEQ ID NO: 105221 - protein, 199 aa, Arabidopsis thaliana; identical to SEQ ID NO: 26430
  peptide (1)..(199): Ceres Seq. ID no. 13616723

SEQ ID NO: 105222 - protein, 182 aa, Arabidopsis thaliana; identical to SEQ ID NO: 26431
  peptide (1)..(182): Ceres Seq. ID no. 13616724

SEQ ID NO: 105223 - protein, 125 aa, Arabidopsis thaliana; identical to SEQ ID NO: 25190
  peptide (1)..(125): Ceres Seq. ID no. 13616725

SEQ ID NO: 105224 - DNA, 927 bp, Arabidopsis thaliana
  misc_feature (1)..(927): Ceres Seq. ID no. 13616726
  misc_feature (1)..(927): Ortholog of  Ceres SEQ ID NO 13661767 as cited in SEQ ID NO 61423
tccctgttttaaaaagaagaatcgagtaatcgggtggttttgaagacgaagaaggactaagacatcacgaggaacacgatgggtgaagcggtcaaggatgggagagaagaagtgattcaagcttggtatatggatgatagtgaagaggatcagagacttcctcaccacaaggatcctaaagagtttgtatcgttggacaaacttgcagagctgggagtacttagctggagacttgatgctgataactatgaaaccgatgaggatttgaaaaagatccgtgaatctcgtggttactcttacatggacttttgtgaggtatgcccggaaaagcttccaaactatgaagtgaaagtgaagagctttttcgaagaacatttacacactgatgaggagatccgttactgcgttgcaggaactggttactttgatgtgagagatcgtaatgaagcttggattagggtattggtaaagaagggaggtatgatagtcttacctgctgggatctatcatcgcttcactgtggactctgacaactatatcaaggcaatgcggctattcgtgggtgaaccggtatggacaccatacaatcgcccacacgaccatcttcctgcaaggaaagaatatgtcgataacttcatgatcaatgcctcggcttagagagcttcctctctctatatctggctttctgaaacaaggatctataaacaaggcctacaataaagaaagctttcctgtcaagtattggatatttatatgtattcctgtgtagaatgatggcttttggtatgcttgagttgttgtaaacttagttacactctctgatatgtctctctttaccatctttgtcgtatcccatatacgaaaagattacattgggattcatattgtcttacgttcgttcctatgtgcaatatgttgagtttttac

SEQ ID NO: 105225 - protein, 192 aa, Arabidopsis thaliana
  peptide (1)..(192): Ceres Seq. ID no. 13616727
MGEAVKDGREEVIQAWYMDDSEEDQRLPHHKDPKEFVSLDKLAELGVLSWRLDADNYETDEDLKKIRESRGYSYMDFCEVCPEKLPNYEVKVKSFFEEHLHTDEEIRYCVAGTGYFDVRDRNEAWIRVLVKKGGMIVLPAGIYHRFTVDSDNYIKAMRLFVGEPVWTPYNRPHDHLPARKEYVDNFMINASA

SEQ ID NO: 105226 - protein, 175 aa, Arabidopsis thaliana
  peptide (1)..(175): Ceres Seq. ID no. 13616728
MDDSEEDQRLPHHKDPKEFVSLDKLAELGVLSWRLDADNYETDEDLKKIRESRGYSYMDFCEVCPEKLPNYEVKVKSFFEEHLHTDEEIRYCVAGTGYFDVRDRNEAWIRVLVKKGGMIVLPAGIYHRFTVDSDNYIKAMRLFVGEPVWTPYNRPHDHLPARKEYVDNFMINASA

SEQ ID NO: 105227 - protein, 118 aa, Arabidopsis thaliana
  peptide (1)..(118): Ceres Seq. ID no. 13616729
MDFCEVCPEKLPNYEVKVKSFFEEHLHTDEEIRYCVAGTGYFDVRDRNEAWIRVLVKKGGMIVLPAGIYHRFTVDSDNYIKAMRLFVGEPVWTPYNRPHDHLPARKEYVDNFMINASA

SEQ ID NO: 105228 - DNA, 729 bp, Arabidopsis thaliana
  misc_feature (1)..(729): Ceres Seq. ID no. 13616730
  misc_feature (1)..(729): Ortholog of  Ceres SEQ ID NO 15168553 as cited in SEQ ID NO 57750
acaaaccattaagcgatcaaacaactaaattaaaaaaaaatcttgagagattcttggaacacaagaaaaacatgaaacctagaatgtgtttaatcttgtttattgctttaatgagagtaatgtcgattgtttctgctcagtcgagttgcacaaatgttctaatcagcatggcgccgtgtctcagcttcatcactcaaaacacttctctcccgtctcaacaatgttgtaaccagttggctcatgttgtccggtattcttctgagtgtttgtgtcaggttctcgatggtggaggttctcagcttgggatcaatgttaatgagacacaagctcttgctttgcctaaagcttgtcatgttgaaactcctcctgctagtcgctgccatagtggttcttcggttaattcacattcagaacatggaaatggatcaaaaacagtcccaagagaaaagtcatcatctgatggttctattaagttctcattccctcttctcgccatcctattcacagcttcttacattacattaatctacgcaaaatactgacttattttaccaataaagcttttggcctctttgaagaacatattcatttttagtctctattaaatcgcggtgtattgtgctgaagtattttgtgctctaaatccctactttctaggtgatattggtttgtagtccaaagagtgtgattgtatatctttgatttatgcaataaacattattttctagc

SEQ ID NO: 105229 - protein, 179 aa, Arabidopsis thaliana
  peptide (1)..(179): Ceres Seq. ID no. 13616731
KPLSDQTTKLKKNLERFLEHKKNMKPRMCLILFIALMRVMSIVSAQSSCTNVLISMAPCLSFITQNTSLPSQQCCNQLAHVVRYSSECLCQVLDGGGSQLGINVNETQALALPKACHVETPPASRCHSGSSVNSHSEHGNGSKTVPREKSSSDGSIKFSFPLLAILFTASYITLIYAKY

SEQ ID NO: 105230 - protein, 156 aa, Arabidopsis thaliana
  peptide (1)..(156): Ceres Seq. ID no. 13616732
MKPRMCLILFIALMRVMSIVSAQSSCTNVLISMAPCLSFITQNTSLPSQQCCNQLAHVVRYSSECLCQVLDGGGSQLGINVNETQALALPKACHVETPPASRCHSGSSVNSHSEHGNGSKTVPREKSSSDGSIKFSFPLLAILFTASYITLIYAKY

SEQ ID NO: 105231 - protein, 152 aa, Arabidopsis thaliana
  peptide (1)..(152): Ceres Seq. ID no. 13616733
MCLILFIALMRVMSIVSAQSSCTNVLISMAPCLSFITQNTSLPSQQCCNQLAHVVRYSSECLCQVLDGGGSQLGINVNETQALALPKACHVETPPASRCHSGSSVNSHSEHGNGSKTVPREKSSSDGSIKFSFPLLAILFTASYITLIYAKY

SEQ ID NO: 105232 - DNA, 1650 bp, Arabidopsis thaliana
  misc_feature (1)..(1650): Ceres Seq. ID no. 13616757
  misc_feature (1)..(1650): Ortholog of  Ceres SEQ ID NO 13597574 as cited in SEQ ID NO 64677
  misc_feature (1)..(1650): Ortholog of  Ceres SEQ ID NO 13597843 as cited in SEQ ID NO 64850
  misc_feature (1)..(1650): Ortholog of  Ceres SEQ ID NO 13597678 as cited in SEQ ID NO 65375
  misc_feature (1)..(1650): Ortholog of  Ceres SEQ ID NO 13596180 as cited in SEQ ID NO 67941
  misc_feature (1)..(1650): Ortholog of  Ceres SEQ ID NO 13591190 as cited in SEQ ID NO 68044
  misc_feature (1)..(1650): Ortholog of  Ceres SEQ ID NO 13595961 as cited in SEQ ID NO 68223
aacgaaaagtccaaaaacgtaaaaacagaaatgaagaagattgagctcgtgttcataccttcgccgggaatcggccatctccggccaaccgtgaagctagcaaagcaactcatcggaagcgaagaacattttttcaatcaccgtaatcatcatcccttctagaaacgacgccggtgatgcaaccgcctatatcgcatccctcgttgcagagtctcaagatcgcctccgctacgaacccatctccgtcgaaaaacaaccaccaaccgcaaatcttgagccgtctcaagtctacatcgagaaacaaaaaccacaagtgagagacaccgtctccagaatcatcaatccaacaagaaaactcgccggattcgtggtggacatgttctgttcttcaatgatcgatatagctaacgaatttggagttccttgttatatgatctacacatcaaacgctacgtttttgggaatcacacttcacgttcaagaaatgtacgacgacaaaaagtatgacgtcagcgatttggatgagtcagtcaacgaattggagtttccttgtttgactcgtccttatccagtgaagtgccttcctcatatccttagttcaaaagattggttacctttttttgcagctcaaggtaggtctttccggaagatgaaaggtattttggtaaatacagttgctgagcttgagcctcacgctttgaagatgtttaacaatgttgatcttcctcaagcttatcctgttggaccagtgttgcatcttgataacggcgatgacgacgatgaaaagagattggaggttttgcggtggcttgatgatcaaccgcctaaatctgttttgtttctctgttttggaagtatgggaggtttcactgaggaacaaactagagaggtagctgtggcgttaaaccgaagtggtcaccggtttctttggtctctccgtcgtgcatcgccgaatataatgatggaacgtcccggagattataagaatcttgaggaggttttaccggacgggttcttggaacggactttggatagagggaaagtgattggatgggctccacaagtggcggtgttagagaagccggcgataggagggtttgttactcattgtgggtggaactctatgttagagagcttgtggtttggtgttccgatggtgacgtggccgctttacgcggagcagaaggttaacgcgtttgagatggtggaggagctgggattggcggtggagatacgtaagtgcattagtggagatttgttgttgatcggagagatggagatagtgacggcggaggatatagagagagctataaggtgtgtgatggagcaggatagtgatgtaaggagtcgagtgaaggagatggcggagaagtgtcacgtggcgttgatggacggtggatcttccaagacggctttgcaaaagtttattcaagacgtgatagagaatgttgcttaaattggatagagagactcgcatggaattccagactcgcatgttgagagttcactatgagatcgatgactcaggtccatgtgttattatgtatgttatgtcgttttcgtttttctttttttgttggaatttgtatacgttgtgtacttgtgtttgtgtgtctttttaaaatgtttacgtaataaaatgtgatacag

SEQ ID NO: 105233 - protein, 359 aa, Arabidopsis thaliana; identical to SEQ ID NO: 49769
  peptide (1)..(359): Ceres Seq. ID no. 13616758

SEQ ID NO: 105234 - protein, 354 aa, Arabidopsis thaliana; identical to SEQ ID NO: 49770
  peptide (1)..(354): Ceres Seq. ID no. 13616759

SEQ ID NO: 105235 - protein, 341 aa, Arabidopsis thaliana
  peptide (1)..(341): Ceres Seq. ID no. 13616760
MIYTSNATFLGITLHVQEMYDDKKYDVSDLDESVNELEFPCLTRPYPVKCLPHILSSKDWLPFFAAQGRSFRKMKGILVNTVAELEPHALKMFNNVDLPQAYPVGPVLHLDNGDDDDEKRLEVLRWLDDQPPKSVLFLCFGSMGGFTEEQTREVAVALNRSGHRFLWSLRRASPNIMMERPGDYKNLEEVLPDGFLERTLDRGKVIGWAPQVAVLEKPAIGGFVTHCGWNSMLESLWFGVPMVTWPLYAEQKVNAFEMVEELGLAVEIRKCISGDLLLIGEMEIVTAEDIERAIRCVMEQDSDVRSRVKEMAEKCHVALMDGGSSKTALQKFIQDVIENVA

SEQ ID NO: 105236 - DNA, 1015 bp, Arabidopsis thaliana
  misc_feature (1)..(1015): Ceres Seq. ID no. 13616769
  misc_feature (1)..(1015): Ortholog of  Ceres SEQ ID NO 14304124 as cited in SEQ ID NO 56378
  misc_feature (1)..(1015): Ortholog of  Ceres SEQ ID NO 12585331 as cited in SEQ ID NO 62912
  misc_feature (1)..(1015): Ortholog of  Ceres SEQ ID NO 13654964 as cited in SEQ ID NO 63176
attttttcccagaatcaaccagatctgctttcgaagacgaatctagctattagccatggacaaaccgtacggatacgcgagcgtgagcatgagcggcatagatcgttccgccggaaaggatattgatcttgagatgggagtcggagaagcgacgctttatcctgggctaagttacggcgagaatcagctccgatggggatttattcgtaaggtctatgggattctctcagctcagcttcttcttacgacgcttatctccgccgtcgttgttcttaatcctcctgttaacgatctcttgaccggatctcctgggattcttctcttcctctgcatcgttcccttcatcttaatctggcctctgcacatttaccaccagaagcatcctgttaacctgatcctccttgccctcttcactgtttcattgagtttcactgttggtgtcagttgtgctatgacagaaggacgaattgtgctacaagccttgatattgactctgtctgtggtcggatctctaaccgcatacactttctgggctgcaaagaagggaaaagacttcagcttccttggacccattctcttcaccagcctcatcattcttgtagtgaccagcttcatccagatgttcttccctcttggcccgacttctgttgccgtatacggaggattcagtgccttggtattctgcggatacatagtctatgataccgacaacctcatcaagcgtttcacatatgacgaatacatcctagcatcagtagctctctacttggacatcctcaatctcttcttgaccatattgcgtatactgaggcaaggcgacaactgaaaggcataaaacgatgcttcagtgatgtgatccagtttataactataagagaatccaaaagcctttatgtgtgtatatctgatttctgtttggagaattaagtatatgatgctatgtggttaaacgattgatataaacaaaatcaagcaatgtcgattttcaacttcaaataaatttgttaattttggc

SEQ ID NO: 105237 - protein, 256 aa, Arabidopsis thaliana; identical to SEQ ID NO: 29776
  peptide (1)..(256): Ceres Seq. ID no. 13616770

SEQ ID NO: 105238 - protein, 245 aa, Arabidopsis thaliana; identical to SEQ ID NO: 29777
  peptide (1)..(245): Ceres Seq. ID no. 13616771

SEQ ID NO: 105239 - protein, 230 aa, Arabidopsis thaliana; identical to SEQ ID NO: 29778
  peptide (1)..(230): Ceres Seq. ID no. 13616772

SEQ ID NO: 105240 - DNA, 2012 bp, Arabidopsis thaliana
  misc_feature (1)..(2012): Ceres Seq. ID no. 13616773
  misc_feature (1)..(2012): Ortholog of  Ceres SEQ ID NO 14304471 as cited in SEQ ID NO 53670
atccgccattacagacgaagaagaatttcaactgcaatctctctctgaaccatgagaggtcacgatcggattaacaattgtttgccggaggaacttatcctcgagatattccggcgacttgaatcgaaaccgaatcgcgacgcatgctccctcgtctgcaagcgatggttatctctcgagcgatttagccgcaccacgcttcgtatcggcgcttcgttttctcccgacgacttcatctccctcctatctcgtcgctttctctatattacctctatccatgtcgacgaacgtatctccgtctcccttccttccctctctccttccccaaaaagaaaacgtgggagggacagttcgtcgccatcgtcgagtaagcggaagaaattgactgataagacacattctggagctgagaacgtcgagtcttccagcttgactgatacgggcttgactgctctagcgaatggatttccaagaatagaaaacttgagcttgatatggtgccctaacgtttcaagtgtgggtttgtgttcccttgctcagaaatgcacttcacttaaatctcttgatttacagggttgctatgttggagatcaaggcttagcagctgttggaaagttttgtaagcaacttgaagaactaaatttgcgcttttgcgaaggcttaactgatgttggagttattgatcttgttgttggttgttccaagtctttaaagtctatcggtgttgctgcgtcagcaaaaataacagatttatctctggaagcagttggttctcactgtaaattactagaagttttgtatttggattctgaatacatccatgataaaggattgatagcggtggctcagggatgccaccgtttgaaaaatctgaagcttcaatgtgttagtgtgacggatgtggcttttgctgcagtgggagagttgtgtacttcgttggagcgattggcattgtatagctttcagcattttactgacaagggcatgcgagccatcggtaaagggtctaagaagttgaaagatcttactttaagtgattgttactttgtgagttgcaaaggtttagaagctattgctcatggttgtaaggaacttgagcgtgtggaaattaacggatgccacaacattggtacacgtggaatagaggcaattggaaaatcttgcccgcgcctcaaagagttagctttgttgtattgccaaaggattggtaattcggctcttcaagaaattggaaaaggctgtaaatccctagaaatacttcacttagtagactgctctggcattggagacatcgctatgtgcagtattgctaaaggctgtcgcaacctcaagaaacttcatatccgcagatgctatgagataggaaacaaaggaattatatctattggaaagcattgcaaatcactaaccgagcttagtctccggttttgcgataaagttggaaataaagcattaatcgccattggaaaaggttgctccttacaacaactaaacgtaagtggttgtaatcaaatcagcgatgctggaataacagcaatcgccagaggctgtcctcaactcactcacctcgacattagtgttcttcagaacattggagacatgccgttggctgagcttggagaaggatgtccaatgctgaaagacttggtcttgtctcattgccaccatataacagacaatggtctgaaccatcttgtacagaagtgcaaacttctggagacttgtcacatggtttactgcccagggatcacttccgctggagtggctacagtcgtctcgagctgtccacacatcaaaaaggtgttgatagagaaatggaaagtgactgagaggacgacaaggagagctggatcggttatctcttatctatgcatggatctctagatcgtaatttcaaggtcagtttctaagatttatgtttatgttttcttaataaaagtaataacttatagtccaaacttatggtgagtcatggttgtttattgtatgtttatgtgaactggttgtacatg

SEQ ID NO: 105241 - protein, 610 aa, Arabidopsis thaliana; identical to SEQ ID NO: 38740
  peptide (1)..(610): Ceres Seq. ID no. 13616774

SEQ ID NO: 105242 - DNA, 1690 bp, Arabidopsis thaliana
  misc_feature (1)..(1690): Ceres Seq. ID no. 13616775
  misc_feature (1)..(1690): Ortholog of  Ceres SEQ ID NO 13594345 as cited in SEQ ID NO 58043
  misc_feature (1)..(1690): Ortholog of  Ceres SEQ ID NO 12614112 as cited in SEQ ID NO 60891
  misc_feature (1)..(1690): Ortholog of  Ceres SEQ ID NO 13597574 as cited in SEQ ID NO 64677
  misc_feature (1)..(1690): Ortholog of  Ceres SEQ ID NO 13662880 as cited in SEQ ID NO 65422
  misc_feature (1)..(1690): Ortholog of  Ceres SEQ ID NO 12779098 as cited in SEQ ID NO 67698
  misc_feature (1)..(1690): Ortholog of  Ceres SEQ ID NO 13591190 as cited in SEQ ID NO 68044
  misc_feature (1)..(1690): Ortholog of  Ceres SEQ ID NO 13596089 as cited in SEQ ID NO 68373
atattttgttttaggtgttcacataaatttgatagtgtaaagaaaacaaaaccactttctagttcttaaagaaactagaaatccatggacccgtctcgtcatactcatgtgatgctcgtatctttccccggccaaggtcacgtaaaccctctacttcgtctcggaaagctcatagcctctaaaggcttactcgtcacctttgtcaccacagagaagccatggggcaagaagatgcgtcaagccaacaagattcaagacggtgtgctcaaaccggtcggtctaggtttcatccggtttgagttcttctctgacggcttcgccgacgacgatgaaaaaagattcgacttcgatgccttccgaccacaccttgaagctgtcggaaaacaagagatcaagaatctcgttaagagatataacaaggagccggtgacgtgtctcataaacaacgcttttgtcccatgggtatgtgatgtcgccgaggagcttcacatcccttcggctgttctatgggtccagtcttgtgcttgtctcacggcttattactattaccaccaccggttagttaagttcccgaccaaaaccgagccggacatcagcgttgaaatcccttgcttgccattgttaaagcatgacgagatcccaagctttcttcacccttcgtctccgtatacagcttttggagatatcattttagaccagttaaagagattcgaaaaccacaagtctttctatcttttcatcgacacttttcgcgaactagaaaaagacatcatggaccacatgtcacaactttgtcctcaagccatcatcagtcctgtcggtccgctcttcaagatggctcaaaccttgagttctgacgttaagggagatatatccgagccagcgagtgactgcatggaatggcttgactcaagagaaccatcctcagtcgtttacatctcctttgggactatagccaacttgaagcaagagcagatggaggagatcgctcatggcgttttgagctctggcttgtcggtcttatgggtggttcggcctcccatggaagggacatttgtagaaccacatgttttgcctcgagagctcgaagaaaagggtaaaatcgtggaatggtgtccccaagagagagtcttggctcatcctgcgattgcttgtttcttaagtcactgcggatggaactcgacaatggaggctttaactgccggagtccccgttgtttgttttccgcaatggggagatcaagtgactgatgcggtgtacttggctgatgttttcaagacaggagtgagactaggccgcggagccgctgaggagatgattgtttcgagggaggttgtagcagagaagctgcttgaggccacagttggggaaaaggcggtggagctgagagaaaacgctcggaggtggaaggcggaggccgaggccgccgtggcggacggtggatcatctgatatgaactttaaagagtttgtggacaagttggttacgaaacatgtgacgagagaagacaacggagaacactagtgataatgatgtctcgaaaatatccgactatttgttgtaccgcaaaaaccttaaccactacaaccttttcttttttcttgtcaataaatcgtatcaatctcatttcatttttcgaaagtgttttttctcacttctgaaatcaataattacgtattgtcttcttatc

SEQ ID NO: 105243 - protein, 479 aa, Arabidopsis thaliana; identical to SEQ ID NO: 23079
  peptide (1)..(479): Ceres Seq. ID no. 13616776

SEQ ID NO: 105244 - protein, 470 aa, Arabidopsis thaliana; identical to SEQ ID NO: 23080
  peptide (1)..(470): Ceres Seq. ID no. 13616777

SEQ ID NO: 105245 - protein, 430 aa, Arabidopsis thaliana; identical to SEQ ID NO: 23081
  peptide (1)..(430): Ceres Seq. ID no. 13616778

SEQ ID NO: 105246 - DNA, 726 bp, Arabidopsis thaliana
  misc_feature (1)..(726): Ceres Seq. ID no. 13616787
  misc_feature (1)..(726): Ortholog of  Ceres SEQ ID NO 12612244 as cited in SEQ ID NO 60140
aatttattctcatgtttgtttgtttctcactttaccaatctcacttacagatcttccttcttcttcctcttcctcttccttcttccttaaaccctacaagcttctactctattgacaaatttgattccgagtttacatcgataatggcggaccaaacctccgattcaacatctcccgtggctcctctctccgtatcttctcctactgctactaagaaagataataccaatcctgttgattcgaagctcacggaattgaatgaatcaagggctgagttactaaacaggatccagaatctgaaacaggacttgcaaagttggagaggtaaattggacactcaagttaaagtctaccgtgaggagctctctgggctaaagaagactctgaatcttgaagttgagcagcttcgtgaggaattcaaagatctgaaaactaccttgaatcaacagcaagatgatgtttccgctagcctgaaaagcttaggcctacaagattcaaaagagcaaattgataagagaagtgaggtgacagaagagaaagtggaagctctatcgactgatgataatgccaaagaagcagaacattagataatatgaaaattgtttgttcttatgatattctcgccactactgttaccactaccttgagattgtactagtatgcttaatatgtagttccgcggtttagttgattctaatgatgcaccatgacacaatggtttgctgc

SEQ ID NO: 105247 - protein, 194 aa, Arabidopsis thaliana
  peptide (1)..(194): Ceres Seq. ID no. 13616788
FILMFVCFSLYQSHLQIFLLLPLPLPSSLNPTSFYSIDKFDSEFTSIMADQTSDSTSPVAPLSVSSPTATKKDNTNPVDSKLTELNESRAELLNRIQNLKQDLQSWRGKLDTQVKVYREELSGLKKTLNLEVEQLREEFKDLKTTLNQQQDDVSASLKSLGLQDSKEQIDKRSEVTEEKVEALSTDDNAKEAEH

SEQ ID NO: 105248 - protein, 191 aa, Arabidopsis thaliana
  peptide (1)..(191): Ceres Seq. ID no. 13616789
MFVCFSLYQSHLQIFLLLPLPLPSSLNPTSFYSIDKFDSEFTSIMADQTSDSTSPVAPLSVSSPTATKKDNTNPVDSKLTELNESRAELLNRIQNLKQDLQSWRGKLDTQVKVYREELSGLKKTLNLEVEQLREEFKDLKTTLNQQQDDVSASLKSLGLQDSKEQIDKRSEVTEEKVEALSTDDNAKEAEH

SEQ ID NO: 105249 - protein, 147 aa, Arabidopsis thaliana; identical to SEQ ID NO: 35359
  peptide (1)..(147): Ceres Seq. ID no. 13616790

SEQ ID NO: 105250 - DNA, 1116 bp, Arabidopsis thaliana
  misc_feature (1)..(1116): Ceres Seq. ID no. 13616795
  misc_feature (1)..(1116): Ortholog of  Ceres SEQ ID NO 15177022 as cited in SEQ ID NO 57405
  misc_feature (1)..(1116): Ortholog of  Ceres SEQ ID NO 13597427 as cited in SEQ ID NO 64038
attattcccctaacgaatttcaaatcaaaatctctctctttctcttatctctaatggcgttgaggaacattgaaaacgctcttccgatctcacaggaacgacctaagaagctggccaaactctcaaagcaaccggagattggtctaaatgacgaaaacaaccctgtcgctgtggctgaatcgaccgtcgaatacgttgcttctgagaatctcaaaccattttcagatcctgaatcttctgtccagagattacttgaagaattagcatcaaaggattggattaaagtatgtgactcattgaacaacacaaggagatttgcaattcatcactcttctctgttgctaccaattctagaaaagcttatagttgtgatggtgaaggcgatgaagaatcctagaagtgcattgtgcaagacttcgattatgacttgttctgatatcttcactgcttatggagaaaagttgctggaaggacctcatttgaaatctatggacgatctgctgttgcagttgctgatgaaagcttcacaagacaagaagtttgtgtgtgaagaagcagagaaagcgctgaacacgatggttaactcggtggctcgcttgccgcttctgcgtaagcttcagagttatgtccgtcacagtaaccctcgtgtcagggccaaagctgctgtgtctacttccaactgcgtttctaaaatggaggtaaatgaaatggaagaatttgggatgattctgctcgcacaaatggctgcggatcagttgagtgacaagttgccagaggcaagggaagctgcaaggagtatggtgaactcgcttttcgagaaatttacatggaatgaagaagaagacgaagaaggaagcaagcaagaagcttggaagaagttttgtgagaagaatgtaacagggcttaatgcacaagccatgatcaagatcgttgcatctcaataaaattctgaagatgaaaatgttgttctctctgattcatgtaaaatacgtttttacatgatataaacaatcttttttatttctagtggatctgtcctctcaattccaatgctactaccataatacaacagaagctcagtggttctttaagcttcatgaaaaattgttgttgtgg

SEQ ID NO: 105251 - protein, 313 aa, Arabidopsis thaliana
  peptide (1)..(313): Ceres Seq. ID no. 13616796
YSPNEFQIKISLFLLSLMALRNIENALPISQERPKKLAKLSKQPEIGLNDENNPVAVAESTVEYVASENLKPFSDPESSVQRLLEELASKDWIKVCDSLNNTRRFAIHHSSLLLPILEKLIVVMVKAMKNPRSALCKTSIMTCSDIFTAYGEKLLEGPHLKSMDDLLLQLLMKASQDKKFVCEEAEKALNTMVNSVARLPLLRKLQSYVRHSNPRVRAKAAVSTSNCVSKMEVNEMEEFGMILLAQMAADQLSDKLPEAREAARSMVNSLFEKFTWNEEEDEEGSKQEAWKKFCEKNVTGLNAQAMIKIVASQ

SEQ ID NO: 105252 - protein, 296 aa, Arabidopsis thaliana
  peptide (1)..(296): Ceres Seq. ID no. 13616797
MALRNIENALPISQERPKKLAKLSKQPEIGLNDENNPVAVAESTVEYVASENLKPFSDPESSVQRLLEELASKDWIKVCDSLNNTRRFAIHHSSLLLPILEKLIVVMVKAMKNPRSALCKTSIMTCSDIFTAYGEKLLEGPHLKSMDDLLLQLLMKASQDKKFVCEEAEKALNTMVNSVARLPLLRKLQSYVRHSNPRVRAKAAVSTSNCVSKMEVNEMEEFGMILLAQMAADQLSDKLPEAREAARSMVNSLFEKFTWNEEEDEEGSKQEAWKKFCEKNVTGLNAQAMIKIVASQ

SEQ ID NO: 105253 - protein, 190 aa, Arabidopsis thaliana
  peptide (1)..(190): Ceres Seq. ID no. 13616798
MVKAMKNPRSALCKTSIMTCSDIFTAYGEKLLEGPHLKSMDDLLLQLLMKASQDKKFVCEEAEKALNTMVNSVARLPLLRKLQSYVRHSNPRVRAKAAVSTSNCVSKMEVNEMEEFGMILLAQMAADQLSDKLPEAREAARSMVNSLFEKFTWNEEEDEEGSKQEAWKKFCEKNVTGLNAQAMIKIVASQ

SEQ ID NO: 105254 - DNA, 945 bp, Arabidopsis thaliana
  misc_feature (1)..(945): Ceres Seq. ID no. 13616803
  misc_feature (1)..(945): Ortholog of  Ceres SEQ ID NO 13661756 as cited in SEQ ID NO 61398
ctccacgattctgaccaaaaaaaggagaaggaataagagaaaagtgagtttgttgtttgtatcgatcagaaaatggcgacgtcgatgatacagaggatgttcaagcaagggacgaagatcgtctgcgtcggccgtaactacgccgctcacgccaaagaactaggcaacgccgtccccaaggaaccagttatattcttgaagccaacatcatcatacttagaaaatggaggaacaattgagatcccacatcctttggattcacttcaccatgaagtagaactcgctttagtgattggacagaaagctagagatgtacctgaatcaatagccatggattacattggaggatatgcggttgctcttgatatgactgctagggaactccaagcttctgctaaggcatctggtctcccatggacggttgcgaaaggacaagataccttcactcctatcagctctgttctgccaaaggcgatggtgcgtgatcccgataatctagaactttggctcaaggttgatggtgaaacaagacagaagggtttgaccaaagatatgatattcaaggtcccctacctcattagctacataagttctataatgaccctttacggagatgtcatcttgacaggcacaccagaaggtgttggacctgtaaagataggtcagaagataacggccggaatcaccggtctatctgaagttcaattcgatgtggagaggcgtgtaaagcccttgagctaataagtggttttatttatctttcatacaaaaatgtcaattttataaaagcatctctaaaattttcatcacttactgtgtttcctaaggaagggagaaataaaactcgttactcattttatttgtaatctctataacaatggctctaagaccggtttaaattgtttatatgggagagtatttgtaaagttgtgatatttactgttg

SEQ ID NO: 105255 - protein, 222 aa, Arabidopsis thaliana
  peptide (1)..(222): Ceres Seq. ID no. 13616804
MATSMIQRMFKQGTKIVCVGRNYAAHAKELGNAVPKEPVIFLKPTSSYLENGGTIEIPHPLDSLHHEVELALVIGQKARDVPESIAMDYIGGYAVALDMTARELQASAKASGLPWTVAKGQDTFTPISSVLPKAMVRDPDNLELWLKVDGETRQKGLTKDMIFKVPYLISYISSIMTLYGDVILTGTPEGVGPVKIGQKITAGITGLSEVQFDVERRVKPLS

SEQ ID NO: 105256 - protein, 218 aa, Arabidopsis thaliana
  peptide (1)..(218): Ceres Seq. ID no. 13616805
MIQRMFKQGTKIVCVGRNYAAHAKELGNAVPKEPVIFLKPTSSYLENGGTIEIPHPLDSLHHEVELALVIGQKARDVPESIAMDYIGGYAVALDMTARELQASAKASGLPWTVAKGQDTFTPISSVLPKAMVRDPDNLELWLKVDGETRQKGLTKDMIFKVPYLISYISSIMTLYGDVILTGTPEGVGPVKIGQKITAGITGLSEVQFDVERRVKPLS

SEQ ID NO: 105257 - protein, 214 aa, Arabidopsis thaliana
  peptide (1)..(214): Ceres Seq. ID no. 13616806
MFKQGTKIVCVGRNYAAHAKELGNAVPKEPVIFLKPTSSYLENGGTIEIPHPLDSLHHEVELALVIGQKARDVPESIAMDYIGGYAVALDMTARELQASAKASGLPWTVAKGQDTFTPISSVLPKAMVRDPDNLELWLKVDGETRQKGLTKDMIFKVPYLISYISSIMTLYGDVILTGTPEGVGPVKIGQKITAGITGLSEVQFDVERRVKPLS

SEQ ID NO: 105258 - DNA, 1052 bp, Arabidopsis thaliana
  misc_feature (1)..(1052): Ceres Seq. ID no. 13616807
  misc_feature (1)..(1052): Ortholog of  Ceres SEQ ID NO 13658132 as cited in SEQ ID NO 66758
acattttcgtcttcgtctccaatgattgctctctcactctcagtctcactcacatcattaccattctccttcgcgttttcatcgactccgtgcaaatcacgcgcctctcctccacgtagcaccgtctcgttgagttcttccaggagacgacaagatcgccggcgatcaattgaggctatgtctcaggtgatggaattggaagatgaatccgatttcgagaagcttctctcatcggataatcggatctcgatcactggattcggttctcttctctccgagagaagcgcgaggagtacattcccagatttggagaatttcagaatcgcgaaattgcaaggattcagaagagttttcgctcattctgctccgatcttcttcgagcgtggcatcgcgaatcctgaaactaaggagatctcaagcttgagtgttgagccatgtgaaggagagagccttgtggttactgtcttcgagatcaaaagctcagagattccggcttttattggaagggagcttgagttccggtttctcgctgttgttcctgaaacattggaaggcaaaccttacaccaattctgcggtactttgtggtcgatacagtgatgaggagtttttccagattagatgcaaaggaaacaaagggatttactttcaacattatggaagattcaagatcgataagatatggcgggacgacatcttaccttgtcgtctctatctaagacactgtgtgttggctgctaagaatctgggagatgaagcttacaataactttctggatcatacattcttgggagatcgaaaaacaaccatcagagagtatttaagcagcacagggtctggtatcatggaagaagaaccaccggaggctctaaagtctagatatggaggttgatcaaaaaccaacaaaaaaagttaaactgatttttatcaagcttcaaacgttatcgaagctagttataaaattaagaaaacaaaaatcaacaaatgtcccacatcgggagttttagaggagggtagcgtttctttggcctatataagagaatgagttttgtc

SEQ ID NO: 105259 - protein, 296 aa, Arabidopsis thaliana
  peptide (1)..(296): Ceres Seq. ID no. 13616808
TFSSSSPMIALSLSVSLTSLPFSFAFSSTPCKSRASPPRSTVSLSSSRRRQDRRRSIEAMSQVMELEDESDFEKLLSSDNRISITGFGSLLSERSARSTFPDLENFRIAKLQGFRRVFAHSAPIFFERGIANPETKEISSLSVEPCEGESLVVTVFEIKSSEIPAFIGRELEFRFLAVVPETLEGKPYTNSAVLCGRYSDEEFFQIRCKGNKGIYFQHYGRFKIDKIWRDDILPCRLYLRHCVLAAKNLGDEAYNNFLDHTFLGDRKTTIREYLSSTGSGIMEEEPPEALKSRYGG

SEQ ID NO: 105260 - protein, 289 aa, Arabidopsis thaliana
  peptide (1)..(289): Ceres Seq. ID no. 13616809
MIALSLSVSLTSLPFSFAFSSTPCKSRASPPRSTVSLSSSRRRQDRRRSIEAMSQVMELEDESDFEKLLSSDNRISITGFGSLLSERSARSTFPDLENFRIAKLQGFRRVFAHSAPIFFERGIANPETKEISSLSVEPCEGESLVVTVFEIKSSEIPAFIGRELEFRFLAVVPETLEGKPYTNSAVLCGRYSDEEFFQIRCKGNKGIYFQHYGRFKIDKIWRDDILPCRLYLRHCVLAAKNLGDEAYNNFLDHTFLGDRKTTIREYLSSTGSGIMEEEPPEALKSRYGG

SEQ ID NO: 105261 - protein, 237 aa, Arabidopsis thaliana
  peptide (1)..(237): Ceres Seq. ID no. 13616810
MSQVMELEDESDFEKLLSSDNRISITGFGSLLSERSARSTFPDLENFRIAKLQGFRRVFAHSAPIFFERGIANPETKEISSLSVEPCEGESLVVTVFEIKSSEIPAFIGRELEFRFLAVVPETLEGKPYTNSAVLCGRYSDEEFFQIRCKGNKGIYFQHYGRFKIDKIWRDDILPCRLYLRHCVLAAKNLGDEAYNNFLDHTFLGDRKTTIREYLSSTGSGIMEEEPPEALKSRYGG

SEQ ID NO: 105262 - DNA, 1176 bp, Arabidopsis thaliana
  misc_feature (1)..(1176): Ceres Seq. ID no. 13616816
  misc_feature (1)..(1176): Ortholog of  Ceres SEQ ID NO 14314782 as cited in SEQ ID NO 56830
attcgtaaccccgtgcaaaaaaaactgaaaaccccaaatccaacctctctcactcaaaaaccatgtcttggctcttcaaatctcgcggcgatgacgatcacgatcccgatcccgatccttccacaactcatggcggtgtcaaagaagatttatcttccttactccgtggcgtcgcagctttcctggcaccgcctccttctccacctgtaaacgaacgccgactctcctctgataattcaccaactcagctaggtcttctcgggatccgcaacgatctagccgagattcgtggaaatttctccaatttcgcatctaatttactccaatttcctagtaatctaagagatagagaaagtagtagaagatctccgttgaacgatcaagttcctggaatctctgaagaagtagtcgatttcgctgttaaaatctcgacgaaacctggttgttggacagattttccattgtcactcgatactgaatttgaactgtctgaggctcaaagggcacatgcatcagccattgaagatttggttcctggccttgtagctgtgaagaatcaagttagtagttacatggatgatgaacacttctggctgatttattttattttgctgatgccgagactgaatgggcatgattttgaactcttagcaacatgcaaggtatttgaaacaagggatcaacttttactaaagctgcaaaagaaagagacagggtcaagcaagagcactactggtcacgaaactcctgaagaaggtagcagtagggaaacagaaaccgttgagggagtcattgacaagatagagactctaaaaattgagcaaagggagataagtgatgagtcatctgaagaacaacggaggagtttcagagatgaagaggtaatctcctttagtgatttagatgtcgatgatctctcggagaagccaagtcccaacaggagtacactgaaaagaccagcatcaaacgcaagcgggtcaagctgggttcagctcagcaagagccaagttggacatagcaaggattcggaaggtgattccagtgactggcttccaattggcgattctgattaacgtttaaaggtatgaaattgaatattactgtaaagtgaagtgttagcaatgacttttaaatgaaaccatgcacatttttattaataaaaatcttactgtgtag

SEQ ID NO: 105263 - protein, 336 aa, Arabidopsis thaliana; identical to SEQ ID NO: 22118
  peptide (1)..(336): Ceres Seq. ID no. 13616817

SEQ ID NO: 105264 - DNA, 1303 bp, Arabidopsis thaliana
  misc_feature (1)..(1303): Ceres Seq. ID no. 13616825
  misc_feature (1)..(1303): Ortholog of  Ceres SEQ ID NO 13655302 as cited in SEQ ID NO 63307
  misc_feature (1)..(1303): Ortholog of  Ceres SEQ ID NO 13597380 as cited in SEQ ID NO 64054
  misc_feature (1)..(1303): Ortholog of  Ceres SEQ ID NO 12625474 as cited in SEQ ID NO 64169
  misc_feature (1)..(1303): Ortholog of  Ceres SEQ ID NO 13597502 as cited in SEQ ID NO 64681
  misc_feature (1)..(1303): Ortholog of  Ceres SEQ ID NO 13600397 as cited in SEQ ID NO 0
atggaatcacactatcacaatcataaccacaaaaacaaacactatgggacacctcaaaagtctcttcacaattcttttcctaatagctatgtcttcaaccgtaacatttgccggtaaaatacccgcgatcatcgtgtttggcgactcttccgttgatgccgggaacaacaactatatcccaactgttgctagaagcaactttgagccatatggacgggactttgttggtggaaagccgaccggacggttttgtaacggaaagattgcgacggattttatgtccgaagccttagggcttaaaccaatcattccggcgtacttggatccttcttataacatttcggattttgcaacaggtgttacctttgcttctgctgccactggctatgacaacgccacttctgatgttctgtcggtactacctctatggaaacaactcgaatactacaaagaataccaaacaaaacttaaagcataccaaggaaaagacagaggcacagagactatagaaagctctctctacctcataagcatagggaccaacgatttcctcgagaattactttgcctttccgggccgttcttcgcaatattccgtcagtctttaccaagattttctagccggaatcgcgaaagaatttgtgaagaagttgcatggacttggtgctagaaagatctcactaggtgggttacctccaatgggatgcatgcctttagagagagccaccaacattggcactggaggtgagtgcgtaggacggtacaacgacatagccgtccagttcaacagcaagcttgataagatggttgagaagctgagcaaagagctccctggttccaacctcgttttctcaaatccctatgagccatttatgcggatcatcaagaacccttcctcctttgggttcgaggtggtgggagcggcatgttgcgcgacagggatgttcgagatgggatatggttgtcaaaggaataacccattcacatgtacaaacgcagacaagtatgtgttttgggactcatttcacccaacacagaagactaatcacatcatggccaatgctctcatgaacagcacattccctcacttcctctaaattatttttatgtttgtgtgtggaaactaaatagatataagagtaatattattattagggattgcttttgatatgcactctgtatgtatttatatttaagtagattttgctcttgtgttagttagcgaaacctacgtttcttttctagattatggtgtgcctatatatgtagcttattttatcctctttagttattctcaatatatc

SEQ ID NO: 105265 - protein, 364 aa, Arabidopsis thaliana
  peptide (1)..(364): Ceres Seq. ID no. 13616826
WNHTITIITTKTNTMGHLKSLFTILFLIAMSSTVTFAGKIPAIIVFGDSSVDAGNNNYIPTVARSNFEPYGRDFVGGKPTGRFCNGKIATDFMSEALGLKPIIPAYLDPSYNISDFATGVTFASAATGYDNATSDVLSVLPLWKQLEYYKEYQTKLKAYQGKDRGTETIESSLYLISIGTNDFLENYFAFPGRSSQYSVSLYQDFLAGIAKEFVKKLHGLGARKISLGGLPPMGCMPLERATNIGTGGECVGRYNDIAVQFNSKLDKMVEKLSKELPGSNLVFSNPYEPFMRIIKNPSSFGFEVVGAACCATGMFEMGYGCQRNNPFTCTNADKYVFWDSFHPTQKTNHIMANALMNSTFPHFL

SEQ ID NO: 105266 - protein, 350 aa, Arabidopsis thaliana
  peptide (1)..(350): Ceres Seq. ID no. 13616827
MGHLKSLFTILFLIAMSSTVTFAGKIPAIIVFGDSSVDAGNNNYIPTVARSNFEPYGRDFVGGKPTGRFCNGKIATDFMSEALGLKPIIPAYLDPSYNISDFATGVTFASAATGYDNATSDVLSVLPLWKQLEYYKEYQTKLKAYQGKDRGTETIESSLYLISIGTNDFLENYFAFPGRSSQYSVSLYQDFLAGIAKEFVKKLHGLGARKISLGGLPPMGCMPLERATNIGTGGECVGRYNDIAVQFNSKLDKMVEKLSKELPGSNLVFSNPYEPFMRIIKNPSSFGFEVVGAACCATGMFEMGYGCQRNNPFTCTNADKYVFWDSFHPTQKTNHIMANALMNSTFPHFL

SEQ ID NO: 105267 - protein, 335 aa, Arabidopsis thaliana
  peptide (1)..(335): Ceres Seq. ID no. 13616828
MSSTVTFAGKIPAIIVFGDSSVDAGNNNYIPTVARSNFEPYGRDFVGGKPTGRFCNGKIATDFMSEALGLKPIIPAYLDPSYNISDFATGVTFASAATGYDNATSDVLSVLPLWKQLEYYKEYQTKLKAYQGKDRGTETIESSLYLISIGTNDFLENYFAFPGRSSQYSVSLYQDFLAGIAKEFVKKLHGLGARKISLGGLPPMGCMPLERATNIGTGGECVGRYNDIAVQFNSKLDKMVEKLSKELPGSNLVFSNPYEPFMRIIKNPSSFGFEVVGAACCATGMFEMGYGCQRNNPFTCTNADKYVFWDSFHPTQKTNHIMANALMNSTFPHFL

SEQ ID NO: 105268 - DNA, 1040 bp, Arabidopsis thaliana
  misc_feature (1)..(1040): Ceres Seq. ID no. 13616832
  misc_feature (1)..(1040): Ortholog of  Ceres SEQ ID NO 15176333 as cited in SEQ ID NO 52787
  misc_feature (1)..(1040): Ortholog of  Ceres SEQ ID NO 15170403 as cited in SEQ ID NO 53457
  misc_feature (1)..(1040): Ortholog of  Ceres SEQ ID NO 14303479 as cited in SEQ ID NO 54254
  misc_feature (1)..(1040): Ortholog of  Ceres SEQ ID NO 14312047 as cited in SEQ ID NO 55656
  misc_feature (1)..(1040): Ortholog of  Ceres SEQ ID NO 13660872 as cited in SEQ ID NO 60830
  misc_feature (1)..(1040): Ortholog of  Ceres SEQ ID NO 12616221 as cited in SEQ ID NO 63291
  misc_feature (1)..(1040): Ortholog of  Ceres SEQ ID NO 14302355 as cited in SEQ ID NO 65830
aaacatatctttacagttctttcttgctaaacaacaataaaggggaaaataggttaattatgatgaaatctggggctgatttgcaatttccaccaggatttagatttcatcctacggatgaggagctagtcctcatgtatctctgtcgtaaatgcgcgtcgcagccgatccctgctccgattatcaccgaactcgatttgtaccgatatgatccttgggaccttcccgacatggctttgtacggtgaaaaggagtggtattttttctcaccaagagatcgaaagtatccaaacggttcaagacccaaccgtgcagctggtactggatattggaaagctaccggagctgataaaccaataggtcgtcctaaaccggttggtattaagaaggctctagtgttttactcgggaaaacctccaaatggagagaaaaccaattggattatgcacgaataccggctcgctgacgttgaccggtcggttcgtaagaaaaacagtctaagattggacgattgggtattgtgtcgtatatataacaagaaaggtgtcatcgagaagcgacgaagcgatatcgaggacgggttaaagcctgtgactgacacgtgtccaccggaatctgtggcgagattgatctccggctcggagcaagcggtgtcaccggaattcacgtgtagcaacggtcggttgagtaatgcccttgattttccgtttaattacgtagatgccatcgccgataacgagattgtgtcacggctattgggcgggaatcagatgtggtcgacgacgcttgatccacttgtggttaggcagggaactttctgagttgtcacgtgcgattagagttagtggaaagtggaaactatcactgtctgttttcgcacgtgtcgggtagccgtcttgaaacccgctagctgatccagaagtgacctcattgggcttttcaacaacaattgggccttagcctttcttctcccttagtaagacaagctactgtattgtgttgttattttcaggaagcaatataaattcattttaatcact

SEQ ID NO: 105269 - protein, 272 aa, Arabidopsis thaliana
  peptide (1)..(272): Ceres Seq. ID no. 13616833
TYLYSSFLLNNNKGENRLIMMKSGADLQFPPGFRFHPTDEELVLMYLCRKCASQPIPAPIITELDLYRYDPWDLPDMALYGEKEWYFFSPRDRKYPNGSRPNRAAGTGYWKATGADKPIGRPKPVGIKKALVFYSGKPPNGEKTNWIMHEYRLADVDRSVRKKNSLRLDDWVLCRIYNKKGVIEKRRSDIEDGLKPVTDTCPPESVARLISGSEQAVSPEFTCSNGRLSNALDFPFNYVDAIADNEIVSRLLGGNQMWSTTLDPLVVRQGTF

SEQ ID NO: 105270 - protein, 253 aa, Arabidopsis thaliana; identical to SEQ ID NO: 23480
  peptide (1)..(253): Ceres Seq. ID no. 13616834

SEQ ID NO: 105271 - protein, 252 aa, Arabidopsis thaliana; identical to SEQ ID NO: 23481
  peptide (1)..(252): Ceres Seq. ID no. 13616835

SEQ ID NO: 105272 - DNA, 1527 bp, Arabidopsis thaliana
  misc_feature (1)..(1527): Ceres Seq. ID no. 13616844
  misc_feature (1)..(1527): Ortholog of  Ceres SEQ ID NO 13638402 as cited in SEQ ID NO 60300
  misc_feature (1)..(1527): Ortholog of  Ceres SEQ ID NO 12618349 as cited in SEQ ID NO 64838
aattttcatggcataaagagtgagagagagagagtcatagacaggagacgtttgagattgatgaacagcgaattcgaaacaaatcacatggaagaagagctctctttcgctaccgttaccttctccacttttctccttcattagggttttctctcttatttagctgcgcagctctctctctttcttacggattcacttcttaaaactcgttaatttcttgtgggtttttgtctcttttgcgatctgattccgaaagttgagtgagagtgagagaatcatggaggaaggaagtatgttcagatctctattagcgattcttcagtggtggggtttcaatgttaccgtcatcatcatgaacaaatggatctttcagaaactggattttaagtttccactatcggtttcatgtgttcacttcatatgttcgtcgattggagcttacatcgttatcaaagttctcaagcttaaaccattgattgttgtcgatcctgaagatcgatggaggaggatttttccaatgtctttcgtgttttgtatcaacattgtcttgggaaatgtcagtcttcgttacattccggtttcgtttatgcagacgattaagtctttcactccagctactacagttgtgttacagtggctggtatggaggaaatactttgactggcgtatttgggcgtctctcgtgcctattgttggtggaattcttctgacatctgtgactgaacttagttttaacatgtttggattctgtgctgccctgtttggatgtttagctacttccacaaagaccattctagccgaatctcttcttcatggttacaaatttgacagcataaacaccgtttactatatggcgccttttgccaccatgattctcgggataccagcgttattactggaaggcagtggaattttgagctggtttgaagcacaccctgctccctggtcagccctcatcattatactcagttctggtgttctagccttctgtctcaacttctccatcttctatgtcattcactccacaactgcagtcacattcaacgtggctggaaaccttaaggttgcagtggctgtaatggtctcatggttgatattccgtaacccaatatcatatatgaatgctgttggatgcggaattacgcttgtgggctgcacgttttatggatatgtgaggcatatgctttcacagcaaacaccgggaactcctaggactcctcgtaccccaagaagcaagatggaattacttccacttgttaataatgataaactcgaaggcaaagtctgatcttcttcattccgcagctcagtttagtactcactggttcagggtgctgcagaagagaagcattgacacaaggggtgttgaatttttactaaatatgcattttactcaaaaaccttagtagagaaaagttacatttttttttttcgttttgatttgagctcgtagaagagataatggttcctactactatttatatttctgtgaagtgtagaatcttttaatttatcaaatacattttc

SEQ ID NO: 105273 - protein, 336 aa, Arabidopsis thaliana; identical to SEQ ID NO: 29083
  peptide (1)..(336): Ceres Seq. ID no. 13616845

SEQ ID NO: 105274 - protein, 331 aa, Arabidopsis thaliana; identical to SEQ ID NO: 29084
  peptide (1)..(331): Ceres Seq. ID no. 13616846

SEQ ID NO: 105275 - protein, 311 aa, Arabidopsis thaliana; identical to SEQ ID NO: 29085
  peptide (1)..(311): Ceres Seq. ID no. 13616847

SEQ ID NO: 105276 - DNA, 1168 bp, Arabidopsis thaliana
  misc_feature (1)..(1168): Ceres Seq. ID no. 13616858
  misc_feature (1)..(1168): Ortholog of  Ceres SEQ ID NO 13582619 as cited in SEQ ID NO 56520
  misc_feature (1)..(1168): Ortholog of  Ceres SEQ ID NO 13660872 as cited in SEQ ID NO 60830
  misc_feature (1)..(1168): Ortholog of  Ceres SEQ ID NO 12616221 as cited in SEQ ID NO 63291
atcttgtttcttactcatttctctaacaattttccaaattaaatacgtttataggatcatcgtggatggataatataatgcaatcgtcaatgccaccgggattccgatttcatccgacagaggaagagcttgtgggttattacctagataggaagatcaattcaatgaagagtgctttagatgtcattgtagagattgatctctacaaaatggagccatgggatatacaagcgaggtgtaaactagggtatgaagagcaaaacgagtggtacttctttagtcataaggacaggaagtaccctaccgggactaggaccaaccgagccactgcggctgggttctggaaagccacgggtagagacaaggcggtactatcaaaaaacagtgtcatcggaatgcggaagacacttgtctactacaagggtcgagctcctaatggaagaaagtccgattggatcatgcacgaataccgtctccaaaactccgagcttgccccggttcaggaggaaggctgggtggtgtgtcgagcatttaggaagccaattccaaaccagaggccattagggtacgagccatggcagaaccagctctaccacgtcgaaagtagtaacaactactcatcttcagtgacaatgaacacgagtcatcatatcggtgcatcttcatcaagtcataaccttaatcaaatgctcatgagcaataaccactacaatcctaataatacatcctcatcgatgcatcaatatggcaacattgagctcccgcagttggacagcccgagcttgtcgcctagtttagggacgaataaagatcagaacgagagtttcgagcaagaagaagagaagagctttaactgtgtggattggagaacactagataccttgcttgagacacaagtcatacatccgcataaccctaatattcttatgttcgaaacgcagtcgtataatccggcgccaagcttcccttccatgcatcaaagctataatgaggtcgaagctaatattcatcattctcttggatgcttccctgactcgtaattaaaaaaaaacacacttctatatattgatttgtattctatgatttaattgttccatctggaaaataacatttataactgtctatttgtaaaagaagtttgtgtttattacgtagaaatttgttgttg

SEQ ID NO: 105277 - protein, 324 aa, Arabidopsis thaliana; identical to SEQ ID NO: 42739
  peptide (1)..(324): Ceres Seq. ID no. 13616859

SEQ ID NO: 105278 - protein, 320 aa, Arabidopsis thaliana; identical to SEQ ID NO: 42740
  peptide (1)..(320): Ceres Seq. ID no. 13616860

SEQ ID NO: 105279 - protein, 316 aa, Arabidopsis thaliana; identical to SEQ ID NO: 42741
  peptide (1)..(316): Ceres Seq. ID no. 13616861

SEQ ID NO: 105280 - DNA, 578 bp, Arabidopsis thaliana
  misc_feature (1)..(578): Ceres Seq. ID no. 13616866
  misc_feature (1)..(578): Ortholog of  Ceres SEQ ID NO 12557027 as cited in SEQ ID NO 140
gttattgaaaaaaaattcccagattctataaaaaagagaaatgcaaacatttgctcctggaacaagagtctaccacctcatcatcatcgtcttcttcttcttcttctgcttatcatcgttcttcgcttcaatcgtcatggctgatgaatataccggagaagcaacgggatcgtcggaagcaaaggttcacatcatctacaccgagaaacctaccgatgaagaacctaaaacctatcatctccgtaccctttcctctgctctcggcagtgaggaagctgcaaaagatgctttgatttacagttacaaggaagctgcttctggtttttcagctaagctcactcctgagcaagtcgctgagatatcaaaacaaccaggtgtgattcaagttgtgccaagccagacttatcagctgcacaaacctggtggtggtggtggtttcaagttgacctaacttgactttgtgtattctctacttctcaactaaacctgttgctttacagaaactagtctgttgttgtattgttgtgactttgaaccaagtatctaactaaaataatgttatgaagttgctttgattc

SEQ ID NO: 105281 - protein, 136 aa, Arabidopsis thaliana
  peptide (1)..(136): Ceres Seq. ID no. 13616867
MQTFAPGTRVYHLIIIVFFFFFCLSSFFASIVMADEYTGEATGSSEAKVHIIYTEKPTDEEPKTYHLRTLSSALGSEEAAKDALIYSYKEAASGFSAKLTPEQVAEISKQPGVIQVVPSQTYQLHKPGGGGGFKLT

SEQ ID NO: 105282 - protein, 104 aa, Arabidopsis thaliana; identical to SEQ ID NO: 24149
  peptide (1)..(104): Ceres Seq. ID no. 13616868

SEQ ID NO: 105283 - DNA, 2057 bp, Arabidopsis thaliana
  misc_feature (1)..(2057): Ceres Seq. ID no. 13616877
  misc_feature (1)..(2057): Ortholog of  Ceres SEQ ID NO 12460981 as cited in SEQ ID NO 65146
cctctgttttcttcttttaaaagcctcctcttcttcctcttctctctcctcacaactcaaaactctctccatctctcttctaaaatcagacaagaaagatggctcaagaggaagtacagaaatcggctgatgtcgctgctgctccggtggtgaaggagaaacctattaccgataaggaggttactattcctacccctgtggcagagaaagaggaagttgctgctcctgtctctgatgagaaggcggttccagagaaggaggtgactccggagaaggaagccccagcggcggaagcggagaaatctgtttcggtgaaggaggaagagacggttgttgtagctgagaaggttgttgttttaactgctgaggaagttcagaagaaggcacttgaggagtttaaggagcttgtaagggaggctttgaacaaacgtgaattcactgctccggtgacgccggttaaggaagagaaaacagaggagaagaaaacagaggaggaaactaaagaggaagagaaaacagaggagaagaaagaagagacaacgactgaggttaaggttgaagaagagaaaccggcggttccagcggcggaggaggagaaatcatcagaggctgctccggttgagaccaaatctgaggagaaacctgaagagaaagcagaggtaacaaccgagaaagcatccagtgccgaagaagatggaaccaagaccgtggaagcaatcgaagaatctatcgtctctgtttcaccacctgaatccgccgtagcacctgtcgtggtagagactgtcgccgttgctgaggcagagccagtggagccggaagaagtctcgatctggggagttccactactccaagacgagagatctgacgtgatcctcacgaaattcctccgtgcaagagactttaaggtcaaagaagctttaaccatgcttaaaaacaccgtccagtggcgtaaagaaaacaaaatcgacgaactcgttgaatccggagaagaagtgagtgagttcgagaagatggtgtttgctcacggtgttgacaaagaaggacacgtcgtgatctacagttcttacggtgagtttcagaacaaggagcttttctccgacaaggagaagcttaacaagttcctcagctggaggattcagctacaagagaagtgtgtgagagctattgatttcagcaaccctgaagcgaagtcttcgtttgtgttcgtcagcgacttcaggaacgctccaggacttggtaaaagagccttgtggcaattcatcagacgcgctgttaaacaattcgaggacaattatcctgaattcgccgctaaagagctattcatcaatgtcccatggtggtacattccatactacaaaacattcggatctatcatcacatccccaaggactaggagcaagatggtccttgctggtccatccaaatctgccgatactattttcaaatacatagctcctgaacaagttcccgttaaatacggtggacttagcaaagatactcctttgaccgaagaaaccataacggaagccatcgttaaaccggcagcaaactacactattgaattgcctgcttctgaggcttgcacgctttcatgggagcttagggttttgggtgctgatgtgagctacggagctcagtttgagccaaccaccgaaggaagctatgctgtgatcgtctctaagacacggaagattggatcaaccgatgaaccggtgataaccgattcttttaaggtgggtgaaccgggaaagattgtgatcacaatcgacaaccagacttccaagaagaagaaagtgctctacaggttcaaaactcaataaaaggtctgatctttgaaatccaaatccaaggaagaagcaaaaaaaatgttattttgttatttgggggaaacaaattttaattaattaatttagtttgttatttattatgtaattttgaaatctcaagatgtggttgtgtttttgctttgttttggtattgggggttgttttcgtgtgtggagaatatgtgattaaaattcaaaagaaagtaaagaacactttgtttcatgatttctt

SEQ ID NO: 105284 - protein, 573 aa, Arabidopsis thaliana; identical to SEQ ID NO: 39018
  peptide (1)..(573): Ceres Seq. ID no. 13616878

SEQ ID NO: 105285 - protein, 298 aa, Arabidopsis thaliana; identical to SEQ ID NO: 39019
  peptide (1)..(298): Ceres Seq. ID no. 13616879

SEQ ID NO: 105286 - DNA, 642 bp, Arabidopsis thaliana
  misc_feature (1)..(642): Ceres Seq. ID no. 13616880
  misc_feature (1)..(642): Ortholog of  Ceres SEQ ID NO 15179051 as cited in SEQ ID NO 0
tcatcaatacaaacttagtagtgtattctttatacgtataataacatcccttgtgatcaaacaagtaaaccattcaaaagatgaaaggaagaattttgattttgagtttgctcataatgagtctggtcatggcacaagttcaagtagaagcaaagatctgctgcccttccaaccaagctagaaatggctatagtgtatgccgtataaggttttccaagggaaggtgtatgcaagtgagtggatgccaaaactctgatacatgccctcgaggttgggtaaacgccattctcgaaaactcagctgatgctaccaatgagcactgcaagttagggtgtgaaacttctgtgtgtggtgccatgaacactctccagaactctgatgcaagtgaaattgtgaatggagcgtcggaacaatgtgccaagggatgttctattttctgtaccaagagctatgtagtcccacctgggccgcctaaactgttgtaatggtcgtatatgtgaaaaaacaaatgctagactcttgctattctggtttgtgtgtgtgtgtgtgcatgtgtcgtagaaggtttgttcgatcactagattgtacatgccctctacttcctataacctaaataaagagttaaacgtacgtgtcttttat

SEQ ID NO: 105287 - protein, 134 aa, Arabidopsis thaliana; identical to SEQ ID NO: 36079
  peptide (1)..(134): Ceres Seq. ID no. 13616881

SEQ ID NO: 105288 - protein, 122 aa, Arabidopsis thaliana; identical to SEQ ID NO: 36080
  peptide (1)..(122): Ceres Seq. ID no. 13616882

SEQ ID NO: 105289 - protein, 118 aa, Arabidopsis thaliana; identical to SEQ ID NO: 36081
  peptide (1)..(118): Ceres Seq. ID no. 13616883

SEQ ID NO: 105290 - DNA, 1135 bp, Arabidopsis thaliana
  misc_feature (1)..(1135): Ceres Seq. ID no. 13616890
  misc_feature (1)..(1135): Ortholog of  Ceres SEQ ID NO 14307300 as cited in SEQ ID NO 54107
actacatcttctctctcttcttcgctcattctctcttcctcatatatttccaaaacaatacctttcttcttctctcttcagaagaaacgagagattcgagtgatgttttatgaactactactagtgtttttttccgtgaagtaaagagaaacggtaactttttctatttgttttcaagaaaagccaaagaaaaaaagaatttttaatatactctgttttttgcaatgattttgttttgtgaaatttttctcggagaagaaagtaatttagaagacggagagtggcaaaacgaaatataaaaaaaaaagttttcaatttcttttaagaaaaaaaaagctttttcccttcttaaaacccttcctctgtttcagaaacagagacataagaagaaaatagatcacaagctaattgcgttctcttctcttcttcttctactgggttttaaaatcaagaaaccatgtctgcgagtgttctaagtgatccaacaatgctaatttcaacaccggaggtaatactcgtctctccggtatcggttactcaaatctccggagatgagccagattcggtgacgtgtgattgttgcggattaaccgaggagtgtacccaatcgtacatagagatggtcagagagcgttacatggggaaatggatctgtggactttgttctgaagctgtgaagtatgaagtcatgagaacgaaaagattgttaacgacagaggaagctatggccagacacatgaacatgtgtaataagttcaaatcctcaagcccaccaccgaatccgacaggacatttgatctctgccatgagacagatcttgagaaaaagcttagattcaccaagaatgcttagatctatgcctaatagtccatctaaagacgaccaagatcatcatcatgattgtgtttctaatgttttgtctaggtctgatagctgtttcgctagtttgacttgaaaaaagctcatcgttgaaaaaattgttttaaaccgtcggtttagggacccacttggatcaaatccggttttctgatttgaaattttcgtcggtaaatcaaaaattggtttctgtatgtgtttttgccggatttgttgttgtacttttggaaaattttgggctaaaagaataatttggtgc

SEQ ID NO: 105291 - protein, 165 aa, Arabidopsis thaliana
  peptide (1)..(165): Ceres Seq. ID no. 13616891
MSASVLSDPTMLISTPEVILVSPVSVTQISGDEPDSVTCDCCGLTEECTQSYIEMVRERYMGKWICGLCSEAVKYEVMRTKRLLTTEEAMARHMNMCNKFKSSSPPPNPTGHLISAMRQILRKSLDSPRMLRSMPNSPSKDDQDHHHDCVSNVLSRSDSCFASLT

SEQ ID NO: 105292 - protein, 155 aa, Arabidopsis thaliana
  peptide (1)..(155): Ceres Seq. ID no. 13616892
MLISTPEVILVSPVSVTQISGDEPDSVTCDCCGLTEECTQSYIEMVRERYMGKWICGLCSEAVKYEVMRTKRLLTTEEAMARHMNMCNKFKSSSPPPNPTGHLISAMRQILRKSLDSPRMLRSMPNSPSKDDQDHHHDCVSNVLSRSDSCFASLT

SEQ ID NO: 105293 - protein, 111 aa, Arabidopsis thaliana
  peptide (1)..(111): Ceres Seq. ID no. 13616893
MVRERYMGKWICGLCSEAVKYEVMRTKRLLTTEEAMARHMNMCNKFKSSSPPPNPTGHLISAMRQILRKSLDSPRMLRSMPNSPSKDDQDHHHDCVSNVLSRSDSCFASLT

SEQ ID NO: 105294 - DNA, 1307 bp, Arabidopsis thaliana
  misc_feature (1)..(1307): Ceres Seq. ID no. 13616898
  misc_feature (1)..(1307): Ortholog of  Ceres SEQ ID NO 13596048 as cited in SEQ ID NO 68476
  misc_feature (1)..(1307): Ortholog of  Ceres SEQ ID NO 12589137 as cited in SEQ ID NO 0
aaaattgattactctgttttggttttggatcagatcaaccaaaggaagcgaagaagaagaagactttatacactctcgacgctattgatttcgtctgtgcagttttgtttctctatcagttagttttaaagatgagttcttcagagagtgtggaaaacgagtgcatgtgttgggctgcaagagatccatctggtcttctttctcctcatactatcactcgcaggtctgttacaactgacgatgtttcactcacaatcactcattgtggagtgtgttacgctgatgttatctggagtagaaaccaacatggagactccaagtaccctttggttcctgggcatgagattgctggaatagtgactaaggttgggcctaatgttcaacgattcaaagttggagaccatgttggtgttggaacgtatgttaactcctgcagggagtgtgaatattgtaatgaaggacaagaagttaattgtgcgaaaggagtttttactttcaatggcattgatcatgatggctctgttactaaaggaggctactctagtcacattgttgttcatgaaaggtactgctacaagatacctgtggactatcccttggaatcagctgcaccattactctgtgctggaatcacggtttatgctcctatgatgcgtcacaatatgaatcaacctggtaaatctcttggggtgatcgggctaggtggtcttggacacatggcggttaagtttggcaaggcttttggacttagtgttacggtttttagcaccagcatttccaagaaagaagaagctttgaatctgctaggagctgagaatttcgttatctcatctgaccatgaccagatgaaggcactagagaaatctctagactttctagttgacacagcatctggtgatcacgcgtttgatccttacatgtctctcttgaagattgctggaacttatgtattggttggtttcccaagtgaaattaaaatcagtcctgccaatctcaatcttggtatgagaatgctcgctggaagtgtaaccggggggaccaaaataacacagcaaatgttagatttctgtgcagctcataagatttatccaaacatagaggtgattcccattcaaaagataaacgaagctctcgaaagagtggtgaagaaggacatcaagtaccgtttcgtgattgacatcaagaactccctcaaatagatgttgctcaaaggaaggaataatggagtctgtaataagagaataatactcactgctacaatctttattacgtattttctcgtttttcattagtaaagcaaataaatt

SEQ ID NO: 105295 - protein, 355 aa, Arabidopsis thaliana; identical to SEQ ID NO: 23334
  peptide (1)..(355): Ceres Seq. ID no. 13616899

SEQ ID NO: 105296 - protein, 344 aa, Arabidopsis thaliana; identical to SEQ ID NO: 23335
  peptide (1)..(344): Ceres Seq. ID no. 13616900

SEQ ID NO: 105297 - protein, 183 aa, Arabidopsis thaliana; identical to SEQ ID NO: 23336
  peptide (1)..(183): Ceres Seq. ID no. 13616901

SEQ ID NO: 105298 - DNA, 953 bp, Arabidopsis thaliana
  misc_feature (1)..(953): Ceres Seq. ID no. 13616906
  misc_feature (1)..(953): Ortholog of  Ceres SEQ ID NO 13597839 as cited in SEQ ID NO 64260
atcaacgcgtcgagatattttccccaaatacagagaaaccctaaagtctctgtttttgagaatttttctaccgatagatccaagcgaattgatctagaggaattgatccaacatgggtaacacagataagctgatgaatcagatattcgatttgaaatttacgtcaaagtctctgcaaaggcaatcaaggaagtgtgagaaggaagagaaagcagagaaattgaaggtgaagaaggctatcgagaagggtaatatggatggtgctcggatctacgctgagaacgccattcgtaagcgtagcgagcagatgaactatctccgtctcgcttctcgccttgacgctgttgttgctcgtcttgatactcaggctaagatgaccaccatcaccaaatccatgaccaatatcgtcaaatcccttgagtcttctcttgccacagggaatctacagaagatgtcagagacaatggattcattcgagaagcagtttgtgaacatggaggtccaagctgagttcatggagaatgctatggctggttcaacttcattgtccactccagaaggcgaagtcaacagccttatgcagcaggtggcagatgactatggtttggaagtctctgtggggcttcctcagcctgctggtcatgccattcctactaagactgaggagaaagtcgatgaggatgatttgtcgaggaggcttgcggagcttaaagccagaggataaatgcgctaaccaacattcatgcttggattacctgccactttgcatgcgatccttatcgaattgttgcttctattatccgcaaacacgggcgtatttgtgtatattgctcactttgaaatatgctttgtttataactttatataaaaaaccttcgtgtgtttttagtttttaccatttgaatgatatgctttccttttgagttgttcattaaagagtgttttgctcagtc

SEQ ID NO: 105299 - protein, 203 aa, Arabidopsis thaliana; identical to SEQ ID NO: 41284
  peptide (1)..(203): Ceres Seq. ID no. 13616907

SEQ ID NO: 105300 - protein, 196 aa, Arabidopsis thaliana; identical to SEQ ID NO: 41285
  peptide (1)..(196): Ceres Seq. ID no. 13616908

SEQ ID NO: 105301 - protein, 156 aa, Arabidopsis thaliana; identical to SEQ ID NO: 41286
  peptide (1)..(156): Ceres Seq. ID no. 13616909

SEQ ID NO: 105302 - DNA, 1005 bp, Arabidopsis thaliana
  misc_feature (1)..(1005): Ceres Seq. ID no. 13616934
  misc_feature (1)..(1005): Ortholog of  Ceres SEQ ID NO 12624943 as cited in SEQ ID NO 67802
aatcaaatctctgagctttcagatatactctgatagagaagaagaagaagaagaagagatcagctgagcaacaatggccaccgcgatacctctcttcgcctctttcaagtatgccgatagtctcaccgtcgttggaatctctttctgcacggcgttggtctgcgaagcaatctcatggatcctaatctatcgcacaagctcttacaaatcgttgaaatcttccattgacaaagcctctaagaagcttgagacgatgaagacagataatccttcctcgaagctaacaaacaagaaatcgaagacgaagaagatagatcgcgttgaatccagcttaaaggaatcgagcagagatctatcactcttcaagtttaaatctggtgccgttgtggctttggttctctttgtcgtgtttggattgttgaattcgcttttcgaagggaaagtggtagcgaagcttccgtttcatccgattacgattgtgaggaagatgagtcatagaggattgaaaggcgatgattccactgattgttccatggcttttctttatctgctttgttctattagtataaggactaatctgcagaagttcttgggtttctctccacctagaggagctgctggtgctggtggtttgttcccaatgcctgatccaaagaccaattgatcaggtttgatctgatgatgaattggattctggattcttagctcgttgttactctgaaattttcatagataacttcaatgctctgatgtagtggtgttgttttcagttcgtttgatgagaaacactttcaaagtttcgagttttgagttttcttctagtatgaggtttggatttggatcccttaacatgatctactccttttcaaattcagtcttgattattgtgtgttcaagtccttttcatatgctttgacatctttctaatcatttgtacaccaaaaggcttgagttttcatgcgtatggattgtttggagactgaaatgagaggttagtgaaagatg

SEQ ID NO: 105303 - protein, 196 aa, Arabidopsis thaliana; identical to SEQ ID NO: 34750
  peptide (1)..(196): Ceres Seq. ID no. 13616935

SEQ ID NO: 105304 - protein, 136 aa, Arabidopsis thaliana; identical to SEQ ID NO: 34751
  peptide (1)..(136): Ceres Seq. ID no. 13616936

SEQ ID NO: 105305 - DNA, 1294 bp, Arabidopsis thaliana
  misc_feature (1)..(1294): Ceres Seq. ID no. 13616941
  misc_feature (1)..(1294): Ortholog of  Ceres SEQ ID NO 13638746 as cited in SEQ ID NO 59296
  misc_feature (1)..(1294): Ortholog of  Ceres SEQ ID NO 13596474 as cited in SEQ ID NO 62169
  misc_feature (1)..(1294): Ortholog of  Ceres SEQ ID NO 13598714 as cited in SEQ ID NO 62656
  misc_feature (1)..(1294): Ortholog of  Ceres SEQ ID NO 13596969 as cited in SEQ ID NO 63375
  misc_feature (1)..(1294): Ortholog of  Ceres SEQ ID NO 14302434 as cited in SEQ ID NO 63410
  misc_feature (1)..(1294): Ortholog of  Ceres SEQ ID NO 15225685 as cited in SEQ ID NO 63616
  misc_feature (1)..(1294): Ortholog of  Ceres SEQ ID NO 13597519 as cited in SEQ ID NO 64759
  misc_feature (1)..(1294): Ortholog of  Ceres SEQ ID NO 13587054 as cited in SEQ ID NO 0
atgatcagtcaagaaatacgcgtttaatcgactttttctctctatatatacaattctttcaaaatgatcaaacatagtcataagttccgcaccaatcagtggaaataactaatcaaaactctgtatcatcgttttcaaaacctaattaatggctgtaacaaatcttcctacttgtgatggtttgttcattatcagtcttattgtcatcgtttcttcaatatttgggacatcatctgcgcaactaaacgcaacattttactctgggacttgtcccaacgcctctgccatcgtacgcagcactattcagcaagctcttcaatccgatacaagaatcggagccagcctcatccgccttcattttcatgactgttttgttaatggatgtgatgcatcgatcttgcttgacgacactggaagcatccagagcgagaagaacgctggtccgaatgtaaactcagctagaggattcaacgttgttgataatatcaagactgccctcgaaaacgcttgccctggtgttgtctcttgctctgacgttttagcccttgcctctgaggcttctgtgtctttggcaggagggccatcatggactgtattattaggaagaagagatagtctcacggccaacctcgccggtgcaaattcgtccattccttctcccatcgaaagcctaagcaacatcacatttaaattttcggctgtcgggcttaatacaaacgatctggtagccttatctggtgcgcatacgttcgggcgtgctcgatgtggagtattcaacaacagactatttaacttcagcgggacaggaaatcccgatccaactctaaactcaacgcttctgagcactcttcaacagctatgtcctcaaaacggtagcgcatcaacgatcaccaatcttgatttgagcacaccagatgcgttcgataacaattacttcgccaaccttcagagcaacgatggacttcttcagtcagaccaagagctgttctctaccaccggttcatccaccatcgcgattgttacttcgttcgcaagtaaccagactctgttttttcaggcctttgcacagtccatgatcaatatggggaatattagtcccttgactgggagtaatggagagattaggttagactgtaagaaggttaatggaagttgatttccttaaagctcattttctttgaaaaaacattggcaagctttggttgaataatttttgttatcataatcacatcaaatctgtattgcacttaaatcattctaagcaaatttatgataaatgaaattaaatcaaaac

SEQ ID NO: 105306 - protein, 335 aa, Arabidopsis thaliana; identical to SEQ ID NO: 24060
  peptide (1)..(335): Ceres Seq. ID no. 13616942

SEQ ID NO: 105307 - DNA, 1351 bp, Arabidopsis thaliana
  misc_feature (1)..(1351): Ceres Seq. ID no. 13616943
  misc_feature (1)..(1351): Ortholog of  Ceres SEQ ID NO 13638746 as cited in SEQ ID NO 59296
  misc_feature (1)..(1351): Ortholog of  Ceres SEQ ID NO 14314050 as cited in SEQ ID NO 59952
  misc_feature (1)..(1351): Ortholog of  Ceres SEQ ID NO 13596474 as cited in SEQ ID NO 62169
  misc_feature (1)..(1351): Ortholog of  Ceres SEQ ID NO 13598714 as cited in SEQ ID NO 62656
  misc_feature (1)..(1351): Ortholog of  Ceres SEQ ID NO 13596969 as cited in SEQ ID NO 63375
  misc_feature (1)..(1351): Ortholog of  Ceres SEQ ID NO 15225685 as cited in SEQ ID NO 63616
  misc_feature (1)..(1351): Ortholog of  Ceres SEQ ID NO 13597519 as cited in SEQ ID NO 64759
  misc_feature (1)..(1351): Ortholog of  Ceres SEQ ID NO 13587054 as cited in SEQ ID NO 0
aatcagtaaaacgaaaagctaatccaaaactctttaattatttgcaacaactgatcaatggctgtaacaagctcttcttctacttgtgatggtttcttcatcatcagccttattgttatcgtttcttcattgtttgggacatcatctgcgcagttaaacgcaacgttttactcaggcacatgccctaacgcctctgccatcgttcgcagcactattcagcaagctcttcaatccgatgcaagaatcggaggcagcctaatccgccttcattttcacgactgttttgttaatggttgcgatgggtcgctcttgcttgacgacacttcaagcatccagagcgagaagaacgctcctgccaatgcaaactcaactagaggattcaatgttgtcgatagtatcaagacagccctcgagaatgcttgtccgggcattgtttcttgctctgacattttagctcttgcctcagaggcctctgtgtctttggcaggaggaccttcatggactgtgttattaggaagaagagatggtctcaccgcaaacttgtctggagccaattcgtctcttccctctcccttcgaaggccttaacaacatcacatcaaaatttgtagctgtcgggctaaagacaaccgatgtagtatccttgtctggagcgcatacgtttgggcgtggtcaatgcgtaacgttcaacaatagactattcaacttcaacgggacaggaaaccccgacccgactctgaactcaacacttctcagcagtcttcaacagctatgtcctcaaaacggcagcaatacagggatcaccaatctcgatctgagcacacctgatgcgttcgataacaattacttcacgaaccttcagagtaacaatgggcttctccagtcagaccaggaactgttctcaaacaccggttcagccaccgtcccgattgttaattcctttgcaagtaaccagaccctgttttttgaggcgtttgttcagtctatgatcaagatggggaacattagtcccttgactgggagtagtggagagattagacaagactgtaaggtggttaatggacagtcatcagccactgaagcaggggacattcagttacaatctgacggaccagtgagtgtagcagatatgtgaacaacgatgagatcagtttcaccgtttgtttatcatatatgaataataactcctaggccgaatcatttttgtgaaaaaaataagtttggttgaggagaaaataagtgagtggtagggttgtgttttacacttttgaaaattttaatattctaaaacattattatgcctaaatacatgcatgcatgtataacgtctatcgttttgatacattttgtgg

SEQ ID NO: 105308 - protein, 358 aa, Arabidopsis thaliana; identical to SEQ ID NO: 27751
  peptide (1)..(358): Ceres Seq. ID no. 13616944

SEQ ID NO: 105309 - DNA, 1446 bp, Arabidopsis thaliana
  misc_feature (1)..(1446): Ceres Seq. ID no. 13616945
  misc_feature (1)..(1446): Ortholog of  Ceres SEQ ID NO 14314480 as cited in SEQ ID NO 52362
  misc_feature (1)..(1446): Ortholog of  Ceres SEQ ID NO 13593854 as cited in SEQ ID NO 53403
  misc_feature (1)..(1446): Ortholog of  Ceres SEQ ID NO 12581680 as cited in SEQ ID NO 55019
aaaaatctcacattttttttcttcagtttcatctaaaaagattcaattcatatcgaaaataaaaaaggaacaaactttgctttttgttttcgcaatctccgattcgttaactcgttttctctcttcacctgtttcaagcttttcgatccaacaaatcacgagattcctctttccggtgtggtctccggcgacctaaaataaagagttaattctcgtggtcgtggagagcaaatgagggatgttctcctggttagcgagaatggctcttttttgtttacgacctatgcggcgatacggtcgtatgaacagagatgatgacgatgatgatgatcacgacggtgactcttcttcctccggtgactcccttctttggtctagagaactcgagagacattctttcggagatttctctattgctgttgtgcaagctaacgaggttattgaagatcatagtcaagtcgagactggaaacggtgccgttttcgtcggagtttacgatggtcatggtggtcctgaagcttctagatacatctctgatcatctcttttctcatttgatgagagtttcgagagaaaggagttgtatttcagaggaggctttaagagctgcattttctgctactgaggaagggtttctcacgcttgtgcgaaggacttgcgggttgaaaccgttgattgcagctgttggatcttgttgtttggttggagttatttggaaagggactttgcttatcgctaatgttggtgattctcgtgctgtgcttggttccatgggtagtaataataataggtcaaacaagattgtagctgagcaactgactagtgatcacaatgctgctttggaagaagttagacaagagcttaggtcgttgcatcctgatgattcacatatcgttgtccttaaacatggtgtgtggcgcatcaaaggcatcattcaggtatctagatcaataggggatgcatatttaaagcgcccagagttctcacttgacccttcatttccgcggttccatctcgctgaagaactacaaagacctgttttatcagcagagccttgtgtctacacaagagtcttacaaacaagtgacaagtttgtgatattcgcatcagatggactctgggaacaaatgaccaaccagcaagctgtagagatagtgaataaacacccccgtcctggaatagcgagaaggctggtgagaagagcgataaccatagctgcgaaaaagagagagatgaattacgatgatttgaagaaagtggagagaggagtgaggagattctttcatgatgatataacagtggttgtgatattcatagacaatgagcttcttatggtggagaaagctactgttcctgaattgtccattaaaggtttttctcataccgttggaccttccaagttcagtatcttcctctcttagacatttttgttacatttctttacttt

SEQ ID NO: 105310 - protein, 393 aa, Arabidopsis thaliana; identical to SEQ ID NO: 40665
  peptide (1)..(393): Ceres Seq. ID no. 13616946

SEQ ID NO: 105311 - protein, 386 aa, Arabidopsis thaliana; identical to SEQ ID NO: 40666
  peptide (1)..(386): Ceres Seq. ID no. 13616947

SEQ ID NO: 105312 - protein, 378 aa, Arabidopsis thaliana; identical to SEQ ID NO: 40667
  peptide (1)..(378): Ceres Seq. ID no. 13616948

SEQ ID NO: 105313 - DNA, 1118 bp, Arabidopsis thaliana
  misc_feature (1)..(1118): Ceres Seq. ID no. 13616953
  misc_feature (1)..(1118): Ortholog of  Ceres SEQ ID NO 13597538 as cited in SEQ ID NO 64966
atttatattgttgagctgtgtgtgtggagatgatgatgatgatgataaacccaatagaattttaaaaggataagaatcgcaaagctcatatcacaaaactttgagatctcatttcatctttcttcgattctacctactccgattcaatcgatcttatcgagacatggatgctcgtaagagaggacgccctgaagctgctgcctctcacaactccaatggcggattcaagaggtctaagcaagagatggaatcaatttcaactggtttaggaagcaaatccaagccatgcactaaatttttcagcacttctggatgtccatttggtgacaattgccacttcttgcactatgtgcccggtgggtacaatgctgcagcgcagatgacaaatctccgaccaccggtttctcaagtttccagaaatatgcaaggatctggtggtcccggcggcagattctcagggagaggagatccaggatcaggccctgtttcaatctttggtgcttctacttccaagatcagtgtagatgcttctttagccggtgccatcattggaaaaggtggaatccattccaaacagatatgccgtgaaacaggagcaaaattatcgattaaagatcatgaaagagacccaaacttgaagattatcgagctggaaggaacatttgaacagatcaatgtagcgagtgggatggtgagagagcttatagggaggcttggatcagtgaagaaacctcaagggattggtggtcctgaagggaaaccacatcctgggagcaactacaaaaccaagatctgtgataggtactctaaagggaactgtacatatggagatagatgccattttgctcatggtgaatctgagctgcgcaggtcaggaatcgcttagttatgtctttagactcttgagaacagattatgcattgttagctccattatcattgtgactttttgctctctctttttgttttatcaatttgttttatgcgactcgctttgaaaactttagcccattctgtattgagctctgaagattcgacgagttctgtaagttaccgatcacagttaaaagactttgatatgttaaaacccttatattacagctacatactatttttgtc

SEQ ID NO: 105314 - protein, 240 aa, Arabidopsis thaliana
  peptide (1)..(240): Ceres Seq. ID no. 13616954
MDARKRGRPEAAASHNSNGGFKRSKQEMESISTGLGSKSKPCTKFFSTSGCPFGDNCHFLHYVPGGYNAAAQMTNLRPPVSQVSRNMQGSGGPGGRFSGRGDPGSGPVSIFGASTSKISVDASLAGAIIGKGGIHSKQICRETGAKLSIKDHERDPNLKIIELEGTFEQINVASGMVRELIGRLGSVKKPQGIGGPEGKPHPGSNYKTKICDRYSKGNCTYGDRCHFAHGESELRRSGIA

SEQ ID NO: 105315 - protein, 213 aa, Arabidopsis thaliana
  peptide (1)..(213): Ceres Seq. ID no. 13616955
MESISTGLGSKSKPCTKFFSTSGCPFGDNCHFLHYVPGGYNAAAQMTNLRPPVSQVSRNMQGSGGPGGRFSGRGDPGSGPVSIFGASTSKISVDASLAGAIIGKGGIHSKQICRETGAKLSIKDHERDPNLKIIELEGTFEQINVASGMVRELIGRLGSVKKPQGIGGPEGKPHPGSNYKTKICDRYSKGNCTYGDRCHFAHGESELRRSGIA

SEQ ID NO: 105316 - protein, 168 aa, Arabidopsis thaliana
  peptide (1)..(168): Ceres Seq. ID no. 13616956
MTNLRPPVSQVSRNMQGSGGPGGRFSGRGDPGSGPVSIFGASTSKISVDASLAGAIIGKGGIHSKQICRETGAKLSIKDHERDPNLKIIELEGTFEQINVASGMVRELIGRLGSVKKPQGIGGPEGKPHPGSNYKTKICDRYSKGNCTYGDRCHFAHGESELRRSGIA

SEQ ID NO: 105317 - DNA, 1236 bp, Arabidopsis thaliana
  misc_feature (1)..(1236): Ceres Seq. ID no. 13616961
  misc_feature (1)..(1236): Ortholog of  Ceres SEQ ID NO 12614972 as cited in SEQ ID NO 61986
  misc_feature (1)..(1236): Ortholog of  Ceres SEQ ID NO 12625706 as cited in SEQ ID NO 64144
  misc_feature (1)..(1236): Ortholog of  Ceres SEQ ID NO 13584933 as cited in SEQ ID NO 65009
  misc_feature (1)..(1236): Ortholog of  Ceres SEQ ID NO 12634984 as cited in SEQ ID NO 0
  misc_feature (1)..(1236): Ortholog of  Ceres SEQ ID NO 13599377 as cited in SEQ ID NO 0
gacgccaaacacaaatattccattaaaagaaacattttctatagtcaagcataaagagcattccaatggcgatcccaagtttctccatgtgtcacaagcccgagctccttaaggaaggcaaaagcgaaggccaagaagaagaagggctaagctacgagttccaagagatgttggactctcttcctaaggagagaggacggagaaatcgttacctttacttattccaagggtttcggtgccaagctaaggagattcaagctatcacgtctttccaaaaacattttcagtcccttccagacgacgttgtcctcgccaccatacctaaatctggcacaacctggttaaaagctttaactttcaccatccttacccgtcatcggtttgatccggtttcctcatcaagttccgaccaccctcttctcacatccaaccctcacgacctcgtacctttcttcgagtacaagctttacgccaacggaaatgttcccgatctctcgggtctagccagtccaagaacattcgcaacccacgtaccgttcggtgcccttaaggattcggtcgagaatcccagtgtgaaggttgtgtacctgtgccggaacccgtttgacacattcatctccatgtggcattacatcaacaacatcacttccgagtcagtgagcgcagtcttgctagacgaagcttttgatctatattgccggggattactgatcggatttggcccgttttgggaacacatgttgggatactggagagagagcttgaagaggccagagaaagtcttatttttaaagtacgaggatctcaaagaagacatcgagaccaacttgaagaagctagcaagtttcttaggacttcctttcaccgaagaagaggaacaaaagggagttgtgaaagctatcgctgatctgtgtagctttgagaatctgaagaagttggaggtgaacaagtcaagcaaattgatccagaactatgagaaccggttcttgtttaggaaaggagaagtgagtgatttggttaactatttgtcgccatcacaagtggaaagattgtcagccttagtggatgacaagttagctggatctggtctcactttcagattgagttaaatatgaggccacctgcccacatttatactcctgttttgagggcctataaaagttttaagttaagtgaaggcagttgtattattgttacagatggacaatgatgcaacgtaacgtccacactttagtt

SEQ ID NO: 105318 - protein, 347 aa, Arabidopsis thaliana
  peptide (1)..(347): Ceres Seq. ID no. 13616962
MAIPSFSMCHKPELLKEGKSEGQEEEGLSYEFQEMLDSLPKERGRRNRYLYLFQGFRCQAKEIQAITSFQKHFQSLPDDVVLATIPKSGTTWLKALTFTILTRHRFDPVSSSSSDHPLLTSNPHDLVPFFEYKLYANGNVPDLSGLASPRTFATHVPFGALKDSVENPSVKVVYLCRNPFDTFISMWHYINNITSESVSAVLLDEAFDLYCRGLLIGFGPFWEHMLGYWRESLKRPEKVLFLKYEDLKEDIETNLKKLASFLGLPFTEEEEQKGVVKAIADLCSFENLKKLEVNKSSKLIQNYENRFLFRKGEVSDLVNYLSPSQVERLSALVDDKLAGSGLTFRLS

SEQ ID NO: 105319 - protein, 340 aa, Arabidopsis thaliana; identical to SEQ ID NO: 72686
  peptide (1)..(340): Ceres Seq. ID no. 13616963

SEQ ID NO: 105320 - protein, 313 aa, Arabidopsis thaliana; identical to SEQ ID NO: 72687
  peptide (1)..(313): Ceres Seq. ID no. 13616964

SEQ ID NO: 105321 - DNA, 961 bp, Arabidopsis thaliana
  misc_feature (1)..(961): Ceres Seq. ID no. 13616965
  misc_feature (1)..(961): Ortholog of  Ceres SEQ ID NO 13594296 as cited in SEQ ID NO 57764
acacataacacacacacatcttcttcctctctttatcttcttcttctctgtttctctaagaagatagaacaatcccaagattctcctcttatttgatcaaccatgtcgaatgtcttgctatccccaaacggctacgtatttgcatcgcctaaacctcttggcagattcatcaattcaaagtccggcggacggaaacttttcttctccgtcgttagagcttcttccgatgatgctgattgtaatgccgaagaatgtgctcccgagaaggaggtaggaacagtgagtatggaatggttagctggagagaagacgaaagtggtgggaacatttcctcctcggaagccgcgtggttggactggctatgttgagaaagatactgctggtcagactaatgtttactccattgagcctgcagtatatgttgcagagagcgcgattagctcaggtactgcaggatcatcggctgatggggctgagaacacagcagcaatcgtagcaggcattgctcttatcgcagtcgctgcagcttcctctatactcctccaagtcgggaaagatgccccaactcgacccaaagcagtggattacagtggaccgtctcttagctactacatcaacaagttcaagccttctgaaattgttcaaccttctaccccctccgtcacagaagccccaccggtggccgagctagaaacttcactgccagaaactccatcggtggctcagcaagaaacctcactgccggaaactatggctagtgaggctcagccagaggcgtcttctgttccaacaacaagtagtacctcttaggggcttagcctaggattatatctttgtgtaaaaatgagatgaagcatataccaagattatgcattctgttaatattcggatatacctatatgtatgtatacactctgtcactcttctctttgagtgaatgattatatcaaatctcaaatcc

SEQ ID NO: 105322 - protein, 235 aa, Arabidopsis thaliana; identical to SEQ ID NO: 30350
  peptide (1)..(235): Ceres Seq. ID no. 13616966

SEQ ID NO: 105323 - protein, 174 aa, Arabidopsis thaliana; identical to SEQ ID NO: 30351
  peptide (1)..(174): Ceres Seq. ID no. 13616967

SEQ ID NO: 105324 - DNA, 1579 bp, Arabidopsis thaliana
  misc_feature (1)..(1579): Ceres Seq. ID no. 13616968
  misc_feature (1)..(1579): Ortholog of  Ceres SEQ ID NO 13662245 as cited in SEQ ID NO 62708
aacccatccaacccaaaagcatacaatacaatgtctactcttgttttattcctccaacttttttccatcctaccattagcacttgggttgaaccacccaaattgtgacctgaccaagactcaagaccaaggctctaccctaagaatcttccacatagacagcccttgctcccccttcaaatcatcatccccactctcatgggaagcgcgtgtgctccagacgctggctcaagaccaggcccgtctccagtacctgagcagcctcgtcgccgggagatctgtagtccccattgcctcagggcgtcaaatgttgcaaagcactacatacattgtcaaggctttgatcggtactccggctcagccgctgctcctagccatggacacgagcagtgacgtggcttggattccttgctccggctgcgttggctgtccttctaacacggccttttcccctgctaagtctacatccttcaagaacgttagctgcagcgctcctcagtgtaagcaggtaccaaaccccacgtgtggagcacgcgcgtgctctttcaacctcacctatggaagctcctccattgcggctaacctctctcaagacacgatacgtcttgccgccgatccgatcaaagcctttacattcggatgcgtcaacaaagtcgccggtggaggaaccatcccaccacctcaaggcttgttgggcttgggacgaggcccactttcactcatgtcacaggctcagtctatttacaagtccactttctcttactgtttgccaagtttcaggtctctgaccttctctggttctctcagactcggccctacctcccagccccagcgcgtgaagtacactcaacttctcagaaaccctagaaggtcttctctgtactacgtcaacctcgttgcgatccgcgttggtcggaaagtcgtcgatttaccgccggcagctattgcttttaatccttcaaccggcgctggaaccatcttcgactccggaactgtgtacacgcggctggctaaaccggtttacgaggcagtgaggaacgagttcaggaagcgcgtgaagccaaccacagccgtggtgacgtcactcgggggtttcgacacgtgctactcagggcaagtcaaggtgccgacgataacattcatgttcaagggagtgaacatgacgatgccggctgataacctgatgttacacagtaccgccggaagcacgtcgtgcctcgccatggctgcagcgccggaaaacgtaaactctgtcgtcaatgtgatcgcaagcatgcagcagcagaaccaccgtgtcctcatcgacgtccccaatggacggctcggtttggcacgtgaacgatgctcttagaaagatgaatgagacaataagagcctactcatatttatgcagagacttgtttgtttgtgttatttgtgtgtttcatttttgtcttgtcttgcgtcgtttgcttcaccagtcttagagggcggaggtgtgtagcatttgtgctatctagtaatttatgtttttaattgttcttcaattatctagagtgttggatctaagctaatcaaataatgaaactatattatatttc

SEQ ID NO: 105325 - protein, 449 aa, Arabidopsis thaliana; identical to SEQ ID NO: 29838
  peptide (1)..(449): Ceres Seq. ID no. 13616969

SEQ ID NO: 105326 - protein, 439 aa, Arabidopsis thaliana; identical to SEQ ID NO: 29839
  peptide (1)..(439): Ceres Seq. ID no. 13616970

SEQ ID NO: 105327 - protein, 347 aa, Arabidopsis thaliana; identical to SEQ ID NO: 29840
  peptide (1)..(347): Ceres Seq. ID no. 13616971

SEQ ID NO: 105328 - DNA, 1509 bp, Arabidopsis thaliana
  misc_feature (1)..(1509): Ceres Seq. ID no. 13616972
  misc_feature (1)..(1509): Ortholog of  Ceres SEQ ID NO 15177652 as cited in SEQ ID NO 56858
gcatgtgatatagaaatcaagatgggaagccaaggcatgagttcaccgagtcccttggtggtgaagaaatcgcaagtggttatagtgaaaccctcaaaggctacacctgatgtctctctttctctctccacactcgacaacgatccttatctcgaaaccctcgccaaaaccatctatgtctacgctccaccatccccaaacgaccacgtccacgatccagcttccctttttcagcaagctctctctgacgcccttgtctattactaccctctcgctggaaaacttcaccggggatcacacgaccatagactagaattgaggtgcagtcccgcggaaggagtcccctttgttagggcaaccgcagactgtactctctcttccctcaactatttgaaggacatggacactgacttataccaactcgtaccttgtgatgtagctgcgccctctggcgattacaaccctctggctttgcagatcactttgtttgcatgcggagggctcactcttgctacggccctctctcattccttgtgtgatggttttggagcgtctcagtttttcaaaaccttaactgagctcgccgcgggaaaaacacaacctagcatcatccccgtctgggacagacatcgtctcacttctaacaactttagcttaaacgaccaagtggaggagggacaagctcccaagctagttgattttggagaggcttgctcttctgcggcaacttctccctacacacccagcaacgacatggtatgtgagatcctcaacgtgacatccgaagatattactcagctcaaggagaaagttgcgggggtggtcacgactctagagattcttgcggcccacgtctggagagcaaggtgccgggccttgaagttaagtccagatgggacttctcttttcggaatggctgtgggtatacgccgcattgtggagccaccattaccggaagggtactacggaaacgcatttgtcaaagccaacgtagcaatgaaggctggagagttaagcaactcaccgttgtctcacgttgttcagctcattaaagaggcaaagaaagcggcacaggagaagaggtacgtgttggagcagttaagagagacagagaaaacgttgaagatgaatgtagcgtgtgaaggagggaaaggagcgttcatgttgcttactgattggaggcaacttggattgctagacgaaattgattttgggtatggaggatcagtgaatattataccattggtgcccaagtatctgccggatatttgtattttcttgccgaggaagcaaggtggtgttagagtgctagtcacgctgcccaaatctgtaatggtcaacttcaaggaacacataaatcccctaaatacatgaaattaataagcaggtgaatgtaattcacagtgtttctttaaaatatgaaaaggacctcatgcgattgtatatttaaagcttttgtttgctgtttgtttaagtttttcacatttggaaagtaatattttacaaacc

SEQ ID NO: 105329 - protein, 457 aa, Arabidopsis thaliana; identical to SEQ ID NO: 30323
  peptide (1)..(457): Ceres Seq. ID no. 13616973

SEQ ID NO: 105330 - protein, 450 aa, Arabidopsis thaliana; identical to SEQ ID NO: 30324
  peptide (1)..(450): Ceres Seq. ID no. 13616974

SEQ ID NO: 105331 - protein, 445 aa, Arabidopsis thaliana; identical to SEQ ID NO: 30325
  peptide (1)..(445): Ceres Seq. ID no. 13616975

SEQ ID NO: 105332 - DNA, 891 bp, Arabidopsis thaliana
  misc_feature (1)..(891): Ceres Seq. ID no. 13616980
  misc_feature (1)..(891): Ortholog of  Ceres SEQ ID NO 12627129 as cited in SEQ ID NO 68657
  misc_feature (1)..(891): Ortholog of  Ceres SEQ ID NO 15179538 as cited in SEQ ID NO 0
gccgacagtttgaagtaaagccagcaaatcgtgaaagccatttacttttagatctctctctgcactctctgactttgtccgcaaagtagatctgctgcaatggcttctcctcttctcccaacttcgactactcctgatcaacttcccggcggcgatccacagttgctgagctctctacgcgtcctcttgtcccgcgttctagccaccgtccgtcacgcttctgcagatgccagaccctgggcagagctcgttgaccggtcagcgttttcccggccaccatcgctctcggaggcaacgtcacgagtaaggaagaacttttcctatttccgagccaattacataaccttagtggcaatcttactcgccgcgtctctgctcacgcaccctttcgctctcttcctcctcgcatcgctggccgcttcttggcttttcctctactttttccgtccggcggatcagccgttggtcattggaggacgcacgttctccgatcttgagacgctagggatactctgcctgtccactgtggtggtgatgttcatgaccagcgttggatcgctcttgatgtccactctagcagttgggatcatgggcgtggccatccacggagcgtttcgtgctcccgaagacctgtttcttgaagaacaagaagccattggatctggacttttcgcattcttcaacaacaatgcctctaatgcagctgccgctgccatagccacctcagcaatgtcacgcgttcgagtctgagattgttgaagagactacattcctacaccgcatttccaaagtgtgatatttattcatattgaattgttgtaacttgtaaccattcttttgtcatttctgttttgtttactttgttgctggaattttgaaacacaattcatc

SEQ ID NO: 105333 - protein, 216 aa, Arabidopsis thaliana; identical to SEQ ID NO: 35333
  peptide (1)..(216): Ceres Seq. ID no. 13616981

SEQ ID NO: 105334 - DNA, 1279 bp, Arabidopsis thaliana
  misc_feature (1)..(1279): Ceres Seq. ID no. 13617001
  misc_feature (1)..(1279): Ortholog of  Ceres SEQ ID NO 13647847 as cited in SEQ ID NO 20430
  misc_feature (1)..(1279): Ortholog of  Ceres SEQ ID NO 15171696 as cited in SEQ ID NO 59997
gttttggtgtttcttcgtcgacgtcgctatctccaatctcattactcccctttctcaatgatcataaaacctacttcgattctactccttatcaactgaatcaccgaaaaacctcaccttttttctttttccgatcatggggaatctgatcagtttgatcttctgctgcgggagaaggcagaggagcaatattcctccggcgatggaaacggctcctcttgaactcccaccgaacagatttgtattcgccgccgtgccaccatatctgaaccctaaccctaactacgttgaccagtatccaggtaactgccttcctccgccagtaactgagccgccgatgctaccgtacaatttcaaccatttgcatcactatcctcccaacagttaccaactacctcatcctttgtttcacggcggtagataccctatactgccgcctcctacgtacgtccaccagaaagccgtcacgattcgtaacgatgttaatctgaagaagaagactttaacgctcatacccgacccggagaatccgaatcgacttcttgtctccttcacatttgatgcatccatgcccggaaggatcacagttgttttctttgctacagaagatgcagaatgtaatcttagagctacaaaggaagatactttgcctccaatcacttttgatttcggagaaggacttggtcagaagttcatacaatcatctggaacgggtatagacttgacggcgtttaaagattccgagctattcaaggaggtggatacagatgtcttcccgttggcggttaaggcggaggcaactccagcggaagaaggaaagtctggttccaccaatgtgcagattactcaagtggtgtataccaaggagaaaggagagattaaaatagaagtggtgaagcagatactatgggtgaataagaggaggtatgagctgcttgagatttatgggattgagaacacggttgatggttccgatgagggaaaggaatgtgttgtatgcttgtctgaaccacgcgatacaactgttcttccttgcagacacatgtgtatgtgtagcgggtgcgcaaaggcgttaaggtttcagacaaatctgtgcccagtttgcagacaacctgttgagatgcttttggagattaacaagaacggatgaaatggagatggagaatgaacaaatttagttaagcaatcgacttgtgtaatatatgccatgcttaattaagacgtaaaacgttatggttcaatatattataagtggaaactgagttcttaaatagcaatg

SEQ ID NO: 105335 - protein, 337 aa, Arabidopsis thaliana
  peptide (1)..(337): Ceres Seq. ID no. 13617002
MGNLISLIFCCGRRQRSNIPPAMETAPLELPPNRFVFAAVPPYLNPNPNYVDQYPGNCLPPPVTEPPMLPYNFNHLHHYPPNSYQLPHPLFHGGRYPILPPPTYVHQKAVTIRNDVNLKKKTLTLIPDPENPNRLLVSFTFDASMPGRITVVFFATEDAECNLRATKEDTLPPITFDFGEGLGQKFIQSSGTGIDLTAFKDSELFKEVDTDVFPLAVKAEATPAEEGKSGSTNVQITQVVYTKEKGEIKIEVVKQILWVNKRRYELLEIYGIENTVDGSDEGKECVVCLSEPRDTTVLPCRHMCMCSGCAKALRFQTNLCPVCRQPVEMLLEINKNG

SEQ ID NO: 105336 - protein, 315 aa, Arabidopsis thaliana
  peptide (1)..(315): Ceres Seq. ID no. 13617003
METAPLELPPNRFVFAAVPPYLNPNPNYVDQYPGNCLPPPVTEPPMLPYNFNHLHHYPPNSYQLPHPLFHGGRYPILPPPTYVHQKAVTIRNDVNLKKKTLTLIPDPENPNRLLVSFTFDASMPGRITVVFFATEDAECNLRATKEDTLPPITFDFGEGLGQKFIQSSGTGIDLTAFKDSELFKEVDTDVFPLAVKAEATPAEEGKSGSTNVQITQVVYTKEKGEIKIEVVKQILWVNKRRYELLEIYGIENTVDGSDEGKECVVCLSEPRDTTVLPCRHMCMCSGCAKALRFQTNLCPVCRQPVEMLLEINKNG

SEQ ID NO: 105337 - protein, 270 aa, Arabidopsis thaliana
  peptide (1)..(270): Ceres Seq. ID no. 13617004
MLPYNFNHLHHYPPNSYQLPHPLFHGGRYPILPPPTYVHQKAVTIRNDVNLKKKTLTLIPDPENPNRLLVSFTFDASMPGRITVVFFATEDAECNLRATKEDTLPPITFDFGEGLGQKFIQSSGTGIDLTAFKDSELFKEVDTDVFPLAVKAEATPAEEGKSGSTNVQITQVVYTKEKGEIKIEVVKQILWVNKRRYELLEIYGIENTVDGSDEGKECVVCLSEPRDTTVLPCRHMCMCSGCAKALRFQTNLCPVCRQPVEMLLEINKNG

SEQ ID NO: 105338 - DNA, 1225 bp, Arabidopsis thaliana
  misc_feature (1)..(1225): Ceres Seq. ID no. 13617008
  misc_feature (1)..(1225): Ortholog of  Ceres SEQ ID NO 13596039 as cited in SEQ ID NO 62117
aataattcatcctttcgtctttttctgactcttcaatctctcccaaagcctaaagcgatctctgcaaatctctcgcgactctctctttcaagatgcaaatcttcgtgaaaacactcactggcaagactatcactctcgaggttgagagctctgacaccatcgacaatgttaaggcaaagattcaggacaaggaaggcattcctccggatcagcaaagattaatattcgccggtaaacagctagaagatggccgtaccttggccgattacaacattcagaaagaatcaacccttcatttggttctccgtttaagaggtggtatgcaaatctttgtcaagactctgactggcaagaccattactttggaggttgagagctctgacactattgacaacgtcaaagcaaagatccaggacaaggaaggaatccctccggatcagcagagacttatctttgccggtaagcagcttgaagacggaagaactcttgctgactacaacattcaaaaggagtcgacccttcatttggtgcttcgtctcagaggtggtatgcaaatctttgtcaagaccctcactggtaaaacaatcacccttgaggttgagagttcagacaccattgacaatgtcaaagctaagatccaagataaagagggaattcctccggatcagcagaggcttatctttgccggtaagcagctcgaagatggacgcacccttgcagattacaacatccaaaaggagtcgacacttcatcttgtgcttcgtctccgtggtggtatgcagatctttgtgaagacccttaccggaaagaccattactctggaggttgaaagctcagacaccatcgataatgtcaaggctaagattcaggacaaggaagggatcccaccagaccaacagagactcatcttcgctggaaaacagcttgaggatggtcgcacacttgcagattacaacatccagaaggagtcgactcttcacttggttcttcgtcttcgtggtggaagcttctaagctttttgtgatctgatgataagtggttggttcgtgtctcatgcacttgggaggtgatctatttcacctggtgtagtttgtgtttccgtcagttggaaaaacttatccctatcgatttcgttttcattttctgcttttcttttatgtaccttcgtttgggcttgtaacgggcctttgtatttcaactctcaataataatccaagtgcatgtt

SEQ ID NO: 105339 - protein, 306 aa, Arabidopsis thaliana; identical to SEQ ID NO: 42947
  peptide (1)..(306): Ceres Seq. ID no. 13617009

SEQ ID NO: 105340 - protein, 230 aa, Arabidopsis thaliana; identical to SEQ ID NO: 42948
  peptide (1)..(230): Ceres Seq. ID no. 13617010

SEQ ID NO: 105341 - protein, 154 aa, Arabidopsis thaliana; identical to SEQ ID NO: 42949
  peptide (1)..(154): Ceres Seq. ID no. 13617011

SEQ ID NO: 105342 - DNA, 1560 bp, Arabidopsis thaliana
  misc_feature (1)..(1560): Ceres Seq. ID no. 13617012
  misc_feature (1)..(1560): Ortholog of  Ceres SEQ ID NO 13654989 as cited in SEQ ID NO 63117
  misc_feature (1)..(1560): Ortholog of  Ceres SEQ ID NO 13655640 as cited in SEQ ID NO 63844
  misc_feature (1)..(1560): Ortholog of  Ceres SEQ ID NO 13584744 as cited in SEQ ID NO 69137
aaacctttgacttcaaatttgttcttcctcttattagtcttcgtcatattttcttccttcttccatcttttagttctgataagttaacattttcataagacctcaaaaatagctcctacatttgttatcttccttttcaagtcaacaatatttttttttgttctgttatcaaagactccttcttttggtgattaaactctgttcaacttctgaaaaaaagttttgatttttcttttgtctgtagtacacaaagatctcaaagtggaggaacctcggtgttttaacatctttacgaagatgaaatgcttcttattccctcttggggacaagaaagatgaacagagaagccctaaaccggtttcaccaacgtctaacttcagtgacgtaaacaaaagcggttcagatttcagtccccgggatgtttctggaacgagcacagtatcatccactggtaggaactcgaacactagcatgtcagctagagaaaacaaccttagagagttcactattggtgatcttaaatctgccacaaggaacttcagcaggtcaggtatgatcggggaaggcggttttggttgtgtcttctggggaacaatcaagaacttagaagacccatcgaagaaaatcgaagtcgcggttaaacagctcggcaaaagagggttgcagggtcataaagaatgggtgactgaagtgaactttctcggtgtagtcgagcattcaaacttggtgaagttgctgggacattgtgcagaagacgatgaacgtggaatccaaaggcttttggtttatgaatatatgccaaaccaaagtgtcgagttccatttatctccgcggtcaccgacagtacttacttgggacctcagattgagaatagcacaagacgcagctcgaggtttaacataccttcatgaagaaatggactttcagataatattccgtgatttcaagtcatccaacattctactagacgagaattggacagcgaagctttcggatttcggtttggctcgcttaggtccttcaccaggatccagccatgtttctactgatgtagtaggaacaatgggatacgcagctccagagtatatccaaacgggtcgcctcacgtcgaaaagcgatgtgtggggatacggagttttcatctatgagctcattacaggaagaaggccactagaccggaacaagcctaaaggagagcagaagcttttagaatgggtgagaccttacttatccgacacaaggaggttccggctaatagtagacccgaggctcgagggaaagtacatgatcaagtcagtgcagaaactcgcggttgtagccaacctttgccttactagaaacgcaaaggcgcgtccaaagatgagcgaggtgttagagatggtgacaaagattgtggaagcttcatcgcctgggaatggtggcaagaagccgcagctggttccactaaagagtcaagaaacttctagagtcgaggaagggaagaataagaaggttcttgatggtgctgaaggaggttggttagaaaagttgtggaacccaaagaatgtgagagcttgttga

SEQ ID NO: 105343 - protein, 420 aa, Arabidopsis thaliana
  peptide (1)..(420): Ceres Seq. ID no. 13617013
MKCFLFPLGDKKDEQRSPKPVSPTSNFSDVNKSGSDFSPRDVSGTSTVSSTGRNSNTSMSARENNLREFTIGDLKSATRNFSRSGMIGEGGFGCVFWGTIKNLEDPSKKIEVAVKQLGKRGLQGHKEWVTEVNFLGVVEHSNLVKLLGHCAEDDERGIQRLLVYEYMPNQSVEFHLSPRSPTVLTWDLRLRIAQDAARGLTYLHEEMDFQIIFRDFKSSNILLDENWTAKLSDFGLARLGPSPGSSHVSTDVVGTMGYAAPEYIQTGRLTSKSDVWGYGVFIYELITGRRPLDRNKPKGEQKLLEWVRPYLSDTRRFRLIVDPRLEGKYMIKSVQKLAVVANLCLTRNAKARPKMSEVLEMVTKIVEASSPGNGGKKPQLVPLKSQETSRVEEGKNKKVLDGAEGGWLEKLWNPKNVRAC

SEQ ID NO: 105344 - protein, 362 aa, Arabidopsis thaliana
  peptide (1)..(362): Ceres Seq. ID no. 13617014
MSARENNLREFTIGDLKSATRNFSRSGMIGEGGFGCVFWGTIKNLEDPSKKIEVAVKQLGKRGLQGHKEWVTEVNFLGVVEHSNLVKLLGHCAEDDERGIQRLLVYEYMPNQSVEFHLSPRSPTVLTWDLRLRIAQDAARGLTYLHEEMDFQIIFRDFKSSNILLDENWTAKLSDFGLARLGPSPGSSHVSTDVVGTMGYAAPEYIQTGRLTSKSDVWGYGVFIYELITGRRPLDRNKPKGEQKLLEWVRPYLSDTRRFRLIVDPRLEGKYMIKSVQKLAVVANLCLTRNAKARPKMSEVLEMVTKIVEASSPGNGGKKPQLVPLKSQETSRVEEGKNKKVLDGAEGGWLEKLWNPKNVRAC

SEQ ID NO: 105345 - protein, 335 aa, Arabidopsis thaliana
  peptide (1)..(335): Ceres Seq. ID no. 13617015
MIGEGGFGCVFWGTIKNLEDPSKKIEVAVKQLGKRGLQGHKEWVTEVNFLGVVEHSNLVKLLGHCAEDDERGIQRLLVYEYMPNQSVEFHLSPRSPTVLTWDLRLRIAQDAARGLTYLHEEMDFQIIFRDFKSSNILLDENWTAKLSDFGLARLGPSPGSSHVSTDVVGTMGYAAPEYIQTGRLTSKSDVWGYGVFIYELITGRRPLDRNKPKGEQKLLEWVRPYLSDTRRFRLIVDPRLEGKYMIKSVQKLAVVANLCLTRNAKARPKMSEVLEMVTKIVEASSPGNGGKKPQLVPLKSQETSRVEEGKNKKVLDGAEGGWLEKLWNPKNVRAC

SEQ ID NO: 105346 - DNA, 1101 bp, Arabidopsis thaliana
  misc_feature (1)..(1101): Ceres Seq. ID no. 13617031
  misc_feature (1)..(1101): Ortholog of  Ceres SEQ ID NO 13656436 as cited in SEQ ID NO 69154
aacttgttttcttcagcgagcgacattttggaaggaagcattccattagcttttttgctgtctccagaaaataaattttcaatctttcgtcggaaaaaagaagaagaagaagcagagctgggtttagttttttcacgagaagcaaagagatcaataagtcagtgagcttttttctcgtttctgacgatggcggttgcgccggcaagagctcgttcagactatgattacctcatcaagcttcttctcatcggcgatagcggtgtggggaagagttgtttgttacttcgattctcagatgatactttcactacaagtttcattactaccattggtattgacttcaagataagaactgttgaacttgatgggaagcgtatcaaattgcagatttgggacactgctggtcaagaacgtttcagaactatcactacagcgtattacaggggagcgatgggtatattgcttgtctacgatgtaacggatgagtcatcttttaacaatattaggaactggatgaagaacattgagcaacatgcctcagataatgtcaacaaaatattggttggtaacaaagctgatatggatgaaagcaaaagggctgttccaacagcaaagggccaagctttggctgatgagtatggaatcaaattctttgagacgagtgcaaaaacaaacctcaatgtcgaaaatgttttcatgtcaatcgcaaaagacataaaacaaagattgacagaaaccgacacgaaggcagagccccaaggcatcaagatcactaaacaagatactgccgcatcgtcttctacagccgagaagtcagcttgctgtagttacgtttaggagtatgattgctctttttcgcctgcaccgggttttttaaatatctggccatctttttcatctcttacgtctcaaatcagagataattctcatgttgttacctagaacgagtaggaaatctcattgatggttgtgatctttatgtctaatttgttatctccataattcctgtacaatgatcttcctgatatggaagactatgttggtcaaaaaactatgtgaaaaagactttgaatttataaaaatgaaactgttgtagtgtgt

SEQ ID NO: 105347 - protein, 216 aa, Arabidopsis thaliana; identical to SEQ ID NO: 26592
  peptide (1)..(216): Ceres Seq. ID no. 13617032

SEQ ID NO: 105348 - protein, 128 aa, Arabidopsis thaliana; identical to SEQ ID NO: 26593
  peptide (1)..(128): Ceres Seq. ID no. 13617033

SEQ ID NO: 105349 - DNA, 1361 bp, Arabidopsis thaliana
  misc_feature (1)..(1361): Ceres Seq. ID no. 13617034
  misc_feature (1)..(1361): Ortholog of  Ceres SEQ ID NO 14314037 as cited in SEQ ID NO 52244
  misc_feature (1)..(1361): Ortholog of  Ceres SEQ ID NO 13661419 as cited in SEQ ID NO 61673
acaaattcaattccaattctcaaagtgctctctttttaaaccaatctgctctcttccacttactctctctatctctctcccatctcgtttcttttttggtcattaaaagagaaacctttgctctgaatcttgaaaatggattctttgatcaaactcttcttctgcctctttatcttcttatgtacttcgctcttatttggagaaatcaatggagtggagggttcaaatcaaaatcatcacttgtatccatttaggccaacgaagctctttgtgttcggagattcttatgccgataccggaaacattaaaaaggctttctctagctcttggaaattcccttacggtatcactttccccggaaaacccgctggccgtttctccgatggccgtgtggcaacagattttctagctaaatttgtggggataaaatcaccaatcccatacttttggaaagattacgcgggaaagaaacgattacagtacggaatgaattttgcgtacggaggaacaggagtgttcaacactcaaactccattgcctaacatgacaactcaaatcgacatcttccagaacattctcaccaccggcgacatctactatcctcccgagcttacttcatccgtggctctcgtcagtgtcgctggcaacgactactccaatttcatcgccctaaaccgccctgcctctgaattcccagcattcataaagcaagttgtggatcaaacagaggtgaatttgagacggatccacgctttgggagtgaaaaagattgcagtaccatccctgcaaccgcttggttgtctccctcccttcacattcgtaacctcgttccagcgttgcaacgagacacaaaacgctttagttaacctccacaacaacttattgcagcaagttgtggcaaagctcaataacgagactaaacagtcgactttcatcatccttgatctctacaatgctttcttgactgtgttcaagaacaaaggatctaatccagggagtacaaggtttgagagtccattaaagccgtgttgcgtaggtgtgagccgcgagtataactgtggaagtgtggatgagaagggagtgaagaagtatattgtatgtgataatcctaaaactgctttcttttgggatggacttcaccctacagaagaaggatggagatcggtttactctgttttacgcgaaagtcttaccgcgtctttgattaaagcgtgagaaacaaaagaaacacacattttgcttaggttttttcttatgaagctcaatgtttgagcgctctgttcctgttttcagtatctcttcattcatttgtgtttgtgtgtttaaagattgtgtgactaataaaatctcttaactggttc

SEQ ID NO: 105350 - protein, 359 aa, Arabidopsis thaliana; identical to SEQ ID NO: 29103
  peptide (1)..(359): Ceres Seq. ID no. 13617035

SEQ ID NO: 105351 - protein, 242 aa, Arabidopsis thaliana; identical to SEQ ID NO: 29104
  peptide (1)..(242): Ceres Seq. ID no. 13617036

SEQ ID NO: 105352 - protein, 223 aa, Arabidopsis thaliana; identical to SEQ ID NO: 29105
  peptide (1)..(223): Ceres Seq. ID no. 13617037

SEQ ID NO: 105353 - DNA, 1252 bp, Arabidopsis thaliana
  misc_feature (1)..(1252): Ceres Seq. ID no. 13617046
  misc_feature (1)..(1252): Ortholog of  Ceres SEQ ID NO 15171279 as cited in SEQ ID NO 51378
  misc_feature (1)..(1252): Ortholog of  Ceres SEQ ID NO 13596816 as cited in SEQ ID NO 62287
atacatatcaatgttaatttgtatataaggagctaagaacaaacccaattaggcaactagcaattgctaaaacacgtaagatctcaaatatgaccacgttattcctccttattgctctattcatcacaaccatcctcaacccaacaagtggagaatcagtaggtgtatgctatggaatgatggggaacaaccttccttctcaatcagacacaatcgctctctttagacaaaacaacatccgacgtgttagactctacgatccaaaccaagccgctttaaacgctcttagaaacacgggtatcgaagtcatcatcggcgttccaaacaccgatcttcgttcactcactaacccttcttccgctagatcatggctccaaaacaacgtcctcaactattaccccgccgttagcttcaagtacatcgccgtaggtaacgaagtatctccgtcgaacggcggtgatgttgtgctccctgccatgcgtaacgtttacgatgctctaagaggtgcaaatcttcaagatcgtattaaagtttctaccgccattgatatgactttgattggaaactctttccctccttcctccggagagtttcgtggtgacgttagatggtatatcgatcccgtcatcgggtttcttacgagtacgaactcagcgttactagccaacatctatccttacttcagctacgttgacaatccacgtgacatatctctctcttacgctctcttcacttctccttccgtcgtcgtatgggacggctctcgtggctaccaaaacctctttgacgctttacttgacgttgtttactctgccgttgaacgctcaggcggtggatctctcccagtggttgtttccgagagcggatggccttctaacggtggaaacgccgcgagtttcgataacgcgcgaagctttttacacgaatcttgcgtcgcgtgtgagagagaacagaggaacaccgaagagacctggaagaggagtggaaacgtatttgttcgctatgtttgatgagaatcaaaagagtcctgagatcgagaagaattttggtttgttttttcctaataaacaaccaaaatttccgatcacattctctgccgcgagagacggtacggcggttgagtgatgattttatatgctgagatttatgtgaataattgggagattatcccataaaaggttccaaataaagacaaatttcaaataaaacctgttagtccaagttaaattaaatactcggctttgttttggtc

SEQ ID NO: 105354 - protein, 306 aa, Arabidopsis thaliana
  peptide (1)..(306): Ceres Seq. ID no. 13617047
MTTLFLLIALFITTILNPTSGESVGVCYGMMGNNLPSQSDTIALFRQNNIRRVRLYDPNQAALNALRNTGIEVIIGVPNTDLRSLTNPSSARSWLQNNVLNYYPAVSFKYIAVGNEVSPSNGGDVVLPAMRNVYDALRGANLQDRIKVSTAIDMTLIGNSFPPSSGEFRGDVRWYIDPVIGFLTSTNSALLANIYPYFSYVDNPRDISLSYALFTSPSVVVWDGSRGYQNLFDALLDVVYSAVERSGGGSLPVVVSESGWPSNGGNAASFDNARSFLHESCVACEREQRNTEETWKRSGNVFVRYV

SEQ ID NO: 105355 - protein, 277 aa, Arabidopsis thaliana
  peptide (1)..(277): Ceres Seq. ID no. 13617048
MMGNNLPSQSDTIALFRQNNIRRVRLYDPNQAALNALRNTGIEVIIGVPNTDLRSLTNPSSARSWLQNNVLNYYPAVSFKYIAVGNEVSPSNGGDVVLPAMRNVYDALRGANLQDRIKVSTAIDMTLIGNSFPPSSGEFRGDVRWYIDPVIGFLTSTNSALLANIYPYFSYVDNPRDISLSYALFTSPSVVVWDGSRGYQNLFDALLDVVYSAVERSGGGSLPVVVSESGWPSNGGNAASFDNARSFLHESCVACEREQRNTEETWKRSGNVFVRYV

SEQ ID NO: 105356 - protein, 276 aa, Arabidopsis thaliana
  peptide (1)..(276): Ceres Seq. ID no. 13617049
MGNNLPSQSDTIALFRQNNIRRVRLYDPNQAALNALRNTGIEVIIGVPNTDLRSLTNPSSARSWLQNNVLNYYPAVSFKYIAVGNEVSPSNGGDVVLPAMRNVYDALRGANLQDRIKVSTAIDMTLIGNSFPPSSGEFRGDVRWYIDPVIGFLTSTNSALLANIYPYFSYVDNPRDISLSYALFTSPSVVVWDGSRGYQNLFDALLDVVYSAVERSGGGSLPVVVSESGWPSNGGNAASFDNARSFLHESCVACEREQRNTEETWKRSGNVFVRYV

SEQ ID NO: 105357 - DNA, 1837 bp, Arabidopsis thaliana
  misc_feature (1)..(1837): Ceres Seq. ID no. 13617057
  misc_feature (1)..(1837): Ortholog of  Ceres SEQ ID NO 13663419 as cited in SEQ ID NO 66561
aaaaatcaaaaaaattcatatcatctttttgtctttttttaccagaatttcatccttatttcgtgctaaatcattttccaaacattcataatactttttgttggtttatggccaactaacaaaatatcctctagattttcttctttgtgttagtctatataaagcaataccacagtgatcctcttttttaattcattctgtgtttatgtcaataatcacaatggtttggttaatgaaagtttttgtctttgtgacattactctctttagtgtttgtaataacagaatcagctcctgaatctgctcttatcaccaaacttcctggtttcgaaggcacttttccttcgaaacattactccgggtatgtgacaattgataaggaacatggaaagaatctatggtattactttattgaatcggagaagaatccatcgaaagatccggtggtgctttggctcaatggtggtccaggttgttcaagcatggatggatttgtgtatgagcatggtccattcaatttcgaactaccaaagaaaaacaatagtctcccactcttgcatcttaatccttatagttggtccaaggtctctaacattatataccttgattctcctgttggtgtgggattctcttactcaaacaataagtctgattacataaccggtgatattaaaaccgcggttgactctcacgcgttccttctcaagtggttccaaatgtttcctgagtttcaatcaaatccttttttcatctctggagaatcttacgccggagtttatgtcccaactcttgcttcagaagttgtcatagggaacaaaaatggagtaaagccggctcttaacttcaaggggtatttggttggaaatggagttgcggatccgaagtttgatggaaatgcttttgtcccgtttgcacatgggatgggactaatctctgatgaactctttgagaacgttacaaaagcttgcaagggaaatttctatgaaatagagggactcgagtgcgaggaacagtatacgaaagttaacgatgatactaaccagttgaatatatacaacattcttgagccatgttaccacggaacatcgctatctgcattcgacattagatcgcttccttcaagtctccttcagctaggcaaaactgaaaaacggttacctataagaaaaagaatgtttggtcgagcgtggccagttcgtgcgcctgttcatccaggcattgtccctagctggtctcaacttcttgccgacgtcactgttccttgcattgatgatagagttgcaacagcgtggttgaacgatccagagattaggaaagctattcatactaaagaggagagcgagattggaaggtgggaactttgcagtgggaaactctcattctatcacgacgcaggaagcatgatcgatttccatagaaaccttacactaagtggatatagagctctcatttacagcggggatcacgatatgtgtgttccgtttactggctcggaagcttggacaaaatctcttggatacaaagttattgatgaatggagggcatggatatcaaatgaccaagtcgcggggtatacgcaaggatatgcaaacaatctcacatttttaaccatcaagggtgcaggacatacggttcctgagacaaaccgcgggaggctttagacttctatagccgatttctagaaggaagcaagatttaagagagctgtctcatcagtttcatattctgtgctgtatttaaaagtgatcatcttatagcaatatagaatcttgattgatttgaataagaaagatatattcttcaactcattattcaacatagtaaaaatcatttacctc

SEQ ID NO: 105358 - protein, 484 aa, Arabidopsis thaliana
  peptide (1)..(484): Ceres Seq. ID no. 13617058
MSIITMVWLMKVFVFVTLLSLVFVITESAPESALITKLPGFEGTFPSKHYSGYVTIDKEHGKNLWYYFIESEKNPSKDPVVLWLNGGPGCSSMDGFVYEHGPFNFELPKKNNSLPLLHLNPYSWSKVSNIIYLDSPVGVGFSYSNNKSDYITGDIKTAVDSHAFLLKWFQMFPEFQSNPFFISGESYAGVYVPTLASEVVIGNKNGVKPALNFKGYLVGNGVADPKFDGNAFVPFAHGMGLISDELFENVTKACKGNFYEIEGLECEEQYTKVNDDTNQLNIYNILEPCYHGTSLSAFDIRSLPSSLLQLGKTEKRLPIRKRMFGRAWPVRAPVHPGIVPSWSQLLADVTVPCIDDRVATAWLNDPEIRKAIHTKEESEIGRWELCSGKLSFYHDAGSMIDFHRNLTLSGYRALIYSGDHDMCVPFTGSEAWTKSLGYKVIDEWRAWISNDQVAGYTQGYANNLTFLTIKGAGHTVPETNRGRL

SEQ ID NO: 105359 - protein, 479 aa, Arabidopsis thaliana
  peptide (1)..(479): Ceres Seq. ID no. 13617059
MVWLMKVFVFVTLLSLVFVITESAPESALITKLPGFEGTFPSKHYSGYVTIDKEHGKNLWYYFIESEKNPSKDPVVLWLNGGPGCSSMDGFVYEHGPFNFELPKKNNSLPLLHLNPYSWSKVSNIIYLDSPVGVGFSYSNNKSDYITGDIKTAVDSHAFLLKWFQMFPEFQSNPFFISGESYAGVYVPTLASEVVIGNKNGVKPALNFKGYLVGNGVADPKFDGNAFVPFAHGMGLISDELFENVTKACKGNFYEIEGLECEEQYTKVNDDTNQLNIYNILEPCYHGTSLSAFDIRSLPSSLLQLGKTEKRLPIRKRMFGRAWPVRAPVHPGIVPSWSQLLADVTVPCIDDRVATAWLNDPEIRKAIHTKEESEIGRWELCSGKLSFYHDAGSMIDFHRNLTLSGYRALIYSGDHDMCVPFTGSEAWTKSLGYKVIDEWRAWISNDQVAGYTQGYANNLTFLTIKGAGHTVPETNRGRL

SEQ ID NO: 105360 - protein, 475 aa, Arabidopsis thaliana
  peptide (1)..(475): Ceres Seq. ID no. 13617060
MKVFVFVTLLSLVFVITESAPESALITKLPGFEGTFPSKHYSGYVTIDKEHGKNLWYYFIESEKNPSKDPVVLWLNGGPGCSSMDGFVYEHGPFNFELPKKNNSLPLLHLNPYSWSKVSNIIYLDSPVGVGFSYSNNKSDYITGDIKTAVDSHAFLLKWFQMFPEFQSNPFFISGESYAGVYVPTLASEVVIGNKNGVKPALNFKGYLVGNGVADPKFDGNAFVPFAHGMGLISDELFENVTKACKGNFYEIEGLECEEQYTKVNDDTNQLNIYNILEPCYHGTSLSAFDIRSLPSSLLQLGKTEKRLPIRKRMFGRAWPVRAPVHPGIVPSWSQLLADVTVPCIDDRVATAWLNDPEIRKAIHTKEESEIGRWELCSGKLSFYHDAGSMIDFHRNLTLSGYRALIYSGDHDMCVPFTGSEAWTKSLGYKVIDEWRAWISNDQVAGYTQGYANNLTFLTIKGAGHTVPETNRGRL

SEQ ID NO: 105361 - DNA, 1472 bp, Arabidopsis thaliana
  misc_feature (1)..(1472): Ceres Seq. ID no. 13617061
  misc_feature (1)..(1472): Ortholog of  Ceres SEQ ID NO 14316017 as cited in SEQ ID NO 67028
  misc_feature (1)..(1472): Ortholog of  Ceres SEQ ID NO 15177500 as cited in SEQ ID NO 0
acaattctttgcatcatcatcattcatcatggattcttcttaccttagaatctctctttcttttctcttctgggctttactactctcaccggctgtgtcacagtcatcttcttgttcgtcacagacattttccggcgtcaaatcttaccctcactgtctcgacctccctgatcttaaagccattctccattactcttatgacgcatctaacacaactctcgccgttgttttctctgctccaccgtcaaaacctggtggttggatcgcttgggctattaaccctaaatccaccggcatggctggatctcaagccctcgttgcctctaaggaccctagcaccggcgttgcttccgtgacgacccttaacatcgtctcttacagctctctggttccctcgaaactgtcctttgacgtgtgggatgttaaggcggaggaggcggctaatgacggtggagctttacgaatctttgcgaaagtgaaggttccggcggatttagcggcgagtgggaaggttaaccaggtttggcaggttggtccgggagtgtctaatgggaggatacaggctcatgatttcagcggtcccaatcttaactcagtgggatcactcgatttaaccgggaccacccccggagtccctgtctccggaggtggtggtgccggtaattctagaatccacaagagaaatatccatggaatattgaacgcagtgagttggggacttctatttcccattggagcaatgatagctaggtatatgagaatctttgaatcagcagatcctgcttggttttacctccacgtgtcatgccaattctctgcttatgtcatcggtgttgccggatgggccaccggactcaagcttggttcagaatctaaaggtattcagtacaacactcaccggaacatcggcatctgtctcttctctatagccactcttcagatgtttgcgatgctgttgcggccaaggaaggaccacaagtttagattcgtttggaatatttaccaccacggagttggatactctatcctcatccttggaatcatcaatgttttcaaaggtcttagcatcttgaatccaaagcatacttacaagacggcttatatcgctgtgattgggaccttaggaggcatcacgttactcttggaagttgttacttgggtcattgtcctcaagagaaaatctgccaagtctacaaagcctctcaaggcctaatggtgttggtaattcaaaggatttgtattgttttattttcttttttttttgaagttagaaattgcattgtctttctccacaaattatgattcatctcttgacgttgcttgttttgaggatgatgattatgacttgtgtgttttatgtatagtaggagaaacacatatatgtcttagtgtttgttctttgtagctctgccttttatttcgtgtgtttttgtggttcagaatacttgtagggaattataaactaatttttc

SEQ ID NO: 105362 - protein, 403 aa, Arabidopsis thaliana; identical to SEQ ID NO: 26972
  peptide (1)..(403): Ceres Seq. ID no. 13617062

SEQ ID NO: 105363 - protein, 394 aa, Arabidopsis thaliana; identical to SEQ ID NO: 26973
  peptide (1)..(394): Ceres Seq. ID no. 13617063

SEQ ID NO: 105364 - protein, 305 aa, Arabidopsis thaliana; identical to SEQ ID NO: 26974
  peptide (1)..(305): Ceres Seq. ID no. 13617064

SEQ ID NO: 105365 - DNA, 1281 bp, Arabidopsis thaliana
  misc_feature (1)..(1281): Ceres Seq. ID no. 13617065
  misc_feature (1)..(1281): Ortholog of  Ceres SEQ ID NO 13584217 as cited in SEQ ID NO 64024
  misc_feature (1)..(1281): Ortholog of  Ceres SEQ ID NO 14316021 as cited in SEQ ID NO 67130
acaaccactttttatatgatataccgcttttaccccttaagcctctccgcgtaaaaccgagaacaaaatcttaagcaccgttgttccgattcagagatcatcgtcgtcgtcgttcagaaaccttcaaaaatggctggaaaactcatgcacgctcttcagtacaactcttacggtggtggcgccgccggattagagcatgttcaagttccggttccaacaccaaagagtaatgaggtttgcctgaaattagaagctactagtctaaaccctgttgattggaaaattcagaaaggaatgatccgcccatttctgccccgcaagttcccctgcattccagctactgatgttgctggagaggtcgttgaggttggatcaggagtaaaaaattttaaggctggtgacaaagttgtagcggttcttagccatctaggtggaggtggacttgctgagttcgctgttgcaaccgagaagctgactgtcaaaagacctcaagaagtgggagcagctgaagcagcagctttacctgtggcgggtctaaccgctctccaagctcttactaatcctgcggggttgaagctggatggtacaggcaagaaggcgaacatcctggtcacagcagcatctggtggggttggtcactatgcagtccagctggcaaaacttgcaaatgctcacgtaaccgctacatgtggtgcccggaacatagagtttgtcaaatcgttgggagcggatgaggttctcgactacaagactcccgagggagccgccctcaagagtccgtcgggtaaaaaatatgacgctgtggtccattgtgcaaacgggattccattttcggtattcgaaccaaatttgtcggaaaacgggaaggtgatagacatcacaccggggcctaatgcaatgtggacttatgcggttaagaaaataaccatgtcaaagaagcagttagtgccactcttgttgatcccaaaagctgagaatttggagtttatggtgaatctagtgaaagaagggaaagtgaagacagtgattgactcaaagcatcctttgagcaaagcggaggatgcttgggccaaaagtatcgatggtcatgctactgggaagatcattgtcgagccataagagcgttgtagccatctttgactgtctgtgaatgtgataatagatgttaaaagtttgcgtaccgtttacagaatgttttatgttgttttgtttaatatacccgagtatgtcgaaagttacatgaaaagaaaatttggatgaaataaataatacttgttaggt

SEQ ID NO: 105366 - protein, 329 aa, Arabidopsis thaliana; identical to SEQ ID NO: 27334
  peptide (1)..(329): Ceres Seq. ID no. 13617066

SEQ ID NO: 105367 - protein, 324 aa, Arabidopsis thaliana; identical to SEQ ID NO: 27335
  peptide (1)..(324): Ceres Seq. ID no. 13617067

SEQ ID NO: 105368 - protein, 274 aa, Arabidopsis thaliana; identical to SEQ ID NO: 27336
  peptide (1)..(274): Ceres Seq. ID no. 13617068

SEQ ID NO: 105369 - DNA, 922 bp, Arabidopsis thaliana
  misc_feature (1)..(922): Ceres Seq. ID no. 13617077
  misc_feature (1)..(922): Ortholog of  Ceres SEQ ID NO 15173936 as cited in SEQ ID NO 61736
  misc_feature (1)..(922): Ortholog of  Ceres SEQ ID NO 13596373 as cited in SEQ ID NO 67991
aaaaattcagaggaaaaaaaacacgatcgagaaatggagaataatccaagaagctcatcgtctctccctctagccgggcgtgtagctatagtgaccggagccaccagaggcatgggccgtgaaatcgcgattcacctccactctcttggtgcaagagtcaccatcaattatgtctcgagctcatcaaaagctgaactcttggtttcagaactaaacgactcatctcaattaaagtcagcgatcgcagttaaagcagatgtgtcagacccggaccagatcaacaacttgtttgatcaaacagaacaagagttcggatctaaagttcacatcgtcgtgaattgtgcaggtgttttggatccaaagtatccatctttatccgagacgacactagaagatttcgataacacattcacaataaacacaagagggtctttcttgtgttgcaaggaagcagctaaaagggttatgagaggaggtggtggaagaatcattatgatgtctacatcaatggttggtggtctcgccccgggttatggagtttacgcagcatcaaaggccgccgttgagacaatggtgaaagtgttggcgaaggagcttaagggaagccggataaccgcgaattgcgtggcgccagggccggttgcgacggagatgttttatgctggaaagagtgatgaaacggtgaaaatgcttgcaggggcttgtcctatggggaggatcggtgagtcaaaggatataaccgagattgtagggtttttggccggtgatggtggtgaatggattaacggtcaagttattagagccaatggaggctttgttgtctaataaatgaagaactaacattggaatttgatgttgtcttcttcttttcgtgtgttgatctacttttatgtcaatgatgatgagttgtttattgggcaag

SEQ ID NO: 105370 - protein, 274 aa, Arabidopsis thaliana; identical to SEQ ID NO: 25824
  peptide (1)..(274): Ceres Seq. ID no. 13617078

SEQ ID NO: 105371 - protein, 263 aa, Arabidopsis thaliana; identical to SEQ ID NO: 25825
  peptide (1)..(263): Ceres Seq. ID no. 13617079

SEQ ID NO: 105372 - protein, 237 aa, Arabidopsis thaliana; identical to SEQ ID NO: 25826
  peptide (1)..(237): Ceres Seq. ID no. 13617080

SEQ ID NO: 105373 - DNA, 718 bp, Arabidopsis thaliana
  misc_feature (1)..(718): Ceres Seq. ID no. 13617085
  misc_feature (1)..(718): Ortholog of  Ceres SEQ ID NO 14309339 as cited in SEQ ID NO 0
agagagacagagagagagatgagtagcttcacgattccatctccttcctccttctctctttccaattcatataatcaaacctctcctcattccttcactctccgcaattctcgttccaattttgagttccaccggttacgattagatgtggagtctcgaagaagaagcacttctttacggtccaattgctccaccaaaggtacagattcaggtgaaaatgagaacaaaagtgtgttagatgctttctttttggggaaagcattagctgaggttatcaatgagagaattgagtctactgttggagaagtgttgagtactattggaaagtttcaagctgagcaacagaaacaagttcaagagattcaggaagaggttcttgaaagagctaagaaagctaaggaaagagcagctcgagaaactatggaggaacaaggacttgttgcttccaaaccagtagccattactcgaaatccggatgctgttgttgttgcctctgtaacttctacatcgaccgttgagagcaagactataatggttgatgtagaggaaagctcgagttccagtgatgaagactgaacgatggtttcaagggtttaagttgaagatttggtaatagcagcagagacttgtctaaaagggttaagatatatgtacttgaaaaaacgatgtaaacaatgtaagttgatataaatcaaggttaaaccagcattgatacatg

SEQ ID NO: 105374 - protein, 191 aa, Arabidopsis thaliana
  peptide (1)..(191): Ceres Seq. ID no. 13617086
RETEREMSSFTIPSPSSFSLSNSYNQTSPHSFTLRNSRSNFEFHRLRLDVESRRRSTSLRSNCSTKGTDSGENENKSVLDAFFLGKALAEVINERIESTVGEVLSTIGKFQAEQQKQVQEIQEEVLERAKKAKERAARETMEEQGLVASKPVAITRNPDAVVVASVTSTSTVESKTIMVDVEESSSSSDED

SEQ ID NO: 105375 - protein, 185 aa, Arabidopsis thaliana; identical to SEQ ID NO: 30509
  peptide (1)..(185): Ceres Seq. ID no. 13617087

SEQ ID NO: 105376 - DNA, 1793 bp, Arabidopsis thaliana
  misc_feature (1)..(1793): Ceres Seq. ID no. 13617088
  misc_feature (1)..(1793): Ortholog of  Ceres SEQ ID NO 14316451 as cited in SEQ ID NO 57956
  misc_feature (1)..(1793): Ortholog of  Ceres SEQ ID NO 15224799 as cited in SEQ ID NO 0
aaatatctaacaatctatcttttgggtccctaaaaaagctccttcgtttatcttgttttctaagttatctttttgtatgagtttcaaagcttatcattatctcactcttcttccatagctatgactactttaacgaagattcaagtgtacccacaagtcttggagcaccgtctcttcttcagagatccgatacgggtcgggtcaagattgacttgtagagaacgtagtaatagggtttatgtgcatcggtgtgagaaaaaagttgaaagaaagagaaaagttgagaaatttaagggaaatgggtcgtgggattctttgaaatctgggtttttagggtttagtaaattagggttcttgtctaaagatgagtataatcagaaagttgaaaacttggagatggttttctcttcggttgctgttcaaattgcgagatacattgtgacgatgacaagtactggagctattcttttgattgggtttcaattatcaggtggagatagttcgatgaactcattggtttggtatagttggcttggtggaattatcattggaaccatgactggtgctaacatggttttggaagatcattatcgagccggtccacggaatgttgttataaccggaagcactaggggactagggaaagctcttgctagagagtttcttctctctggagacagagtcattgtcacatctcgcagttctgaatctgttgatatgactgtcaaagagctagagcaaaatctcaaagagattatgagtaacgctagcgagtcagctagaaagaaactgagtgatgctaaggtagttggtattgcctgtgatgtttgcaaacccgaagacgttgagaagctgtcgaatttcgctgtaaaagagcttggttccatcaacatatggataaacaatgctggtactaacaaaggttttagaccgctactcgagttcacggaagaagatatcacacagattgtctccacaaatttgattggatcaattctatgtacacgaggggctatggatgtgatgagcagacagcacagtggtggacacatctttaacatggatggtgctggctctggaggttcaagtactcctctcactgccgtatatggttcaacaaaatgtggacttaggcagtttcatgggtctatagtgaaagaaagccaaaaaacaaacgttggccttcacactgcatcccctggcatggttctgacagaacttcttctcagtggttcgagcattaaaaacaagcagatgtttaacataatctgtgagcttcctgagacagtagctagaactttggtaccacgaatgcgagttgtgaaaggttcgggaaaagccgtcaattacctaactcctcctcggatattgttagctattgtcacttcctggctaaggagaggccgatggtttgatgaccaaggacgggcgttatatgcagcagaagcagatagactaaggaactgggcagagaacaggacgaggttgtcgttaacagacgcgatggagatgtatacagagaatacttgggtctctgttttctctctttctgttgtttgcgctttcatcatcttacaaagcacaacacctagctcttttccaggcacataacaaacatcttcctcggatgtgttttaagaaaattgtaaacgtacatgttatgtataaaaaacatatatataacagaaccgatttgttcatgtaaacacttcttatagttgtagaatgtgtcgttgttgaaaacaatgaaaaaatagattgtaataaacttttatcagattgtagtattttct

SEQ ID NO: 105377 - protein, 496 aa, Arabidopsis thaliana; identical to SEQ ID NO: 39043
  peptide (1)..(496): Ceres Seq. ID no. 13617089

SEQ ID NO: 105378 - protein, 404 aa, Arabidopsis thaliana; identical to SEQ ID NO: 39044
  peptide (1)..(404): Ceres Seq. ID no. 13617090

SEQ ID NO: 105379 - protein, 388 aa, Arabidopsis thaliana; identical to SEQ ID NO: 39045
  peptide (1)..(388): Ceres Seq. ID no. 13617091

SEQ ID NO: 105380 - DNA, 1154 bp, Arabidopsis thaliana
  misc_feature (1)..(1154): Ceres Seq. ID no. 13617108
  misc_feature (1)..(1154): Ortholog of  Ceres SEQ ID NO 14311981 as cited in SEQ ID NO 55703
  misc_feature (1)..(1154): Ortholog of  Ceres SEQ ID NO 15226227 as cited in SEQ ID NO 63433
  misc_feature (1)..(1154): Ortholog of  Ceres SEQ ID NO 13599003 as cited in SEQ ID NO 0
atcaactcgtttcttcgctgtcttagaaatccacaatatctttcttcacactttctttcactttcccgggaaaacagccgagaaaataaaagaaacgaagaaaagtttgttcctttgtggggatcaaagaagaatgtactcggcgattcggtcttcgcttcctctagatggcagcttgggagactactctgacggaaccaatcttcccatcgacgcttgtctggtcctaaccactgaccccaagcctcgccttcgttggacctctgagctccatgaaagattcgttgacgccgtcactcagctcggcggacccgacaaagcaacgcctaaaactataatgagaacaatgggagtgaagggtctcactctttaccatctcaaatctcatcttcagaaattccgcttggggaggcaatcttgtaaagaatcaattgacaactctaaggatgtttcttgtgttgcggagagtcaggacactggttcatcttcaacatcatccttaagattggctgctcaagaacagaacgagagttaccaggtcactgaagctttgcgtgcccagatggaagtccaaagaagactacacgagcaactagaggtgcaaaggcgactccagttaaggatcgaggcacaagggaagtacctgcaatcaattctagagaaagcttgcaaggctatagaggagcaagctgttgcatttgctgggttagaggcagctagagaagagctttcagagctagccataaaggcctccatcaccaatgggtgccaaggaacaacaagcaccttcgacacaaccaaaatgatgattccatccttatccgagcttgcagtagcaatagagcacaagaacaactgttcagcagagagctctctgacttccagcactgtaggaagtccggtatcagctgcgttgatgaagaagagacaacgaggagtgtttggaaatggagatagtgtggttgttggtcatgatgctggatgggttatgcctagtagtagcattggatgaagttagcaagagagagagagagagcgagaccagattttagcttatttaattttgctatgttgtatttaactctaaactctgtcatcaaacttgtcttagcgtctatgtatatatttgttgaatctgtagcctctcttttagt

SEQ ID NO: 105381 - protein, 336 aa, Arabidopsis thaliana; identical to SEQ ID NO: 24416
  peptide (1)..(336): Ceres Seq. ID no. 13617109

SEQ ID NO: 105382 - protein, 292 aa, Arabidopsis thaliana; identical to SEQ ID NO: 24417
  peptide (1)..(292): Ceres Seq. ID no. 13617110

SEQ ID NO: 105383 - protein, 224 aa, Arabidopsis thaliana; identical to SEQ ID NO: 24418
  peptide (1)..(224): Ceres Seq. ID no. 13617111

SEQ ID NO: 105384 - DNA, 1013 bp, Arabidopsis thaliana
  misc_feature (1)..(1013): Ceres Seq. ID no. 13617112
  misc_feature (1)..(1013): Ortholog of  Ceres SEQ ID NO 13596097 as cited in SEQ ID NO 68421
  misc_feature (1)..(1013): Ortholog of  Ceres SEQ ID NO 13598439 as cited in SEQ ID NO 69016
  misc_feature (1)..(1013): Ortholog of  Ceres SEQ ID NO 13599524 as cited in SEQ ID NO 0
acaacatcatatctcaagttcaccacccaaaagaaaaaacacacacacatcttagagagatgaaagagactaattttggcgagaaaacgcgcgttctggtagttggtgggacgggatcattggggaggaggattgtaagtgcgtgtttggctgagggacacgagacttatgttctccagcggccggagattggagtggacatcgagaaggtgcagctacttctttctttcaaaagactcggcgcacatcttgtggaaggctcattctccgatcaccaaagccttgtctctgccgtaaagcaagtcgacgtggttgtctccgccatgtccggtgtccacttccgcacccacaacatccccgttcagctcaagctcgtcgcagccatcaaagaggccggtaacgtcaagcgtttcttaccatcagaatttggaatggatccgtcacgtatgggacatgccatgccaccaggaagtgaaacatttgatcaaaaaatggaaatacgaaatgcaattaaggccgccgggatctcccacacatacctcgtcggtgcttgttttgccgcatacttcggcggaaatttatctcaaatgggaactttgttccctccgaaaaacaaagttgatatttatggggacggaaatgttaaagtggtgttcgtagatgaagatgacatggcaaaatatacagcgaagacgcttaatgatccccgaacgttgaataaaactgtgtatgttagacctaccgacaacattctcacacaaatggaactagttcagatatgggagaaactaaccgaaaaagagttggagaagacctatgtttcaggaaacgactttcttgctgacattgaagataaggagatatcacaccaagcgggactaggacacttttatcacatatactacgaaggttgtctcacagatcatgaagttggagacgacgaagaagctactaaactctatccggatgtgaagtacaaacgcatggatgaatatttgaaaattttcgtataa

SEQ ID NO: 105385 - protein, 336 aa, Arabidopsis thaliana
  peptide (1)..(336): Ceres Seq. ID no. 13617113
NIISQVHHPKEKTHTHLREMKETNFGEKTRVLVVGGTGSLGRRIVSACLAEGHETYVLQRPEIGVDIEKVQLLLSFKRLGAHLVEGSFSDHQSLVSAVKQVDVVVSAMSGVHFRTHNIPVQLKLVAAIKEAGNVKRFLPSEFGMDPSRMGHAMPPGSETFDQKMEIRNAIKAAGISHTYLVGACFAAYFGGNLSQMGTLFPPKNKVDIYGDGNVKVVFVDEDDMAKYTAKTLNDPRTLNKTVYVRPTDNILTQMELVQIWEKLTEKELEKTYVSGNDFLADIEDKEISHQAGLGHFYHIYYEGCLTDHEVGDDEEATKLYPDVKYKRMDEYLKIFV

SEQ ID NO: 105386 - protein, 317 aa, Arabidopsis thaliana; identical to SEQ ID NO: 22360
  peptide (1)..(317): Ceres Seq. ID no. 13617114

SEQ ID NO: 105387 - protein, 229 aa, Arabidopsis thaliana; identical to SEQ ID NO: 22361
  peptide (1)..(229): Ceres Seq. ID no. 13617115

SEQ ID NO: 105388 - DNA, 1553 bp, Arabidopsis thaliana
  misc_feature (1)..(1553): Ceres Seq. ID no. 13617122
  misc_feature (1)..(1553): Ortholog of  Ceres SEQ ID NO 14302216 as cited in SEQ ID NO 66456
atcgaattttctgccacaaagaattttttgaaaactcagattttttttgttttcagaacatgattggtgaggcaattgctaaaattaaatagtacttatgtgttttatgttgattttttgattagaaaatggacattttgtccgattcttatttgtttgtgttttttttttttgtagacgcaataagctatcttcagcctaaactttctggaaattttcgtcattagtaacctgaaattatcttaacttgtatataagcaagactataaatattagcaaagatggaggagatgtcacctgataatatacatggagtcattttagctgtgtcttcgagtatattcatcggttctagcttcatcatcaagaaaaaaggtcttaagaaggccggtgttagcggcgccagagcaggtgaaggaggatatggatacttatatgaaccttggtggtgggctggaatgataacaatgattgttggggagatagccaattttgcagcatatgcatttgcaccggctattctagtaacacctttgggagctttaagtattattttcagcgcagtgctagcacattttattttggaagagaagttgcatatgtttggtatacttggttgtgtcctctgtgttgttggatctacaacgattgttttacatgctcctcacgagcaaggcattgaatccgtcaagcaagtatggcaccttgctaccgaaccaggtttccttgcatattctgctgtggtcttggttgtggtgcttgcattgatcttttactatgagccgcgttatgggaagacgcatatgatagtatatgttgggatttgctctctaatgggctctcttacagttatgagtgttaaagctgtggcgatcgccataaagctgactttttccgggatgaaccaattcaagtacttccacgcatggatcttcatcatagtagtgaccatatgttgcattttgcaaatcaactacttgaacaaggctctggataatttcaacacagcagtcatatctccagtgtactatgttatgtttacaacattcaccatcttagctagtatgatcatgttcaaggattgggcttctcaaagtggattgcaaattgctaccgagctatgtggctttgtgaccattttgtcaggaacttttcttctccacaagacaaaagacatgggaaacagtaccagcttacgcggctccacatcacactcgcctagagacactcctgtcttcataaactcaggttccagtcgcagctccaattccactagacctgcaatactataatcccacggctccgatagtagatcatctaacggtcaagatcgaggcaacacgagctcaaaagcctcaaagagaactttttttgggtgacaaatgagaaaaaaaacagagcaaatggggtttaattaaggctataattggttttttggataacggaaggtttagtgaatgatttgttagggatactatttgattgattgcttcatgtttatttgtttctaatattttttgtttgtttctcatatgagatataaagaaagtttt

SEQ ID NO: 105389 - protein, 336 aa, Arabidopsis thaliana
  peptide (1)..(336): Ceres Seq. ID no. 13617123
MEEMSPDNIHGVILAVSSSIFIGSSFIIKKKGLKKAGVSGARAGEGGYGYLYEPWWWAGMITMIVGEIANFAAYAFAPAILVTPLGALSIIFSAVLAHFILEEKLHMFGILGCVLCVVGSTTIVLHAPHEQGIESVKQVWHLATEPGFLAYSAVVLVVVLALIFYYEPRYGKTHMIVYVGICSLMGSLTVMSVKAVAIAIKLTFSGMNQFKYFHAWIFIIVVTICCILQINYLNKALDNFNTAVISPVYYVMFTTFTILASMIMFKDWASQSGLQIATELCGFVTILSGTFLLHKTKDMGNSTSLRGSTSHSPRDTPVFINSGSSRSSNSTRPAIL

SEQ ID NO: 105390 - protein, 333 aa, Arabidopsis thaliana
  peptide (1)..(333): Ceres Seq. ID no. 13617124
MSPDNIHGVILAVSSSIFIGSSFIIKKKGLKKAGVSGARAGEGGYGYLYEPWWWAGMITMIVGEIANFAAYAFAPAILVTPLGALSIIFSAVLAHFILEEKLHMFGILGCVLCVVGSTTIVLHAPHEQGIESVKQVWHLATEPGFLAYSAVVLVVVLALIFYYEPRYGKTHMIVYVGICSLMGSLTVMSVKAVAIAIKLTFSGMNQFKYFHAWIFIIVVTICCILQINYLNKALDNFNTAVISPVYYVMFTTFTILASMIMFKDWASQSGLQIATELCGFVTILSGTFLLHKTKDMGNSTSLRGSTSHSPRDTPVFINSGSSRSSNSTRPAIL

SEQ ID NO: 105391 - protein, 277 aa, Arabidopsis thaliana
  peptide (1)..(277): Ceres Seq. ID no. 13617125
MITMIVGEIANFAAYAFAPAILVTPLGALSIIFSAVLAHFILEEKLHMFGILGCVLCVVGSTTIVLHAPHEQGIESVKQVWHLATEPGFLAYSAVVLVVVLALIFYYEPRYGKTHMIVYVGICSLMGSLTVMSVKAVAIAIKLTFSGMNQFKYFHAWIFIIVVTICCILQINYLNKALDNFNTAVISPVYYVMFTTFTILASMIMFKDWASQSGLQIATELCGFVTILSGTFLLHKTKDMGNSTSLRGSTSHSPRDTPVFINSGSSRSSNSTRPAIL

SEQ ID NO: 105392 - DNA, 618 bp, Arabidopsis thaliana
  misc_feature (1)..(618): Ceres Seq. ID no. 13617134
  misc_feature (1)..(618): Ortholog of  Ceres SEQ ID NO 12556948 as cited in SEQ ID NO 54
catttctgcttcttcttctgcttagagacagagaaatagagagagatcgcgtcggcacaatctgcaatttccaacatcgacatgtttaactctacagcgttggtgattttcgccattcttttcctcttaatctccgccgatgcgttcccgattccgtctcccaacggagagatcgacgcaatgttgatccgaaacagtatcatcggagaagatgaagatctaatgccaactgagatcagccggagagtactgatggcgcagaaacggtacatcggctacgaaacgctaaggagagacatggttccttgtcagaaaccaggagcttcttactacgattgtcgctctggacaagctaattcttacagcagaggctgtgacaccattaccagatgcgctagagacacaaacgacatcaacacatgaaggtaagatccaagaaattgccaaaattggaagctttttggccgaggcaagtaaattatatgattaagcttttgcattgctgttgttatatatgtgtttttgacataagaattgttataatatatgtaactctgccactagttggttatcaatgttcaattattgagatctataaattatattaagtttttttgg

SEQ ID NO: 105393 - protein, 113 aa, Arabidopsis thaliana
  peptide (1)..(113): Ceres Seq. ID no. 13617135
MFNSTALVIFAILFLLISADAFPIPSPNGEIDAMLIRNSIIGEDEDLMPTEISRRVLMAQKRYIGYETLRRDMVPCQKPGASYYDCRSGQANSYSRGCDTITRCARDTNDINT

SEQ ID NO: 105394 - protein, 80 aa, Arabidopsis thaliana; identical to SEQ ID NO: 30497
  peptide (1)..(80): Ceres Seq. ID no. 13617136

SEQ ID NO: 105395 - protein, 66 aa, Arabidopsis thaliana; identical to SEQ ID NO: 30498
  peptide (1)..(66): Ceres Seq. ID no. 13617137

SEQ ID NO: 105396 - DNA, 1226 bp, Arabidopsis thaliana
  misc_feature (1)..(1226): Ceres Seq. ID no. 13617138
  misc_feature (1)..(1226): Ortholog of  Ceres SEQ ID NO 12778054 as cited in SEQ ID NO 63215
  misc_feature (1)..(1226): Ortholog of  Ceres SEQ ID NO 14303185 as cited in SEQ ID NO 67203
acactttggatagctgccgccgaagttttgtgcaatggcgacgaaaccgacgtttcagctgttttcttcttctcaaggttctggtctaggtttagggttccttgattcatcagagccagctcttcctccacctcctcctcctgttgaagtattatccttcgaggtgtcttcctccactgatttcgaagtggataaattgactatcggcgagatcactcttttgaagggtcgtgtgagcactaaagaggtttttggattgcctaattcagatttggttcctggagtctatgaaggcgggcttaagctttgggaaggatcgattgatcttgttaaagctcttgagaaagaatcacaaaccggaaacttatcattttccggaaagcgggttctcgagcttggatgtggtcatgcacttccaggaatctatgcgtgtctcaagggttcagatgctgttcatttccaggacttcaatgctgaggttcttcgatgtctcaccattccgaatctgaatgctaatctgtctgagaagtcttcctctgtctcagtaagtgaaacagaagtacgcttctttgctggtgagtggagtgaagttcatcaggttcttccactagttaatagtgatggtgagactaataagaagggtggttatgacatcattctaatggctgagacgatatattccatctccgctcagaaaagtcaatatgaattgattaaaaggtgtctggcgtatcctgatggagcagtgtatatggctgcaaagaagtactatttcggggtcggtggagggacaaggcaattcttgtctatgatagagaaagacggtgctcttgcttcaacgttggtgtctcaagtcacagatggttcctcaaatgtcagagaggtatggaagctttcgtacaagtaagtcgaagctatactggaattcagtgtccaacgatctgattttagtggatttgggttgctcataaaaatgagtggaaattcaaaatctctcatccatgtgtttagcttatagactctcctgactgtgttataataattgcttagtttttcattttggtacattttctggcttaacgaaaggcttatgtgatctgccgttgattctcaccggaccaaagttccaaactaagctttagttggagtcgcagtttatatattgtaaatctctcacatgattagttatgcttttgagaataaatccaccagctcgacctgtcttg

SEQ ID NO: 105397 - protein, 290 aa, Arabidopsis thaliana; identical to SEQ ID NO: 36065
  peptide (1)..(290): Ceres Seq. ID no. 13617139

SEQ ID NO: 105398 - DNA, 613 bp, Arabidopsis thaliana
  misc_feature (1)..(613): Ceres Seq. ID no. 13617168
  misc_feature (1)..(613): Ortholog of  Ceres SEQ ID NO 13600689 as cited in SEQ ID NO 0
  misc_feature (1)..(613): Ortholog of  Ceres SEQ ID NO 15178120 as cited in SEQ ID NO 0
attctttggagttacccaatttcgacgttgaacacaaacccttgcttctctcttctctgtttctctctcgcagcgaaaaatcatggcgattagctccttcaagcatgaacatcctcttgaaaagagacaagctgaagcagcacgtatcagggagaagtatccagacagaataccagtcattgtcgaaagagccgagaagagtgatgtcccggatattgataggaaaaagtacttggtcccagctgatttgactgttggccagtttgtttatgttgtacggaagcggatcaagctcagtcccgagaaagccatcttcatttttgtcaagaacattctaccaccaactgcggcaataatgtctgcaatttatgaagagcacaaagacgaagacgggtttctatacatgagttacagtggtgagaacacgttcgggatcttcttctaatgcgcttggaatatgtggatgcatcagattatcaatgtacagtctgtctatttctctgcttgtctctagttttcatgacattggacgaagcttttgaaacttgcatgctatgttattaacatgataaggtcttccgttcatggtgttaatttggctttatgctacact

SEQ ID NO: 105399 - protein, 120 aa, Arabidopsis thaliana; identical to SEQ ID NO: 26669
  peptide (1)..(120): Ceres Seq. ID no. 13617169

SEQ ID NO: 105400 - protein, 82 aa, Arabidopsis thaliana; identical to SEQ ID NO: 26670
  peptide (1)..(82): Ceres Seq. ID no. 13617170

SEQ ID NO: 105401 - DNA, 1386 bp, Arabidopsis thaliana
  misc_feature (1)..(1386): Ceres Seq. ID no. 13617179
  misc_feature (1)..(1386): Ortholog of  Ceres SEQ ID NO 14314015 as cited in SEQ ID NO 56942
  misc_feature (1)..(1386): Ortholog of  Ceres SEQ ID NO 13596745 as cited in SEQ ID NO 60636
atctatctgattctcactatcactactgacacaaatccttttccttttgttcctctttctctaaaccaatctttaaaacaacttattcgtcttcaagatttctccaacaagtcctaccatgtccggcgaaggagacacgaccctcaaagctatctgttacaagcctggctctctccagttactcgatcagaggaagcttcctttagagactatttacttagagattcgtgatgcttcagatggatggagtgctattcaggaaatggttgtacgtggtgctcctgctatagctattgctgctgctctttctttggctgttgaagttttcaactttcatggttttgatggatcagcttcagatgctgttgcttttcttgagaacaagttggattatttagtgtcaagccgtccaacagcagttaatcttgcagatgctgctttgaaacttaaacatgttatagcaaaggccttggctactgccaccgaagccaaatccattttcaaggcatatattgaagctagtgaggatatgcttgaagatgatgttgtttcaaacaaagctataggaaactttggtttaagcttgttgaggcaacaagccaagaatcctgataagctttctgttttgacccattgcaacactggcagccttgctaccgccggatatggtactgccctcggtgtcatccgtgcactccatactcaaggaatcttagaaagagcatactgcacagaaactcgtccatttaatcaaggatcgaggcttacagcgtttgagttggtgcatgagaaaatccctgcaactctcattgcagactcagctgcagctgcactgatgaaagatggtcgtgttgatggtgtcatcgttggagctgatcgtgtggcttcaaatggcgatactgctaacaagattgggacttacagtctcgccttgtgcgcaaaacatcacgggatcccattttatgttgctgcacctcttacctcagttgatctgtcactttcatccgggaaagaaatcgtgatagaggaaagatctccaaaggagttgatgcacacacacggaggacttggtgaacgcattgcagcaccagggatctcagtttggaacccagcttttgatatgactccagcagagctgattgcaggaatcataaccgagaaaggggtcataacaaagaatggcaatgatacatttgacataagcagctttgccaagaagataacaggaaactcatctcgttgaagttagagtcagcattgcgacttgcggatgttcccctctctctatatacttgcaacaaagcaaattactttgtaatgtttgagctactaagtacactgtggtaaaaattgtcaaaaataagaaataatcgatacgttttagcc

SEQ ID NO: 105402 - protein, 374 aa, Arabidopsis thaliana; identical to SEQ ID NO: 23709
  peptide (1)..(374): Ceres Seq. ID no. 13617180

SEQ ID NO: 105403 - protein, 326 aa, Arabidopsis thaliana; identical to SEQ ID NO: 23710
  peptide (1)..(326): Ceres Seq. ID no. 13617181

SEQ ID NO: 105404 - protein, 237 aa, Arabidopsis thaliana; identical to SEQ ID NO: 23711
  peptide (1)..(237): Ceres Seq. ID no. 13617182

SEQ ID NO: 105405 - DNA, 1507 bp, Arabidopsis thaliana
  misc_feature (1)..(1507): Ceres Seq. ID no. 13617187
  misc_feature (1)..(1507): Ortholog of  Ceres SEQ ID NO 15225627 as cited in SEQ ID NO 64323
gatctcatcgaagctcctctctcttacatatcatcacttcacatcaaccaaacctacttctgtctctctctctcgctctctatctctcacgctctcacagtagaagaaaaaattagaaaggttgtgagaatggcggctacagcagcttcaagcttacaaattgctacacgaaggccgagcatgtcttcgcctagcaaaattcttaaagcaggaacctacattgttggtgccaatcctggaaacgcttcatgggataaactttcatgcactcgccaattatcaaaccttggatgtttgagaaaccacagtgctgttccaacttgtaagagacccttttctttttccacaagggcaatgtctgaatccagtgaaaacaaggctccttcagggcttccaattgatttgagagggaaaagagctttcattgctggtatagctgatgataatggctatggttgggccatagcaaaatctcttgctgctgctggagctgaaatattggttgggacttgggttcctgcacttaatatatttgagacaagcttgagacgtggaaaattcgaccagtcacgagtgttgcctgacgggtcattgatggagattaagaaggtttatgctttggatgctgtgtttgacaatcctgaagatgtgcctgaagatgtgaaaacgaataagcgatatgcaggatcgtcaaactggaccgtacaggaagctgctgaatgtgtgaaaaaagattttggaagcattgacattcttgtccattcccttgcaaatggcccagaggttagcaaacctcttctggagacatcaaggaaaggctatctcgctgctatctctgcttcgagttactcctttgtttccttgctgaggcattttctgccaattatgaacccaggaggtgcttcaatatctcttacttacattgcctctgaaagaatcattcctgggtatggtggaggtatgagttctgccaaagctgcactagagagtgacacacgggtgcttgcatatgaagctggaaggaaatcaaacattagggtcaacaccatctctgcgggtcctttgggaagccgagcagcaaaagccattgggttcatagacaccatgattgagtattcctacaataatgggcctattcagaaaacactgaccgcagatgaagttgggaatgcagcagccttcttggcatctccattggcctctgccataaccggtgcaaccatatatgtggacaatggtttgaatgcaatgggcgttgcactggacagcccggtgttcaaagaccttaacagcaagaattagagtcttgatcgacgactggactcgagaaattccgtgttttcgtgagcttgcttgtttctttatgagttagtatgtacggcatatgttccccatcggctgtctttttttttctttctttaagagaataaattatggttctaggttgggtcatttagcaactatatatgtagtgatggattattattcctcttatgattgaaaattt

SEQ ID NO: 105406 - protein, 433 aa, Arabidopsis thaliana
  peptide (1)..(433): Ceres Seq. ID no. 13617188
DLIEAPLSYISSLHINQTYFCLSLSLSISHALTVEEKIRKVVRMAATAASSLQIATRRPSMSSPSKILKAGTYIVGANPGNASWDKLSCTRQLSNLGCLRNHSAVPTCKRPFSFSTRAMSESSENKAPSGLPIDLRGKRAFIAGIADDNGYGWAIAKSLAAAGAEILVGTWVPALNIFETSLRRGKFDQSRVLPDGSLMEIKKVYALDAVFDNPEDVPEDVKTNKRYAGSSNWTVQEAAECVKKDFGSIDILVHSLANGPEVSKPLLETSRKGYLAAISASSYSFVSLLRHFLPIMNPGGASISLTYIASERIIPGYGGGMSSAKAALESDTRVLAYEAGRKSNIRVNTISAGPLGSRAAKAIGFIDTMIEYSYNNGPIQKTLTADEVGNAAAFLASPLASAITGATIYVDNGLNAMGVALDSPVFKDLNSKN

SEQ ID NO: 105407 - protein, 390 aa, Arabidopsis thaliana; identical to SEQ ID NO: 101249
  peptide (1)..(390): Ceres Seq. ID no. 13617189

SEQ ID NO: 105408 - protein, 373 aa, Arabidopsis thaliana; identical to SEQ ID NO: 23380
  peptide (1)..(373): Ceres Seq. ID no. 13617190

SEQ ID NO: 105409 - DNA, 1264 bp, Arabidopsis thaliana
  misc_feature (1)..(1264): Ceres Seq. ID no. 13617198
  misc_feature (1)..(1264): Ortholog of  Ceres SEQ ID NO 14316532 as cited in SEQ ID NO 57093
  misc_feature (1)..(1264): Ortholog of  Ceres SEQ ID NO 14301482 as cited in SEQ ID NO 63355
attttaagataagaataaaactaaataaggaaaaagaaggataattaggtcatcttcaccttcctcgttgtctcctcacactgtaaaagacttgaaactcatataaaatctcaagcttctatctatttcttctttcatcatcatcatcatcactctctcttcttcttctctctattccatggctttagtacgtgaacgtcgtcagctaaatctccgtcttcctcttcctccaatctccgaccgccgcttctccacctcttcctcctcagccaccaccaccaccgtcgctggctgtaacggaatctccgcttgtgatctcgagaaactcaacgttctcggatgcggaaacggcgggattgtttacaaagtccgtcataaaaccacatcggagatctacgctttgaaaacagttaacggcgacatggatccgattttcacaagacagttgatgcgagagatggagattctccgccgtacagattcaccgtacgtcgttaagtgtcacggaatcttcgagaaacctgtcgtcggtgaagtatcgattctaatggagtatatggacggcggaaccctagaatcactacgcggcggtgtaacggagcaaaaactcgccggattcgctaaacagatcttaaaaggattaagctatttacacgctcttaagatcgttcatcgtgatatcaaaccggcgaatcttcttctcaattcgaaaaacgaagttaaaatcgctgatttcggagttagtaagatcttagtccgatcattagattcgtgtaattcgtatgttggtacttgtgcttatatgagtccggagaggtttgattcggaatcttccggtggaagctctgatatctacgccggagatatctggagtttcggattgatgatgcttgagcttctcgttggtcattttcctttgcttccgccgggacagagacctgattgggcgacgttgatgtgcgcggtgtgttttggagaaccgccgcgagcgccggagggatgttctgaagagtttaggagcttcgttgagtgttgtctccgtaaagattcgagtaagcgatggacggcgccgcagcttcttgctcatccttttctccgggaagatctttgattcgattccttttgtaacagaatctggaatcttaaaagttggaatattagatttgaaattattttaatttttgtagagttttctggagatatttatgatcgtgatttttgtacatataatatactccagaatgttaggggaaaatcgttcttg

SEQ ID NO: 105410 - protein, 310 aa, Arabidopsis thaliana; identical to SEQ ID NO: 27837
  peptide (1)..(310): Ceres Seq. ID no. 13617199

SEQ ID NO: 105411 - protein, 229 aa, Arabidopsis thaliana; identical to SEQ ID NO: 27838
  peptide (1)..(229): Ceres Seq. ID no. 13617200

SEQ ID NO: 105412 - protein, 220 aa, Arabidopsis thaliana; identical to SEQ ID NO: 40038
  peptide (1)..(220): Ceres Seq. ID no. 13617201

SEQ ID NO: 105413 - DNA, 521 bp, Arabidopsis thaliana
  misc_feature (1)..(521): Ceres Seq. ID no. 13617202
  misc_feature (1)..(521): Ortholog of  Ceres SEQ ID NO 12610934 as cited in SEQ ID NO 55904
  misc_feature (1)..(521): Ortholog of  Ceres SEQ ID NO 13661786 as cited in SEQ ID NO 61478
  misc_feature (1)..(521): Ortholog of  Ceres SEQ ID NO 15177467 as cited in SEQ ID NO 0
aaaaatggagattaacaaatttctggccgtagtcgtagccgtcgtggtcctctactccgtcgaagcgacggcacaaggaggaaaccctcagttgacggcttgtctgcagaaactgctgccgtgtcagccgtacatacattcgctgaatccgcctcctccgccatcgtgttgcgggccgatgaaagagatcgtagagaaagacgcaccgtgtttatgcatcgcttttaacaatccggaggtgctcaaagccctaaacctcaccaaagagaacgctctcctacttcccaaggcatgtggagttaatcctgacgtttcactctgctccaaaatagccactccttcgcctattgcgtcgccgggatcaaccaatggaacctcttccgcttcaactatcagcttcaatcgatttagctttctgtctgcttttgtggcaatgatcttcttctgattatgtcattttttaatttataattatatgtgtgatgactgtgtaattcggtcatcagaatgtgtttaagtat

SEQ ID NO: 105414 - protein, 148 aa, Arabidopsis thaliana
  peptide (1)..(148): Ceres Seq. ID no. 13617203
KMEINKFLAVVVAVVVLYSVEATAQGGNPQLTACLQKLLPCQPYIHSLNPPPPPSCCGPMKEIVEKDAPCLCIAFNNPEVLKALNLTKENALLLPKACGVNPDVSLCSKIATPSPIASPGSTNGTSSASTISFNRFSFLSAFVAMIFF

SEQ ID NO: 105415 - protein, 147 aa, Arabidopsis thaliana
  peptide (1)..(147): Ceres Seq. ID no. 13617204
MEINKFLAVVVAVVVLYSVEATAQGGNPQLTACLQKLLPCQPYIHSLNPPPPPSCCGPMKEIVEKDAPCLCIAFNNPEVLKALNLTKENALLLPKACGVNPDVSLCSKIATPSPIASPGSTNGTSSASTISFNRFSFLSAFVAMIFF

SEQ ID NO: 105416 - protein, 89 aa, Arabidopsis thaliana
  peptide (1)..(89): Ceres Seq. ID no. 13617205
MKEIVEKDAPCLCIAFNNPEVLKALNLTKENALLLPKACGVNPDVSLCSKIATPSPIASPGSTNGTSSASTISFNRFSFLSAFVAMIFF

SEQ ID NO: 105417 - DNA, 964 bp, Arabidopsis thaliana
  misc_feature (1)..(964): Ceres Seq. ID no. 13617206
  misc_feature (1)..(964): Ortholog of  Ceres SEQ ID NO 14301994 as cited in SEQ ID NO 56653
  misc_feature (1)..(964): Ortholog of  Ceres SEQ ID NO 13595658 as cited in SEQ ID NO 59888
  misc_feature (1)..(964): Ortholog of  Ceres SEQ ID NO 13661330 as cited in SEQ ID NO 61614
  misc_feature (1)..(964): Ortholog of  Ceres SEQ ID NO 13596025 as cited in SEQ ID NO 62024
  misc_feature (1)..(964): Ortholog of  Ceres SEQ ID NO 13662324 as cited in SEQ ID NO 62162
  misc_feature (1)..(964): Ortholog of  Ceres SEQ ID NO 12625713 as cited in SEQ ID NO 64160
  misc_feature (1)..(964): Ortholog of  Ceres SEQ ID NO 14301782 as cited in SEQ ID NO 66788
  misc_feature (1)..(964): Ortholog of  Ceres SEQ ID NO 14302860 as cited in SEQ ID NO 67667
  misc_feature (1)..(964): Ortholog of  Ceres SEQ ID NO 15174373 as cited in SEQ ID NO 0
ataaagagaaaatctccaaaagcaatgaccaatgagaaatgtgaagttgctcttccactaaagttgaaatcagaaaaaccatcaatggcttcttcatcatctctctttctcctccctctccttcttcttgtctcccaagcttcagcttcaacggttatattttacaacaagtgcacgtacactgtctggcctgggatccaacctagctccggtcagtcattactcgccggcggcggatttaaactgtcgccgaacagagcttacactctccaacttccaccgctctggtccggtcgcttctggggccgccacggttgctcctttgacagatctggccgtggtcgctgcgccaccggagactgtggtggttctttcctctgtaacggagctggcggtgtacctccggctactcttgccgagatcaccctcggtcatgacatggacttttatgacgtcagcctcgttgatggatataacttggcgatgtcgataatgccggtgaagggtacgggaaagtgtacctacgctggttgcgtaagcgacctgaaccggatgtgcccggttggtctacaagtccgttcacgtgacgggacacaggtagtagcctgtaaaagcgcatgctctgcgtttaactcaccacgctattgctgtaccggcttgttcggtaacccacagtcatgcaagccaacggcttactctaagatcttcaaggtagcttgccctaaggcttactcatacgcctacgatgacccaactagcattgcgacatgttctaaagctaattatgtcgtcactttttgccctcaccgcggccgttgattaaagggattgacatctatgaataattttgcttgactatttagtacgagatcttctttttgagttatcgacccgtttttttgttttggaatttagtgatttcatcgatttgttacaaagaacatgcattatttatgcgtctttt

SEQ ID NO: 105418 - protein, 272 aa, Arabidopsis thaliana; identical to SEQ ID NO: 30204
  peptide (1)..(272): Ceres Seq. ID no. 13617207

SEQ ID NO: 105419 - protein, 264 aa, Arabidopsis thaliana; identical to SEQ ID NO: 30205
  peptide (1)..(264): Ceres Seq. ID no. 13617208

SEQ ID NO: 105420 - protein, 244 aa, Arabidopsis thaliana; identical to SEQ ID NO: 30206
  peptide (1)..(244): Ceres Seq. ID no. 13617209

SEQ ID NO: 105421 - DNA, 883 bp, Arabidopsis thaliana
  misc_feature (1)..(883): Ceres Seq. ID no. 13617214
  misc_feature (1)..(883): Ortholog of  Ceres SEQ ID NO 12619999 as cited in SEQ ID NO 66123
  misc_feature (1)..(883): Ortholog of  Ceres SEQ ID NO 13656436 as cited in SEQ ID NO 69154
aaaacaaaagaggaacttgagaattttatgcttgagacaaaatggcagaagatacgtacgaggaagagtgcgactacttgtttaaggcggtgttgatcggagactcagccgtcggaaaatcaaacctcttgtctagattttctaaagacgagttccggtttgactctaaaccaaccatcggagtagagtttgcttaccggaatgttcacgtcggagataaaatcatcaaggctcagatttgggacaccgccggccaagaaagatttcgagcaatcacaagttcgtactaccgtggagcattaggggcattactgatttacgacatcactagacgaacaactttcgacaacatcaagaaatggcttttcgagcttagagacttcgccaatcccgaaaccgtcgttgtcctcgtcggaaacaaatctgatctccgacaatctagagaagttgaagaagacgagggtaagactctagcagaatcagaaggtctctacttcctcgagacttcggctttagagaatgttaacgtcgaagaagcgtttctagtgatgatcggacggatacatgaggttgttactcagaggatagcttcggaaaacaaatccaacggtgctgcgacgcctcacattaacggtaatgggaacggtacggtccttccggttggtaaagaaattgtgaatatacacgaagtcactgctactcaacccttattaagctcatcttccaactgttgtttcaagtaaataattaatgtatttttttcgtttattgttttggaatactttgatgatgtttttatttgcctgtgtattcgtgaaaattttgcctaggttgagtacatgaatttaaatcatacaattaaatccaaataaatatgaaaatc

SEQ ID NO: 105422 - protein, 233 aa, Arabidopsis thaliana; identical to SEQ ID NO: 41070
  peptide (1)..(233): Ceres Seq. ID no. 13617215

SEQ ID NO: 105423 - DNA, 1191 bp, Arabidopsis thaliana
  misc_feature (1)..(1191): Ceres Seq. ID no. 13617216
  misc_feature (1)..(1191): Ortholog of  Ceres SEQ ID NO 14313796 as cited in SEQ ID NO 54544
agaaaggataacgaatcgtttctcttcgatcgaaagaatatatatttggaagttttctctgcttttttgttttcgtttgatagaatgggaacagttctcgattcgcattttctggctctcactgctattgtcactgtgatttaccagttcatattcttcgtaatcacggctcttttcaaatttgatcaagtcactgactttgctggtagcacaaacttcgttatacttgctgtgttaacacttgttctcaaagcctcttggcattttcgacagatagtattgactttgctagttgtggtatggggtcttcgcttggggattttccttctaatgaggatcttgcaatggggggaagatcgtcgctttgatgaacagcgtggaaatatagtgagactaatcattttctggactcttcaggctgtgtgggtttggacggttagcttacctttaacacttgttaatgcaagtgatggtggtggatctcttaaacccgcagatgttatcggttggactatgtgggttttcggtttcttgattgaagctgcagctgatcaacagaagctatcattcaaaaactctcctgaaaacagaggaaaatggtgtgatgttggagtctggaagtattcaagacatccaaactacttcggtgagatgttactgtggtggggaatctttgtggctgcatcgcctgtgcttgaaggtgcagagtatcttgtcatattcggaccactctttctcactttgctacttctattcgtcagcggcataccattactcgaggcatcggctgacaaaaaacatggaaactcaggagcttacagatcctacaagaagacaacaagtcctctgattctgttcccaagaggagtgtatgggaacttaccaggatggttcaagacggtctttctcttcgagtttccattttacagccgaaatctccctcaagaggtggctgtttagtaactgcttattctgtttcagtttcatcttttatatcttactttagtgtttgatgagtttggcttctctttgttgtatgtgtgcaagaaagttagggtagactccaaaacagcaaagagaaagaagtaaaagatgactgatttgtgatactcatatttgagttattgttcttcacaacactctttgataaaatttgtgtaaaaaattgcccgtaagaaactgaatttgttt

SEQ ID NO: 105424 - protein, 319 aa, Arabidopsis thaliana
  peptide (1)..(319): Ceres Seq. ID no. 13617217
RKDNESFLFDRKNIYLEVFSAFLFSFDRMGTVLDSHFLALTAIVTVIYQFIFFVITALFKFDQVTDFAGSTNFVILAVLTLVLKASWHFRQIVLTLLVVVWGLRLGIFLLMRILQWGEDRRFDEQRGNIVRLIIFWTLQAVWVWTVSLPLTLVNASDGGGSLKPADVIGWTMWVFGFLIEAAADQQKLSFKNSPENRGKWCDVGVWKYSRHPNYFGEMLLWWGIFVAASPVLEGAEYLVIFGPLFLTLLLLFVSGIPLLEASADKKHGNSGAYRSYKKTTSPLILFPRGVYGNLPGWFKTVFLFEFPFYSRNLPQEVAV

SEQ ID NO: 105425 - protein, 291 aa, Arabidopsis thaliana
  peptide (1)..(291): Ceres Seq. ID no. 13617218
MGTVLDSHFLALTAIVTVIYQFIFFVITALFKFDQVTDFAGSTNFVILAVLTLVLKASWHFRQIVLTLLVVVWGLRLGIFLLMRILQWGEDRRFDEQRGNIVRLIIFWTLQAVWVWTVSLPLTLVNASDGGGSLKPADVIGWTMWVFGFLIEAAADQQKLSFKNSPENRGKWCDVGVWKYSRHPNYFGEMLLWWGIFVAASPVLEGAEYLVIFGPLFLTLLLLFVSGIPLLEASADKKHGNSGAYRSYKKTTSPLILFPRGVYGNLPGWFKTVFLFEFPFYSRNLPQEVAV

SEQ ID NO: 105426 - protein, 209 aa, Arabidopsis thaliana
  peptide (1)..(209): Ceres Seq. ID no. 13617219
MRILQWGEDRRFDEQRGNIVRLIIFWTLQAVWVWTVSLPLTLVNASDGGGSLKPADVIGWTMWVFGFLIEAAADQQKLSFKNSPENRGKWCDVGVWKYSRHPNYFGEMLLWWGIFVAASPVLEGAEYLVIFGPLFLTLLLLFVSGIPLLEASADKKHGNSGAYRSYKKTTSPLILFPRGVYGNLPGWFKTVFLFEFPFYSRNLPQEVAV

SEQ ID NO: 105427 - DNA, 1621 bp, Arabidopsis thaliana
  misc_feature (1)..(1621): Ceres Seq. ID no. 13617220
  misc_feature (1)..(1621): Ortholog of  Ceres SEQ ID NO 15172174 as cited in SEQ ID NO 60481
  misc_feature (1)..(1621): Ortholog of  Ceres SEQ ID NO 13660287 as cited in SEQ ID NO 67316
gagaaacagagagaaaatggaagatggtgtgacgcctccgcttctgatcacagagaaagacacgacgatgattcgtgtgaaggaggaggtgaagaagcagctatggctttctgctccactcattggtgttagccttcttcaatactctctccaagtcatctccgtcatgttcgttggccatcttggctctcttcctctctctgccgcctctatcgccacctcctttgcctccgttaccggcttcaccttcctcttgggaacagcaagtgcattggagacactatgtggccaagcttacggagcaaaactatatggaaaattgggaattcaaatgcagagagcaatgtttgtacttcttatactctctgttcctctctcaatcatttgggctaacacagaacagattctcgtattggtccatcaagacaagtccattgcaagtgttgctggctcctacgctaaatacatgatcccgagcctcttcgcctacggactgcttcaatgtatcaacaggttcttgcaagcgcagaacaatgtgttccctgtctttgtctgctctggtatcactacatgtcttcatttgcttctctgttggttgtttgtgttgaagactggtttaggatacagaggagctgctcttgctatttcggtctcttactggttcaacgtcattctcctctcgtgttatgtcaagttttcgccttcttgctcgcatagttggaccgggttttcgaaagaggcttttcaagaactttatgatttctctaaaattgcttttccttcagcggtcatggtctgtttggagctttggtccttcgagcttctggttcttgcctcaggccttcttcctaacccggttttagaaacttcggtgctttcaatctgtctaaatacttccctaacaatctggcagatttcggttggtcttggtggcgctgcaagcataagggtctcaaacgagttaggagcagggaatccacaagtggcaaaactggctgtatatgtcattgtaggcatagcagtagccgagggaattgtggttgtaacagttttgttgtcgattcggaagatcttaggtcatgcttttagcagcgacccgaaaatcatcgcatatgccgcatcaatgataccgattgttgcatgtggaaacttccttgatggcttacaatgcgtactctcaggggttgctagaggatgtggatggcagaaaattggagcatgtgtgaatcttggatcatattatcttgttggagttccattaggattgttacttggtttccatttccacattggtggtcgggggctttggctgggaatcgtaacagcattgtctgttcaagtgttgtgtctttccttagtcactatattcacaaactgggataaagaggcaaagaaagctacgaacagagtcggatcttcagatgacaaagatggtgacgtccaatgatcaataaacgtctgaggaaaaagcagttgcaaatgagcttaatgagtgctttattcttgtatgcccatatgaacttattgggaatttctaattgatgtggccgtacattggtctttagaaaactttaccattgttacatagttattgaaattccttggatgtgtttccattctc

SEQ ID NO: 105428 - protein, 481 aa, Arabidopsis thaliana
  peptide (1)..(481): Ceres Seq. ID no. 13617221
RNREKMEDGVTPPLLITEKDTTMIRVKEEVKKQLWLSAPLIGVSLLQYSLQVISVMFVGHLGSLPLSAASIATSFASVTGFTFLLGTASALETLCGQAYGAKLYGKLGIQMQRAMFVLLILSVPLSIIWANTEQILVLVHQDKSIASVAGSYAKYMIPSLFAYGLLQCINRFLQAQNNVFPVFVCSGITTCLHLLLCWLFVLKTGLGYRGAALAISVSYWFNVILLSCYVKFSPSCSHSWTGFSKEAFQELYDFSKIAFPSAVMVCLELWSFELLVLASGLLPNPVLETSVLSICLNTSLTIWQISVGLGGAASIRVSNELGAGNPQVAKLAVYVIVGIAVAEGIVVVTVLLSIRKILGHAFSSDPKIIAYAASMIPIVACGNFLDGLQCVLSGVARGCGWQKIGACVNLGSYYLVGVPLGLLLGFHFHIGGRGLWLGIVTALSVQVLCLSLVTIFTNWDKEAKKATNRVGSSDDKDGDVQ

SEQ ID NO: 105429 - protein, 476 aa, Arabidopsis thaliana
  peptide (1)..(476): Ceres Seq. ID no. 13617222
MEDGVTPPLLITEKDTTMIRVKEEVKKQLWLSAPLIGVSLLQYSLQVISVMFVGHLGSLPLSAASIATSFASVTGFTFLLGTASALETLCGQAYGAKLYGKLGIQMQRAMFVLLILSVPLSIIWANTEQILVLVHQDKSIASVAGSYAKYMIPSLFAYGLLQCINRFLQAQNNVFPVFVCSGITTCLHLLLCWLFVLKTGLGYRGAALAISVSYWFNVILLSCYVKFSPSCSHSWTGFSKEAFQELYDFSKIAFPSAVMVCLELWSFELLVLASGLLPNPVLETSVLSICLNTSLTIWQISVGLGGAASIRVSNELGAGNPQVAKLAVYVIVGIAVAEGIVVVTVLLSIRKILGHAFSSDPKIIAYAASMIPIVACGNFLDGLQCVLSGVARGCGWQKIGACVNLGSYYLVGVPLGLLLGFHFHIGGRGLWLGIVTALSVQVLCLSLVTIFTNWDKEAKKATNRVGSSDDKDGDVQ

SEQ ID NO: 105430 - protein, 459 aa, Arabidopsis thaliana
  peptide (1)..(459): Ceres Seq. ID no. 13617223
MIRVKEEVKKQLWLSAPLIGVSLLQYSLQVISVMFVGHLGSLPLSAASIATSFASVTGFTFLLGTASALETLCGQAYGAKLYGKLGIQMQRAMFVLLILSVPLSIIWANTEQILVLVHQDKSIASVAGSYAKYMIPSLFAYGLLQCINRFLQAQNNVFPVFVCSGITTCLHLLLCWLFVLKTGLGYRGAALAISVSYWFNVILLSCYVKFSPSCSHSWTGFSKEAFQELYDFSKIAFPSAVMVCLELWSFELLVLASGLLPNPVLETSVLSICLNTSLTIWQISVGLGGAASIRVSNELGAGNPQVAKLAVYVIVGIAVAEGIVVVTVLLSIRKILGHAFSSDPKIIAYAASMIPIVACGNFLDGLQCVLSGVARGCGWQKIGACVNLGSYYLVGVPLGLLLGFHFHIGGRGLWLGIVTALSVQVLCLSLVTIFTNWDKEAKKATNRVGSSDDKDGDVQ

SEQ ID NO: 105431 - DNA, 1369 bp, Arabidopsis thaliana
  misc_feature (1)..(1369): Ceres Seq. ID no. 13617232
  misc_feature (1)..(1369): Ortholog of  Ceres SEQ ID NO 14310616 as cited in SEQ ID NO 55699
  misc_feature (1)..(1369): Ortholog of  Ceres SEQ ID NO 15173907 as cited in SEQ ID NO 62356
  misc_feature (1)..(1369): Ortholog of  Ceres SEQ ID NO 13596519 as cited in SEQ ID NO 62572
  misc_feature (1)..(1369): Ortholog of  Ceres SEQ ID NO 12625108 as cited in SEQ ID NO 68102
ccaattctaaaccaaacaacagattctcataatcatctcttcttttttcctctttacgaaaagaagaaagatcaaaccttccaagtaatcattttctttctctctctcacacacacacattcactagttttagcttcacaaaatgtgatctaacttcatttacctatatgcaggtttacacaaaaagaaaaaagaacgatggctcttgtcaccttcttgtttattgctacccttggagcaatgacgtcacatgtcaatggttacgccggaggaggttgggtcaacgcacacgccacattctacggtggtggtgatgcttccggcacaatgggaggtgcttgtggatacggaaacctatatagccaaggctatggaaccaacacggcggcgctaagcacggctctattcaataatggtctaagttgtggtgcttgcttcgagataagatgtcaaaacgatggaaaatggtgtcttcctggctcaattgtcgtcacagccacaaacttttgccctcctaacaacgccttaccgaacaacgcaggaggttggtgtaaccctcctcagcagcattttgatctctctcagcccgtatttcaacgcatcgctcaatacagagccggcattgtccccgtcgcttaccgaagagtgccgtgcgtgagaagaggaggaataaggtttacgataaacggacactcttacttcaacctagttctgatcactaacgtcggaggagccggagatgttcactcagcgatggttaaaggttcaagaactggatggcaagcgatgtcaagaaactggggacagaactggcagagtaactcttaccttaacggacaatctctctcattcaaagttacaacaagcgatggccaaaccattgtctctaacaacgttgctaacgcaggctggtctttcggccagaccttcacaggtgcgcagctacgttaggaagagtgattcggtgaaaattcatctcattgatcgtgtggtattgacgtgttgtagtagaagcagttagagagaggggcatgatagtaatttggtcctttctttcaattgaggttaacctaaaaagaagtggtgcttcgagtgcttgattttgcacgaggccttgatgatgtcatcttttgggaaccttttcttatctttcttcatttttattggtaaggttttatgttatactgatgcagaggtggtattgagttgaagtaccacccgctagtagtagtagtagtctctcgtgtcatttgtatcccttctcgaagcgagagggagagttttagattttattaatctcgttaaagtcatttgtatgttgtaaatttttcaatttctacaagtaagaaatattggagatttgtttgtt

SEQ ID NO: 105432 - protein, 250 aa, Arabidopsis thaliana; identical to SEQ ID NO: 24990
  peptide (1)..(250): Ceres Seq. ID no. 13617233

SEQ ID NO: 105433 - protein, 236 aa, Arabidopsis thaliana; identical to SEQ ID NO: 24991
  peptide (1)..(236): Ceres Seq. ID no. 13617234

SEQ ID NO: 105434 - protein, 207 aa, Arabidopsis thaliana; identical to SEQ ID NO: 24992
  peptide (1)..(207): Ceres Seq. ID no. 13617235

SEQ ID NO: 105435 - DNA, 1217 bp, Arabidopsis thaliana
  misc_feature (1)..(1217): Ceres Seq. ID no. 13617236
  misc_feature (1)..(1217): Ortholog of  Ceres SEQ ID NO 14311981 as cited in SEQ ID NO 55703
aacaaacccaacaatctttgaaaacaaatcaccctttcgtttttatttaaatttcttgggtcgtttcttaaatttgtatgtgtttattaatggagatcaacaataatgccaacaatactaatactactattgataatcacaaggcaaagatgagccttgtgttgtcaacggatgctaagccaaggttgaaatggacttgtgatcttcatcacaaattcatcgaagccgttaatcaacttggaggacctaacaaagcaacacctaagggtttgatgaaggttatggagattcctgggcttaccttataccatctcaagagccatttacagaaatatcggttagggaagagcatgaagttcgatgataacaagctagaagtttcctctgcatcagagaatcaagaagttgagagtaaaaacgattcaagagatctccgaggctgcagtgtcaccgaagaaaacagcaatccagctaaagacagagggctacaaatcacagaggctttacaaatgcagatggaagttcagaagaaacttcatgaacaaatcgaagttcagaggcatttgcaggtgaagattgaggcacaaggaaagtatctacagtccgttttaatgaaagctcaacaaactctcgctggctactcatcttcaaatctcggcatggattttgcgaggaccgagctctctagattagcttcaatggtgaacagaggctgtccaagcacttcgttctcagagctaacgcaagtagaagaagaagaagaaggtttcttgtggtacaagaaaccagaaaacagaggaattagtcagctgagatgttcagtagagagctcgttgacatcttcagagacctcagagacaaaactggatactgacaataaccttaataaatcgattgaacttccgttgatggagatcaactcggaagtgatgaaggggaagaagagaagcataaacgacgtcgtttgcgtggagcagcctctaatgaagagagcttttggagttgatgatgatgagcatttgaagttgagtttgaatacttacaagaaagacatggaggcgtgtacgaacataggactagggtttaattaaaaaaaaaacattttactaaagttatataaaaatgttttaaaagaatccagtaatatatatgcgtagatttctatagattattgtagagattttgtgagtaagtcgtggtgaagaagaacgcatggg

SEQ ID NO: 105436 - protein, 337 aa, Arabidopsis thaliana
  peptide (1)..(337): Ceres Seq. ID no. 13617237
MCLLMEINNNANNTNTTIDNHKAKMSLVLSTDAKPRLKWTCDLHHKFIEAVNQLGGPNKATPKGLMKVMEIPGLTLYHLKSHLQKYRLGKSMKFDDNKLEVSSASENQEVESKNDSRDLRGCSVTEENSNPAKDRGLQITEALQMQMEVQKKLHEQIEVQRHLQVKIEAQGKYLQSVLMKAQQTLAGYSSSNLGMDFARTELSRLASMVNRGCPSTSFSELTQVEEEEEGFLWYKKPENRGISQLRCSVESSLTSSETSETKLDTDNNLNKSIELPLMEINSEVMKGKKRSINDVVCVEQPLMKRAFGVDDDEHLKLSLNTYKKDMEACTNIGLGFN

SEQ ID NO: 105437 - protein, 333 aa, Arabidopsis thaliana
  peptide (1)..(333): Ceres Seq. ID no. 13617238
MEINNNANNTNTTIDNHKAKMSLVLSTDAKPRLKWTCDLHHKFIEAVNQLGGPNKATPKGLMKVMEIPGLTLYHLKSHLQKYRLGKSMKFDDNKLEVSSASENQEVESKNDSRDLRGCSVTEENSNPAKDRGLQITEALQMQMEVQKKLHEQIEVQRHLQVKIEAQGKYLQSVLMKAQQTLAGYSSSNLGMDFARTELSRLASMVNRGCPSTSFSELTQVEEEEEGFLWYKKPENRGISQLRCSVESSLTSSETSETKLDTDNNLNKSIELPLMEINSEVMKGKKRSINDVVCVEQPLMKRAFGVDDDEHLKLSLNTYKKDMEACTNIGLGFN

SEQ ID NO: 105438 - protein, 313 aa, Arabidopsis thaliana
  peptide (1)..(313): Ceres Seq. ID no. 13617239
MSLVLSTDAKPRLKWTCDLHHKFIEAVNQLGGPNKATPKGLMKVMEIPGLTLYHLKSHLQKYRLGKSMKFDDNKLEVSSASENQEVESKNDSRDLRGCSVTEENSNPAKDRGLQITEALQMQMEVQKKLHEQIEVQRHLQVKIEAQGKYLQSVLMKAQQTLAGYSSSNLGMDFARTELSRLASMVNRGCPSTSFSELTQVEEEEEGFLWYKKPENRGISQLRCSVESSLTSSETSETKLDTDNNLNKSIELPLMEINSEVMKGKKRSINDVVCVEQPLMKRAFGVDDDEHLKLSLNTYKKDMEACTNIGLGFN

SEQ ID NO: 105439 - DNA, 1395 bp, Arabidopsis thaliana
  misc_feature (1)..(1395): Ceres Seq. ID no. 13617243
  misc_feature (1)..(1395): Ortholog of  Ceres SEQ ID NO 13595598 as cited in SEQ ID NO 56822
  misc_feature (1)..(1395): Ortholog of  Ceres SEQ ID NO 15171777 as cited in SEQ ID NO 57417
  misc_feature (1)..(1395): Ortholog of  Ceres SEQ ID NO 13655712 as cited in SEQ ID NO 63394
  misc_feature (1)..(1395): Ortholog of  Ceres SEQ ID NO 15179075 as cited in SEQ ID NO 0
accagaagtggtatagtctaggccgatacatttcactatctctctctcttttgtttttcctcttcttctttttttccatttgatttcaaactctcacacaaagagcttcagatttataagaccatgataatggctttaagacaaagattggcaagaagaaaaaactaaagagaaacgaccaaaatctcaagcaaacagtactaacttctgttgcaaaacagaagaagatgtcttgtaataatggaatgtcttttttcccttcaaatttcatgatccaaacctcttacgaagatgatcatcctcatcaatctccatctcttgctcctcttcttccttcttgctctctacctcaagatctccatggatttgcttcgtttctaggtaagagatctccaatggaagggtgttgtgatttagaaacagggaacaatatgaatggagaagaggattattcagatgatgggtcacaaatgggagagaagaagaggagattgaacatggaacaagtgaagacactagagaagaactttgagcttggaaacaaacttgaaccagagaggaaaatgcagctagctcgtgccttaggtttgcaaccaagacagatcgcgatttggtttcaaaatcgaagagctcgttggaaaacaaagcagctagagaaagattatgatactcttaaacgacagtttgatacacttaaagctgaaaatgatcttcttcaaactcataatcagaaactccaagctgagataatgggattaaaaaacagagaacaaacagaatcaataaatctaaacaaagaaactgaaggatcttgcagtaacagaagtgataacagttcagataatctcagactagatatctcaactgcgccgccatcaaacgacagtacattaaccggtggccacccaccgccaccacagacagttggtcgacacttcttcccaccgtcgccagccaccgcaacgacaactactacaacaatgcagttctttcaaaactcatcttcaggacagagtatggttaaagaagagaatagtatcagtaacatgttctgtgcaatggatgaccattctggtttttggccatggcttgatcagcaacagtacaattgaaattggtctacctgttttttttgtttttgtttttaaaaaaatttatattttttttttttgtatttggaattttgatcagaagaacccatgcatgttttcaaaaactggaatctatatcattagctcactttgaaatctgcaaccaaacaccactgaggttttttgtttactttttgagtaaatgagatgtaaaaaaatgggtaatatccattatattatataaaaaataatatcattatggcccaacatttttctgtatggagaaaaataaaataaattgtat

SEQ ID NO: 105440 - protein, 294 aa, Arabidopsis thaliana; identical to SEQ ID NO: 26506
  peptide (1)..(294): Ceres Seq. ID no. 13617244

SEQ ID NO: 105441 - protein, 288 aa, Arabidopsis thaliana; identical to SEQ ID NO: 26507
  peptide (1)..(288): Ceres Seq. ID no. 13617245

SEQ ID NO: 105442 - protein, 280 aa, Arabidopsis thaliana; identical to SEQ ID NO: 26508
  peptide (1)..(280): Ceres Seq. ID no. 13617246

SEQ ID NO: 105443 - DNA, 2167 bp, Arabidopsis thaliana
  misc_feature (1)..(2167): Ceres Seq. ID no. 13617247
  misc_feature (1)..(2167): Ortholog of  Ceres SEQ ID NO 12613725 as cited in SEQ ID NO 68196
  misc_feature (1)..(2167): Ortholog of  Ceres SEQ ID NO 14301486 as cited in SEQ ID NO 69222
actacacccaaaaaagcttctaacaaagagaaagtgtctgtatgttgtgcccactctctacatttatcaatcacttcatgtgtgttaccttgattgcaaaaaagtgagaatatattctcacaacattaaatccaccccgaaatcgaagtgagtatatcacgagtgtagtaatatcttagagatggttttggaggatagaaaggacggttcttctttgccgggacgatccggtagtttctctaaatcgtcaccgtcggagttggatgttgttgatccctacaagcggataagttcgccgggatctatattggatgctgagaaggtagagaaaaagcctggaggatggagagccgtctcgttcattttaggaaatgagacgctggagagactgggatcgataggattgttggcaaacttcatggtttatctaaccaaagtgtttcacttagaacaagtcgacgctgcaaatgtcatcaacatttggtcaggtttcaccaatctcactcctctcgtcggagcgtatatctcagacacttatgttggccgcttcaagaccatcgctttcgcctcattcgccactctcctcggactaataacaattacactcacagcatcgtttcctcaactccacccagcatcatgcaacagccaggacccactcagttgcggcggtccgaataagctccagatcggagttttgctattgggactctgtttcctctccgtagggagtggaggaatacgaccttgtagcatcccttttggggttgatcagtttgaccaacgaactgaggaaggggttaaaggagtggccagtttcttcaactggtattacatgactttcactgtggttctgatcattacacagaccgtagttgtgtatatccaggatcaagtcagttggattatcggttttagtatccctaccggactcatggctcttgcggttgttatgttttttgccggaatgaagcgttatgtctacgttaaaccagaaggaagtatattctctgggatcgctcaagttatcgtggcagctcgtaagaagcgaaagctgaaacttccggcggaagatgacggcactgtcacctattacgacccagccatcaagtctagcgtgttatccaagttacaccgcagtaaccaattcaggtgtcttgacaaagccgcggtggttatagaaggtgacctaacacccgagggacctcccgcagacaagtggcggttatgcagcgtccaagaagtggaagaagtgaagtgtttgatccgaattgttcctatctggtcggccggaataatctcactcgcggccatgacaacacaaggcactttcacggtctctcaagctttgaaaatggatcgaaacttaggtcctaaattcgagattccggctggttcactctccgtcatctctctcctcacaatcggcatctttcttcccttctacgaccgcgtttttgtaccattcatgcggcgaatcaccggccataaatccggaatcacactcctccaaaggataggaacagggatcgttttcgcgatcttttctatgatcgttgcgggcattgtggagcgtatgagacgcatacgctccatcaatgccggagatccaacgggaatgactccaatgtcggtgttttggctttcgccgcagctaattctcatgggactatgtgaagcattcaatatcatcggacaaattgagttcttcaacagtcagtttccagagcacatgagaagtatcgctaactctctcttctctttatcgttcgccggttcgagctaccttagtagtttccttgtgactgtcgttcataaattctccggtgggcatgatcgtccggattggctaaacaagaatctcaacgcgggaaaattggattacttctattatctgattgcggttttgggtgtggttaatctggtttacttttggtattgtgctcggggataccggtacaaggtcggtttaccgattgaagactttgaggaggacaagtcctccgatgatgttgagatgacttcgaagaaatcgatgaaatgatttaatagactatccttagggacaacaagaagattgtcgatgttgtttgaataattactatgacaatgtatgtatcataatatgtaagaactagaatatttaataaaattttacctttcatta

SEQ ID NO: 105444 - protein, 620 aa, Arabidopsis thaliana; identical to SEQ ID NO: 35261
  peptide (1)..(620): Ceres Seq. ID no. 13617248

SEQ ID NO: 105445 - protein, 541 aa, Arabidopsis thaliana; identical to SEQ ID NO: 35262
  peptide (1)..(541): Ceres Seq. ID no. 13617249

SEQ ID NO: 105446 - protein, 402 aa, Arabidopsis thaliana; identical to SEQ ID NO: 35263
  peptide (1)..(402): Ceres Seq. ID no. 13617250

SEQ ID NO: 105447 - DNA, 1217 bp, Arabidopsis thaliana
  misc_feature (1)..(1217): Ceres Seq. ID no. 13617263
  misc_feature (1)..(1217): Ortholog of  Ceres SEQ ID NO 13595414 as cited in SEQ ID NO 56539
acttatttcaattcccaaaatcctctgcctcatcatcttcaaactgttaccacgtccatagggttgtcgaagagctaggaagagccttaccaagagcttcttcttcccctaacatttaggttggtaggagaagcaaaggaagagatcatttataatggctcctgcattcggaaaatgtttcatgttctgctgcgctaaaacctccccggaaaaagacgaaatggcaacggaatcgtacgaagccgccattaaaggactcaatgatcttctcagtacgaaagcggatctcggaaacgtcgccgccgcgaagatcaaagcgttgacggcggagctaaaggagcttgactcaagcaattcagacgcaattgaacgaatcaagaccggttttactcaattcaaaaccgagaaatatttgaagaatagtactttgttcaatcatcttgccaagactcagaccccaaagtttctggtgtttgcttgctctgattctcgagtttgtccatctcacatcttgaatttccaacctggtgaggcttttgttgtcagaaacatagccaatatggttccaccttttgaccagaagagacactctggagttggcgccgccgttgaatacgcagttgtacatctcaaggtggagaacattttggtgataggccatagctgctgtggtggtattaagggactcatgtccattgaagatgatgctgccccaactcaaagtgacttcattgaaaattgggtgaagataggcgcatcagcgaggaacaagatcaaggaggaacataaagacttgagctacgatgatcaatgcaacaagtgtgagaaggaagctgtgaacgtatcgcttggaaacttgctttcgtacccattcgtgagagctgaggtggtgaagaacacacttgcaataagaggaggtcactacaatttcgtcaaaggaacgtttgatctctgggagctcgatttcaagaccactcctgcttttgccttctcttaagaaagaaagctaccggaacatataaaactcttttgagataaaaaaagacactttgactcatctttcttcattctctcatgttgatgattcctctccaacttctttgatttctttttgttaattcaaaacttcaactttgctgcttctatttcaaaagctcaaacaataaagctgtaaccaacgtttgaaacttctatatttgtctaattgatgtttgaac

SEQ ID NO: 105448 - protein, 280 aa, Arabidopsis thaliana; identical to SEQ ID NO: 24626
  peptide (1)..(280): Ceres Seq. ID no. 13617264

SEQ ID NO: 105449 - protein, 271 aa, Arabidopsis thaliana; identical to SEQ ID NO: 24627
  peptide (1)..(271): Ceres Seq. ID no. 13617265

SEQ ID NO: 105450 - protein, 258 aa, Arabidopsis thaliana; identical to SEQ ID NO: 21610
  peptide (1)..(258): Ceres Seq. ID no. 13617266

SEQ ID NO: 105451 - DNA, 3673 bp, Arabidopsis thaliana
  misc_feature (1)..(3673): Ceres Seq. ID no. 13617282
  misc_feature (1)..(3673): Ortholog of  Ceres SEQ ID NO 12586556 as cited in SEQ ID NO 64667
  misc_feature (1)..(3673): Ortholog of  Ceres SEQ ID NO 13660894 as cited in SEQ ID NO 67475
tgtaggagagttttttttttttttttgttaacggataattttactactgttacattgcatgaacattctactcataaagtaagactatcatccaacaacaaaaacctagatgagatcgaagtcctacaattattcagaagcacaagaaaaagaaaaaaaaaaaaacagaacacgaaagtaagacagaaaaccacgaaatttcgattcaacaaaaacagagcaaataacagaacaagtgaacaacaccgtttatccagtatatcccccgccggttccgtacccggtggcaccaccaccaccaacgtgagtgttatgagcggttgtccgaccagttccagtgttccttccaatcgggtcggtcacagccgtgccctccacaacgcggtcggtcagttgtcccgttccgtgaccaggcagagccgacatctgatgtgtcccagtgccgtgtccgacttgtccagtggtcgagtgagtggccgtccccaaacctaaaccggttccggctccagccgcttctttcatggccgcgttgtgctgacgcgtttctctcttctgcatctcagcttgattgatcttatcttctttaacctgtgtagccatctgtttctgaacagggtctcgtgtcttcatcttctccgccttttcctccaaggtagctttggttttgtccatgccagattttgcagaagctgcaatattcgaagctgtttctttcatcgactgcatttttaccaaatctctctcttttcctttagcgaaattcaaagatgttacaaagatatcttctgattacttttgtttattcggttctcgagaaccgatttaggcgcccaaaagctcaaaaattcattcatgtccaccgttaatcatcactgcctcctcaattttcctcatatcccaccttcaattcctccgaatcatcgtcccaaacttctttcttctctctccctctatcgaaaaccagaacgcctctttgctctctctgcgtctctgtctctttcaccagcaacaatccatgaatgttcttcttcctcatcttcttcttcttcatcgttcgataaagaagaaacggaagacattgaatctgttattgatgggtttttctatctgcttcgattgtctgctcaataccacgacgtcgaggtaacaaaagctgtgcacgcttcgtttcttaagctcagagaagaaaaaacccgtcttggaaatgcccttatctctacttatctcaaacttggtttccctcgtgaagctattctcgtcttcgtgtctctgtcttcgccaacggtggtttcttacacagctcttatctcgggtttctcaaggttaaaccttgaaattgaggctcttaaggttttcttcaggatgagaaaagcaggtcttgttcagccgaatgagtatacttttgtagcgattttgactgcttgcgtgagagtttcccgattctcgcttgggattcagattcatggattgatagttaaatcagggtttttgaattctgtgtttgttagtaattcgctgatgagtttgtatgataaggattctgggtcttcgtgtgatgatgtgcttaagttgttcgatgaaattcctcagagagatgtggcgtcttggaacactgtggtttcgagtttagtgaaagagggcaagtctcataaagctttcgatttgttttatgagatgaatagagtcgaaggatttggagttgatagttttacgctttcaacgcttttgagctcttgtactgattctagtgtcttattgagaggtagagaactccatggtcgtgcaattaggatagggttgatgcaggagttgagtgtgaacaacgctctgattgggttttattctaaattttgggatatgaaaaaggtagagagtttatacgagatgatgatggcgcaagatgctgttactttcacggagatgatcacagcttacatgtcatttggaatggtggattccgctgttgagatattcgcgaatgtaactgaaaaaaacactattacgtataatgcgctcatggctgggttctgtagaaatggccatggcttgaaggcactaaaattattcactgatatgctgcagagaggtgttgagttgacggattttagtttaacaagcgctgttgatgcttgtggtttagtttcagagaagaaagtaagcgaacagattcacgggttttgtattaagtttggaactgctttcaacccttgtatccagactgcattgcttgatatgtgcacaaggtgtgaaaggatggcagatgctgaggagatgtttgaccaatggccttctaatctcgatagctcgaaagcaacgacgtctataatcggtggttacgctcggaatggcttacctgataaggctgtatcgctattccatcgcactctctgtgaacagaagttgtttttagatgaagtttcgttgactttgattcttgcggtctgcgggacattaggttttcgggaaatgggttatcagatccattgctatgctcttaaagctgggtacttttctgatataagcttgggaaattctttgattagcatgtacgcgaaatgttgtgactcagatgatgccataaagattttcaacactatgcgagaacatgatgttatttcttggaacagcttgatttcttgctacatccttcaaagaaatggtgatgaggcactggctctatggtcgaggatgaatgagaaagagatcaagcctgacataatcaccctcactcttgttatttctgcatttcggtatacagagtcaaataagcttagtagctgccgtgatctgtttctctccatgaagactatctatgacattgaaccaacgactgaacattacactgcattcgtccgtgttcttggtcattggggtcttcttgaagaagcggaagacacaataaactcaatgccggttcagcccgaggtctctgttttgagagctctgcttgatagctgcagaatacattcaaacacaagcgttgcgaaacgagtagcaaagcttatactatctacaaagccagaaaccccgtctgagtacatcctcaaatccaacatctactcagcttccggattctggcatcgctctgaaatgataagagaggaaatgcgggaaagaggttaccggaaacatcctgctaaaagctggataatccatgagaacaaaatacattcctttcacgcgcgtgacacatcccacccgcaagagaaagacatatacaggggattggagatactgataatggaatgtctgaaagttggatacgaaccaaacacagagtatgttcttcaggaggttgatgagtttatgaagaagagtttcttgtttcaccacagcgcgaaactcgcagtgacttatggaattctctcgagcaatactcggggcaagccggttcgggttatgaagaacgtaatgctctgtggtgattgccacgagttcttcaagtatatttcagttgtggtaaaaagagagatagttttgagagattcctcagggtttcatcattttgtgaatggcaagtgttcttgtagagatctgtggtgaatcgaccaagacccttagtttttgtaatgttttcttttataaattcgtaagttgttaatacgagagttttggttctgatagctacatagtccattcaaagtttcaaataaaaaagcattgcaaacgcaat

SEQ ID NO: 105452 - protein, 896 aa, Arabidopsis thaliana
  peptide (1)..(896): Ceres Seq. ID no. 13617283
MSTVNHHCLLNFPHIPPSIPPNHRPKLLSSLSLYRKPERLFALSASLSLSPATIHECSSSSSSSSSSFDKEETEDIESVIDGFFYLLRLSAQYHDVEVTKAVHASFLKLREEKTRLGNALISTYLKLGFPREAILVFVSLSSPTVVSYTALISGFSRLNLEIEALKVFFRMRKAGLVQPNEYTFVAILTACVRVSRFSLGIQIHGLIVKSGFLNSVFVSNSLMSLYDKDSGSSCDDVLKLFDEIPQRDVASWNTVVSSLVKEGKSHKAFDLFYEMNRVEGFGVDSFTLSTLLSSCTDSSVLLRGRELHGRAIRIGLMQELSVNNALIGFYSKFWDMKKVESLYEMMMAQDAVTFTEMITAYMSFGMVDSAVEIFANVTEKNTITYNALMAGFCRNGHGLKALKLFTDMLQRGVELTDFSLTSAVDACGLVSEKKVSEQIHGFCIKFGTAFNPCIQTALLDMCTRCERMADAEEMFDQWPSNLDSSKATTSIIGGYARNGLPDKAVSLFHRTLCEQKLFLDEVSLTLILAVCGTLGFREMGYQIHCYALKAGYFSDISLGNSLISMYAKCCDSDDAIKIFNTMREHDVISWNSLISCYILQRNGDEALALWSRMNEKEIKPDIITLTLVISAFRYTESNKLSSCRDLFLSMKTIYDIEPTTEHYTAFVRVLGHWGLLEEAEDTINSMPVQPEVSVLRALLDSCRIHSNTSVAKRVAKLILSTKPETPSEYILKSNIYSASGFWHRSEMIREEMRERGYRKHPAKSWIIHENKIHSFHARDTSHPQEKDIYRGLEILIMECLKVGYEPNTEYVLQEVDEFMKKSFLFHHSAKLAVTYGILSSNTRGKPVRVMKNVMLCGDCHEFFKYISVVVKREIVLRDSSGFHHFVNGKCSCRDLW

SEQ ID NO: 105453 - protein, 726 aa, Arabidopsis thaliana
  peptide (1)..(726): Ceres Seq. ID no. 13617284
MRKAGLVQPNEYTFVAILTACVRVSRFSLGIQIHGLIVKSGFLNSVFVSNSLMSLYDKDSGSSCDDVLKLFDEIPQRDVASWNTVVSSLVKEGKSHKAFDLFYEMNRVEGFGVDSFTLSTLLSSCTDSSVLLRGRELHGRAIRIGLMQELSVNNALIGFYSKFWDMKKVESLYEMMMAQDAVTFTEMITAYMSFGMVDSAVEIFANVTEKNTITYNALMAGFCRNGHGLKALKLFTDMLQRGVELTDFSLTSAVDACGLVSEKKVSEQIHGFCIKFGTAFNPCIQTALLDMCTRCERMADAEEMFDQWPSNLDSSKATTSIIGGYARNGLPDKAVSLFHRTLCEQKLFLDEVSLTLILAVCGTLGFREMGYQIHCYALKAGYFSDISLGNSLISMYAKCCDSDDAIKIFNTMREHDVISWNSLISCYILQRNGDEALALWSRMNEKEIKPDIITLTLVISAFRYTESNKLSSCRDLFLSMKTIYDIEPTTEHYTAFVRVLGHWGLLEEAEDTINSMPVQPEVSVLRALLDSCRIHSNTSVAKRVAKLILSTKPETPSEYILKSNIYSASGFWHRSEMIREEMRERGYRKHPAKSWIIHENKIHSFHARDTSHPQEKDIYRGLEILIMECLKVGYEPNTEYVLQEVDEFMKKSFLFHHSAKLAVTYGILSSNTRGKPVRVMKNVMLCGDCHEFFKYISVVVKREIVLRDSSGFHHFVNGKCSCRDLW

SEQ ID NO: 105454 - protein, 674 aa, Arabidopsis thaliana
  peptide (1)..(674): Ceres Seq. ID no. 13617285
MSLYDKDSGSSCDDVLKLFDEIPQRDVASWNTVVSSLVKEGKSHKAFDLFYEMNRVEGFGVDSFTLSTLLSSCTDSSVLLRGRELHGRAIRIGLMQELSVNNALIGFYSKFWDMKKVESLYEMMMAQDAVTFTEMITAYMSFGMVDSAVEIFANVTEKNTITYNALMAGFCRNGHGLKALKLFTDMLQRGVELTDFSLTSAVDACGLVSEKKVSEQIHGFCIKFGTAFNPCIQTALLDMCTRCERMADAEEMFDQWPSNLDSSKATTSIIGGYARNGLPDKAVSLFHRTLCEQKLFLDEVSLTLILAVCGTLGFREMGYQIHCYALKAGYFSDISLGNSLISMYAKCCDSDDAIKIFNTMREHDVISWNSLISCYILQRNGDEALALWSRMNEKEIKPDIITLTLVISAFRYTESNKLSSCRDLFLSMKTIYDIEPTTEHYTAFVRVLGHWGLLEEAEDTINSMPVQPEVSVLRALLDSCRIHSNTSVAKRVAKLILSTKPETPSEYILKSNIYSASGFWHRSEMIREEMRERGYRKHPAKSWIIHENKIHSFHARDTSHPQEKDIYRGLEILIMECLKVGYEPNTEYVLQEVDEFMKKSFLFHHSAKLAVTYGILSSNTRGKPVRVMKNVMLCGDCHEFFKYISVVVKREIVLRDSSGFHHFVNGKCSCRDLW

SEQ ID NO: 105455 - DNA, 1091 bp, Arabidopsis thaliana
  misc_feature (1)..(1091): Ceres Seq. ID no. 13617301
  misc_feature (1)..(1091): Ortholog of  Ceres SEQ ID NO 14309202 as cited in SEQ ID NO 0
aaaaaaagataaattacaaaatatcattttccttatcttattgacttgtcaagattctcttcttcttcttcttcttcctcctcctccaaactcagttccctccgtccatggcagcaaccttacctctatctccgatcaatcatcagttgtgtcggttcgggaacaactctttgacgactcaccggttctgttctcctggcttcttgatttcttctccttgtttcattggtttgaccggaatgggctctgctactcagttacgtgctcgtcgttctctgatctcttcagcagttgcgacgaattcgctgttgcatgacgtcggagccaccgtggcagtgcttggtggagcatacgcgcttgtcttaagcttcgagagtctcaccaagcgaaacgtcattcaacagagtttgagcagaaagcttgtgcatatactctcaggtctgcttttcgtacttgcgtggccaatcttcagcggatcgaccgaggctcgatactttgctgcttttgttccgttagtgaatggcttaaggcttgttattaacggactatccatttccccaaattcgatgctaatcaaatccgtcacaagagaagggagagcagaagagttgcttaaaggtcctttgttctacgttctagctcttcttttctctgcggttttcttctggagagagtctcctatcggtatgatctcgttagcaatgatgtgtggtggcgatggaatagctgatataatgggacgtaagtttgggtcaactaagataccttacaacccaagaaagagttgggcaggaagcatctccatgttcatcttcggcttcttcatctccatcgcattactttactattactcaagccttgggtaccttcacatgaactgggaaacgaccttgcagagagtagcaatggtctcaatggtcgccacggtagtcgagtcgctacccatcaccgatcaattagacgacaatatttcggttcctctggctactattttagctgcttatttaagtttcggatattagattaatccctcataaaccgaatgtgtatatacgtatttttttaatgaatccgaccttacaaatgtttcc

SEQ ID NO: 105456 - protein, 304 aa, Arabidopsis thaliana
  peptide (1)..(304): Ceres Seq. ID no. 13617302
MAATLPLSPINHQLCRFGNNSLTTHRFCSPGFLISSPCFIGLTGMGSATQLRARRSLISSAVATNSLLHDVGATVAVLGGAYALVLSFESLTKRNVIQQSLSRKLVHILSGLLFVLAWPIFSGSTEARYFAAFVPLVNGLRLVINGLSISPNSMLIKSVTREGRAEELLKGPLFYVLALLFSAVFFWRESPIGMISLAMMCGGDGIADIMGRKFGSTKIPYNPRKSWAGSISMFIFGFFISIALLYYYSSLGYLHMNWETTLQRVAMVSMVATVVESLPITDQLDDNISVPLATILAAYLSFGY

SEQ ID NO: 105457 - protein, 260 aa, Arabidopsis thaliana
  peptide (1)..(260): Ceres Seq. ID no. 13617303
MGSATQLRARRSLISSAVATNSLLHDVGATVAVLGGAYALVLSFESLTKRNVIQQSLSRKLVHILSGLLFVLAWPIFSGSTEARYFAAFVPLVNGLRLVINGLSISPNSMLIKSVTREGRAEELLKGPLFYVLALLFSAVFFWRESPIGMISLAMMCGGDGIADIMGRKFGSTKIPYNPRKSWAGSISMFIFGFFISIALLYYYSSLGYLHMNWETTLQRVAMVSMVATVVESLPITDQLDDNISVPLATILAAYLSFGY

SEQ ID NO: 105458 - DNA, 854 bp, Arabidopsis thaliana
  misc_feature (1)..(854): Ceres Seq. ID no. 13617308
  misc_feature (1)..(854): Ortholog of  Ceres SEQ ID NO 13595667 as cited in SEQ ID NO 56786
ctaattgtatcatcctcttccttgcgttctctctttctctctctcgccgacgacgaaaacatgggtgccaaggcgaagaaagctttgaagaagaacatgaagaaggttgctgcttcggcttcttcttctcagctacctcttccccagaacccgaaaccttcagctgattttttgccactagaaggaggtccagctcgaaaagctccagttaccaccccacctcttcagaataaagctactgtgctatacatcggtagaatccctcatggcttctatgagactgagattgaagctttcttctcgcagtttggaacagttaagagagttagagtcgccagaaacaaaaagactgggaaatcaaagcattttgggttcatacagtttgaggaccctgaggtggcggaaattgcagcgggtgcaatgaatgattatttgttgatggagcacatgcttaaagtccatgtcattgaaccagagaatgttaaacccaatctgtggagagggtttaaatgtaacttcaaaccagtggattcggttcagattgagcgaagacaacttaataaggaaaggacattggaagagcataggaaaatgttgcagaagatagttaaaaaggatcagaaaaggaggaagagaatcgaagccgctggaatagaatacgaatgccctgagcttgttggaaacacacagccagtcccgaagaggatcaagtttagtgaagaagactaaaagctgaagctgaacaacacttttccgataaccttttttgaatagaaatctgttctgttgtactcttgatattggatcaataactaaactttaaagtttgcaatgaaaacttctgtttcaatgat

SEQ ID NO: 105459 - protein, 242 aa, Arabidopsis thaliana
  peptide (1)..(242): Ceres Seq. ID no. 13617309
LIVSSSSLRSLFLSLADDENMGAKAKKALKKNMKKVAASASSSQLPLPQNPKPSADFLPLEGGPARKAPVTTPPLQNKATVLYIGRIPHGFYETEIEAFFSQFGTVKRVRVARNKKTGKSKHFGFIQFEDPEVAEIAAGAMNDYLLMEHMLKVHVIEPENVKPNLWRGFKCNFKPVDSVQIERRQLNKERTLEEHRKMLQKIVKKDQKRRKRIEAAGIEYECPELVGNTQPVPKRIKFSEED

SEQ ID NO: 105460 - protein, 222 aa, Arabidopsis thaliana; identical to SEQ ID NO: 26736
  peptide (1)..(222): Ceres Seq. ID no. 13617310

SEQ ID NO: 105461 - protein, 210 aa, Arabidopsis thaliana; identical to SEQ ID NO: 26737
  peptide (1)..(210): Ceres Seq. ID no. 13617311

SEQ ID NO: 105462 - DNA, 1671 bp, Arabidopsis thaliana
  misc_feature (1)..(1671): Ceres Seq. ID no. 13617316
  misc_feature (1)..(1671): Ortholog of  Ceres SEQ ID NO 14311183 as cited in SEQ ID NO 58495
  misc_feature (1)..(1671): Ortholog of  Ceres SEQ ID NO 13502874 as cited in SEQ ID NO 66298
  misc_feature (1)..(1671): Ortholog of  Ceres SEQ ID NO 12614124 as cited in SEQ ID NO 68392
aatcttcgtcttcttcttctctgcttgagtcaacaagaaataaacagagctaaaatgtttcctctaatctccttttctccaacttctcttgatttcaccttcttcgccattatcatctcaggtttcgttttcatcatcactcgatggaattccaattcaaagaaacgtttaaaccttcctccaggtccgccaggttggccggtggtcggaaacttattccagttcgcgcgctcaggtaaaccgtttttcgaatacgcagaggatctcaagaaaacgtatggcccgatttttacactgagaatggggactcgaacaatgatcatcctctccgacgcaactctagtccacgaagctttgatccaacgcggagctctcttcgcttcacgacccgccgagaatccgacccgaacaatcttcagctgcaacaaattcaccgtcaacgccgctaaatacggtccagtgtggcgatctctgagaagaaacatggttcagaacatgcttagctcaacacgtctcaaggaattcgggaaactgagacaatccgccatggataaactcatcgagaggatcaaatcggaagctagagacaacgacgggctaatctgggttcttaaaaacgcaagattcgctgcgttttgtattctcttggaaatgtgtttcggaatcgagatggatgaagagacaatcgagaagatggatgagattttgaagacggtgttaatgactgttgatccacgaatcgacgattatcttccgattcttgctccgttcttctctaaagagaggaaacgagctctcgaagttcgccgtgaacaagtcgattacgtcgtcggagttatcgagagacgacggagagcgattcagaatccaggatctgataaaacggcgtcgtctttttcatacttagatacactctttgatttaaaaatcgaaggtcgtaaaacgacgccgtctaacgaagagctcgtgacgctctgctctgagtttcttaacggtggtacggatacgacggggacggcgatcgagtgggggatagcgcagctgattgcgaatcctgagattcaatctcggctctacgatgagattaaatcaacggtgggagatgatcgtagggtcgatgagaaagatgtggacaaaatggtctttttacaagcttttgttaaggagcttctccggaaacatccgccgacttatttttctctgacgcatgccgttatggagacgacgacgcttgctggttacgatattcccgccggcgttaacgtcgaggtttatcttccgggtattagtgaggatccgagaatttggaataacccgaaaaagtttgatccggaccggtttatgttgggtaaggaagatgctgacataaccgggattagtggagtaaaaatgattccgtttggtgtgggccgtaggatctgtccaggacttgcaatggcaaccatacacgtccatttgatgcttgcgcggatggttcaggagttcgagtggtgtgctcatccaccaggaagtgagattgatttcgccggaaaattggagtttacggtggtgatgaagaatccgttgagagctatggtcaaaccaaggatttagtcttttattgtttttttgttaagaatattgagattattgtaaggtgtgtttgcttataaacattaaagtacccaaatc

SEQ ID NO: 105463 - protein, 530 aa, Arabidopsis thaliana
  peptide (1)..(530): Ceres Seq. ID no. 13617317
NLRLLLLCLSQQEINRAKMFPLISFSPTSLDFTFFAIIISGFVFIITRWNSNSKKRLNLPPGPPGWPVVGNLFQFARSGKPFFEYAEDLKKTYGPIFTLRMGTRTMIILSDATLVHEALIQRGALFASRPAENPTRTIFSCNKFTVNAAKYGPVWRSLRRNMVQNMLSSTRLKEFGKLRQSAMDKLIERIKSEARDNDGLIWVLKNARFAAFCILLEMCFGIEMDEETIEKMDEILKTVLMTVDPRIDDYLPILAPFFSKERKRALEVRREQVDYVVGVIERRRRAIQNPGSDKTASSFSYLDTLFDLKIEGRKTTPSNEELVTLCSEFLNGGTDTTGTAIEWGIAQLIANPEIQSRLYDEIKSTVGDDRRVDEKDVDKMVFLQAFVKELLRKHPPTYFSLTHAVMETTTLAGYDIPAGVNVEVYLPGISEDPRIWNNPKKFDPDRFMLGKEDADITGISGVKMIPFGVGRRICPGLAMATIHVHLMLARMVQEFEWCAHPPGSEIDFAGKLEFTVVMKNPLRAMVKPRI

SEQ ID NO: 105464 - protein, 512 aa, Arabidopsis thaliana
  peptide (1)..(512): Ceres Seq. ID no. 13617318
MFPLISFSPTSLDFTFFAIIISGFVFIITRWNSNSKKRLNLPPGPPGWPVVGNLFQFARSGKPFFEYAEDLKKTYGPIFTLRMGTRTMIILSDATLVHEALIQRGALFASRPAENPTRTIFSCNKFTVNAAKYGPVWRSLRRNMVQNMLSSTRLKEFGKLRQSAMDKLIERIKSEARDNDGLIWVLKNARFAAFCILLEMCFGIEMDEETIEKMDEILKTVLMTVDPRIDDYLPILAPFFSKERKRALEVRREQVDYVVGVIERRRRAIQNPGSDKTASSFSYLDTLFDLKIEGRKTTPSNEELVTLCSEFLNGGTDTTGTAIEWGIAQLIANPEIQSRLYDEIKSTVGDDRRVDEKDVDKMVFLQAFVKELLRKHPPTYFSLTHAVMETTTLAGYDIPAGVNVEVYLPGISEDPRIWNNPKKFDPDRFMLGKEDADITGISGVKMIPFGVGRRICPGLAMATIHVHLMLARMVQEFEWCAHPPGSEIDFAGKLEFTVVMKNPLRAMVKPRI

SEQ ID NO: 105465 - protein, 430 aa, Arabidopsis thaliana
  peptide (1)..(430): Ceres Seq. ID no. 13617319
MGTRTMIILSDATLVHEALIQRGALFASRPAENPTRTIFSCNKFTVNAAKYGPVWRSLRRNMVQNMLSSTRLKEFGKLRQSAMDKLIERIKSEARDNDGLIWVLKNARFAAFCILLEMCFGIEMDEETIEKMDEILKTVLMTVDPRIDDYLPILAPFFSKERKRALEVRREQVDYVVGVIERRRRAIQNPGSDKTASSFSYLDTLFDLKIEGRKTTPSNEELVTLCSEFLNGGTDTTGTAIEWGIAQLIANPEIQSRLYDEIKSTVGDDRRVDEKDVDKMVFLQAFVKELLRKHPPTYFSLTHAVMETTTLAGYDIPAGVNVEVYLPGISEDPRIWNNPKKFDPDRFMLGKEDADITGISGVKMIPFGVGRRICPGLAMATIHVHLMLARMVQEFEWCAHPPGSEIDFAGKLEFTVVMKNPLRAMVKPRI

SEQ ID NO: 105466 - DNA, 1154 bp, Arabidopsis thaliana
  misc_feature (1)..(1154): Ceres Seq. ID no. 13617320
  misc_feature (1)..(1154): Ortholog of  Ceres SEQ ID NO 13590967 as cited in SEQ ID NO 65553
  misc_feature (1)..(1154): Ortholog of  Ceres SEQ ID NO 14309438 as cited in SEQ ID NO 0
aatttctctcgccattttatagattaaggtgttctctctgacttcggaggagaaagaaagaaaaaaaatattcttgtttcaaacttcaatggcgttctcgagttccatcttctctgttactcagttttcttcttcgttagcttcgcgtccttcttctgcaatcagtaggcagactcgttttcccgctcaaattgcttctccagatctatcgcctgctttgttcgatgatcgccggaagttcgtcggaggtgtaatgtctctcttgacgaagagtattaaaaaccgtgtatatgcttcgattaacagcattgattcggccgctactccatcgtatccgaaatcggaagacgatgacgacgttgttccaatgccaatggttatgatagaccaggatgctgaccctgaagctactattgtacaactcagttttggaaatcgtcttggggctcttattgacacaatgcgggcgctgaaagatttgggattggatgtaataaaaggaactgtctcaactgaaggatccattaagcagaccaaattttctataacgaaacgagacactggccggaaagtggaagatcctgacttgttggaacaaatccgattaacaatcatcaacaatctcttgaaataccatccggaatgcagtgagcaacttgcaatgggtgagacttttggaataaaggctcccgaaaagaagattgatgtcgatatcgcaactcatatacatgtgaaagaagatggaccaaagaggagcctgcttgtcatagagacagcggacaggccaggtcttgtcgtagagatgatcaaagtgatggctgatgtcaacatagacgtggaatccgcagagatagatacagagggactggttgcgaaagacaagtttcacgtaagctaccaagggcaagctctaaacagatctttgtcacaggttttggtgaactgtctgcgttacttcctgagaaggcctgaaactgacattgacagctactaaatgagcttttgtttgctctaaaacaaaactgctctttatcctttaaagcaatcatatctgtgcttgcgaaactttcagacttctgtatggaagattatgtggaaattcgtgatactataattgaaccactgtggctaaaaaataaatgggttcttgacac

SEQ ID NO: 105467 - protein, 301 aa, Arabidopsis thaliana; identical to SEQ ID NO: 22798
  peptide (1)..(301): Ceres Seq. ID no. 13617321

SEQ ID NO: 105468 - protein, 246 aa, Arabidopsis thaliana; identical to SEQ ID NO: 22799
  peptide (1)..(246): Ceres Seq. ID no. 13617322

SEQ ID NO: 105469 - protein, 208 aa, Arabidopsis thaliana; identical to SEQ ID NO: 22800
  peptide (1)..(208): Ceres Seq. ID no. 13617323

SEQ ID NO: 105470 - DNA, 676 bp, Arabidopsis thaliana
  misc_feature (1)..(676): Ceres Seq. ID no. 13617328
  misc_feature (1)..(676): Ortholog of  Ceres SEQ ID NO 13583412 as cited in SEQ ID NO 62624
agagaaaaaatacaaatcgttcaccggaaaaaaacaaaatggctcgtcgcgatgttctcctccctttcctcctccttctcgccaccgtctccgccgtagctttcgccgaagatgatccagactgtgtatacacattctacctcagaaccggatcgatctggaaagccggaaccgattcgatcatcagcgcaagaatctacgataaggacggtgactacatcggaatcaaaaaccttcaagcttgggctggattaatgggacctgattacaattacttcgagaggggtaatctcgacattttcagtggaagagcaccgtgtttacctagtccgatctgtgccttaaacctaacctccgatggctccggcgatcaccatggttggtacgttaattacgttgagatcacgacggctggtgttcacgcacagtgctcgacgcaggattttgagattgagcaatggctcgctactgatacttctccttatgagctcaccgccgtacggaacaattgtccggtcaagcttagggatagtgttagtcgggtcgggtctgagattcggaaaaagctttcttgggtcgtttaagtgatgtgttgtgattcgtgagacttgtctgtattgtttgtattctcgttgttcttgtgagtgtaatgtggcgttaatgaaatatgattcaa

SEQ ID NO: 105471 - protein, 193 aa, Arabidopsis thaliana
  peptide (1)..(193): Ceres Seq. ID no. 13617329
RKNTNRSPEKNKMARRDVLLPFLLLLATVSAVAFAEDDPDCVYTFYLRTGSIWKAGTDSIISARIYDKDGDYIGIKNLQAWAGLMGPDYNYFERGNLDIFSGRAPCLPSPICALNLTSDGSGDHHGWYVNYVEITTAGVHAQCSTQDFEIEQWLATDTSPYELTAVRNNCPVKLRDSVSRVGSEIRKKLSWVV

SEQ ID NO: 105472 - protein, 181 aa, Arabidopsis thaliana; identical to SEQ ID NO: 27247
  peptide (1)..(181): Ceres Seq. ID no. 13617330

SEQ ID NO: 105473 - protein, 109 aa, Arabidopsis thaliana; identical to SEQ ID NO: 27248
  peptide (1)..(109): Ceres Seq. ID no. 13617331

SEQ ID NO: 105474 - DNA, 1150 bp, Arabidopsis thaliana
  misc_feature (1)..(1150): Ceres Seq. ID no. 13617332
  misc_feature (1)..(1150): Ortholog of  Ceres SEQ ID NO 14304842 as cited in SEQ ID NO 54198
  misc_feature (1)..(1150): Ortholog of  Ceres SEQ ID NO 14308683 as cited in SEQ ID NO 58723
aaataaacagagaagaagaaccaaattcaatgcttccttgtcgccgtcttgttctgtcctgcaagaatcaagctgccagttttctccgaaggtgtggaccatcgaaacgaattcaatcagtcaattactgtaaatcaacaagacagggccatgaaattccagatgtgaaacctctttttcccacaggaggaggaactcaagctccttctcgttctcgtgctcgttatgctgttcctgcgattctacttggttttgccggattcgtcggctttcttcattacaacgacgaaaggagagcagttcctagaggtcaagcaagcagcaatagcggttgtggctgcggttctaatacaactgtcaaaggtccgattatcggaggtccgtttacgcttgtgagcacagaaaacaagatagtcacagagaatgacttttgtggtaaatgggttctactctactttggatactctttttccccggatgttggacctgagcaactaaagatgatgtccaaagctgttgataaactagagtctaaacataacgagaagattctgcctgtctttgtcactcttgaccctcaacgagacacaccttctcatctccacgcatacttgaaagagtttgatagtagaatactaggactaaccgggactgcaagtgcaatgaggcaaatggcacaagagtatcgtgtctacttcaagaaggttcaagaggacggagaagattatctcgttgatacttctcacaacatgtacttgataaatccgaagatggagattgtgaggtgctttggggttgagtataatccagacgagctctcacaagagcttcttaaagaagttgcttctgtttcacagtgacccattttgaccaaacactaaagagagaaacactaggatgctctttgattgttttcttcaattcgtgatttttttaaagacgattttgttaatccgtctcttattcttgaaaaaatgaaaattagatggtagatcctgcaaagtcgaaaaaatccaaaatttcccatatagtaatattttattcttcaatgttatttttgttgttagagttgtttcttttacttatttacaaattttctttcaacgtttgtaacataatcatcagttttcagttattaaataattctctg

SEQ ID NO: 105475 - protein, 285 aa, Arabidopsis thaliana
  peptide (1)..(285): Ceres Seq. ID no. 13617333
INREEEPNSMLPCRRLVLSCKNQAASFLRRCGPSKRIQSVNYCKSTRQGHEIPDVKPLFPTGGGTQAPSRSRARYAVPAILLGFAGFVGFLHYNDERRAVPRGQASSNSGCGCGSNTTVKGPIIGGPFTLVSTENKIVTENDFCGKWVLLYFGYSFSPDVGPEQLKMMSKAVDKLESKHNEKILPVFVTLDPQRDTPSHLHAYLKEFDSRILGLTGTASAMRQMAQEYRVYFKKVQEDGEDYLVDTSHNMYLINPKMEIVRCFGVEYNPDELSQELLKEVASVSQ

SEQ ID NO: 105476 - protein, 276 aa, Arabidopsis thaliana; identical to SEQ ID NO: 24352
  peptide (1)..(276): Ceres Seq. ID no. 13617334

SEQ ID NO: 105477 - DNA, 1654 bp, Arabidopsis thaliana
  misc_feature (1)..(1654): Ceres Seq. ID no. 13617335
  misc_feature (1)..(1654): Ortholog of  Ceres SEQ ID NO 12581920 as cited in SEQ ID NO 54896
gcttctctctctctctctttctcttttcctatatattgacaagcttgcgatctctgttcgctagatctgtctgaaacagtgaggggattcctaggtttcagagcaaagtaatgtctccactcaagtacttgtgttttagaaaggtactcttgttgttgctctattccagtctcttcctattctcttcttcttctttctttgcctcatcagttgatgatcatgagctacaacgaatagatcctcatttccgagtgagaagattgttggtgaaagatctggattcaactggtgatgatgatgaaaccaatcttcctcctcctcctaagaagaagaagcttcttactgattctgtttcatcatcatcatcatcatctggtactaagaagaatcaaaccaagctccttaaacccatctcttcttcttcttccaccaagaaccaaactaaactcgccaagaccaccaccatgggtacgtctcacaaacttaactccacaaaatcttcttctaacacaaccaagaccagctctgagctcaagaagctcaattccggaacaaaatccacaaattctacttcttcgatcaagaaatcagcagatctgtccaaatcaagctcatccaaaaacaaaaccaccataaaacccccaagttccaaactttcttcacctccatcagagaagaaatcacaaccctcctcaaaaccagtgaccaaatcgaaacaatccgagaaagaaatcaaaccattctggctagacgacgaagaagacgaagatttcgtaagcgaattcagagatctaccaacaagattccaaagatccctaatcccagacctagagcgaatctcaacaacatccaaaaactacatcaacaaagccaacaaacagatcaccaaaaacttcaaaccctatttcggcaacaaatacgcaccaaccatagcttccgtagtctctttcgtcttcatcctcgtccctctactcttagtctcactcattttcaacagattcaaagcttatttctcactccagaagatcctaatcttcatccaaatctacctctcgatctacttctcaatcctatgcctctcatcgctcgtcaccggaatcgaaccactcaagtttctctacgcaacatcgagctcaacatacgtttgcttgcagatcctgcaaaccctaggctacgtcttctacctcttgcttcttctcatgtacctcgttctcgtcttctccacggattgtggtttgggccttaaggtattgggcttggcgcagacctttgtgggctttgctgtaggtctgcattattacgtggcggtgtttcatagggtggtgcttcgtcagcctccgaagacgaactggaagatacacggtgtgtatgccacgtgtttccttttgatttgtctgttatctaatgctgagaggaggaagaaagagtacttggaagaaggcggtgacgaagggaagaaaaattgaaattttctttattttattcttctctatctttgtatttttatattttaaattttgaaaaattcggcaaaattttagctgagaaatgcaatagaaagaacaattactggtggatggttggaaactttttttaaaaacttcaattgtatttataataaatcgataaatgtggaataaaatttcataatctc

SEQ ID NO: 105478 - protein, 451 aa, Arabidopsis thaliana
  peptide (1)..(451): Ceres Seq. ID no. 13617336
MSPLKYLCFRKVLLLLLYSSLFLFSSSSFFASSVDDHELQRIDPHFRVRRLLVKDLDSTGDDDETNLPPPPKKKKLLTDSVSSSSSSSGTKKNQTKLLKPISSSSSTKNQTKLAKTTTMGTSHKLNSTKSSSNTTKTSSELKKLNSGTKSTNSTSSIKKSADLSKSSSSKNKTTIKPPSSKLSSPPSEKKSQPSSKPVTKSKQSEKEIKPFWLDDEEDEDFVSEFRDLPTRFQRSLIPDLERISTTSKNYINKANKQITKNFKPYFGNKYAPTIASVVSFVFILVPLLLVSLIFNRFKAYFSLQKILIFIQIYLSIYFSILCLSSLVTGIEPLKFLYATSSSTYVCLQILQTLGYVFYLLLLLMYLVLVFSTDCGLGLKVLGLAQTFVGFAVGLHYYVAVFHRVVLRQPPKTNWKIHGVYATCFLLICLLSNAERRKKEYLEEGGDEGKKN

SEQ ID NO: 105479 - protein, 333 aa, Arabidopsis thaliana
  peptide (1)..(333): Ceres Seq. ID no. 13617337
MGTSHKLNSTKSSSNTTKTSSELKKLNSGTKSTNSTSSIKKSADLSKSSSSKNKTTIKPPSSKLSSPPSEKKSQPSSKPVTKSKQSEKEIKPFWLDDEEDEDFVSEFRDLPTRFQRSLIPDLERISTTSKNYINKANKQITKNFKPYFGNKYAPTIASVVSFVFILVPLLLVSLIFNRFKAYFSLQKILIFIQIYLSIYFSILCLSSLVTGIEPLKFLYATSSSTYVCLQILQTLGYVFYLLLLLMYLVLVFSTDCGLGLKVLGLAQTFVGFAVGLHYYVAVFHRVVLRQPPKTNWKIHGVYATCFLLICLLSNAERRKKEYLEEGGDEGKKN

SEQ ID NO: 105480 - DNA, 4715 bp, Arabidopsis thaliana
  misc_feature (1)..(4715): Ceres Seq. ID no. 13617338
  misc_feature (1)..(4715): Ortholog of  Ceres SEQ ID NO 15174740 as cited in SEQ ID NO 52905
ctctctctctctctatctctatctctcgatttgggggagttccgtcacggtggactagtacgtctcgttgccgttggtggcgtagtcggaattaatttcctcggcgttgagattcacatggtctagaattctagctaagtggttgttgttgttgttacgatttccgatttctcgagttttttttttatatttagcttctgtttcgtttatccctcccggagacactccttggtcgaatctctcatgctgaggtgttttggacacttgttgtcaagaagaaaccagttttggttctgattaatcgttggttggaaaatatactcaattccaggccatgccttcacttcaactattgcagttaactgagcggggtcggggtcttgtagcgtcaagacggaaatctatactgcttgcggctgggattgtagctgctggtggaactgctgtttacctgaaatcaagggtcgcttcccggaggcctgattcttcgcgtctttgcaatggtcagagtgatgatgatgagactttggaaaagctgactgcaactgatcaaaatgcaaagataaccacgaaaaagaagaaaggaggaggattgaagtctcttcaggttctgactgctattcttctctctcagatgggaaaaatgggtgccagggatcttttggcactagtcgccaccgtggttttcagaacagctttgagcaatagattggcaaaagtgcaaggtttccttttccgtgctgctttcttaaggcgtgcgccactgtttctacggctcatctccgagaatattatgttgtgtttcatgctatcaacattgcactctacttcaaagtacataactggggcattgagtttgcgattcagaaagatattgaccaagattatccattcacactattttgagaatatggtatattacaaaatatcacacgtggatggtcggattacgcaccctgaacaaagaattgccagcgatgtaccaagattctcctcagagttgagcgatcttatactggatgatttgacggcggttactgatggaattttgtatgcatggcgcctgtgttcatatgctagtccaaaatacatcttctggatactggcctatgtactgggggctgggacggcgataagaaacttttctccttcttttgggaaattgatgtccaaggaacagcagttagaaggagagtaccggcaacttcattcacgcttaaggactcattcggaaagcatagcattctatggtggggaaaccagggaagaatctcatatacaacaaaagttcaagaatcttgttagccatatgagtcacgtgcttcatgatcactggtggtttggtatgatccaagattttctgctgaagtatcttggggccacagttgcagttattctgattatcgaaccattcttctctgggcatctaagacctgacgactcgaccttaggaagagctgagatgcttagcaatataagatatcacactagtgtcattatatctctctttcaggcgttgggaacactttctataagttccaggcggctcaaccgactcagtggttatgctgaccgaatccatgagttgatggctgtctcaagagaactcagtggtgatgataaatcgtctttccagagaaatagaagcagaaattatctaagtgaagctaattatgtagagttttccgatgtcaaggttgttactccaaccggaaatgttttggtggaggatctcacccttcgagttgagcaagggtctaatcttctgattacaggtcctaatggaagtggcaagagttcccttttccgagtattaggaggtctatggcccctggtgtctggacatattgtgaagccaggagttggttctgatcttaacaaggagatcttctatgtgccgcaacggccttatatggcagtaggaacacttcgtgaccagttaatatatcctcttacttctggccaagagagtgaactgctcactgagattggaatggtggagctattgaaaaatgttgatctagaatatttattggatcgctaccaacctgaaaaagaggttaattggggtgatgaattatctcttggagagcaacagagattgggtatggccagactattctaccacaaacccaaatttgcaattctagatgaatgcacaagtgctgtcacaactgatatggaagaacgctttgccgctaaggttcgagctatgggaacttcttgcataacaatctcccatcgtccagcgcttgttgcattccatgatgttgttctgtcattagacggtgaaggaggatggagtgttcattacaagagggatgactctgcccttctgacggatgctgaaattgattcagtgaaaagttcagatacagatcggcaaaatgatgcgatggttgttcaacgagcgtttgctgcagctagaaaggaatctgctactaattcaaaggctcagtcgtaccagacacagttaattgcaagatcacctgttgtagataaaagtgtagtgttgcctcgttttcctcaacctcaaacatcccaaagggctttaccatcaagagtagctgcaatgttaaacgtgttgatacccactatatttgacaagcaaggagctcaactgcttgctgttgcttgccttgtcgtctcaagaacgctgatctctgaccgaatagcctctttgaatgggaccactgtgaagtatgtcttggagcaagataaggcagcctttgttcgtttgattggtttgagtgttctccaaagtggtgcatcttctataattgctccttcactaaggcatttaacgcaaaggctagcgttagggtggaggattcgtttgactcaacatctgctaaggaactatttgagaaataatgcgttttacaaggttttccacatgtcaggcaatagtattgatgcggaccagagactcactcgtgacctggaaaagttaaccgctgacttgtctggacttcttactggaatggtaaagccatcggttgacattctctggttcacctggaggatgaagttactgactggtcagaggggagttgccatactttacacatatatgttacttggtcttggttttctgagacgtgttgctcccgatttcggtgatctagccggtgaagaacagcagcttgaagggaagtttcggtttatgcacgagaggctgaacactcatgctgaatctattgcattctttggaggtggagctcgagaaaaggctatggttgacaaaaaattcagggccctactggatcattctctcatgctcttgaggaagaaatggttgtatggcatacttgatgattttgtgacaaagcaacttcccaataatgtgacgtggggattgagtttattgtatgccctagaacacaagggagacagagcacttgtctccactcaaggtgaattggcacatgcattgcggtatctagcttctgttgtctcccaaagctttatggcttttggcgatattcttgaactacacaagaagttcctggagctctctggtggtattaacagaatttttgagctcgatgagtttttggatgcttctcagtcaggtgttacctcagaaaatcaaacaagtcgtttggattctcaagatctactttccttttcggaggtggatatcattacccctgctcagaaattgatggctagcaagttgtcgtgtgaaatagtttcagggaaaagcctgctcgtcacaggtccaaatggtagtggaaagacttcagtatttagagtccttagagatatctggcccactgtatgtggaagacttaccaaaccatcattggatatcaaagaacttgggtcagggaatggcatgttttttgtcccgcagcgaccttatacatgtttagggacactgagagatcaaattatataccctctatctaaagaagaagcagagaaaagggcagcaaagttgtacaccagtggagagagctcaacagaagctggaagcattctggattctcatttgaaaaccattctggagaatgttcggttagtttatctcttggaaagagacgtaggtggttgggatgctactaccaattgggaagacatattatctcttggagagcaacagagattaggcatggcacgtttattctttcacaggccgaagtttggagtccttgatgaatgcacaaatgcgacgagtgttgatgttgaggaacagctctatagagttgcacgagacatgggagtcactttcataacctcatcacaacggccggctctgatcccattccattccttggagctaaggctgattgatggagaaggaaactgggagctccgttcgatcgaacagacaacagagtgaactcagcaaaacatttttagaaaggtctatatagttgttaaagaaaaaagtaataaagttaaagccattagacgatgcaagctatatggtatgtagtatatggattcttcctcgatcgcaaggagtggaagagaatgcgtcgatgctagtgcttttgttagaattggaggatttgatttgattctagatatatataaatgtaggcgattgaattggtggagcattttgagttctcctatggagtatggtcttagctttgaacaaacaaagaatatagtgatcactcaaataatgtacagttcgtttcaatttcctttgttgggattagtttttctatcttataattaaaagaatgaaattgaagtgg

SEQ ID NO: 105481 - protein, 1337 aa, Arabidopsis thaliana; identical to SEQ ID NO: 36916
  peptide (1)..(1337): Ceres Seq. ID no. 13617339

SEQ ID NO: 105482 - protein, 1237 aa, Arabidopsis thaliana; identical to SEQ ID NO: 36917
  peptide (1)..(1237): Ceres Seq. ID no. 13617340

SEQ ID NO: 105483 - protein, 1234 aa, Arabidopsis thaliana; identical to SEQ ID NO: 36918
  peptide (1)..(1234): Ceres Seq. ID no. 13617341

SEQ ID NO: 105484 - DNA, 761 bp, Arabidopsis thaliana
  misc_feature (1)..(761): Ceres Seq. ID no. 13617346
  misc_feature (1)..(761): Ortholog of  Ceres SEQ ID NO 13596727 as cited in SEQ ID NO 63000
aaagaagaaaaacccttgctactgcttttcatttctgacctaaaagctcagctccgatttgaaaatggggagtagattgggaggacgagtggttcatttcgcgaatcttccgattaagcttctgatgcctgcgaagctgaccaacattcacgaattcgcgttgaaaacgattccttccgcgtccaagatcgagatcaagcgagtcctggagtcgctctacggattcgatgtggagaaggtgaatactttaaacatggatgggaagaagaagaagcgtggtggtttgttgatagcgaaagctgattacaagaaggcttacgtcacgctacgtagtccattgtcgatttctagggatttgtttccggtgaagtatatcgaggaagataggaagagtaaagtgaaaggatctagctttgttgaggaagaagatgataagaagagtcattggcttgatcgtaaggagaagagggagattggtggttatggtaaaggtaaaggtcgtcgaggtggtgaaagggctaactctccgacgagaggtggtgctgcggcggcggggacggccaagtttccatggagcaacatgagatttgttggtaagtagggtttatgagcagattatgatctggggtttgtgtttctttagctatcggattattgattttgttgtttctattacttgaggtttgtgtattgagaatctgaatcattgaagctctcagtgtttctgagatttggctaataaatctgaatcaagatgtttc

SEQ ID NO: 105485 - protein, 178 aa, Arabidopsis thaliana; identical to SEQ ID NO: 31095
  peptide (1)..(178): Ceres Seq. ID no. 13617347

SEQ ID NO: 105486 - protein, 158 aa, Arabidopsis thaliana; identical to SEQ ID NO: 31096
  peptide (1)..(158): Ceres Seq. ID no. 13617348

SEQ ID NO: 105487 - protein, 115 aa, Arabidopsis thaliana; identical to SEQ ID NO: 31097
  peptide (1)..(115): Ceres Seq. ID no. 13617349

SEQ ID NO: 105488 - DNA, 1171 bp, Arabidopsis thaliana
  misc_feature (1)..(1171): Ceres Seq. ID no. 13617350
  misc_feature (1)..(1171): Ortholog of  Ceres SEQ ID NO 12562983 as cited in SEQ ID NO 53309
  misc_feature (1)..(1171): Ortholog of  Ceres SEQ ID NO 14309224 as cited in SEQ ID NO 0
gcaagtctcatcagaagaggaagagaatcaatggcgagttgcttcagctacgtgtcttctcgtaacaaatgttaccaatacagcttctctcgtgctggtctccgatcatctacctccgatcttggcgacggcaccgtcttccactgttggatcccacttactcacatccacaccaagcccacgctcctcctccttcacgggatcggagctaacgctatgtggcagtgggaccgcttcatcgaccgttttatcccccgcttcaacgtctacgtaccggacctcatcttctttggcgactcctacaccactcgtcccgaccgctcagagtctttccaggcgacttgtgtcatgaaggcgatggatgcttacggtgttaggaccatgaccgtcgctggcctcagctacggtggttttgtggcctactccttggcggcgcagtttaaggagagggtagatcgagttgtgctaatatgcgccggtgttgctctggaggagaaagactcggaggatggtatgttcaaagtgaagagcccggaggaagcggcggctgttttgtttcctcagtctccttcgatgctccggcggcttctccagttatctttctataaaccgccgatttggatcccttcttgctttgccatggactacattcatgtaatgtgtaaagactatcttcaagaaaggaaagaacttgtggaagctctgcataagggtagaagattcgccaatcttccaaagataacacagccgacattgatgatatggggagaggaagatcaagtatttccagttgaattagctcatagattgaaaagatatttaggggaagacagagcacaattggtgttactgaagaagacaggacatgcgattaatgaagagaaaccaaaagagatgtacaaacacatgaaatcttttctttgcactgacgcaatgattcctcagaatcaccagatcaatgctaagagactcatgttagcaaacttgatatccccagatcagcagatcaacaagtgatgttactgcagaaaaaaaaaaagtgttgttagaagacataatagttaatcatgtttttagcttgtccctaaatgtgatttgtatcgttattgttaaagaaagacattgcttctaatagttggaattaagaatacttttatttcaagaaagtaat

SEQ ID NO: 105489 - protein, 338 aa, Arabidopsis thaliana
  peptide (1)..(338): Ceres Seq. ID no. 13617351
ASLIRRGRESMASCFSYVSSRNKCYQYSFSRAGLRSSTSDLGDGTVFHCWIPLTHIHTKPTLLLLHGIGANAMWQWDRFIDRFIPRFNVYVPDLIFFGDSYTTRPDRSESFQATCVMKAMDAYGVRTMTVAGLSYGGFVAYSLAAQFKERVDRVVLICAGVALEEKDSEDGMFKVKSPEEAAAVLFPQSPSMLRRLLQLSFYKPPIWIPSCFAMDYIHVMCKDYLQERKELVEALHKGRRFANLPKITQPTLMIWGEEDQVFPVELAHRLKRYLGEDRAQLVLLKKTGHAINEEKPKEMYKHMKSFLCTDAMIPQNHQINAKRLMLANLISPDQQINK

SEQ ID NO: 105490 - protein, 328 aa, Arabidopsis thaliana
  peptide (1)..(328): Ceres Seq. ID no. 13617352
MASCFSYVSSRNKCYQYSFSRAGLRSSTSDLGDGTVFHCWIPLTHIHTKPTLLLLHGIGANAMWQWDRFIDRFIPRFNVYVPDLIFFGDSYTTRPDRSESFQATCVMKAMDAYGVRTMTVAGLSYGGFVAYSLAAQFKERVDRVVLICAGVALEEKDSEDGMFKVKSPEEAAAVLFPQSPSMLRRLLQLSFYKPPIWIPSCFAMDYIHVMCKDYLQERKELVEALHKGRRFANLPKITQPTLMIWGEEDQVFPVELAHRLKRYLGEDRAQLVLLKKTGHAINEEKPKEMYKHMKSFLCTDAMIPQNHQINAKRLMLANLISPDQQINK

SEQ ID NO: 105491 - protein, 266 aa, Arabidopsis thaliana
  peptide (1)..(266): Ceres Seq. ID no. 13617353
MWQWDRFIDRFIPRFNVYVPDLIFFGDSYTTRPDRSESFQATCVMKAMDAYGVRTMTVAGLSYGGFVAYSLAAQFKERVDRVVLICAGVALEEKDSEDGMFKVKSPEEAAAVLFPQSPSMLRRLLQLSFYKPPIWIPSCFAMDYIHVMCKDYLQERKELVEALHKGRRFANLPKITQPTLMIWGEEDQVFPVELAHRLKRYLGEDRAQLVLLKKTGHAINEEKPKEMYKHMKSFLCTDAMIPQNHQINAKRLMLANLISPDQQINK

SEQ ID NO: 105492 - DNA, 1472 bp, Arabidopsis thaliana
  misc_feature (1)..(1472): Ceres Seq. ID no. 13617358
  misc_feature (1)..(1472): Ortholog of  Ceres SEQ ID NO 14315481 as cited in SEQ ID NO 56990
gagattacaagagtgttgtttgagagcgaatcaaggttcctccaaagaaggaagatgactttaattcttatttaatttccctttctccttttgcttcaccaaaatccacacattcatcaattaaaaaacaaaccctagattcttgaaaactggaactcattcacgaatcctaaaaagagagctcctttggttttcttgaaacccagattcttcaagctcagctatggcggtcttcaaaaccctagctttcctattcgttttaagcatcgtgatttaccaatcagtggctgttacagatgtaaattcatcgttttcctttaatgggtttgtgaaagctccaagctttgacaataatgttgctctgtttggagattcgaagctcgttcatggcggtccatcgatacaattgactgactcagtgagtcgcagtgaagggcgagttatttacaagaaacccatcagactgttccaaggtaaagagagaaacttttccggatcattctcaactagtttctcgttttcgatgtctgatgagattggtagtgtcttggcttttataatggttccaagaggtttggatcttaggttgtttggtagaaagggtaataatagttcctctggtttagggttcttattgaaacacaaagttgttgctgttgagtttggtatctccaagagagggaatcatgtagggatcttagttggtcgtcctgaatctggtaaagttagaaagttatcatcttttggtcaccatttcaatgaagagaagagattgaattgttggattgattatgaggcaagctcaaagagaatagaggttcgtttgagtctatctgctgccttaaagccggtggatccattcgtgtcttactctgtagacttggctaagctatggaaagatgggaagtttatggtgggtttaacctctgcaaatggaaacacttcaaagccggtttatctccattcgtggagctttaaactgagacatccttcgatgaggattcactcgcagccgcttgatccaaacgacgtttccaagactgttaaggaaggggagaagacggtggaagttaaggggaaaggaaaatgtatatggagaatccttggtgcattggttttgggggcggtttgtggaacattgggagccatgttcgcgttatacctttggacaatatgcggtaataggcagtcaatggcgatagttcccgaggaatgtgctgacgaaaaagcggatatccttgtaacgaaagctgatgttgttgttgaagaagaagtcaagaagtagtagaaaaagaaaagtttggtgtgtgtgttttagaatgttgtatttgttgtttgtaatgtaaattcttgtgtccttctttattcttcttctgtttgtttttttgttagttgcagatttggtgagatgagttttcacatgtagaagaatcatacaatatgtattaagttaagatcctgaaatcttgatc

SEQ ID NO: 105493 - protein, 353 aa, Arabidopsis thaliana
  peptide (1)..(353): Ceres Seq. ID no. 13617359
MAVFKTLAFLFVLSIVIYQSVAVTDVNSSFSFNGFVKAPSFDNNVALFGDSKLVHGGPSIQLTDSVSRSEGRVIYKKPIRLFQGKERNFSGSFSTSFSFSMSDEIGSVLAFIMVPRGLDLRLFGRKGNNSSSGLGFLLKHKVVAVEFGISKRGNHVGILVGRPESGKVRKLSSFGHHFNEEKRLNCWIDYEASSKRIEVRLSLSAALKPVDPFVSYSVDLAKLWKDGKFMVGLTSANGNTSKPVYLHSWSFKLRHPSMRIHSQPLDPNDVSKTVKEGEKTVEVKGKGKCIWRILGALVLGAVCGTLGAMFALYLWTICGNRQSMAIVPEECADEKADILVTKADVVVEEEVKK

SEQ ID NO: 105494 - protein, 253 aa, Arabidopsis thaliana
  peptide (1)..(253): Ceres Seq. ID no. 13617360
MSDEIGSVLAFIMVPRGLDLRLFGRKGNNSSSGLGFLLKHKVVAVEFGISKRGNHVGILVGRPESGKVRKLSSFGHHFNEEKRLNCWIDYEASSKRIEVRLSLSAALKPVDPFVSYSVDLAKLWKDGKFMVGLTSANGNTSKPVYLHSWSFKLRHPSMRIHSQPLDPNDVSKTVKEGEKTVEVKGKGKCIWRILGALVLGAVCGTLGAMFALYLWTICGNRQSMAIVPEECADEKADILVTKADVVVEEEVKK

SEQ ID NO: 105495 - protein, 241 aa, Arabidopsis thaliana
  peptide (1)..(241): Ceres Seq. ID no. 13617361
MVPRGLDLRLFGRKGNNSSSGLGFLLKHKVVAVEFGISKRGNHVGILVGRPESGKVRKLSSFGHHFNEEKRLNCWIDYEASSKRIEVRLSLSAALKPVDPFVSYSVDLAKLWKDGKFMVGLTSANGNTSKPVYLHSWSFKLRHPSMRIHSQPLDPNDVSKTVKEGEKTVEVKGKGKCIWRILGALVLGAVCGTLGAMFALYLWTICGNRQSMAIVPEECADEKADILVTKADVVVEEEVKK

SEQ ID NO: 105496 - DNA, 1275 bp, Arabidopsis thaliana
  misc_feature (1)..(1275): Ceres Seq. ID no. 13617362
  misc_feature (1)..(1275): Ortholog of  Ceres SEQ ID NO 13654273 as cited in SEQ ID NO 68551
tccggcgtgattcttgagaagaactgaagtagagagagagatctgaaatctcaatctccgatttaacttgcgacaatgcttcaaattcgtcttcggagggattccccgacggaaactggaaatggtgcgaggccttctccgacggagacggttactgtagcctgtcccgaccatctcgtcctcgccgatcttcctgttgcgaaaggaatcggttccgtgactcccaccaccgtaatcaagcccgtcggtcgtcgttctcgccgtcagctaggcgagagagttcacttctgcgttcgttgcgattttccgattgcaatctatggtcgtctgattccttgtgatcatgccttttgccttgaatgtgctcgcagtgattccatctgctatctatgtgatgagcggattcagaagattcaaacaatcaagatgatggaagggatcttcatctgtgcagctcctcattgtcttaggtctttcctgaagaaacttgactttgaagcccatgtccatgacctccatggaagcctattacaagccgatgcagagaaagaagatggtaaccagtcagatgttcagagcacaatgcagcagtcttcagcttcagaatccaccttgcgagctcctttaagatcccagctgcaacaatcccgtgaactaaacaggtcggcgtcatttgcaaagtcacagtctggatttagtcaagtccagaattaccctccagatagcgataactctcgccctcctggattcgaaaccgctagtcctaaaccaggaatccggttcccagactacccccagcctatgaatcttatgcaaccgcccagcttgcccgttccaatgaatcaaaacccgggtttaccacagcagtttggttttccttcgtatccaacaacagagagtggatcatctcaacaattctttaacggtgctcagtacgagatgacaagaacagagagcggcggatcagaacaaagttcattgctcgggtatcccccgccttcaccaatgacgaatctgaatttccaaggatcgtatcctcctccatcatggaatcccggaatggcaccgcctcacacgacccagcaggttaaccggggtagagacggtcaaagttttgggtggccacaagagaaccgtgatggctttgggcaggagtaagagtagtctagtttgaatttgtgcaatgttaaactcgtcgtttgaaagtttcaagtacttttgtttctaaaaactgtgtcgtttgttgttggtctaacatgtaattcgagtaaaccc

SEQ ID NO: 105497 - protein, 360 aa, Arabidopsis thaliana
  peptide (1)..(360): Ceres Seq. ID no. 13617363
MLQIRLRRDSPTETGNGARPSPTETVTVACPDHLVLADLPVAKGIGSVTPTTVIKPVGRRSRRQLGERVHFCVRCDFPIAIYGRLIPCDHAFCLECARSDSICYLCDERIQKIQTIKMMEGIFICAAPHCLRSFLKKLDFEAHVHDLHGSLLQADAEKEDGNQSDVQSTMQQSSASESTLRAPLRSQLQQSRELNRSASFAKSQSGFSQVQNYPPDSDNSRPPGFETASPKPGIRFPDYPQPMNLMQPPSLPVPMNQNPGLPQQFGFPSYPTTESGSSQQFFNGAQYEMTRTESGGSEQSSLLGYPPPSPMTNLNFQGSYPPPSWNPGMAPPHTTQQVNRGRDGQSFGWPQENRDGFGQE

SEQ ID NO: 105498 - protein, 243 aa, Arabidopsis thaliana
  peptide (1)..(243): Ceres Seq. ID no. 13617364
MMEGIFICAAPHCLRSFLKKLDFEAHVHDLHGSLLQADAEKEDGNQSDVQSTMQQSSASESTLRAPLRSQLQQSRELNRSASFAKSQSGFSQVQNYPPDSDNSRPPGFETASPKPGIRFPDYPQPMNLMQPPSLPVPMNQNPGLPQQFGFPSYPTTESGSSQQFFNGAQYEMTRTESGGSEQSSLLGYPPPSPMTNLNFQGSYPPPSWNPGMAPPHTTQQVNRGRDGQSFGWPQENRDGFGQE

SEQ ID NO: 105499 - protein, 242 aa, Arabidopsis thaliana
  peptide (1)..(242): Ceres Seq. ID no. 13617365
MEGIFICAAPHCLRSFLKKLDFEAHVHDLHGSLLQADAEKEDGNQSDVQSTMQQSSASESTLRAPLRSQLQQSRELNRSASFAKSQSGFSQVQNYPPDSDNSRPPGFETASPKPGIRFPDYPQPMNLMQPPSLPVPMNQNPGLPQQFGFPSYPTTESGSSQQFFNGAQYEMTRTESGGSEQSSLLGYPPPSPMTNLNFQGSYPPPSWNPGMAPPHTTQQVNRGRDGQSFGWPQENRDGFGQE

SEQ ID NO: 105500 - DNA, 731 bp, Arabidopsis thaliana
  misc_feature (1)..(731): Ceres Seq. ID no. 13617366
  misc_feature (1)..(731): Ortholog of  Ceres SEQ ID NO 15174048 as cited in SEQ ID NO 61892
cggcgtctccatcgccgtctctatctaatctcgtcctgcgtcgacctagtgagctacttcagattccggccatcacgcagctccagttgtatgctttgagagttaatacaaagatgacaacaatcgaaaccggtcagaaaactcaaaagtcttctccttccggttctggtactacccctactggtactcttaagcagtcatcagcatcgtttaaaaggtggggaaggagacacccgtttgtaagatatggacttccgatgatatctctcactgtatttggagccctcggactcggccaactccttcaaggcagtaaggatattgcaaaggtaaaagatgaccaagaatgggagattatagaaacaagaaaggcactttcgagaacaggacctgtcgatgcctataaacctaaaaacacatccattgaagatgagctcaaggctatgcaagagaaggtggacataaacacgtacgagtacaagaaaattccaaagctaaacgaaagcaagtcgagttaagaagagtctttgtataagattagtctttttagatgtgtttcagttttaaatgactcttcagttcacataatcgcccaagtacaaattccagtaagttctgtctgggcttcctaaaaccaagaacaacgagggacttgccaattgttgataatacatgttgtcgtgttgatttacgacgtccaaatagatctgaaagaggttttataaccagtt

SEQ ID NO: 105501 - protein, 171 aa, Arabidopsis thaliana
  peptide (1)..(171): Ceres Seq. ID no. 13617367
ASPSPSLSNLVLRRPSELLQIPAITQLQLYALRVNTKMTTIETGQKTQKSSPSGSGTTPTGTLKQSSASFKRWGRRHPFVRYGLPMISLTVFGALGLGQLLQGSKDIAKVKDDQEWEIIETRKALSRTGPVDAYKPKNTSIEDELKAMQEKVDINTYEYKKIPKLNESKSS

SEQ ID NO: 105502 - protein, 134 aa, Arabidopsis thaliana
  peptide (1)..(134): Ceres Seq. ID no. 13617368
MTTIETGQKTQKSSPSGSGTTPTGTLKQSSASFKRWGRRHPFVRYGLPMISLTVFGALGLGQLLQGSKDIAKVKDDQEWEIIETRKALSRTGPVDAYKPKNTSIEDELKAMQEKVDINTYEYKKIPKLNESKSS

SEQ ID NO: 105503 - protein, 86 aa, Arabidopsis thaliana; identical to SEQ ID NO: 29125
  peptide (1)..(86): Ceres Seq. ID no. 13617369

SEQ ID NO: 105504 - DNA, 836 bp, Arabidopsis thaliana
  misc_feature (1)..(836): Ceres Seq. ID no. 13617378
  misc_feature (1)..(836): Ortholog of  Ceres SEQ ID NO 12624653 as cited in SEQ ID NO 61262
  misc_feature (1)..(836): Ortholog of  Ceres SEQ ID NO 12579223 as cited in SEQ ID NO 0
  misc_feature (1)..(836): Ortholog of  Ceres SEQ ID NO 12635708 as cited in SEQ ID NO 0
aaaatcagcctcttcgttttctttctcctcctgtctgttgatttaaagacccaaatctgacgcttctctctctctttctggtatctgcgtttgattcggagaagaaaaaaaaaaaaaaggcaaagagagagcttcaatggagttagcttctttccttggtagagctctgtttgtttccgtatttcttctctccgcatggcaagagttcaatgattttggtgaagatggtggccgatcagctaaatctttgaaaccaaaattcaatgcctttgtaaaccatgtgacaactcacactggccagcaattgccaccagtcgatatgaagattcttgttgctgctgctatagccttgaagggtattgggggactattgtttgtctttggcagctcattgggagcttatctcttgcttctgcatcaagccgttgccaccccaattctgtatgatttctacaactacgatgttgacagaaaggaattcggccaactattttcaaaatttacacagagcttggctcttcttggaggactgctcttcttcattggaatgaaaaactcaaggaaacacggtaggcaactcaggaaaaaggctccaaaggcaaaagcaaactgaagaagccatatctttcatcggttttattcggtctgtattttattttcattttggaatccaggatgggtttaaagagtctatctgatgaggccattgaaaggcaaaatctctgcaaatcattttgcttacttcaagaagcttttatgacacttttttgtagaaatatttatggattattgtttcttagagacaccacttcaatgttattgttccaacttatttc

SEQ ID NO: 105505 - protein, 158 aa, Arabidopsis thaliana; identical to SEQ ID NO: 26093
  peptide (1)..(158): Ceres Seq. ID no. 13617379

SEQ ID NO: 105506 - protein, 97 aa, Arabidopsis thaliana; identical to SEQ ID NO: 26094
  peptide (1)..(97): Ceres Seq. ID no. 13617380

SEQ ID NO: 105507 - DNA, 1106 bp, Arabidopsis thaliana
  misc_feature (1)..(1106): Ceres Seq. ID no. 13617381
  misc_feature (1)..(1106): Ortholog of  Ceres SEQ ID NO 13594363 as cited in SEQ ID NO 60250
  misc_feature (1)..(1106): Ortholog of  Ceres SEQ ID NO 15225478 as cited in SEQ ID NO 63805
  misc_feature (1)..(1106): Ortholog of  Ceres SEQ ID NO 13596420 as cited in SEQ ID NO 68738
  misc_feature (1)..(1106): Ortholog of  Ceres SEQ ID NO 14309260 as cited in SEQ ID NO 0
aacaacacgatttctcacacatttcaagttttcattatcatccagaaatcttcttcttcctccgatcaccaccatgtgtacgttagagaaacgcggcgatctcttcctcctaaccctaaccggagacggcgaacacagattccaccccgacacaattgccaccattctctcccttctcgaacaagccaaatctcaatccacccgtggatccatcctcatcaccaccgccaacggcaaattcttctccaacggattcgatcttgcatgggctcaaaccgccggatccaaaaccggagccgcaaaccggcttcaccaaatggttgaatcattcaaaccggtggtagcagcgcttctcgatctccctatgccgacgatcgccgccttgaacggccacgccgccgccgcgggattgattttggctttgagccatgattacgtgttcatgaggaaagatcgtggggttctgtatatgagtgaagttgacatcgggctttcgatgccggattatttctcggcgttggttagggctaagatcgggacgagtgcggcgaggagagagctgttgttgagtgggaagaagattagaggagaagaagcggtgggtttggggattgttgactcggccgcgtatgatagtgaggaaggtgttgttgtggctagtgtgcgccttggtgagaaattggcggcgaagaaatggagcggtgaggtttatgcgtcgataaggaagagtttgtatccggagctttgtgggattcttggtttagagactagagtgtttgcaacacctaagctctaagaaagcgtctttcagagagtgaatctttggtttatttgaaaaacacatgttttgggagaaagagacaatgttaaactctagaactgtgatcacagaaataataaacatgttcaatgttggcttgttcagtgttgttgttgggcttgttcttaggcttggttgtttaaaatatggaaccggtttaatcggttttagagctaattagatgaactagagataaccgggttgtagtagttatcggagaaggagaaacggtgttgtgaatttgtgattgctgaaattacgccatgttaaaccggtattaaaacac

SEQ ID NO: 105508 - protein, 264 aa, Arabidopsis thaliana; identical to SEQ ID NO: 21152
  peptide (1)..(264): Ceres Seq. ID no. 13617382

SEQ ID NO: 105509 - protein, 240 aa, Arabidopsis thaliana; identical to SEQ ID NO: 21153
  peptide (1)..(240): Ceres Seq. ID no. 13617383

SEQ ID NO: 105510 - protein, 159 aa, Arabidopsis thaliana; identical to SEQ ID NO: 21154
  peptide (1)..(159): Ceres Seq. ID no. 13617384

SEQ ID NO: 105511 - DNA, 1766 bp, Arabidopsis thaliana
  misc_feature (1)..(1766): Ceres Seq. ID no. 13617387
  misc_feature (1)..(1766): Ortholog of  Ceres SEQ ID NO 13597446 as cited in SEQ ID NO 64098
  misc_feature (1)..(1766): Ortholog of  Ceres SEQ ID NO 15226246 as cited in SEQ ID NO 68314
aatcaattaaatcaccaaactcaattaaataaaaagaaaaaaattattattatcccttcttcttcttcttcgtcttcgtctttgattctcctgattcatgtcgcttaaatttttagcgatcttcgaatcccattttccttcgggaatctgacattttttctcgggaaatttttttatccaaatcggagtaaagtatcgaatctagagaatccgctatggatgagacctattttgatctattgaatttctttaagaatccctcttttacagagacatttgtcgacatcttactatgcgcagttccgatttggctcgccgttatgatcgggttattaatcggatggtcttggcgtccaagatggaccggtttgatctatttagggtttcgttctaagcttcggtttttatggaccgcaccgcctgggtttggtgctcgtcggctttggcttgctttcaccgctctctctgctttctccgtttgccgaaccatctggtcaaggaatgacaccagagctaataaatcggcgaccggttcagcttcgtcgcagacgcctgttgaggataatgatgaatcaggattggcctcaagaggtagcgataacgggacggtgacagaggatattgtgacagagaatgatttagagcatctgcttcagctgcttgaagttggaaatgcagctttggaatggcaatctatgatggataagactactccaaatatgagctaccaggcttggcgtcatgagcctgagacaggtcctgttatttatcgcagccggactgtgtttgaggatgcaactccagatattgttagggatttcttctgggatgatgagtttcgacctaaatgggatttcatgcttgccaacttcaaaacgttggaggaggacactcagacaggaacaatgattgttcagtggagaaaaaagtttccttttttctgtagtgaccgagagtatatcattggccggagaatatgggagtctgggaagaagtattattgtgtcacaaagggagttccttatccagctctaccaaagcgtgataagccaaggcgtgttgagctttatttctcaagttgggttatcagagcggttgaatcccgaaaaggagatggacagcaaacggcttgtgaagtttcccttgtccactacgaagacatgggcatcccaaaagacgtagcaaagttaggtgtccgtcatggcatgtggggagctgtcaagaagctaaactctggtttacgagcgtaccaatccgccagaaaatcagactcatctctatctcggatcgcccaaatggcaagaatcactacaaaactgaacatggattctgcagaatcatcttcaagagatgaagacagaagcagagcaatggaatatgcgagacaacgggaccatttgagaatggactggaaatgggttgttgtaggaggtgtcgcattggcttgtggccttcactctgggatcattggcaaggctttactggctggagctggccagagactggctcgtaggtgagaaaccttgtcgtattcttattatatcttcccttgacagaaaagagaaacatatgcatataattaagggaaatgtattatttttgcaactcctctgagaagggcatgtggttttggtggtgaaccatgtagagtagtagctttaaactatggagtcataagttatttgagttctatcttgtaccacaggatagtgagatatgtattttataaactatatgaatctacatagcttctaaaagcttaaatt

SEQ ID NO: 105512 - protein, 433 aa, Arabidopsis thaliana
  peptide (1)..(433): Ceres Seq. ID no. 13617388
MDETYFDLLNFFKNPSFTETFVDILLCAVPIWLAVMIGLLIGWSWRPRWTGLIYLGFRSKLRFLWTAPPGFGARRLWLAFTALSAFSVCRTIWSRNDTRANKSATGSASSQTPVEDNDESGLASRGSDNGTVTEDIVTENDLEHLLQLLEVGNAALEWQSMMDKTTPNMSYQAWRHEPETGPVIYRSRTVFEDATPDIVRDFFWDDEFRPKWDFMLANFKTLEEDTQTGTMIVQWRKKFPFFCSDREYIIGRRIWESGKKYYCVTKGVPYPALPKRDKPRRVELYFSSWVIRAVESRKGDGQQTACEVSLVHYEDMGIPKDVAKLGVRHGMWGAVKKLNSGLRAYQSARKSDSSLSRIAQMARITTKLNMDSAESSSRDEDRSRAMEYARQRDHLRMDWKWVVVGGVALACGLHSGIIGKALLAGAGQRLARR

SEQ ID NO: 105513 - protein, 398 aa, Arabidopsis thaliana
  peptide (1)..(398): Ceres Seq. ID no. 13617389
MIGLLIGWSWRPRWTGLIYLGFRSKLRFLWTAPPGFGARRLWLAFTALSAFSVCRTIWSRNDTRANKSATGSASSQTPVEDNDESGLASRGSDNGTVTEDIVTENDLEHLLQLLEVGNAALEWQSMMDKTTPNMSYQAWRHEPETGPVIYRSRTVFEDATPDIVRDFFWDDEFRPKWDFMLANFKTLEEDTQTGTMIVQWRKKFPFFCSDREYIIGRRIWESGKKYYCVTKGVPYPALPKRDKPRRVELYFSSWVIRAVESRKGDGQQTACEVSLVHYEDMGIPKDVAKLGVRHGMWGAVKKLNSGLRAYQSARKSDSSLSRIAQMARITTKLNMDSAESSSRDEDRSRAMEYARQRDHLRMDWKWVVVGGVALACGLHSGIIGKALLAGAGQRLARR

SEQ ID NO: 105514 - protein, 273 aa, Arabidopsis thaliana
  peptide (1)..(273): Ceres Seq. ID no. 13617390
MMDKTTPNMSYQAWRHEPETGPVIYRSRTVFEDATPDIVRDFFWDDEFRPKWDFMLANFKTLEEDTQTGTMIVQWRKKFPFFCSDREYIIGRRIWESGKKYYCVTKGVPYPALPKRDKPRRVELYFSSWVIRAVESRKGDGQQTACEVSLVHYEDMGIPKDVAKLGVRHGMWGAVKKLNSGLRAYQSARKSDSSLSRIAQMARITTKLNMDSAESSSRDEDRSRAMEYARQRDHLRMDWKWVVVGGVALACGLHSGIIGKALLAGAGQRLARR

SEQ ID NO: 105515 - DNA, 802 bp, Arabidopsis thaliana
  misc_feature (1)..(802): Ceres Seq. ID no. 13617391
  misc_feature (1)..(802): Ortholog of  Ceres SEQ ID NO 13638897 as cited in SEQ ID NO 55839
  misc_feature (1)..(802): Ortholog of  Ceres SEQ ID NO 15177758 as cited in SEQ ID NO 57504
  misc_feature (1)..(802): Ortholog of  Ceres SEQ ID NO 13624040 as cited in SEQ ID NO 0
acacaagcattttcaaggatatcaaatcacaatcccaagaagagcaataacaagagaagaagaagtagttcaagaattaaggaagagagcttctccgttaaagtatagtgagagaatatggaagtcaccaatgggcttaaccttaaggacacagagcttcgtttgggattacccggagcacaagaagaacaacaactagaactttcttgcgtcagaagcaacaacaagcgcaagaacaacgactcaacagaagaatctgctcctcctcctgcaaaaacacaaatcgttggatggcctccagtgagatctaaccgtaagaacaacaacaacaaaaacgtgagttatgtgaaagtgagtatggacggagctccatatctccgtaagatagatctcaagatgtacaaaaactatccagagcttctcaaagcactagagaacatgttcaagttcacagtaggtgaatattccgagagagaaggctacaaaggatctggatttgtacctacttatgaagacaaagatggagattggatgttggtcggtgatgttccatgggacatgttctcttcatcttgtcaaaaactcagaatcatgaaaggatccgaagctcctactgccttatgatccattgtctcaaaacaccttttggtcgaggcaaaaacaaattctactttgtttagataaaaaaaagtttggtgtaaagaaagaaaaagcaatagggttacaaatacgttatatagatgtaaactagctttggttaattctgtaaaagatgagttttgattatacgaagtttatatgt

SEQ ID NO: 105516 - protein, 168 aa, Arabidopsis thaliana; identical to SEQ ID NO: 22588
  peptide (1)..(168): Ceres Seq. ID no. 13617392

SEQ ID NO: 105517 - protein, 88 aa, Arabidopsis thaliana; identical to SEQ ID NO: 22589
  peptide (1)..(88): Ceres Seq. ID no. 13617393

SEQ ID NO: 105518 - DNA, 944 bp, Arabidopsis thaliana
  misc_feature (1)..(944): Ceres Seq. ID no. 13617402
  misc_feature (1)..(944): Ortholog of  Ceres SEQ ID NO 15225572 as cited in SEQ ID NO 61651
tctccacattttccaaggcttcagtttcacttcatcacactctctgcaaaaaaacaaaaatgagctctcaaatctgcagatctgcttccaaagcagccaaatctcttctctcttcagctaaaaatgctcgcttcttctctgaaggacgagccattggtgctgcggcagcggtttcggcgtcaggaaaaattcctttgtatgcatctaactttgcaagatcatcaggttctggtgttgcttctaagagttggatcactggactcttagctcttcctgctgcagcttatatgattcaagatcaagaggttcttgctgctgagatggaacgaacttttattgctatcaagcctgatggtgtgcaaagaggactgatatcagagatcatttctcgattcgaacgcaagggattcaagctagttggtatcaaagtcattgttccttctaaagatttcgcacaaaagcattaccatgatcttaaggaaagacctttcttcaatggtttgtgtgacttccttagctctggtcctgttattgccatggtctgggaaggagatggtgtgatcagatacggacgtaaactgattggagccactgatcctcagaaatctgagcctggaacaatccgaggagatcttgcagttactgttggcaggaacataatccatggaagtgatggaccagagactgcaaaggatgagatcagtctgtggtttaagcctcaagaacttgtttcttacactagtaactctgagaagtggctctatggtgacaactaaatccctcttcctcttgtcttttgaaatcaaatcacattggtttttcttttcttttcttacccatacaataaaaacaagaaacagttgttacggatacaaacacattccgggttttgatttttccccggtgaactcagtaaacagagcataagcaataagtatgggatg

SEQ ID NO: 105519 - protein, 257 aa, Arabidopsis thaliana
  peptide (1)..(257): Ceres Seq. ID no. 13617403
STFSKASVSLHHTLCKKTKMSSQICRSASKAAKSLLSSAKNARFFSEGRAIGAAAAVSASGKIPLYASNFARSSGSGVASKSWITGLLALPAAAYMIQDQEVLAAEMERTFIAIKPDGVQRGLISEIISRFERKGFKLVGIKVIVPSKDFAQKHYHDLKERPFFNGLCDFLSSGPVIAMVWEGDGVIRYGRKLIGATDPQKSEPGTIRGDLAVTVGRNIIHGSDGPETAKDEISLWFKPQELVSYTSNSEKWLYGDN

SEQ ID NO: 105520 - protein, 238 aa, Arabidopsis thaliana; identical to SEQ ID NO: 23294
  peptide (1)..(238): Ceres Seq. ID no. 13617404

SEQ ID NO: 105521 - protein, 162 aa, Arabidopsis thaliana; identical to SEQ ID NO: 23295
  peptide (1)..(162): Ceres Seq. ID no. 13617405

SEQ ID NO: 105522 - DNA, 1444 bp, Arabidopsis thaliana
  misc_feature (1)..(1444): Ceres Seq. ID no. 13617406
  misc_feature (1)..(1444): Ortholog of  Ceres SEQ ID NO 13577044 as cited in SEQ ID NO 58682
cttaaaagaaaaaaaaaatcccaaacacagcaaaaaaaaaaaaagcctagaggaatagaatcggtctctttctctataatctctctctctctctgacttgtttgtgttctctcaaatcctctgataagaatcaatggccaaggaattagcagagaaagctaaagaagcttttctagatgatgacttcgatgttgctgttgacttatactccaaagccattgacttggatcccaattgcgccgccttcttcgccgatcgtgctcaggccaacatcaaaatcgataacttcactgaagctgttgtagatgcgaacaaagccattgagttggagccaacgttggcaaaagcctatctcagaaagggcactgcttgtatgaagctagaagaatatagtactgctaaagcagccctggaaaagggagcttctgttgcaccgaatgaaccaaagtttaagaagatgatagatgaatgcgatcttcgtattgcagaagaagagaaagatttggttcagccgatgccaccgagtttgccttcaagctctacaacaccactagcaacggaagctgatgctcctcctgttccaattcctgcagcacctgccaaaccgatgttcaggcacgagttctaccagaaaccagaagaagcggtggtgacaattttcgccaaaaaagtacctaaggagaacgtaactgtcgagtttggtgagcagattctgagtgttgtcattgatgttgctggagaggaagcttatcatctccagccgagattgttcgggaagataataccagagaagtgcagatttgaagtattgtcgaccaaagttgagatccgtcttgcgaaagcagagataatcacctgggcctcccttgaatatggtaaagggcaaagtgttttgcccaaacccaatgtctcatcagcgctgtcgcagagaccagtgtacccatcttctaagccagcaaaagactgggacaagttggaagctgaagtgaagaaacaggagaaggatgagaagcttgatggagatgcagctatgaacaaatttttcagcgacatatactcgagtgcagatgaagacatgaggcgggcaatgaacaaatcatttgcagagtcgaatgggacggtactgtcgacaaactggaaagaagttgggactaagaaagtggagagcactccaccagatggcatggagctcaagaagtgggagtattgatcttcttaaaatccccttttctggtttttgttaaaaaaaagtctgacaaatcttttgaacttttaaggtgtttttcttttttggtttctgctcgaatttgtctctctccattcttgcgttgtggtctcaaagaacgttctgatactttgattttgtattagaaaactaaaactcgcaagtctgttgttttggaactttgttcttttatcgagaggcttatctaaatatttcttg

SEQ ID NO: 105523 - protein, 358 aa, Arabidopsis thaliana; identical to SEQ ID NO: 25341
  peptide (1)..(358): Ceres Seq. ID no. 13617407

SEQ ID NO: 105524 - protein, 278 aa, Arabidopsis thaliana; identical to SEQ ID NO: 25342
  peptide (1)..(278): Ceres Seq. ID no. 13617408

SEQ ID NO: 105525 - protein, 250 aa, Arabidopsis thaliana; identical to SEQ ID NO: 25343
  peptide (1)..(250): Ceres Seq. ID no. 13617409

SEQ ID NO: 105526 - DNA, 1189 bp, Arabidopsis thaliana
  misc_feature (1)..(1189): Ceres Seq. ID no. 13617410
  misc_feature (1)..(1189): Ortholog of  Ceres SEQ ID NO 14301430 as cited in SEQ ID NO 56553
  misc_feature (1)..(1189): Ortholog of  Ceres SEQ ID NO 13639124 as cited in SEQ ID NO 56718
  misc_feature (1)..(1189): Ortholog of  Ceres SEQ ID NO 15175700 as cited in SEQ ID NO 58584
  misc_feature (1)..(1189): Ortholog of  Ceres SEQ ID NO 13596474 as cited in SEQ ID NO 62169
  misc_feature (1)..(1189): Ortholog of  Ceres SEQ ID NO 13598714 as cited in SEQ ID NO 62656
  misc_feature (1)..(1189): Ortholog of  Ceres SEQ ID NO 13596969 as cited in SEQ ID NO 63375
  misc_feature (1)..(1189): Ortholog of  Ceres SEQ ID NO 13597519 as cited in SEQ ID NO 64759
  misc_feature (1)..(1189): Ortholog of  Ceres SEQ ID NO 13597870 as cited in SEQ ID NO 64982
  misc_feature (1)..(1189): Ortholog of  Ceres SEQ ID NO 13656123 as cited in SEQ ID NO 65212
  misc_feature (1)..(1189): Ortholog of  Ceres SEQ ID NO 13595926 as cited in SEQ ID NO 67778
  misc_feature (1)..(1189): Ortholog of  Ceres SEQ ID NO 13662323 as cited in SEQ ID NO 68305
aaaccaaattttctaagtgtctcataaaaaatgacgagattcggattagctcttttgatgattcttgtgattcaagggcttgtgaccttttcagaagcacaattgaagatgggattctacgaccaaacgtgcccttacgcagagaagatcgtacaagatgttgtcaaccaacatataaacaatgcaccctctttggctgctggcctaattaggatgcattttcatgactgcttcgttcggggttgtgatggttccatcttgatcaacgcgacatcgagcaaccaacaagtggagaagcttgctcctccgaatctaactgtgagaggtttcgattttatcgataaagtaaagtctgctctagaatcaaagtgccctggaatcgtctcttgcgctgatatcatcacacttgctactagagactctattgttgctattggtggaccgacatggaacgttccaacggggcgcagagacggacgtatctctaactttgccgaggctatgaacaatattcctcctcctttcggaaacttcacgactctgataaccctctttggaaaccaaggacttgatgttaaagacctcgtcttgttatccggtgcccacacgattggagtgtctcattgctcctccttctcaaaccgtctcttcaatttcaccggcgttggagaccaagatccatcgctcgacagcgaatatgccgacaatctcaaatcacggagatgtttatctatcgctgacaataccacaaaagtcgaaatggatcccggtagtcgaaacaccttcgatcttagctactaccgtcttgtcctaaaacgtcgtggactttttgagtctgacgctgcattgactatgaatcctgcggcattggctcaggtcaaacgcttcgccggaggatcggagcaagagttctttgctgagttctccaactccatggagaaaatgggaaggattggggtcaaaacagggtcggatggggagattcgaagaacatgtgcatttgttaactaaaagtgtttcttactttttctttcgcaacttttttgttttgttttaaatatcttttatattggtttttatgttccttttgtcaacttttttgggtgtttggaagaatttcgagatatgtattattgtatgtggtgaatatgtgattttcaaataaatttcacgtctgtgaaaatcgttg

SEQ ID NO: 105527 - protein, 326 aa, Arabidopsis thaliana
  peptide (1)..(326): Ceres Seq. ID no. 13617411
MTRFGLALLMILVIQGLVTFSEAQLKMGFYDQTCPYAEKIVQDVVNQHINNAPSLAAGLIRMHFHDCFVRGCDGSILINATSSNQQVEKLAPPNLTVRGFDFIDKVKSALESKCPGIVSCADIITLATRDSIVAIGGPTWNVPTGRRDGRISNFAEAMNNIPPPFGNFTTLITLFGNQGLDVKDLVLLSGAHTIGVSHCSSFSNRLFNFTGVGDQDPSLDSEYADNLKSRRCLSIADNTTKVEMDPGSRNTFDLSYYRLVLKRRGLFESDAALTMNPAALAQVKRFAGGSEQEFFAEFSNSMEKMGRIGVKTGSDGEIRRTCAFVN

SEQ ID NO: 105528 - protein, 317 aa, Arabidopsis thaliana
  peptide (1)..(317): Ceres Seq. ID no. 13617412
MILVIQGLVTFSEAQLKMGFYDQTCPYAEKIVQDVVNQHINNAPSLAAGLIRMHFHDCFVRGCDGSILINATSSNQQVEKLAPPNLTVRGFDFIDKVKSALESKCPGIVSCADIITLATRDSIVAIGGPTWNVPTGRRDGRISNFAEAMNNIPPPFGNFTTLITLFGNQGLDVKDLVLLSGAHTIGVSHCSSFSNRLFNFTGVGDQDPSLDSEYADNLKSRRCLSIADNTTKVEMDPGSRNTFDLSYYRLVLKRRGLFESDAALTMNPAALAQVKRFAGGSEQEFFAEFSNSMEKMGRIGVKTGSDGEIRRTCAFVN

SEQ ID NO: 105529 - protein, 300 aa, Arabidopsis thaliana
  peptide (1)..(300): Ceres Seq. ID no. 13617413
MGFYDQTCPYAEKIVQDVVNQHINNAPSLAAGLIRMHFHDCFVRGCDGSILINATSSNQQVEKLAPPNLTVRGFDFIDKVKSALESKCPGIVSCADIITLATRDSIVAIGGPTWNVPTGRRDGRISNFAEAMNNIPPPFGNFTTLITLFGNQGLDVKDLVLLSGAHTIGVSHCSSFSNRLFNFTGVGDQDPSLDSEYADNLKSRRCLSIADNTTKVEMDPGSRNTFDLSYYRLVLKRRGLFESDAALTMNPAALAQVKRFAGGSEQEFFAEFSNSMEKMGRIGVKTGSDGEIRRTCAFVN

SEQ ID NO: 105530 - DNA, 1354 bp, Arabidopsis thaliana
  misc_feature (1)..(1354): Ceres Seq. ID no. 13617414
  misc_feature (1)..(1354): Ortholog of  Ceres SEQ ID NO 15178096 as cited in SEQ ID NO 52497
aaaaacccttctctgctttttatcaaaattctctctttttcccaaaaagattcacaaatttgttgtagtctcgccgttaagatggcgccggcgacggagcatcagagctcgttcttgagtcgactaagccgtcgcaatcaagtggtttccatggaggttaaccacgagcaagagcaagaagaactcgaagattttcaaaaacacgtagctgaacgtttcgcggagctcttaccaccgtcggattcgccggaatcttacccgattctttcgatccagtggctaaggaagcttcttgatgttttcatgtctatagaatcggagtttcattcggttttaacatcgaatccgtctcagatctcgaaacctccgttggataagcttgtaccggagatgcttgatcggattgttaaagctcttgatatttgtaccgccgtagtcaacggcgttgactcagtcagacaaatccaacgttgtgcggagattgctgttacggcgttgaaacaaacgccgttaagtgacggaagcgttaggagagctaaaagagctcttacaagcctcctcgccgctttaaacgctgataaaaacagcggtagcagcggcggaggaagtggtaggaggtcatcgacggatcagtggtcgtcgtttggtcgacgtagcggcggaagcagcggaggaggaggaggaggagcagggtgtgtgagtaagaattggtcagcggcgaagcagattcaagcaatgacggcgaatcttgtagcgccacgtggaggagaggcgtcgccgatgtatataatgagtagtgtgatggtaatggtgatgtggacgttagttgtagcggttccttgtcagacaagtaacggcttaatggttcatgtaccgctgccgaagaatcaggtatgggctaacgcggccgtgagtatctcggagagggtcggagaagagatgaaacggaaggagacgcgtggtggtggactgatggaggagatgcagaggatggagaggatcgggttgaagctgatggagttcagtgaagggtttaggtttaatggggaggaggatgtggtggcggaagtggcggagatggaggagatttgccggaaaatggaagatgggcttgaggggttacagagaagagttagagaagtgtttcataggttggtgaaaagcagaagtgagatacttgaagtgattgatcactgattgtaatcttttaactttgttgttgtgaaaatttaatctttgagttaactcttttgattaagaaaagagaacaaattacaggtttttattgttttatttatgtgataatctttgatgtatataaattacaattcgtaattaaagaaagataatgtat

SEQ ID NO: 105531 - protein, 398 aa, Arabidopsis thaliana
  peptide (1)..(398): Ceres Seq. ID no. 13617415
KNPSLLFIKILSFSQKDSQICCSLAVKMAPATEHQSSFLSRLSRRNQVVSMEVNHEQEQEELEDFQKHVAERFAELLPPSDSPESYPILSIQWLRKLLDVFMSIESEFHSVLTSNPSQISKPPLDKLVPEMLDRIVKALDICTAVVNGVDSVRQIQRCAEIAVTALKQTPLSDGSVRRAKRALTSLLAALNADKNSGSSGGGSGRRSSTDQWSSFGRRSGGSSGGGGGGAGCVSKNWSAAKQIQAMTANLVAPRGGEASPMYIMSSVMVMVMWTLVVAVPCQTSNGLMVHVPLPKNQVWANAAVSISERVGEEMKRKETRGGGLMEEMQRMERIGLKLMEFSEGFRFNGEEDVVAEVAEMEEICRKMEDGLEGLQRRVREVFHRLVKSRSEILEVIDH

SEQ ID NO: 105532 - protein, 371 aa, Arabidopsis thaliana
  peptide (1)..(371): Ceres Seq. ID no. 13617416
MAPATEHQSSFLSRLSRRNQVVSMEVNHEQEQEELEDFQKHVAERFAELLPPSDSPESYPILSIQWLRKLLDVFMSIESEFHSVLTSNPSQISKPPLDKLVPEMLDRIVKALDICTAVVNGVDSVRQIQRCAEIAVTALKQTPLSDGSVRRAKRALTSLLAALNADKNSGSSGGGSGRRSSTDQWSSFGRRSGGSSGGGGGGAGCVSKNWSAAKQIQAMTANLVAPRGGEASPMYIMSSVMVMVMWTLVVAVPCQTSNGLMVHVPLPKNQVWANAAVSISERVGEEMKRKETRGGGLMEEMQRMERIGLKLMEFSEGFRFNGEEDVVAEVAEMEEICRKMEDGLEGLQRRVREVFHRLVKSRSEILEVIDH

SEQ ID NO: 105533 - protein, 348 aa, Arabidopsis thaliana
  peptide (1)..(348): Ceres Seq. ID no. 13617417
MEVNHEQEQEELEDFQKHVAERFAELLPPSDSPESYPILSIQWLRKLLDVFMSIESEFHSVLTSNPSQISKPPLDKLVPEMLDRIVKALDICTAVVNGVDSVRQIQRCAEIAVTALKQTPLSDGSVRRAKRALTSLLAALNADKNSGSSGGGSGRRSSTDQWSSFGRRSGGSSGGGGGGAGCVSKNWSAAKQIQAMTANLVAPRGGEASPMYIMSSVMVMVMWTLVVAVPCQTSNGLMVHVPLPKNQVWANAAVSISERVGEEMKRKETRGGGLMEEMQRMERIGLKLMEFSEGFRFNGEEDVVAEVAEMEEICRKMEDGLEGLQRRVREVFHRLVKSRSEILEVIDH

SEQ ID NO: 105534 - DNA, 1393 bp, Arabidopsis thaliana
  misc_feature (1)..(1393): Ceres Seq. ID no. 13617418
  misc_feature (1)..(1393): Ortholog of  Ceres SEQ ID NO 13502952 as cited in SEQ ID NO 62271
  misc_feature (1)..(1393): Ortholog of  Ceres SEQ ID NO 13502973 as cited in SEQ ID NO 68052
  misc_feature (1)..(1393): Ortholog of  Ceres SEQ ID NO 13596000 as cited in SEQ ID NO 68188
acataacacaaaatcctcttctcttctttaataacttttagaaacacaaataaaagtttaattacttttaagcccaacaaaaatgggttatgctaaatcagccatgctgatcttcttactagcattggtcatcgcatcttgtgccacggccatggacatgtccgttgtttcctccaacgataaccaccacgtgaccgccggtcccggccgccgtcagggtattttcgacgctgaagccaccttgatgttcgagtcatggatggtcaaacatgggaaagtgtacgactccgttgccgagaaggaacggcgtttaactatttttgaggacaacctccgttttatcactaaccggaacgctgagaatctcagttaccggcttggtttgaatcggtttgcggatttatctctccatgaatacggagaaatttgccatggggctgatccaagacctcctaggaaccacgtcttcatgactagcagcaaccgatacaagactagtgatggtgatgttcttcctaagtccgttgactggagaaacgaaggcgcagtgactgaagtcaaagatcaaggcctttgcaggagttgttgggctttctccactgtgggagcagtggaaggcttaaacaagattgtgactggagagctagtaactttgtctgagcaagatttgatcaattgtaacaaagaaaacaatggttgcggaggaggcaaagtcgagacagcctatgagttcatcatgaacaatggtggtcttggtaccgacaacgattatccttacaaagctctcaatggagtctgcgaaggccgcctcaaggaagacaacaagaatgttatgattgatgggtatgagaatttgcctgcaaacgatgaagccgctctcatgaaagcggttgctcaccagcctgtgactgccgttgtcgattccagcagccgagagtttcagctttatgaatcgggagtgtttgacggaacttgcggaacaaacctaaaccatggtgttgttgtggtcgggtatggaaccgagaatggtcgtgactactggattgtgaaaaactcgaggggcgacacatggggggaggctggctacatgaagatggctcgcaacattgccaatccaagaggcctatgtggcatcgcaatgcgagcttcataccctctcaagaactcgttttctacggataaagtttcggttgcctaataatatgaactaaatgtatgccatggaacggatcggttaagccattatcgttattcgactttgaaggaaactaaaaaataatgtggtcgattggtttggttttgttatatattatgcatttgtatgggggtcagtcaatgtttgaactttgtataatatttctttgggtctagtgataaatattttcccttttgc

SEQ ID NO: 105535 - protein, 371 aa, Arabidopsis thaliana; identical to SEQ ID NO: 24326
  peptide (1)..(371): Ceres Seq. ID no. 13617419

SEQ ID NO: 105536 - protein, 364 aa, Arabidopsis thaliana; identical to SEQ ID NO: 24327
  peptide (1)..(364): Ceres Seq. ID no. 13617420

SEQ ID NO: 105537 - protein, 348 aa, Arabidopsis thaliana; identical to SEQ ID NO: 24328
  peptide (1)..(348): Ceres Seq. ID no. 13617421

SEQ ID NO: 105538 - DNA, 738 bp, Arabidopsis thaliana
  misc_feature (1)..(738): Ceres Seq. ID no. 13617422
  misc_feature (1)..(738): Ortholog of  Ceres SEQ ID NO 15174034 as cited in SEQ ID NO 0
ttcaagctttatctctttctttctctcctctctatctttctctcacactcatgggtcttccaacagatttcaaagagcttcagattccaggttacgtactaaaaacactttacgtcatcggtttctttagagacatggtcgatgctctttgtccttacatcggtctaccaagttttcttgaccacaacgagacctctcgatccgacccgacccgactcgctctctccacgtcagcaactcttgccaacgagttaatcccggtggttcgtttctccgatcttttaaccgatccggaagattgctgcacggtttgcttatccgattttgtatccgacgataagattagacagctgccgaagtgtggacacgtgtttcatcatcgttgtttagaccgttggatcgttgactgtaataagataacgtgcccgatttgtcggaaccggttcttaccggaggaaaagtccacgccgtttgattggggtacttcagattggtttagagatgaagtggagagtaccaactaataatgatggttttacttttactttttacttttttcacggtaatatttttctactgtataattctttcttccaaactactgtataattcaagtataagattatgtaattgtgtatattagcatcaatcatctttctttgttaaagaaccgtctgtataaaatcttccaatgtaatctgcttttcttttatttgaataaaaaagtggacaaataaa

SEQ ID NO: 105539 - protein, 173 aa, Arabidopsis thaliana
  peptide (1)..(173): Ceres Seq. ID no. 13617423
QALSLSFSPLYLSLTLMGLPTDFKELQIPGYVLKTLYVIGFFRDMVDALCPYIGLPSFLDHNETSRSDPTRLALSTSATLANELIPVVRFSDLLTDPEDCCTVCLSDFVSDDKIRQLPKCGHVFHHRCLDRWIVDCNKITCPICRNRFLPEEKSTPFDWGTSDWFRDEVESTN

SEQ ID NO: 105540 - protein, 157 aa, Arabidopsis thaliana; identical to SEQ ID NO: 23791
  peptide (1)..(157): Ceres Seq. ID no. 13617424

SEQ ID NO: 105541 - protein, 129 aa, Arabidopsis thaliana; identical to SEQ ID NO: 23792
  peptide (1)..(129): Ceres Seq. ID no. 13617425

SEQ ID NO: 105542 - DNA, 710 bp, Arabidopsis thaliana
  misc_feature (1)..(710): Ceres Seq. ID no. 13617426
  misc_feature (1)..(710): Ortholog of  Ceres SEQ ID NO 15174034 as cited in SEQ ID NO 0
aaacacaattataaatctcaccattttttattatacacactttattcttgtctctatagttccacatctcaatctagctctcttctctatctttctctaaatcatgggtcttcctgaagatttcatcaccgagcttcagattccaagttacatattaaagatactttacgtcatcggtttctttagagacatcgtcgatgctctttgtccttacattggtctacctcgttttctagaccacaacgagacctctgcacccgatctgacccgacacgctctctctacgtcagcgagtcttgctaacgagttgatcccggtggttcggttctcggatcttccgaccgatccggaagattgttgtacggtttgtttgtcagattttgagtccgacgataaggttaggcagctacccaagtgtggacacgtgtttcatcattattgtttagaccgttggatcgttgactacaacaagatgaaatgtccggtttgtcggcaccggttcttaccgaaagaaaagtacacgcaatctgattggggttctggttcagattggtttagtgatgaagtggaaagtaccaactaattggtttaatctatgtcggcagaatatttgttgtatcaattccagtataactctatgtatattaacatagatcatctttttgaaggaacaacactatatatatctttatacaaaaacaacactatat

SEQ ID NO: 105543 - protein, 159 aa, Arabidopsis thaliana
  peptide (1)..(159): Ceres Seq. ID no. 13617427
MGLPEDFITELQIPSYILKILYVIGFFRDIVDALCPYIGLPRFLDHNETSAPDLTRHALSTSASLANELIPVVRFSDLPTDPEDCCTVCLSDFESDDKVRQLPKCGHVFHHYCLDRWIVDYNKMKCPVCRHRFLPKEKYTQSDWGSGSDWFSDEVESTN

SEQ ID NO: 105544 - DNA, 904 bp, Arabidopsis thaliana
  misc_feature (1)..(904): Ceres Seq. ID no. 13617428
  misc_feature (1)..(904): Ortholog of  Ceres SEQ ID NO 13595658 as cited in SEQ ID NO 59888
  misc_feature (1)..(904): Ortholog of  Ceres SEQ ID NO 13662324 as cited in SEQ ID NO 62162
cacacatacataaaagtagtagaactaaaaaatggcaaacctcttggtctctactttcatattttccgcacttttgctcatctccaccgcaacagccgccacattcgaaatcctaaaccaatgtagttacaccgtgtgggctgccgcaagccctggaggtggccgacgtctagatgctggccaatcatggaggctagatgtcgcggcgggcactaaaatggcacggatttggggtaggaccaattgtaactttgactcctcaggtcgtggccgatgccaaactggtgactgcagtggtggactccaatgtactggctggggacagccaccaaacacgttggctgagtacgctttgaaccaattcaacaacttagacttctacgatatctcacttgtcgatggatttaacatacctatggagtttagcccaactagttcgaactgccatcggatactatgtaccgcagacataaacggacaatgtccaaacgtgttgagagccccaggtggatgcaacaacccgtgtactgtatttcagacgaaccaatactgttgtacgaacggtcagggatcatgtagcgatactgagtactcaagattctttaagcagagatgccctgacgcttacagctatccacaagatgacccgactagcactttcacttgcaccaacactaactacagggtcgtgttttgtccaaggtctaggctcggtgctactggatcccaccagctcccgatcaagatggtcaccgaggagaattaatagactcgtatctactgtatgtgtgtgtgtgtgagggtgtacgtagatatgcgtacgtgtgacgtgatcatatatacgttaccataaacacttaatggattataataaggcatgcaataataattacgttagtcgacc

SEQ ID NO: 105545 - protein, 244 aa, Arabidopsis thaliana
  peptide (1)..(244): Ceres Seq. ID no. 13617429
MANLLVSTFIFSALLLISTATAATFEILNQCSYTVWAAASPGGGRRLDAGQSWRLDVAAGTKMARIWGRTNCNFDSSGRGRCQTGDCSGGLQCTGWGQPPNTLAEYALNQFNNLDFYDISLVDGFNIPMEFSPTSSNCHRILCTADINGQCPNVLRAPGGCNNPCTVFQTNQYCCTNGQGSCSDTEYSRFFKQRCPDAYSYPQDDPTSTFTCTNTNYRVVFCPRSRLGATGSHQLPIKMVTEEN

SEQ ID NO: 105546 - protein, 182 aa, Arabidopsis thaliana
  peptide (1)..(182): Ceres Seq. ID no. 13617430
MARIWGRTNCNFDSSGRGRCQTGDCSGGLQCTGWGQPPNTLAEYALNQFNNLDFYDISLVDGFNIPMEFSPTSSNCHRILCTADINGQCPNVLRAPGGCNNPCTVFQTNQYCCTNGQGSCSDTEYSRFFKQRCPDAYSYPQDDPTSTFTCTNTNYRVVFCPRSRLGATGSHQLPIKMVTEEN

SEQ ID NO: 105547 - DNA, 825 bp, Arabidopsis thaliana
  misc_feature (1)..(825): Ceres Seq. ID no. 13617435
  misc_feature (1)..(825): Ortholog of  Ceres SEQ ID NO 12609177 as cited in SEQ ID NO 55753
  misc_feature (1)..(825): Ortholog of  Ceres SEQ ID NO 12609935 as cited in SEQ ID NO 55757
  misc_feature (1)..(825): Ortholog of  Ceres SEQ ID NO 13594206 as cited in SEQ ID NO 59075
  misc_feature (1)..(825): Ortholog of  Ceres SEQ ID NO 13654038 as cited in SEQ ID NO 69261
  misc_feature (1)..(825): Ortholog of  Ceres SEQ ID NO 14309346 as cited in SEQ ID NO 0
attcaattcatttccgtttgaaggaggtagtcggagactgagaatcatctgagatcggaaacgacaaacctaattttcccgaagaatcgagaccattatgtggaggagaatcgtttcatcgcatcttaaatccatctccgccgtcgggtcctgcgcggctccgtcgtgcaggcacgccgtcgtagagtccactcacctttctctctcgactcgtgcatcctccattcccgcatattcctccatattctctcgtttaatcggctccgctgcagcggatactgctgtgaagaagcgtgttgaagatgtgatgcctattgcaaccggtcacgagaaagaggaactacaagccgaattggaggggaggaagctggacgatatagactttcctgaagggccttttggaacaaaggaagctcctgctgtagtcaaatcctactacgacatgagaatagttggttgccctggaggtgaaggagaggatgagcatgatgttgtctggttttggctggagaaaggcaagtcttttgaatgccctgtgtgtacacagtacttcaagcttgaagtggtcggccctggaggacctcctgacggacatggtgatgaccatcactgatccaaggaaaacaatctattgtaataagaaatagtgtggcttctgctaaatgtgaagcagcctcgtcttgttttttttttttggttttaattctaccctcagttctctaccaattgcttcagtgattgccttaaaccgccgaaaatagatggtccatcttcaggctctcgtcgccattttttgccaaataattgagatgctacctttgttct

SEQ ID NO: 105548 - protein, 171 aa, Arabidopsis thaliana
  peptide (1)..(171): Ceres Seq. ID no. 13617436
MWRRIVSSHLKSISAVGSCAAPSCRHAVVESTHLSLSTRASSIPAYSSIFSRLIGSAAADTAVKKRVEDVMPIATGHEKEELQAELEGRKLDDIDFPEGPFGTKEAPAVVKSYYDMRIVGCPGGEGEDEHDVVWFWLEKGKSFECPVCTQYFKLEVVGPGGPPDGHGDDHH

SEQ ID NO: 105549 - protein, 101 aa, Arabidopsis thaliana; identical to SEQ ID NO: 21415
  peptide (1)..(101): Ceres Seq. ID no. 13617437

SEQ ID NO: 105550 - DNA, 1295 bp, Arabidopsis thaliana
  misc_feature (1)..(1295): Ceres Seq. ID no. 13617471
  misc_feature (1)..(1295): Ortholog of  Ceres SEQ ID NO 13662567 as cited in SEQ ID NO 62884
aattcgttttccctcctcttctgcttaccggaaaagtctatatctccgacggaccttcttctctctagttaatcagacctcgcgctcgtgataatggcaacttttggtgcgcctgctaccgccaacagtaaccctaacaaatcctacgaggttactccatcaccggcagattctatttcgagcttaagttttagtccaagagctgatatacttgtggccacttcatgggacaatcaggtgaggtgttgggaaatatcccgtagtggagcctctctagccagtgctcctaaagcatcaatatcacatgatcagccggttttatgttctgcttggaaagatgatggaaccacagtctttagcggtggatgtgataagcaagcaaaaatgtggcccttgttgtctggtggtcaacctgtaactgttgctatgcatgagggtcctatcgcagctatggcttggatcccgggaatgaatctccttgcaactggaagttgggataaaactttgaaatattgggacacaagacagcaaaatcctgtacatacccaacagcttccagacaaatgttatacattgtctgtgaaacatcctctgatggttgtcgggactgccgatagaaatctgatagtcttcaacttgcaaaatcctcagactgagtttaagagaatccaatccccactgaagtaccagacgaggtgtgttactgccttccctgatcagcaaggttttttggttggttcaattgaggggcgggttggtgttcatcatctggatgattctcaacagagcaaaaacttcacattcaaatgccacagagatggaaatgatatatattctgtcaactctctgaatttccacccggtacatggcacttttgcaactgctgggtcagatggtgctttcaatttctgggacaaagatagtaaacaaagactcaaggccatgtcgaggtgcaatcagccaattccatgcagctcgttcaaccacgatggatcgatatatgcatatgcggcttgctatgactggagcaaaggtgcagaaaatcacaacccggcgactgcaaaaagcagcattttcttgcacctgccacaggaaagcgaggttaaggccaagccaagagttggagcaaccggcagaaaatgagcgttgcttagtctgatttcttcgctagtgattttttttttttttttagcttgtggacttcgttgggctttgttatctactttagttcatgacattttgaatatacattaggagtcttgtctaaaagactaaaagtaaatctctaatgtttc

SEQ ID NO: 105551 - protein, 349 aa, Arabidopsis thaliana; identical to SEQ ID NO: 24088
  peptide (1)..(349): Ceres Seq. ID no. 13617472

SEQ ID NO: 105552 - protein, 252 aa, Arabidopsis thaliana; identical to SEQ ID NO: 24089
  peptide (1)..(252): Ceres Seq. ID no. 13617473

SEQ ID NO: 105553 - protein, 238 aa, Arabidopsis thaliana; identical to SEQ ID NO: 24090
  peptide (1)..(238): Ceres Seq. ID no. 13617474

SEQ ID NO: 105554 - DNA, 1271 bp, Arabidopsis thaliana
  misc_feature (1)..(1271): Ceres Seq. ID no. 13617475
  misc_feature (1)..(1271): Ortholog of  Ceres SEQ ID NO 14311596 as cited in SEQ ID NO 51728
  misc_feature (1)..(1271): Ortholog of  Ceres SEQ ID NO 12617197 as cited in SEQ ID NO 63406
  misc_feature (1)..(1271): Ortholog of  Ceres SEQ ID NO 13597804 as cited in SEQ ID NO 64182
  misc_feature (1)..(1271): Ortholog of  Ceres SEQ ID NO 14302768 as cited in SEQ ID NO 64889
  misc_feature (1)..(1271): Ortholog of  Ceres SEQ ID NO 13598565 as cited in SEQ ID NO 65250
  misc_feature (1)..(1271): Ortholog of  Ceres SEQ ID NO 13598597 as cited in SEQ ID NO 65496
  misc_feature (1)..(1271): Ortholog of  Ceres SEQ ID NO 13596284 as cited in SEQ ID NO 68273
  misc_feature (1)..(1271): Ortholog of  Ceres SEQ ID NO 14308995 as cited in SEQ ID NO 0
  misc_feature (1)..(1271): Ortholog of  Ceres SEQ ID NO 15179068 as cited in SEQ ID NO 0
actactctcttaagccctttcataaccttgtaaaccattaagaggctttgctcaattacaagaagaagaaaaaatgcttgtcgacgggaaactcgtctgcgtcaccggagccggcggctacattgcttcttggatcgttaagttactcttagagagaggctacaccgttagaggaaccgtaaggaacccaactgatcccaagaacaaccatctcagagagcttcaaggagccaaggaaagactcactcttcacagtgcagatcttctcgactacgaagctctctgtgccacaatcgacggttgcgatggcgttttccacactgcctctccgatgaccgacgatcccgagacaatgttggagccggcggtgaacggagccaagttcgtgattgacgcagcggctaaagccaaggtcaagcgcgtggttttcacgtcatcaattggtgcagtttacatgaaccctaaccgtgacactcaagccattgttgacgaaaactgctggagtgatcttgatttctgcaaaaacactaagaattggtattgctacgggaagatgttggcggaacaatcggcatgggagacggccaaagcaaaaggtgtggacttagtggtgctaaatccggttttggttctcggaccaccgctccagtcagcgatcaacgctagtctagtccatattctcaagtacctcaccggctcagccaagacctacgctaacttgactcaggtctacgtggacgtccgtgacgtggcactaggccatgttctggtctacgaagcaccctccgcctcaggccgttacatcctcgccgagaccgcacttcaccgcggagaggttgttgagattctggccaaattcttcccggagtatccacttcccaccaagtgttcggacgagaagaatccgagggctaagccatacaagtttactacccaaaagataaaagacttaggcttggaatttaaacccatcaagcaatctctttacgaatctgtcaagagcttgcaagagaaaggccatcttcctctacctcaagattcgaaccaaaacgaagtcatcatcgaatcttaggacacgatccacgaccctagaatctgatcatacctacatgaaaagctttattcttaagtaatacatacgttttgattttgactaaagtattgttaaatcttaaatcattatatatagctgattgttctttctttctttggttgtaattgagaatatgttacgcatatgtattatacgataatggaagcaatggttttat

SEQ ID NO: 105555 - protein, 332 aa, Arabidopsis thaliana
  peptide (1)..(332): Ceres Seq. ID no. 13617476
MLVDGKLVCVTGAGGYIASWIVKLLLERGYTVRGTVRNPTDPKNNHLRELQGAKERLTLHSADLLDYEALCATIDGCDGVFHTASPMTDDPETMLEPAVNGAKFVIDAAAKAKVKRVVFTSSIGAVYMNPNRDTQAIVDENCWSDLDFCKNTKNWYCYGKMLAEQSAWETAKAKGVDLVVLNPVLVLGPPLQSAINASLVHILKYLTGSAKTYANLTQVYVDVRDVALGHVLVYEAPSASGRYILAETALHRGEVVEILAKFFPEYPLPTKCSDEKNPRAKPYKFTTQKIKDLGLEFKPIKQSLYESVKSLQEKGHLPLPQDSNQNEVIIES

SEQ ID NO: 105556 - protein, 246 aa, Arabidopsis thaliana
  peptide (1)..(246): Ceres Seq. ID no. 13617477
MTDDPETMLEPAVNGAKFVIDAAAKAKVKRVVFTSSIGAVYMNPNRDTQAIVDENCWSDLDFCKNTKNWYCYGKMLAEQSAWETAKAKGVDLVVLNPVLVLGPPLQSAINASLVHILKYLTGSAKTYANLTQVYVDVRDVALGHVLVYEAPSASGRYILAETALHRGEVVEILAKFFPEYPLPTKCSDEKNPRAKPYKFTTQKIKDLGLEFKPIKQSLYESVKSLQEKGHLPLPQDSNQNEVIIES

SEQ ID NO: 105557 - protein, 239 aa, Arabidopsis thaliana
  peptide (1)..(239): Ceres Seq. ID no. 13617478
MLEPAVNGAKFVIDAAAKAKVKRVVFTSSIGAVYMNPNRDTQAIVDENCWSDLDFCKNTKNWYCYGKMLAEQSAWETAKAKGVDLVVLNPVLVLGPPLQSAINASLVHILKYLTGSAKTYANLTQVYVDVRDVALGHVLVYEAPSASGRYILAETALHRGEVVEILAKFFPEYPLPTKCSDEKNPRAKPYKFTTQKIKDLGLEFKPIKQSLYESVKSLQEKGHLPLPQDSNQNEVIIES

SEQ ID NO: 105558 - DNA, 1189 bp, Arabidopsis thaliana
  misc_feature (1)..(1189): Ceres Seq. ID no. 13617483
  misc_feature (1)..(1189): Ortholog of  Ceres SEQ ID NO 14306479 as cited in SEQ ID NO 53033
acaatcccaccattaaaaaagaagaacccaagatcgactcttacttcgaatctctctcaactttcttcctcagcttacgggaacttccacacatatacatccacaagaacccatatcgaagattcatcctacatatatttacatggatcagtactcatcctctttggtcgatacttcattagatctcactattggcgttactcgtatgcgagttgaagaagatccaccgacaagtgctttggtggaagaattaaaccgagttagtgctgagaacaagaagctctcggagatgctaactttgatgtgtgacaactacaacgtcttgaggaagcaacttatggaatatgttaacaagagcaacataaccgagagggatcaaatcagccctcccaagaaacgcaaatccccggcgagagaggacgcattcagctgcgcggttattggcggagtgtcggagagtagctcaacggatcaagatgagtatttgtgtaagaagcagagagaagagactgtcgtgaaggagaaagtctcaagggtctattacaagaccgaagcttctgacactaccctcgttgtgaaagatgggtatcaatggaggaaatatggacagaaagtgactagagacaatccatctccaagagcttacttcaaatgtgcttgtgctccaagctgttctgtcaaaaagaaggttcagagaagtgtggaggatcagtccgtgttagttgcaacttatgagggtgaacacaaccatccaatgccatcgcagatcgattcaaacaatggcttaaaccgccacatctctcatggtggttcagcttcaacacccgttgcagcaaacagaagaagtagcttgactgtgccggtgactaccgtagatatgattgaatcgaagaaagtgacgagcccaacgtcaagaatcgattttccccaagttcagaaacttttggtggagcaaatggcttcttccttaaccaaagatcctaactttacagcagctttagcagcagctgttaccggaaaattgtatcaacagaatcataccgagaaatagtttagcttcaaattccgttagagtttttagatttgaatttgtcatgagtaagagaaagagagtagattataatccattgtgatactgaaaatgtaacatgtaatcgtttttcatacaatctccaatacattcggcttt

SEQ ID NO: 105559 - protein, 302 aa, Arabidopsis thaliana; identical to SEQ ID NO: 27413
  peptide (1)..(302): Ceres Seq. ID no. 13617484

SEQ ID NO: 105560 - protein, 281 aa, Arabidopsis thaliana; identical to SEQ ID NO: 27414
  peptide (1)..(281): Ceres Seq. ID no. 13617485

SEQ ID NO: 105561 - protein, 253 aa, Arabidopsis thaliana; identical to SEQ ID NO: 27415
  peptide (1)..(253): Ceres Seq. ID no. 13617486

SEQ ID NO: 105562 - DNA, 681 bp, Arabidopsis thaliana
  misc_feature (1)..(681): Ceres Seq. ID no. 13617487
  misc_feature (1)..(681): Ortholog of  Ceres SEQ ID NO 12612236 as cited in SEQ ID NO 58141
agaaaaaaagaaagcgaaatgggattattggccgcgatcggagttctgttgccatttccgttctactggtggctgtggacgaatgctcagtcatgggtcaatctctgcggccgagaaagagacccatcgacggtaatggcacgtgtttctcacgtgctcaaggctgctcaactcctttctctcttctccgttgcttctctctcctggccgcctccgctctacttctggcctctcatggcctttggccagtttctcaacttcagggtataccaattgttaggtgaagctgggacttattacggtgttcgattcgggaagaacataccatgggttacagagttcccatttggagtcattagagatccacagtatgttgggagtatcatgtctctattggcatgcctctcttgggttccatttcaatacattctcctctggtctctcggttatgttttcatgatgtttctcgagtcaaaggaggatccaaatgctcgtgccaaatccatctcatgattcctaagcataacccactagtcttagaagagctcaactcccatgaacgtcaggtcttgactgttttctttatgagtttgtattctcttttgtactcaaactgatgctacactttcatggataatgcagttaccttttctcgggttatcggtagtctacagaattgtc

SEQ ID NO: 105563 - protein, 170 aa, Arabidopsis thaliana
  peptide (1)..(170): Ceres Seq. ID no. 13617488
RKKESEMGLLAAIGVLLPFPFYWWLWTNAQSWVNLCGRERDPSTVMARVSHVLKAAQLLSLFSVASLSWPPPLYFWPLMAFGQFLNFRVYQLLGEAGTYYGVRFGKNIPWVTEFPFGVIRDPQYVGSIMSLLACLSWVPFQYILLWSLGYVFMMFLESKEDPNARAKSIS

SEQ ID NO: 105564 - protein, 164 aa, Arabidopsis thaliana
  peptide (1)..(164): Ceres Seq. ID no. 13617489
MGLLAAIGVLLPFPFYWWLWTNAQSWVNLCGRERDPSTVMARVSHVLKAAQLLSLFSVASLSWPPPLYFWPLMAFGQFLNFRVYQLLGEAGTYYGVRFGKNIPWVTEFPFGVIRDPQYVGSIMSLLACLSWVPFQYILLWSLGYVFMMFLESKEDPNARAKSIS

SEQ ID NO: 105565 - protein, 125 aa, Arabidopsis thaliana
  peptide (1)..(125): Ceres Seq. ID no. 13617490
MARVSHVLKAAQLLSLFSVASLSWPPPLYFWPLMAFGQFLNFRVYQLLGEAGTYYGVRFGKNIPWVTEFPFGVIRDPQYVGSIMSLLACLSWVPFQYILLWSLGYVFMMFLESKEDPNARAKSIS

SEQ ID NO: 105566 - DNA, 1614 bp, Arabidopsis thaliana
  misc_feature (1)..(1614): Ceres Seq. ID no. 13617491
  misc_feature (1)..(1614): Ortholog of  Ceres SEQ ID NO 15178767 as cited in SEQ ID NO 55317
  misc_feature (1)..(1614): Ortholog of  Ceres SEQ ID NO 13657647 as cited in SEQ ID NO 66399
aacttttgcttcttcttcgcattcactcaaaccaaactagaagacggaatccggccaagtcacttccgcaatcctttcgaatttagattttagggttactttgtcggagattgttaatttggagtatctggagattggcaacaatgtctgaactcaaagagcgtttgcttcctccaagacctgcttcggctattaaccttagaggtgatgcaggctctcgtccttctccttcagggagacaaccactccttggagttgatgttttgggtctcaagaagcgtggacaaggccttaagtcgtggattcgtgttgatacttctgccaattctcaggtcattgaggttgataagttcactatgatgcgtagatgtgatttaccagcacgggatttaaggctgcttgatcctttgtttgtgtatccgtcaactattcttggtagagagaaggctattgttgttaacttagagcagatccgttgtattattactgcggatgaggttttgctcttgaattcccttgacaactatgtgcttcgctatgttgttgagctgcagcagagactaaaggcaagttctgttactgaggtttggaatcaggacagtctcgaattgagcaggaggaggagtaggagtttagacaatgtgcttcagaactcatcccctgattatttacctttcgagttcagggctcttgaagttgcacttgaagctgcttgtaccttccttgattcccaggcttcagagttagagattgaggcatacccattattggatgagcttacctcaaagatcagtactctaaacttggagcgtgctcgtagactaaagagcagacttgtagcattgacgagacgagttcagaaggttcgggatgagattgaacagctaatggacgatgatggggatatggcagaaatgtatctaacagagaagaagaagagaatggaaggatctttatatggtgatcaatctttacctgtttatcgaacaaatgattgtttttctctgtctgcgccagtttctcctgtttcttctcctcctgagtcccgtagacttgagaaaagcttgagcattgtaaggagccggcatgacagtgctaggagctcagaagacgcaaccgagaatatagaggagctagagatgttgctggaagcatactttgttgtcattgacagcactctcaacaagctaacctcgttaaaggagtacatcgatgataccgaagatttcatcaacattcaattggataacgtacggaatcagctgatccaattcgagctgctgctaactactgccacattcgttgtagccatcttcggggttgtagccgggatctttgggatgaattttgagatagacttctttgaaaagcctggtgctttcaaatgggttttagccattactggagtgtgtggccttgttgtatttttggcattcctctggtactacaaacgtagaagactcatgcctctgtgaagacataactaccctgacacgtagacgattgttttactgtttatgttgcttaaatctatacattaatcgcctgtgacctttacaagataaaaccccgtgtattttttttttgggttactgaaagattattaagcaaacc

SEQ ID NO: 105567 - protein, 443 aa, Arabidopsis thaliana
  peptide (1)..(443): Ceres Seq. ID no. 13617492
MSELKERLLPPRPASAINLRGDAGSRPSPSGRQPLLGVDVLGLKKRGQGLKSWIRVDTSANSQVIEVDKFTMMRRCDLPARDLRLLDPLFVYPSTILGREKAIVVNLEQIRCIITADEVLLLNSLDNYVLRYVVELQQRLKASSVTEVWNQDSLELSRRRSRSLDNVLQNSSPDYLPFEFRALEVALEAACTFLDSQASELEIEAYPLLDELTSKISTLNLERARRLKSRLVALTRRVQKVRDEIEQLMDDDGDMAEMYLTEKKKRMEGSLYGDQSLPVYRTNDCFSLSAPVSPVSSPPESRRLEKSLSIVRSRHDSARSSEDATENIEELEMLLEAYFVVIDSTLNKLTSLKEYIDDTEDFINIQLDNVRNQLIQFELLLTTATFVVAIFGVVAGIFGMNFEIDFFEKPGAFKWVLAITGVCGLVVFLAFLWYYKRRRLMPL

SEQ ID NO: 105568 - protein, 372 aa, Arabidopsis thaliana
  peptide (1)..(372): Ceres Seq. ID no. 13617493
MMRRCDLPARDLRLLDPLFVYPSTILGREKAIVVNLEQIRCIITADEVLLLNSLDNYVLRYVVELQQRLKASSVTEVWNQDSLELSRRRSRSLDNVLQNSSPDYLPFEFRALEVALEAACTFLDSQASELEIEAYPLLDELTSKISTLNLERARRLKSRLVALTRRVQKVRDEIEQLMDDDGDMAEMYLTEKKKRMEGSLYGDQSLPVYRTNDCFSLSAPVSPVSSPPESRRLEKSLSIVRSRHDSARSSEDATENIEELEMLLEAYFVVIDSTLNKLTSLKEYIDDTEDFINIQLDNVRNQLIQFELLLTTATFVVAIFGVVAGIFGMNFEIDFFEKPGAFKWVLAITGVCGLVVFLAFLWYYKRRRLMPL

SEQ ID NO: 105569 - protein, 371 aa, Arabidopsis thaliana
  peptide (1)..(371): Ceres Seq. ID no. 13617494
MRRCDLPARDLRLLDPLFVYPSTILGREKAIVVNLEQIRCIITADEVLLLNSLDNYVLRYVVELQQRLKASSVTEVWNQDSLELSRRRSRSLDNVLQNSSPDYLPFEFRALEVALEAACTFLDSQASELEIEAYPLLDELTSKISTLNLERARRLKSRLVALTRRVQKVRDEIEQLMDDDGDMAEMYLTEKKKRMEGSLYGDQSLPVYRTNDCFSLSAPVSPVSSPPESRRLEKSLSIVRSRHDSARSSEDATENIEELEMLLEAYFVVIDSTLNKLTSLKEYIDDTEDFINIQLDNVRNQLIQFELLLTTATFVVAIFGVVAGIFGMNFEIDFFEKPGAFKWVLAITGVCGLVVFLAFLWYYKRRRLMPL

SEQ ID NO: 105570 - DNA, 1467 bp, Arabidopsis thaliana
  misc_feature (1)..(1467): Ceres Seq. ID no. 13617495
  misc_feature (1)..(1467): Ortholog of  Ceres SEQ ID NO 15226493 as cited in SEQ ID NO 59078
atgggaatggcgtccatgagctctggtactgaaagccttcgtctttgcgtgtttgacttaagaagaggccaacacgaaggacaggaactggacaagatcttgttcttctatcctcctgatctaaccttctccactcagctatcggttataggtctcagtgaagggcttatcacgttcacgagacttttctccccggaggcagcttgtgaggtaattgaagcagagagacattcccatgttttctatgaggccgagcccgatatctggatggtcatgattgtagagaaaaataaggagattgaagctgtatggaggattgatgcattgcggagagtgcttaaggaagtgcactctctctttgttatgtttcaagggtcaattagggcattgcttgagaaagaaccaactggaggacttgtaagatcgcacttgtatccattcatcacagactatttaaatgatcttttcgttgggaaaaaacaacagttaccttccttccgtgacactttgaaagagcgtggaacagttcagatgctaactttagctagagatgcggcacttgaagttcagtctctcgtcggagtgctagattcatgtgctgggaccgttcgatgccactctgtgattctatttcatgatctactggtgtcaacaactctctcacctgatgataccgtcgacttgtttgcattttctgtcatgagattaaccacaaacgcgctatcatctggcacaagttcctggtcatatctacgcaaaggatccggttcacctcaaatatcttctagatctactacggtgccccctcttggttcaggtggtacattgccttcgggaaatggtagtagcacaggtcgtgttattagacctttgcagcacgataagtggtcgaaggggaaagatgggtttcttgtaactgatatttggggtttagatgccaccccgacaattttgatacagaagacacaggaaagtttttaccttttgacttatcagtacaagagtctcaccttggttcttctcgtgcctatcgctgcaattgttaatggagagctagacatctcattcgtgaagcagcaagttattgaaaacgcatcgaccaaaatcttgaaagtcgaagagaagctatcgaaagggtggggcggtgagaatgcttaccatgtaagcggttaccgttacttactagttgataatgacatggaagtttccagagcttctccaccaggaaaggtagcaacactagcaaaggagtctttgcttgcactaaacaagctaagggaagaagtggatacagaaaaaaaccgctcgaagcaagagaaagacatggaaatatgcattcgagcgaagaacaacacatgggtcatcgcgcgtctaaacagaggtaaagagctttacatggctttagagaaagcaagtgaaactcttcttgatgctacagactctgtccaaagattcagcaacaggtaa

SEQ ID NO: 105571 - protein, 488 aa, Arabidopsis thaliana
  peptide (1)..(488): Ceres Seq. ID no. 13617496
MGMASMSSGTESLRLCVFDLRRGQHEGQELDKILFFYPPDLTFSTQLSVIGLSEGLITFTRLFSPEAACEVIEAERHSHVFYEAEPDIWMVMIVEKNKEIEAVWRIDALRRVLKEVHSLFVMFQGSIRALLEKEPTGGLVRSHLYPFITDYLNDLFVGKKQQLPSFRDTLKERGTVQMLTLARDAALEVQSLVGVLDSCAGTVRCHSVILFHDLLVSTTLSPDDTVDLFAFSVMRLTTNALSSGTSSWSYLRKGSGSPQISSRSTTVPPLGSGGTLPSGNGSSTGRVIRPLQHDKWSKGKDGFLVTDIWGLDATPTILIQKTQESFYLLTYQYKSLTLVLLVPIAAIVNGELDISFVKQQVIENASTKILKVEEKLSKGWGGENAYHVSGYRYLLVDNDMEVSRASPPGKVATLAKESLLALNKLREEVDTEKNRSKQEKDMEICIRAKNNTWVIARLNRGKELYMALEKASETLLDATDSVQRFSNR

SEQ ID NO: 105572 - protein, 486 aa, Arabidopsis thaliana
  peptide (1)..(486): Ceres Seq. ID no. 13617497
MASMSSGTESLRLCVFDLRRGQHEGQELDKILFFYPPDLTFSTQLSVIGLSEGLITFTRLFSPEAACEVIEAERHSHVFYEAEPDIWMVMIVEKNKEIEAVWRIDALRRVLKEVHSLFVMFQGSIRALLEKEPTGGLVRSHLYPFITDYLNDLFVGKKQQLPSFRDTLKERGTVQMLTLARDAALEVQSLVGVLDSCAGTVRCHSVILFHDLLVSTTLSPDDTVDLFAFSVMRLTTNALSSGTSSWSYLRKGSGSPQISSRSTTVPPLGSGGTLPSGNGSSTGRVIRPLQHDKWSKGKDGFLVTDIWGLDATPTILIQKTQESFYLLTYQYKSLTLVLLVPIAAIVNGELDISFVKQQVIENASTKILKVEEKLSKGWGGENAYHVSGYRYLLVDNDMEVSRASPPGKVATLAKESLLALNKLREEVDTEKNRSKQEKDMEICIRAKNNTWVIARLNRGKELYMALEKASETLLDATDSVQRFSNR

SEQ ID NO: 105573 - protein, 483 aa, Arabidopsis thaliana
  peptide (1)..(483): Ceres Seq. ID no. 13617498
MSSGTESLRLCVFDLRRGQHEGQELDKILFFYPPDLTFSTQLSVIGLSEGLITFTRLFSPEAACEVIEAERHSHVFYEAEPDIWMVMIVEKNKEIEAVWRIDALRRVLKEVHSLFVMFQGSIRALLEKEPTGGLVRSHLYPFITDYLNDLFVGKKQQLPSFRDTLKERGTVQMLTLARDAALEVQSLVGVLDSCAGTVRCHSVILFHDLLVSTTLSPDDTVDLFAFSVMRLTTNALSSGTSSWSYLRKGSGSPQISSRSTTVPPLGSGGTLPSGNGSSTGRVIRPLQHDKWSKGKDGFLVTDIWGLDATPTILIQKTQESFYLLTYQYKSLTLVLLVPIAAIVNGELDISFVKQQVIENASTKILKVEEKLSKGWGGENAYHVSGYRYLLVDNDMEVSRASPPGKVATLAKESLLALNKLREEVDTEKNRSKQEKDMEICIRAKNNTWVIARLNRGKELYMALEKASETLLDATDSVQRFSNR

SEQ ID NO: 105574 - DNA, 1457 bp, Arabidopsis thaliana
  misc_feature (1)..(1457): Ceres Seq. ID no. 13617519
  misc_feature (1)..(1457): Ortholog of  Ceres SEQ ID NO 15168545 as cited in SEQ ID NO 57829
  misc_feature (1)..(1457): Ortholog of  Ceres SEQ ID NO 15168468 as cited in SEQ ID NO 58115
  misc_feature (1)..(1457): Ortholog of  Ceres SEQ ID NO 13596440 as cited in SEQ ID NO 68769
ttctatcaaaccgtcaagttgggaaacaaaacaaaactcgcaagtttaacaacgcgtcttctacctcctcctcatcggactatttatctatagtcttcgttagatcaattcctctgttttactcctaagtttcgagatccacatttctctttaacctcatctcatctcttagtcgagatcttcactttctgatgacaatagggtcgtttttctcttctctcttattctggcgcaattctcaggaccaggaggcgcagagagggaggatgcaggagatagatcttagtgttcacactataaagtcccatggaggaagagtcgcttctaaacacaagcacgattggatcatactcgtcatcttgattgccatcgagataggcttgaacctcatctctcctttctaccgctacgtgggaaaagacatgatgactgacctcaagtaccctttcaaggacaacaccgtacctatctggtctgtccctgtgtacgctgtgcttcttcccatcatagtgttcgtctgcttctacctgaagaggacatgtgtgtacgatctgcaccacagcatcctcgggctgctcttcgccgtcttgataactggtgtcatcactgactccatcaaggtagccaccggacgccctcgtcctaacttctactggcgctgcttccccgacggcaaagagctgtatgatgcgttgggaggtgtggtatgccacggcaaggcagctgaggtcaaggaaggccacaagagcttcccgagcggacacacttcctggtcctttgcggggcttacattcctttccctttacctctctggcaaaatcaaggccttcaacaatgaaggacatgtggcgaaactctgcctcgtgatcttccctctgcttgccgcttgtcttgtggggatatctcgtgtggatgactactggcaccactggcaagatgtcttcgcaggagctctcattggcacccttgtagccgccttctgctaccgtcagttctaccccaacccttaccacgaagaaggatggggtccctacgcctatttcaaggcagctcaagaacgaggagtccctgtgacctcctcccaaaacggagatgccttgagggctatgtctctgcagatggattcaacatctctcgaaaacatggaatctggcacttccaccgctcccagatgatcctcctctcttattatttgattcattatttggtttttcattttgatttggccgtcgtcgtgagattgtgaatggtgtagctacatactgtatgtgtattcaaaactctacttgtaccattacatttttgtaaatccactcttcatgaaattgacgtttttctggtgtccgagaggcttgggtcgctcgaataatctcgtccaatagactaatacggctctagtgaacacggtatttacatgtttgtgatctaaactgaaatcagttatttcttaattcgta

SEQ ID NO: 105575 - protein, 327 aa, Arabidopsis thaliana; identical to SEQ ID NO: 30793
  peptide (1)..(327): Ceres Seq. ID no. 13617520

SEQ ID NO: 105576 - protein, 302 aa, Arabidopsis thaliana; identical to SEQ ID NO: 30794
  peptide (1)..(302): Ceres Seq. ID no. 13617521

SEQ ID NO: 105577 - protein, 250 aa, Arabidopsis thaliana; identical to SEQ ID NO: 30795
  peptide (1)..(250): Ceres Seq. ID no. 13617522

SEQ ID NO: 105578 - DNA, 2535 bp, Arabidopsis thaliana
  misc_feature (1)..(2535): Ceres Seq. ID no. 13617523
  misc_feature (1)..(2535): Ortholog of  Ceres SEQ ID NO 15168464 as cited in SEQ ID NO 59187
atcaaattcaatttaatttttcttctgcaaatggaaccaccgccttcttctctgtcctccaccgcggtggcttccacctccatctccgccgccactgctcctgttcctcctcctctacctcctcacgtgacttcttcttaccccgaatctctcgactcctcccctcgttctcgcaccaccgatggctgggatgaccttcctgctccttctggcggcggcggtggcggtggtggtagcgccgtctcttctaaacttcgttttatgtgtagctacggcggtcatatccttcctcgccctcacgataagtctctctgctacatgggcggtgacactcgcatcgttgtcgtcgaccgtaactcctctctcccttctctcatcgctcgtctctccaacacgcttctcgacggtcgttccttcaccctcaagtaccagttacctagcgaagaccttgactctctcatctccgtcactaccgacgaagatctcgacaacatgatcgaagagtatgaccgtaccatttccgcttccaattccaccaaaccttcgcgtctccggttgtttctattcacctccaagcctgaggctactcaatctatgggtcagatccttgagagctctgccaagagcgacgattggttcctcaacgcactcaatagcgccggtcttctcaatcgaggattctcagattctgatactaacgtcaatcgtttacttggtttggatgatgctcttgctctccgttctaattccggtgacaacaacaatcgagatggtgatgatggctctgttaaaagcgccaagcaacagcaacctccaccgccgcagcagcaagaacaacagcaaggaggccaagatgtgaactgcttaccggattctccgatgttagatacatcctcttctttcggctccacttcttcgtctccctcgctcgccaatttgcctccgatccgtgtccatgtagaggaaccaggcggagtaaggactttgccagatcagagaaatctgggaattgaagaacagttcgcacgattcaacgtcgggaacaagcatcagctacatgacgacggatttgctgcgatctcttcaccaccgccgatgcctgtcacaatcgcccttcctgctgcgcctgtgactgcagccaccgtctctaatgagttccaggccagggtttactcagatgacgagagatccgatcacggcgtgcaggctggatacaggaagcctccgactccgcgatcgcagccgcagaatctaccgcctcagcaggctcatcagctgaaatcaaatagcggtggtggacacgagctgccatcacccaattccgtttccagtgatagcagtatgagcaacccaatgtttcaccaaagaccatctgtctatcaagaaccaattgctcagataccttctggctctaccgttgttactggtatgatcaatccctcagatccaagcacacttttgtcacagcatcagaatcaggacccagcctatatccttcacccccagtttgagcaacaatctgcacaatctcagccacagcagcagttcatacacactgctgctcctcctcaatacattcatcaccatccgtctagcggccttcctgtcccgacttacatccaggtttacccttcgcaacagcctcaacagtccttccatcaacacgcaggtcgactggatcagcagccttatcctgtttattatgtcactgctcctgtcccacctaggccctacagtatgcctgtgccacaatctccaagtgtgagcgatgctgcagggtctatcccctctaaccatcccaactctaccatgatgcctccacctcctaacaaccacatgagaagtgttagcagtggcaaacctgagatgggacaggctggggtttacacaacagccccaggtgtgggcggtgctcagatggttcaccagattcccacaaaccagcagcaattcatggggtattcgcagatccgtcaccctcctcagtctggttcagctgggaatccaaactatggatatgaatatgtcgacaatgctcatacacagatatactacactcaacctatgggacatgcacagtaccagacaatgactgggcctccacctgccatggtgatgcctgatggttctgctgctgctaagcttccagctgagaacatgactcaacagatccggagttcacagccattgtgacacacacaaggaacacatgaagatgaaccacaaaattttggaggaagaaaaccccgggttggtttttaaacgtataaatatataacttttacttcttttttcttctcttcttttacaagttgctgcatcaaaaaaagagtctggtgtcatgttaagtttggtattatgggttgtgtttaaaagtgttgtgtgagtaaattaaaaaaacaaataaatagtgcttcttggtgggattttacattatatagttgcaattgatacatgtagtgctttaccattttcctggatcttatatcatattattatcattcatttcattttgtaaatgtatcacttttttga

SEQ ID NO: 105579 - protein, 730 aa, Arabidopsis thaliana; identical to SEQ ID NO: 30500
  peptide (1)..(730): Ceres Seq. ID no. 13617524

SEQ ID NO: 105580 - protein, 720 aa, Arabidopsis thaliana; identical to SEQ ID NO: 30501
  peptide (1)..(720): Ceres Seq. ID no. 13617525

SEQ ID NO: 105581 - protein, 643 aa, Arabidopsis thaliana; identical to SEQ ID NO: 30502
  peptide (1)..(643): Ceres Seq. ID no. 13617526

SEQ ID NO: 105582 - DNA, 1329 bp, Arabidopsis thaliana
  misc_feature (1)..(1329): Ceres Seq. ID no. 13617527
  misc_feature (1)..(1329): Ortholog of  Ceres SEQ ID NO 14310896 as cited in SEQ ID NO 53480
  misc_feature (1)..(1329): Ortholog of  Ceres SEQ ID NO 13660685 as cited in SEQ ID NO 67678
gaggagacgaaaccgagagaaacaatgggagacgctgcgatccgtaccgtcgtcgaagccattcactcatctccgacgcaggccgtcgtctatctttgcggcggtgcctctctggctttaggttggttgatgtcggttcctggagcgtcgaacacgcttctcgagtccgtggttccttattcgagagtatctatggttcaattactcggcagggttccgagccaacactgtagccaagcattggccaaggagatggccttgttagcctacaatcgggcgcttaagctctctaaaccaggatatccggttctcggtgtcgggtttacgggatcattggtaacttctcgtcctaagcgtggagatcacaggttctttttgtctatgagagcatccgaccggattttggaatcttcagtcactctaactaagaacttacggagccgagaagaagaagataaggtgtcaagctgtgcactgatccaggctatggccaaggcatgccaagtttctgggacacttgactctggcttgaccgagtctgaggtgccttatgagtctgaaacccactttactgaagaacaagaactagagcagcttataaatgggcacttgtgctgtaagatttatccattttctggggcacacgggtctgatgaagacagaaagattatactacctggctcttttaacccattacatgaaggtcatctcaagctgttagaagttgctatgagtgtttgtgggggcggctacccatgttttgaaatatccgcaataaatgccgacaaaccaccgcttacaattgcacagattaaagatcgtgtcaagcaatttgaagtagttggaaagacgataatagtttcaaatcagccatacttctacaagaaagctgaactcttcccaggaagcagttttgtaattggcgctgacactgcagcgaggcttgtcaatccaaagtactatgaaggaagcatcaaaaggatgttggagatacttggtgattgcaaacggacaggttgcactttccttgttggtggccgcaatgtagatggtgtatttaaggttcttgaagatgttgatattccagaggaaataatcgacatgtttatttcaattccagcagatatattccggatggatatatcctctacagagataagaaaaaaacaagggggtggtacgaactaatgacttctcaacccgcttgaaagtcttggctcgcaagacaatttatttagtgcagttactttttgatttgatatgtattgtgttgcattctgttcttattatggaatccggatcaatggtatgagcatttgcacatgacat

SEQ ID NO: 105583 - protein, 395 aa, Arabidopsis thaliana
  peptide (1)..(395): Ceres Seq. ID no. 13617528
EETKPRETMGDAAIRTVVEAIHSSPTQAVVYLCGGASLALGWLMSVPGASNTLLESVVPYSRVSMVQLLGRVPSQHCSQALAKEMALLAYNRALKLSKPGYPVLGVGFTGSLVTSRPKRGDHRFFLSMRASDRILESSVTLTKNLRSREEEDKVSSCALIQAMAKACQVSGTLDSGLTESEVPYESETHFTEEQELEQLINGHLCCKIYPFSGAHGSDEDRKIILPGSFNPLHEGHLKLLEVAMSVCGGGYPCFEISAINADKPPLTIAQIKDRVKQFEVVGKTIIVSNQPYFYKKAELFPGSSFVIGADTAARLVNPKYYEGSIKRMLEILGDCKRTGCTFLVGGRNVDGVFKVLEDVDIPEEIIDMFISIPADIFRMDISSTEIRKKQGGGTN

SEQ ID NO: 105584 - protein, 387 aa, Arabidopsis thaliana
  peptide (1)..(387): Ceres Seq. ID no. 13617529
MGDAAIRTVVEAIHSSPTQAVVYLCGGASLALGWLMSVPGASNTLLESVVPYSRVSMVQLLGRVPSQHCSQALAKEMALLAYNRALKLSKPGYPVLGVGFTGSLVTSRPKRGDHRFFLSMRASDRILESSVTLTKNLRSREEEDKVSSCALIQAMAKACQVSGTLDSGLTESEVPYESETHFTEEQELEQLINGHLCCKIYPFSGAHGSDEDRKIILPGSFNPLHEGHLKLLEVAMSVCGGGYPCFEISAINADKPPLTIAQIKDRVKQFEVVGKTIIVSNQPYFYKKAELFPGSSFVIGADTAARLVNPKYYEGSIKRMLEILGDCKRTGCTFLVGGRNVDGVFKVLEDVDIPEEIIDMFISIPADIFRMDISSTEIRKKQGGGTN

SEQ ID NO: 105585 - protein, 352 aa, Arabidopsis thaliana
  peptide (1)..(352): Ceres Seq. ID no. 13617530
MSVPGASNTLLESVVPYSRVSMVQLLGRVPSQHCSQALAKEMALLAYNRALKLSKPGYPVLGVGFTGSLVTSRPKRGDHRFFLSMRASDRILESSVTLTKNLRSREEEDKVSSCALIQAMAKACQVSGTLDSGLTESEVPYESETHFTEEQELEQLINGHLCCKIYPFSGAHGSDEDRKIILPGSFNPLHEGHLKLLEVAMSVCGGGYPCFEISAINADKPPLTIAQIKDRVKQFEVVGKTIIVSNQPYFYKKAELFPGSSFVIGADTAARLVNPKYYEGSIKRMLEILGDCKRTGCTFLVGGRNVDGVFKVLEDVDIPEEIIDMFISIPADIFRMDISSTEIRKKQGGGTN

SEQ ID NO: 105586 - DNA, 1592 bp, Arabidopsis thaliana
  misc_feature (1)..(1592): Ceres Seq. ID no. 13617531
  misc_feature (1)..(1592): Ortholog of  Ceres SEQ ID NO 15177903 as cited in SEQ ID NO 54993
  misc_feature (1)..(1592): Ortholog of  Ceres SEQ ID NO 15177994 as cited in SEQ ID NO 55641
  misc_feature (1)..(1592): Ortholog of  Ceres SEQ ID NO 13595454 as cited in SEQ ID NO 56502
  misc_feature (1)..(1592): Ortholog of  Ceres SEQ ID NO 13589016 as cited in SEQ ID NO 68472
ctttttttgaaattaccaaatctctctccatttcagcgaatctcttcttcagattttcctcttccactaatcttttgcctgtttaatcggagcttagatatcatcagaaggtttttgttctatcaattctccttcattcgatccatttttacccctttctttggaatctccgattcgaccaagcttcttcgccgtctcatcggagacaaacacatattcacgctaaatcaactaaattaagcttagatagatatatagatatataggtaaaaactcaactacgactactcggagatgttgggtgctggatttcagttgacgagaggcagacacggcgacgatcctttctacacttccgcaaaaactcgcagggccaatcagcgcatcgatcagctccgtagagctcagagcgacgtctctaacgttccatcatcagctccttctccgcataaacaacaactcgagccgtccgatttatcttccagtaatctagatcggtttttagagtcggtcacaccatccgtaccggctcagtttttatccaagacattgctacgagaaagaagagcagatgatgattataataaacttgtgccttattttgtgcttggtgatatatgggactcatttgcagagtggagtgcttacggcaccggtgtgcctcttgttttgaataacaacaaggatcgtgttatccaatactatgtcccttctttgtcagccattcaaatctatgctcattctcatgccttggattcatctcttaaatcaaggcgtcctggtgatagtagcgacagtgattttcgggattcaagtagcgatgttagcagcgatagtgattccgagcgggtttctgctagagtagactgtatctcattgagggatcaacatcaggaagactcttccagtgatgatggcgaacctttaggctctcaaggtcgtttgatgtttgagtatcttgaaagagaccttccatacatccgtgaaccttttgctgataaggtcttggacctcgcagctcagtttcccgagctaatgacgctgagaagctgtgacttacttcggtcaagctggttttctgttgcatggtacccaatttacagaatacccacaggaccgacactgaaggacctggatgcttgtttcttgacgtatcattccctacacacatcttttggaggtgaaggcagtgaacaatcaatgagccttacgcaaccaagggagagcgagaagatgtcattgcctgtgtttgggcttgcttcatacaagttcagaggttcattatggacacccattgggggttcggagcaccagctcgtgaactctctgttccaagccgctgacaaatggctgcattcttgtcatgtcagccaccctgatttcctcttcttctgccgtcgttgagtagggtatgaagttgtgacgcactttgagagagtttcaaaaagaaactcaaaactgttgatatggagggttgttgtcagattcaggtttaaaaacgagttgatttttatgtctgtaagttatagataaaacgaattttgtttggtcagataatgtatgtgaaccgtgggcttacctcgtgttgttgt

SEQ ID NO: 105587 - protein, 369 aa, Arabidopsis thaliana
  peptide (1)..(369): Ceres Seq. ID no. 13617532
MLGAGFQLTRGRHGDDPFYTSAKTRRANQRIDQLRRAQSDVSNVPSSAPSPHKQQLEPSDLSSSNLDRFLESVTPSVPAQFLSKTLLRERRADDDYNKLVPYFVLGDIWDSFAEWSAYGTGVPLVLNNNKDRVIQYYVPSLSAIQIYAHSHALDSSLKSRRPGDSSDSDFRDSSSDVSSDSDSERVSARVDCISLRDQHQEDSSSDDGEPLGSQGRLMFEYLERDLPYIREPFADKVLDLAAQFPELMTLRSCDLLRSSWFSVAWYPIYRIPTGPTLKDLDACFLTYHSLHTSFGGEGSEQSMSLTQPRESEKMSLPVFGLASYKFRGSLWTPIGGSEHQLVNSLFQAADKWLHSCHVSHPDFLFFCRR

SEQ ID NO: 105588 - DNA, 905 bp, Arabidopsis thaliana
  misc_feature (1)..(905): Ceres Seq. ID no. 13617537
  misc_feature (1)..(905): Ortholog of  Ceres SEQ ID NO 13594390 as cited in SEQ ID NO 51060
  misc_feature (1)..(905): Ortholog of  Ceres SEQ ID NO 14309565 as cited in SEQ ID NO 52731
aatcatcaaacatccaaactctatcctttcgttttcttgtcagacaaaaactaatactagatgggtaacagtttaggcggcaagaaaacgaccaaagtcatgaagatagacggcgagacttttaaactgaaaactccggtgacggctgaggaggtcttaaaagactttcccggccacgtcttgttagactccgaatccgtcaagcactacggtgcccgagccaaaccacttgaggcgaagcagaggttggaggcgaagcggctttattttgtggtggagccggtgaaagagtgtccaccgagaagggtaagatcaggaattcacgtgagtgcaaaggagaggcttgagagtctcatgctggcccggagatcgtcttccgatctctccatactcaaaccaccaggaggatggacgacggaggaagaagaaggagcggtgaggagggtgaaggtgaggattcccaaagctgagcttgaaaagctcgttaaagaaggagccaccgaagccgaagctacgcagaagatcgctgctctctttatggccaaacagaggcaagaggaggcatatcagaacacacgacaggacgagcccgccaccacggccaccgccaccgccaccaccaccgccacaagaggagtcaaatcccgtttgaaacgagtgagtttcatggcggaaagaggaggagggagcgagatcactgtagcttgaaccaataaacatatgtattagagaatgcttcccaacgtttctgcaaattctatgtacataaaaaacgcagaaagtttgagagaaagcttattcagatattcatccatgtctccactctattgtactcaagagttttactattattacattgtagaagaaacagtcattttataggcagattcattcgtttgcctctc

SEQ ID NO: 105589 - protein, 215 aa, Arabidopsis thaliana
  peptide (1)..(215): Ceres Seq. ID no. 13617538
MGNSLGGKKTTKVMKIDGETFKLKTPVTAEEVLKDFPGHVLLDSESVKHYGARAKPLEAKQRLEAKRLYFVVEPVKECPPRRVRSGIHVSAKERLESLMLARRSSSDLSILKPPGGWTTEEEEGAVRRVKVRIPKAELEKLVKEGATEAEATQKIAALFMAKQRQEEAYQNTRQDEPATTATATATTTATRGVKSRLKRVSFMAERGGGSEITVA

SEQ ID NO: 105590 - protein, 202 aa, Arabidopsis thaliana
  peptide (1)..(202): Ceres Seq. ID no. 13617539
MKIDGETFKLKTPVTAEEVLKDFPGHVLLDSESVKHYGARAKPLEAKQRLEAKRLYFVVEPVKECPPRRVRSGIHVSAKERLESLMLARRSSSDLSILKPPGGWTTEEEEGAVRRVKVRIPKAELEKLVKEGATEAEATQKIAALFMAKQRQEEAYQNTRQDEPATTATATATTTATRGVKSRLKRVSFMAERGGGSEITVA

SEQ ID NO: 105591 - protein, 117 aa, Arabidopsis thaliana
  peptide (1)..(117): Ceres Seq. ID no. 13617540
MLARRSSSDLSILKPPGGWTTEEEEGAVRRVKVRIPKAELEKLVKEGATEAEATQKIAALFMAKQRQEEAYQNTRQDEPATTATATATTTATRGVKSRLKRVSFMAERGGGSEITVA

SEQ ID NO: 105592 - DNA, 1131 bp, Arabidopsis thaliana
  misc_feature (1)..(1131): Ceres Seq. ID no. 13617549
  misc_feature (1)..(1131): Ortholog of  Ceres SEQ ID NO 12388947 as cited in SEQ ID NO 64451
aacaacagataaatttgttggtttcaagtattatcaatttcccggcgaaatctccaccagagttatgggaatcaccggaagtctaacgccagatcagctcgattttttccactctcaagggtatttggtaatcgaatcgttcgcgagtgaggatgagataagaggcttaaggaagaggatggatgagttgcttaatcagtttgattgttccgtctcctctatcttctccaccaaaaatcagaagcacaccacagataattacttctttgagagcgctgagaaaatctccttcttctttgaagaaaaagcttttggtgatgatgggaaattgaagcaacccaaacaactctctataaacaaagttgggcatgcactgcatgagcttgacccattgtataaggatttcacatattcgtcaaagttttcaagtttggcatcatccttaggttacaggagaccagttgtcatgcagtctatgtatattttcaagcaacctggaattggaggcgaagttgtgccgcaccaagataattcttttgtgtacacggatccacagagttgtactggtctctggattgctcttgaagattctacattagttaatggttgtctttgggcaattcctggatctcataagaatggtttagttagaaggtttatccgtggtgacaacggtataacctttgatcagccatccccatcttacgagcagaaagattttgtgtctattgaaatgaaagcaggctcattgattgccattcatggtgatctaatccatcaaagtttcgagaatctatcctcgaagtcaagacatgcctatagcttacatgtagtagaatctgatggatgtaaatgggcaaaagacaactggatacaaagagcaaaaatgccggagcctctctatgttcttccttgattcaagccagtcgtggaaaaacactgtgagttactgtttatcaaatttcttttaagatcactatctttgtgagaactatgaacagtaataagaacatggctaaaagggccttcttgtgtcgtttacttgttgaaatacaatttgtttcttcttggtctctgtagttctgtctttaaataaccaaactctgtggtcaataaagtgtgacagtgatt

SEQ ID NO: 105593 - protein, 304 aa, Arabidopsis thaliana
  peptide (1)..(304): Ceres Seq. ID no. 13617550
TTDKFVGFKYYQFPGEISTRVMGITGSLTPDQLDFFHSQGYLVIESFASEDEIRGLRKRMDELLNQFDCSVSSIFSTKNQKHTTDNYFFESAEKISFFFEEKAFGDDGKLKQPKQLSINKVGHALHELDPLYKDFTYSSKFSSLASSLGYRRPVVMQSMYIFKQPGIGGEVVPHQDNSFVYTDPQSCTGLWIALEDSTLVNGCLWAIPGSHKNGLVRRFIRGDNGITFDQPSPSYEQKDFVSIEMKAGSLIAIHGDLIHQSFENLSSKSRHAYSLHVVESDGCKWAKDNWIQRAKMPEPLYVLP

SEQ ID NO: 105594 - protein, 283 aa, Arabidopsis thaliana; identical to SEQ ID NO: 25615
  peptide (1)..(283): Ceres Seq. ID no. 13617551

SEQ ID NO: 105595 - protein, 245 aa, Arabidopsis thaliana; identical to SEQ ID NO: 25616
  peptide (1)..(245): Ceres Seq. ID no. 13617552

SEQ ID NO: 105596 - DNA, 915 bp, Arabidopsis thaliana
  misc_feature (1)..(915): Ceres Seq. ID no. 13617555
  misc_feature (1)..(915): Ortholog of  Ceres SEQ ID NO 13647991 as cited in SEQ ID NO 187
acgaaagaagagaacaaagaagaaattttgaaaatagtgaaaatggtaaccgtaagccaaagtcacacgacgacgtttctcttcttcaccacatttctcttgatattcggatcaatctcagccgtccgtttgcttccacgaccaaacactacaacaaccaacgatctagatttcatccgaacaagctgcaacgctactctatatccagacgtctgcttcacgtcactctccggctacgcctctgccgttcaagacagtccggcgaggctagccaagctcgcaatcggcgtttcactttcacaagccaaatccactgcggcttttctctccaaactctcacgctctgccgctaaatactccggtgatggccaccaaacagcttccgccgtaatccgagactgcgtttcgaacgtcgaagacgcggtggacgagatgagaggatctctccgtcaactacgcgacatgaacggcagaggaggcggcacggcagctcggaggtcggtagaaacgtttaggttccagatgagtaacgtgcagacgtggatgagtgcagcattgacggatgaggacacgtgtacggatggatttgaagatatggacgaaggaggattgattaagacgaccgtttgtgatcggctcgaggaagtgaagaggctaacgagtaatgctcttgcccttgtcaacacttacgccaacaatggagctccatgaccatgagaccatgagaccatgaggagttttaactttgatttaagtgtctctttatataatttaatacattgtggggtttaagttagagttatgtgtcgatttcatcatgttttacatttgtttttgtatcatccgagtttcttatgtttaaagggttcagagagatgttgtatctttgatttactaatcaaactgcacgatgat

SEQ ID NO: 105597 - protein, 236 aa, Arabidopsis thaliana
  peptide (1)..(236): Ceres Seq. ID no. 13617556
TKEENKEEILKIVKMVTVSQSHTTTFLFFTTFLLIFGSISAVRLLPRPNTTTTNDLDFIRTSCNATLYPDVCFTSLSGYASAVQDSPARLAKLAIGVSLSQAKSTAAFLSKLSRSAAKYSGDGHQTASAVIRDCVSNVEDAVDEMRGSLRQLRDMNGRGGGTAARRSVETFRFQMSNVQTWMSAALTDEDTCTDGFEDMDEGGLIKTTVCDRLEEVKRLTSNALALVNTYANNGAP

SEQ ID NO: 105598 - protein, 222 aa, Arabidopsis thaliana
  peptide (1)..(222): Ceres Seq. ID no. 13617557
MVTVSQSHTTTFLFFTTFLLIFGSISAVRLLPRPNTTTTNDLDFIRTSCNATLYPDVCFTSLSGYASAVQDSPARLAKLAIGVSLSQAKSTAAFLSKLSRSAAKYSGDGHQTASAVIRDCVSNVEDAVDEMRGSLRQLRDMNGRGGGTAARRSVETFRFQMSNVQTWMSAALTDEDTCTDGFEDMDEGGLIKTTVCDRLEEVKRLTSNALALVNTYANNGAP

SEQ ID NO: 105599 - DNA, 1017 bp, Arabidopsis thaliana
  misc_feature (1)..(1017): Ceres Seq. ID no. 13617558
  misc_feature (1)..(1017): Ortholog of  Ceres SEQ ID NO 12609304 as cited in SEQ ID NO 51524
  misc_feature (1)..(1017): Ortholog of  Ceres SEQ ID NO 14308976 as cited in SEQ ID NO 0
attgattcatctgatcaatgacaaaggataagaaaaactaaaagagagcaaattcagaagctgagaatatgaagacggagcttgaagaagaagaagaagaagaatggagatccgttcacgaggttttattaatcgttcttccttatcttcattctctgttcgagcttctctctatgattcgcgtttcgcgatctctcagagacgcgatcagagacgaaaccgcgttatggacaaaactcgttattgaaccaccgttgagctctcgtctaaccgatgatattctatcggagttcagttccaaatccgccggaaagctgaaaactctgattctccggcaatgtcttatggtcaccaacaagggactccgtcgtgttgtggatgctaatcctctcatcactaagataattgtgcctggatgctctggattgactcctgaaggaatcatggaatgtgttgaaagcttgtctaagaacaatcataaactagagacacttcacatcaatggcgtcaatggctttaccaaacaacatctctcagcactgtatacttacctttcttccgagggaacgattgacctcgaggtctgtcccaaatgcgatgaagtaaggatgattccgtcttgctcaagagaatcatgtaaccagaagcaacgcaagtgccgtggatgctggctttgtatccctagatgtgcagagtgcgcagtgtgccttgttggttcagatactgagagtcaagaagcagcgtgtggtaatgatgatgttctgtgtcttgaatgttggcttgtgcttcccaagtgcagattctgcaataaaccatattgcactaatcacagtagtcgtcgacatgagattgcaatcactgatgctgcatctcggccttcgtttgaatgtgaagcttgttactatagggcaggtacaaacccatatgaagtcgactatcaaatctaaacaaacactttgttgtctgcaactttgtctattttgtatatgacaagcttggattgtgaaatattcagcc

SEQ ID NO: 105600 - protein, 292 aa, Arabidopsis thaliana; identical to SEQ ID NO: 39199
  peptide (1)..(292): Ceres Seq. ID no. 13617559

SEQ ID NO: 105601 - protein, 257 aa, Arabidopsis thaliana; identical to SEQ ID NO: 39200
  peptide (1)..(257): Ceres Seq. ID no. 13617560

SEQ ID NO: 105602 - protein, 200 aa, Arabidopsis thaliana; identical to SEQ ID NO: 39201
  peptide (1)..(200): Ceres Seq. ID no. 13617561

SEQ ID NO: 105603 - DNA, 1306 bp, Arabidopsis thaliana
  misc_feature (1)..(1306): Ceres Seq. ID no. 13617566
  misc_feature (1)..(1306): Ortholog of  Ceres SEQ ID NO 15169350 as cited in SEQ ID NO 53271
gaagaatctcaattctcttcgttactaatgtcatcgtattcttcagattccacggcggcgcgtgatcaacatgcgcctctactccgtccacgacacgacggctctttttcttcttcttcttcatcagccagacctacagctctcgccgttctattaggacggatcaccggccaccgagcaccgtcgatgctggttagagaaacagcggcgcgtgctctcgaggagagacgaatcgattggggttactcgaagcctgtagttgctgctgatatactatggaacgctgctttagttcttgcgtcagcggttatgcttgtcggtaccgttgaagaaagacctaatgaaccgattagggtttggatctgtgtgtatgggttacagtgtttgttccatgtggttttggtttggtctgagtattggagaagaaactcaactcgtagagctagggatttggagtcttatgatcatgaagattacaacattgagtatgattatgaacaagacagtgatgacaattcaacaacttacagttttgtgaagagatgtgagtcgataaacacagtgatatcattcatatggtggataattggattctactgggttgttgaaggtggtgataagcttttaggagaagctcctaatctttactggttatcggtgattttcctggcgattgacgtcttctttgctgttttctgtgttgttttggcttgccttgttggaatagctctttgttgctgtcttccttgcataattgctcttctttatgccgttgctggaacggaaggtgtatcggaggcggagctcggtgttcttcccttgtacaaatttaaggctttccatagcaatgagaagaacattactggacctggtaaaatggttcctataccgatcaatggcttatgcttagcaactgaaagaacactgcttgctgaggatgcggattgttgcatatgtctgagttcatatgaggatggcgcagagcttcatgctcttccttgtaaccaccattttcattcgacttgtattgtgaaatggcttaagatgagagcaacatgccctctttgcaaatacaacattcttaaaggaaccactgatcaatcttgaagacaaaactcaaccaaccagagggaataagattctgcacatatagaaacagattccatttcctcaattaaaaagcttctgtatatatttatttacataactatcaaagtcatgtgtcttttgttaaaagcatccattttaaatgtaaaagatcacactttacaaatgcccttttctatatttgcccatatttgagaat

SEQ ID NO: 105604 - protein, 368 aa, Arabidopsis thaliana
  peptide (1)..(368): Ceres Seq. ID no. 13617567
EESQFSSLLMSSYSSDSTAARDQHAPLLRPRHDGSFSSSSSSARPTALAVLLGRITGHRAPSMLVRETAARALEERRIDWGYSKPVVAADILWNAALVLASAVMLVGTVEERPNEPIRVWICVYGLQCLFHVVLVWSEYWRRNSTRRARDLESYDHEDYNIEYDYEQDSDDNSTTYSFVKRCESINTVISFIWWIIGFYWVVEGGDKLLGEAPNLYWLSVIFLAIDVFFAVFCVVLACLVGIALCCCLPCIIALLYAVAGTEGVSEAELGVLPLYKFKAFHSNEKNITGPGKMVPIPINGLCLATERTLLAEDADCCICLSSYEDGAELHALPCNHHFHSTCIVKWLKMRATCPLCKYNILKGTTDQS

SEQ ID NO: 105605 - protein, 359 aa, Arabidopsis thaliana
  peptide (1)..(359): Ceres Seq. ID no. 13617568
MSSYSSDSTAARDQHAPLLRPRHDGSFSSSSSSARPTALAVLLGRITGHRAPSMLVRETAARALEERRIDWGYSKPVVAADILWNAALVLASAVMLVGTVEERPNEPIRVWICVYGLQCLFHVVLVWSEYWRRNSTRRARDLESYDHEDYNIEYDYEQDSDDNSTTYSFVKRCESINTVISFIWWIIGFYWVVEGGDKLLGEAPNLYWLSVIFLAIDVFFAVFCVVLACLVGIALCCCLPCIIALLYAVAGTEGVSEAELGVLPLYKFKAFHSNEKNITGPGKMVPIPINGLCLATERTLLAEDADCCICLSSYEDGAELHALPCNHHFHSTCIVKWLKMRATCPLCKYNILKGTTDQS

SEQ ID NO: 105606 - protein, 306 aa, Arabidopsis thaliana
  peptide (1)..(306): Ceres Seq. ID no. 13617569
MLVRETAARALEERRIDWGYSKPVVAADILWNAALVLASAVMLVGTVEERPNEPIRVWICVYGLQCLFHVVLVWSEYWRRNSTRRARDLESYDHEDYNIEYDYEQDSDDNSTTYSFVKRCESINTVISFIWWIIGFYWVVEGGDKLLGEAPNLYWLSVIFLAIDVFFAVFCVVLACLVGIALCCCLPCIIALLYAVAGTEGVSEAELGVLPLYKFKAFHSNEKNITGPGKMVPIPINGLCLATERTLLAEDADCCICLSSYEDGAELHALPCNHHFHSTCIVKWLKMRATCPLCKYNILKGTTDQS

SEQ ID NO: 105607 - DNA, 666 bp, Arabidopsis thaliana
  misc_feature (1)..(666): Ceres Seq. ID no. 13617581
  misc_feature (1)..(666): Ortholog of  Ceres SEQ ID NO 12585656 as cited in SEQ ID NO 68874
ctagccgcaaagagagaaagggagggaggagagtgtagcagatcggcgaaaatgacaaccagattcaagaagaacaggaagaagagaggtcacgtcagcgccggacatggacgtatcggtaagcaccgtaagcatcccggaggtcgtggtaacgctggaggtatgcatcaccacaggatcctcttcgacaagtaccatccaggttacttcggtaaagttggtatgaggtatttccacaagctgaggaacaagttcttctgcccaatcgttaacctcgacaagctttggtcactcgtccctgaagatgtgaaggcgaaatcaaccaaggacaatgttccgttgatcgatgtgactcaacatggtttcttcaaggttttgggtaaaggtcatttgcctgagaacaagccgttcgttgtgaaggcgaagcttatttcgaagactgctgagaagaagattaaggaagctggtggtgctgttgtgcttactgcttaagttaggtgaatttatttgcttaactctgtttttgaatcttctatggagttttatcatcttttgttgtcttttggattttggaaagagcgagatctctttaaagttagtagttttatgaaccttttgttggattttgataaatgtttggtattccgaattcagacttataattgc

SEQ ID NO: 105608 - protein, 163 aa, Arabidopsis thaliana; identical to SEQ ID NO: 29911
  peptide (1)..(163): Ceres Seq. ID no. 13617582

SEQ ID NO: 105609 - protein, 146 aa, Arabidopsis thaliana [sequence omitted]

SEQ ID NO: 105610 - protein, 109 aa, Arabidopsis thaliana; identical to SEQ ID NO: 29913
  peptide (1)..(109): Ceres Seq. ID no. 13617584

SEQ ID NO: 105611 - DNA, 1560 bp, Arabidopsis thaliana
  misc_feature (1)..(1560): Ceres Seq. ID no. 13617585
  misc_feature (1)..(1560): Ortholog of  Ceres SEQ ID NO 14307534 as cited in SEQ ID NO 55715
  misc_feature (1)..(1560): Ortholog of  Ceres SEQ ID NO 14307548 as cited in SEQ ID NO 58859
  misc_feature (1)..(1560): Ortholog of  Ceres SEQ ID NO 15172032 as cited in SEQ ID NO 59531
aactaatacgcattgagtttcgttgctttctcgggaaaaatctctttgtaactaaacttttatgtacctactaaaaatctcatgttgagattcttcaagaccgaccatagattgttccatcgaatcatcgggtacacaagaccattccacggtctagctaaaacccaaaacgctgagatcgctagaccaggtttggttgatccaagctcgcacccgtggcccgagtggctagatttaatggggatgctagctaaaaaaggttactttgaagaaagcttgattccattgatgagttccaaggaatctaatcatattcgtacagcttgtctcaatttcgcccgccatcgtttcactctcgtcagaaacttgtcgaagaaagatatcaaagtgattgctgggtgtggatgtccaagcactgataggaaggtcgtgaactcaggaaagcgtctaagagcttatgtgggcattgatgaaggaaatgtgtgtggctcctgcaacttgagagggaaatgtgaaagggcgtatgcacaagcacgggatgatgaaggtgctcgaactatagatgtcatgcgtttactgctaacttatgggcttgattccatttctcctactgttgagaatcgtgcctgtcaaaccaaacttgttgaagattctgtgaggaagttgctcagagaaagtgtagcgtatagcttaacagattttgaatctgctgagactgagacagctggagatgagctccagccaaattcacaggacattgatgaaagagatccacgaaaaaggccaggggattggtattgtacagaatgcaagtttctaaattttgcgaaaaacataagatgcttgcgatgtgatgttttttctgaggaaaggcttaaacagttgaaggaagaacaaaaagatcatctcccactgaagaaaggagattggatttgtcaaacatgtaatttcctgaacttttcgaaaaacacgagatgcttaaggtgcaaagacaagcctacattgcgtcaaatcaatcccggagagtgggaatgcgagtcgtgcaattacatcaattttagaagaaactctatatgtttgaagtgtgatcacaagagacaaaaggctgcaaacgtcactccggattcaaagacagttgctgatcgtcaaagcggagttacaaagacgtggagctttgtagaagaagagagtgtaaaacgatgcaatggcgaagaagaggaagaagaagatggtttcatgggatttccagtagagggagggagaagcaatgtttcaaagagcgcagaaaagagagagcaatggaagttggagatgacacagagaattagaagcaatgggactaaagcgaaaaaagatgataatacgaagaacgaaacagagtcaaaatgttatgatcggagaagaaatgaacttcttggtaacattagtgatgatggagagatggatgattggtttgtttcaaaacaagatagatcgacttaaattgaatttataaatttgtaaccacatccatctgtttgtttcttctagtgttttattattggttcattggttggtttg

SEQ ID NO: 105612 - protein, 466 aa, Arabidopsis thaliana
  peptide (1)..(466): Ceres Seq. ID no. 13617586
MLRFFKTDHRLFHRIIGYTRPFHGLAKTQNAEIARPGLVDPSSHPWPEWLDLMGMLAKKGYFEESLIPLMSSKESNHIRTACLNFARHRFTLVRNLSKKDIKVIAGCGCPSTDRKVVNSGKRLRAYVGIDEGNVCGSCNLRGKCERAYAQARDDEGARTIDVMRLLLTYGLDSISPTVENRACQTKLVEDSVRKLLRESVAYSLTDFESAETETAGDELQPNSQDIDERDPRKRPGDWYCTECKFLNFAKNIRCLRCDVFSEERLKQLKEEQKDHLPLKKGDWICQTCNFLNFSKNTRCLRCKDKPTLRQINPGEWECESCNYINFRRNSICLKCDHKRQKAANVTPDSKTVADRQSGVTKTWSFVEEESVKRCNGEEEEEEDGFMGFPVEGGRSNVSKSAEKREQWKLEMTQRIRSNGTKAKKDDNTKNETESKCYDRRRNELLGNISDDGEMDDWFVSKQDRST

SEQ ID NO: 105613 - protein, 414 aa, Arabidopsis thaliana
  peptide (1)..(414): Ceres Seq. ID no. 13617587
MGMLAKKGYFEESLIPLMSSKESNHIRTACLNFARHRFTLVRNLSKKDIKVIAGCGCPSTDRKVVNSGKRLRAYVGIDEGNVCGSCNLRGKCERAYAQARDDEGARTIDVMRLLLTYGLDSISPTVENRACQTKLVEDSVRKLLRESVAYSLTDFESAETETAGDELQPNSQDIDERDPRKRPGDWYCTECKFLNFAKNIRCLRCDVFSEERLKQLKEEQKDHLPLKKGDWICQTCNFLNFSKNTRCLRCKDKPTLRQINPGEWECESCNYINFRRNSICLKCDHKRQKAANVTPDSKTVADRQSGVTKTWSFVEEESVKRCNGEEEEEEDGFMGFPVEGGRSNVSKSAEKREQWKLEMTQRIRSNGTKAKKDDNTKNETESKCYDRRRNELLGNISDDGEMDDWFVSKQDRST

SEQ ID NO: 105614 - protein, 412 aa, Arabidopsis thaliana
  peptide (1)..(412): Ceres Seq. ID no. 13617588
MLAKKGYFEESLIPLMSSKESNHIRTACLNFARHRFTLVRNLSKKDIKVIAGCGCPSTDRKVVNSGKRLRAYVGIDEGNVCGSCNLRGKCERAYAQARDDEGARTIDVMRLLLTYGLDSISPTVENRACQTKLVEDSVRKLLRESVAYSLTDFESAETETAGDELQPNSQDIDERDPRKRPGDWYCTECKFLNFAKNIRCLRCDVFSEERLKQLKEEQKDHLPLKKGDWICQTCNFLNFSKNTRCLRCKDKPTLRQINPGEWECESCNYINFRRNSICLKCDHKRQKAANVTPDSKTVADRQSGVTKTWSFVEEESVKRCNGEEEEEEDGFMGFPVEGGRSNVSKSAEKREQWKLEMTQRIRSNGTKAKKDDNTKNETESKCYDRRRNELLGNISDDGEMDDWFVSKQDRST

SEQ ID NO: 105615 - DNA, 815 bp, Arabidopsis thaliana
  misc_feature (1)..(815): Ceres Seq. ID no. 13617589
  misc_feature (1)..(815): Ortholog of  Ceres SEQ ID NO 15170072 as cited in SEQ ID NO 55533
  misc_feature (1)..(815): Ortholog of  Ceres SEQ ID NO 15173959 as cited in SEQ ID NO 63398
  misc_feature (1)..(815): Ortholog of  Ceres SEQ ID NO 13663564 as cited in SEQ ID NO 66903
acaattcatatcctgtctgatgaacagtagctgttagactctctctctttctctcttctctgttcttcttcatcttctctagccgaatccatccttcagatactactctgtaatttcactacaatcatctcagccaaatgggttcggaagaagagaaggtcgttgttcccagaaactttagattattggaagagctagaaagaggtgagaaaggaattggagatgggacagtgagttatggaatggatgatgctgatgatattttgatgcaatcttggactggtaccattcttggtcctcataatactgcgtatgaagggaaaatctttcagctgaagctattctgtggaaaggattatccggaaagtccacctactgtgaggtttcagagtcgtataaacatggcttgtgtcaatcctgagaatggagtggttgatccgagtcacttccctatgctttccaactggagaagagaattcacaatggaggatctactgattcagcttaaaaaagaaatgatgtcatcgcagaaccgcaagttagctcaacccttggaaggtaatgaggaaggcaggacagacccaaagggactagtggtgaaatgttgcgtgatgtgaaaagaggtaatgaggaatttataagaatttaagagacaaaacaatgtatataaacagcatttgaagggctttgagattggcctaagaaccctttcttctataggccttcttaatcctaccatttgattatgtattatgtaatatttgagaatatattcaccaaaaacaggtgcccttaataaacctccactcttcttc

SEQ ID NO: 105616 - protein, 159 aa, Arabidopsis thaliana; identical to SEQ ID NO: 27234
  peptide (1)..(159): Ceres Seq. ID no. 13617590

SEQ ID NO: 105617 - protein, 124 aa, Arabidopsis thaliana; identical to SEQ ID NO: 27235
  peptide (1)..(124): Ceres Seq. ID no. 13617591

SEQ ID NO: 105618 - protein, 116 aa, Arabidopsis thaliana; identical to SEQ ID NO: 27236
  peptide (1)..(116): Ceres Seq. ID no. 13617592

SEQ ID NO: 105619 - DNA, 986 bp, Arabidopsis thaliana
  misc_feature (1)..(986): Ceres Seq. ID no. 13617593
  misc_feature (1)..(986): Ortholog of  Ceres SEQ ID NO 13661969 as cited in SEQ ID NO 61215
  misc_feature (1)..(986): Ortholog of  Ceres SEQ ID NO 12614809 as cited in SEQ ID NO 68808
  misc_feature (1)..(986): Ortholog of  Ceres SEQ ID NO 12634366 as cited in SEQ ID NO 0
  misc_feature (1)..(986): Ortholog of  Ceres SEQ ID NO 14309113 as cited in SEQ ID NO 0
  misc_feature (1)..(986): Ortholog of  Ceres SEQ ID NO 15175257 as cited in SEQ ID NO 0
attttcttgtcttcgtatagaatcaaaaaaaaagtaacgacgatgcaaatatactatatattacataggcttcaccagatcatctcgaatcttaatcacattattaatacaattacatagaaggagcaattaaatctctatatataaaaggaagcgtgtgtttcgccttctcttttcaccattttcagttactttctctctttcatcttttaccattctcttcttcttttttttctctcattctgatcatggcttcctctatttccactggagtgaaatttgttccagaagaagataatttcttgcagagacatgtcgcttttttcgataggaacaaagatggtatcgtttatccctcggagacatttcaaggatttagagcaattgggtgtggatatttgttgtcagcagtcgcttctgtgttcataaacataggtctcagcagcaaaactcgtccgggtaaaggattctctatctggtttcctatagaggttaagaatattcaccttgccaaacacggaagcgattcaggcgtttacgacaaagatggacggtttgttgcttcgaagtttgaggagatatttacgaagcatgcacacacacatcgcgatgctttgaccaacgaggaactcaaacaactcctaaaggcaaacaaagaacctaatgatcgtaaaggatggcttgcagggtatacggagtggaaggtattgcattatttgtgtaaagacaagaatggtttgttgcacaaagacacagtgagagctgcctacgatggttctcttttcgaaaaactcgagaaacaaagatcttctaaaacttctaagaaacatccataaatccttatttaaatataatcaagctctcctgcatgcttgtggatctgtttatttttaaaactattacttcaatgttatagtgaatatttatggtgtgaagattgtaatgagttttaacaacaataaaaaaaacatgtaatgtgtttaatt

SEQ ID NO: 105620 - protein, 195 aa, Arabidopsis thaliana; identical to SEQ ID NO: 27036
  peptide (1)..(195): Ceres Seq. ID no. 13617594

SEQ ID NO: 105621 - DNA, 1190 bp, Arabidopsis thaliana
  misc_feature (1)..(1190): Ceres Seq. ID no. 13617595
  misc_feature (1)..(1190): Ortholog of  Ceres SEQ ID NO 15171634 as cited in SEQ ID NO 57593
  misc_feature (1)..(1190): Ortholog of  Ceres SEQ ID NO 14301936 as cited in SEQ ID NO 67361
atctttaaagcaagtcttcgctcttcaatttatattttaccaaatcatcttctctctttctctatctctcaaaacaaaaagtaaccatgatcaagacaaagacgacgtcccttctctgtttccttctcacagccgttatactaatgaacccatcttcctcctcccccactgacaattacatatacgccgtttgttctccggctaaattctcccctagctccggctacgagacaaatcttaactccctcctctcttccttcgtcacctcaaccgcccaaacccgctacgccaacttcacagttcccaccgggaaaccggaaccaaccgttaccgtatacggtatttaccagtgccgcggcgacctagacccaaccgcctgctcgacgtgcgtatcaagcgccgtcgcacaggtcggagccttatgttcaaactcgtactccgggttcttgcagatggaaaattgtctgatccgttacgacaacaaatcgttccttggggttcaagacaaaacgttgatcctcaacaaatgtggacagccgatggaattcaacgaccaggatgcgttgaccaaagctagtgacgtcatcggttctttaggtaccggagatggatcttacaggacaggtggcaacgggaatgttcagggtgtggctcagtgctccggtgatctaagtacatcacagtgccaagattgcttgtctgatgcaatcggacggctcaaatctgattgtggaatggctcagggaggatatgtttacttgtcgaaatgttacgcgcgtttcagtgttggtggtagtcacgcgcgtcagaccccaggcccaaactttggtcatgaaggagagaagggcaataaggatgataatggagtgggaaaaacattggcgataataataggaatcgtcaccttaatcatcttgctcgttgtgtttctcgcttttgttggaaagtgttgtagaaaattacaagatgagaaatggtgtaaatgaaaggacaaagtgggaaagatatcaatcaacaactcgagtcgagccacactgttagttgtatttttgtaattttttttgttctccctcataagatgtacgtagttatagtatattgataatttgatatagtattgatatgattgtatctccgaatcgatttttgtataattgtcggacttatataggccaaagcgatatcttctt

SEQ ID NO: 105622 - protein, 299 aa, Arabidopsis thaliana; identical to SEQ ID NO: 25372
  peptide (1)..(299): Ceres Seq. ID no. 13617596

SEQ ID NO: 105623 - protein, 280 aa, Arabidopsis thaliana; identical to SEQ ID NO: 25373
  peptide (1)..(280): Ceres Seq. ID no. 13617597

SEQ ID NO: 105624 - protein, 177 aa, Arabidopsis thaliana; identical to SEQ ID NO: 25374
  peptide (1)..(177): Ceres Seq. ID no. 13617598

SEQ ID NO: 105625 - DNA, 797 bp, Arabidopsis thaliana
  misc_feature (1)..(797): Ceres Seq. ID no. 13617602
  misc_feature (1)..(797): Ortholog of  Ceres SEQ ID NO 13647991 as cited in SEQ ID NO 187
aaacacatcacacaacaatatggtaacaatgatgagacctactctccttatacttctcttttccacctttctcccacaaatcctcaccgttgatccaccactcctaccatccaacggctccgatttcatccgtttggcctgcaacaccacactctacccggacctttgcttctccactctctcctcttttgccaactccatccaaaatgactcaaaccgcctcgcgcgcgtagccatctccctcactctccacaacactctccaccttctctcttacctccaaaacgcttataaccgcgaccacccaacccccgtccttagagactgcttcgagaatcttaaagatgccgttgacggtatgagaggctccatgaaacagatgaaggagcttgtctccgcgtctggctcgatcgagtcatttaggttccagatgagtaatgtcaagacttggcttagtgcagctcttactgatgagtatacttgtacggacgggttcaaagacgtccacgaagacgactctatcaaagatgacgtctgctctcgagtcgatgacgtcaagaagcttactagcaatgcgctggctttagttaaccgctatgccgacgagtcaataataaattaataatatctcagtcatcgatccttcgagtcttttgttttttttcgaaactatgaacttttatacttaaaaaagtattagtaaactaaaagtactactcgttgttgcatgtaatactgaaaatatatgtgagttttccttggaattattatttacttggatttatttcagtttttgc

SEQ ID NO: 105626 - protein, 206 aa, Arabidopsis thaliana
  peptide (1)..(206): Ceres Seq. ID no. 13617603
NTSHNNMVTMMRPTLLILLFSTFLPQILTVDPPLLPSNGSDFIRLACNTTLYPDLCFSTLSSFANSIQNDSNRLARVAISLTLHNTLHLLSYLQNAYNRDHPTPVLRDCFENLKDAVDGMRGSMKQMKELVSASGSIESFRFQMSNVKTWLSAALTDEYTCTDGFKDVHEDDSIKDDVCSRVDDVKKLTSNALALVNRYADESIIN

SEQ ID NO: 105627 - protein, 200 aa, Arabidopsis thaliana
  peptide (1)..(200): Ceres Seq. ID no. 13617604
MVTMMRPTLLILLFSTFLPQILTVDPPLLPSNGSDFIRLACNTTLYPDLCFSTLSSFANSIQNDSNRLARVAISLTLHNTLHLLSYLQNAYNRDHPTPVLRDCFENLKDAVDGMRGSMKQMKELVSASGSIESFRFQMSNVKTWLSAALTDEYTCTDGFKDVHEDDSIKDDVCSRVDDVKKLTSNALALVNRYADESIIN

SEQ ID NO: 105628 - protein, 197 aa, Arabidopsis thaliana
  peptide (1)..(197): Ceres Seq. ID no. 13617605
MMRPTLLILLFSTFLPQILTVDPPLLPSNGSDFIRLACNTTLYPDLCFSTLSSFANSIQNDSNRLARVAISLTLHNTLHLLSYLQNAYNRDHPTPVLRDCFENLKDAVDGMRGSMKQMKELVSASGSIESFRFQMSNVKTWLSAALTDEYTCTDGFKDVHEDDSIKDDVCSRVDDVKKLTSNALALVNRYADESIIN

SEQ ID NO: 105629 - DNA, 1957 bp, Arabidopsis thaliana
  misc_feature (1)..(1957): Ceres Seq. ID no. 13617606
  misc_feature (1)..(1957): Ortholog of  Ceres SEQ ID NO 14307728 as cited in SEQ ID NO 54710
tattttatcatcttcaggcttattcgattttcttcagatttgaaatggtgtcgttcaaggtctctctcgtctctacttcgcctattgatggccagaaacctgggacttctggactccgtaagaaggtgaaagtgtttaagcaaccaaattaccttgaaaattttgtccaggcaacgttcaatgctcttactacagagaaagttaaaggtgcgacacttgtggtttctggtgatggtcgttattattcagagcaagctattcagattatagtaaagatggcagcagctaatggtgttagacgtgtgtgggttggtcaaaacagtctgctatcaactcctgcagtatcagctattattcgtgaaagagtaggggctgatggatctaaagccacaggagcatttatcttaacagcaagtcataatcctggtggcccaactgaggatttcggaattaagtacaatatggaaaatggtggaccagctcctgaatcaatcactgataagatttacgagaacacaaagacaatcaaggagtacccaatagcggaagatctacccagggttgatatttctactattggtataaccagctttgaaggacctgaaggaaagtttgacgtcgaagtttttgattctgcagatgactatgttaaactaatgaagtcaatcttcgactttgaatccatcaagaaattgctatcttatccaaaatttactttctgctatgatgcattgcatggagtggctggagcatatgcacatcgcatctttgtcgaagaactaggtgcaccagaaagttcgttgttgaactgcgtacccaaggaggactttggagggggccacccggatcccaatcttacctatgctaaggagctcgtggcacgcatgggattgagtaaaactgatgatgctggtggcgagcctccagagtttggcgccgctgctgatggtgatgcagaccgaaacatgatcctcggtaaaaggtttttcgtaactccttcggattcagttgctataattgctgcaaatgctgttggggccataccatacttcagctctggtttaaaaggtgttgctaggagcatgccgacctcagctgcacttgatgtcgttgcaaaaaacttgggtttgaagttctttgaggttccaacaggctggaaattctttggcaatctaatggatgctgggatgtgctctgtatgcggagaagaaagttttggaaccggttcggatcatatccgtgagaaagatgggatctgggcagttcttgcttggctatcaatactggctcacaagaacaaggaaacccttgatgggaatgcaaaactggtgacggttgaagacattgtccgccagcactgggctacatatggccgtcactattacactcgatacgactatgagaacgtagacgcaactgcagctaaagaactcatgggacttttggttaagttgcaatcttcacttcccgaagtcaacaagattataaagggaattcatccagaggtggcaaatgttgcaagcgcagatgagttcgagtacaaagatccagtagatggctctgtttcaaagcaccaagggatccgatacttattcgaggatggatcacgacttgtgttccgtctctcgggaactggctcagaaggagcaacaataaggctatacattgaacaatacgagaaggacgcctcaaagatcggccgagattctcaggatgctcttggtcccctggttgatgttgcattaaagctgtcgaaaatgcaagagttcaccggccgatcatcaccaactgttattacataagacagctttcagaagacgctgtctccaatactactctcattccaacttcatttcttatgaatttgggttttgcttttttcctgttatctgttatcttacacaagtatacttcaatacatataattttaatggaatatacattaggttggcaattg

SEQ ID NO: 105630 - protein, 599 aa, Arabidopsis thaliana
  peptide (1)..(599): Ceres Seq. ID no. 13617607
FYHLQAYSIFFRFEMVSFKVSLVSTSPIDGQKPGTSGLRKKVKVFKQPNYLENFVQATFNALTTEKVKGATLVVSGDGRYYSEQAIQIIVKMAAANGVRRVWVGQNSLLSTPAVSAIIRERVGADGSKATGAFILTASHNPGGPTEDFGIKYNMENGGPAPESITDKIYENTKTIKEYPIAEDLPRVDISTIGITSFEGPEGKFDVEVFDSADDYVKLMKSIFDFESIKKLLSYPKFTFCYDALHGVAGAYAHRIFVEELGAPESSLLNCVPKEDFGGGHPDPNLTYAKELVARMGLSKTDDAGGEPPEFGAAADGDADRNMILGKRFFVTPSDSVAIIAANAVGAIPYFSSGLKGVARSMPTSAALDVVAKNLGLKFFEVPTGWKFFGNLMDAGMCSVCGEESFGTGSDHIREKDGIWAVLAWLSILAHKNKETLDGNAKLVTVEDIVRQHWATYGRHYYTRYDYENVDATAAKELMGLLVKLQSSLPEVNKIIKGIHPEVANVASADEFEYKDPVDGSVSKHQGIRYLFEDGSRLVFRLSGTGSEGATIRLYIEQYEKDASKIGRDSQDALGPLVDVALKLSKMQEFTGRSSPTVIT

SEQ ID NO: 105631 - protein, 585 aa, Arabidopsis thaliana; identical to SEQ ID NO: 41581
  peptide (1)..(585): Ceres Seq. ID no. 13617608

SEQ ID NO: 105632 - protein, 508 aa, Arabidopsis thaliana; identical to SEQ ID NO: 41582
  peptide (1)..(508): Ceres Seq. ID no. 13617609

SEQ ID NO: 105633 - DNA, 1493 bp, Arabidopsis thaliana
  misc_feature (1)..(1493): Ceres Seq. ID no. 13617610
  misc_feature (1)..(1493): Ortholog of  Ceres SEQ ID NO 13584744 as cited in SEQ ID NO 69137
atggtcactaagaactctcataagagcaatctgggcatgacaaagtccatgaatttctttcagaacatcattaaacctttcaaacgcagctccaatcgaggtcttgaagatgatattgagcgaattgctgctatggagcaaaaagttttcccatttcaagttttagtttccgctaccaaagattttcacccgacccataaactcggtgaaggtggtttcggtcccgtcttcaagggaagattacctgacgggagagacatagcagtgaagaagctatctcaggtttcaaggcaaggcaaaaacgagtttgtgaacgaggctaagttgttggctaaagttcagcatcgcaatgttgttaatctttggggttattgtacacatggagatgataagctcttggtttatgagtatgtcgttaatgagagcctcgacaaggtcctcttcaaatccaacagaaaatcggagatagattggaagcagaggtttgagatcataacaggcattgctcgaggactgctctatctacatgaagacgcgccaaactgcatcatccacagggatattaaggctggcaatattttgctggatgaaaaatgggttcctaagattgcagattttgggatggctagactctatcaggaagatgtaacacatgtcaacactcgtgttgcaggaaccaatggttatatggcgccagagtacgtaatgcacggggttctatcggtaaaggcagacgtattcagctttggggttttggttctggagctcgtaagtggacagaagaactcgagttttagcatgagacaccctgaccagactcttcttgaatgggcatttaagttgtacaagaaaggccggaccatggagatactagaccaagatatagcagcttcagctgatccagatcaagtcaaactctgtgtacagatcggactactctgcgttcaaggcgatccgcatcaaagaccgagcatgagacgggtatctctacttctctctagaaaaccaggacatctagaagaaccggatcatcctggtgtcccgggatctagataccgtcggcgaacacaacgtccttcaggagcagcatcacttggaacattgtcgaccactggttccagcacagattctttcggttcaaacctgaacacaaacacgggaactggtgttagaggtacccccgcatcttctaaagcttcaactcggagtaatgccactagaagtgctggtcagagctctagctcagaccctcacgggaaacgacatatgagttattgaagtacataaaatctggtcataggtgattgtaaatagcgagctgcatatataatatttgtttcataatttatttaattttgcttttgaaaagtaaattaatttatttttttgactgcagtagtgatttagttttgtagtatgatttgttatattagcggaaaaaaattatgattcatttgttacatttgtatattagaataatcacttgtagtccc

SEQ ID NO: 105634 - protein, 425 aa, Arabidopsis thaliana
  peptide (1)..(425): Ceres Seq. ID no. 13617611
MVTKNSHKSNLGMTKSMNFFQNIIKPFKRSSNRGLEDDIERIAAMEQKVFPFQVLVSATKDFHPTHKLGEGGFGPVFKGRLPDGRDIAVKKLSQVSRQGKNEFVNEAKLLAKVQHRNVVNLWGYCTHGDDKLLVYEYVVNESLDKVLFKSNRKSEIDWKQRFEIITGIARGLLYLHEDAPNCIIHRDIKAGNILLDEKWVPKIADFGMARLYQEDVTHVNTRVAGTNGYMAPEYVMHGVLSVKADVFSFGVLVLELVSGQKNSSFSMRHPDQTLLEWAFKLYKKGRTMEILDQDIAASADPDQVKLCVQIGLLCVQGDPHQRPSMRRVSLLLSRKPGHLEEPDHPGVPGSRYRRRTQRPSGAASLGTLSTTGSSTDSFGSNLNTNTGTGVRGTPASSKASTRSNATRSAGQSSSSDPHGKRHMSY

SEQ ID NO: 105635 - protein, 413 aa, Arabidopsis thaliana
  peptide (1)..(413): Ceres Seq. ID no. 13617612
MTKSMNFFQNIIKPFKRSSNRGLEDDIERIAAMEQKVFPFQVLVSATKDFHPTHKLGEGGFGPVFKGRLPDGRDIAVKKLSQVSRQGKNEFVNEAKLLAKVQHRNVVNLWGYCTHGDDKLLVYEYVVNESLDKVLFKSNRKSEIDWKQRFEIITGIARGLLYLHEDAPNCIIHRDIKAGNILLDEKWVPKIADFGMARLYQEDVTHVNTRVAGTNGYMAPEYVMHGVLSVKADVFSFGVLVLELVSGQKNSSFSMRHPDQTLLEWAFKLYKKGRTMEILDQDIAASADPDQVKLCVQIGLLCVQGDPHQRPSMRRVSLLLSRKPGHLEEPDHPGVPGSRYRRRTQRPSGAASLGTLSTTGSSTDSFGSNLNTNTGTGVRGTPASSKASTRSNATRSAGQSSSSDPHGKRHMSY

SEQ ID NO: 105636 - protein, 409 aa, Arabidopsis thaliana
  peptide (1)..(409): Ceres Seq. ID no. 13617613
MNFFQNIIKPFKRSSNRGLEDDIERIAAMEQKVFPFQVLVSATKDFHPTHKLGEGGFGPVFKGRLPDGRDIAVKKLSQVSRQGKNEFVNEAKLLAKVQHRNVVNLWGYCTHGDDKLLVYEYVVNESLDKVLFKSNRKSEIDWKQRFEIITGIARGLLYLHEDAPNCIIHRDIKAGNILLDEKWVPKIADFGMARLYQEDVTHVNTRVAGTNGYMAPEYVMHGVLSVKADVFSFGVLVLELVSGQKNSSFSMRHPDQTLLEWAFKLYKKGRTMEILDQDIAASADPDQVKLCVQIGLLCVQGDPHQRPSMRRVSLLLSRKPGHLEEPDHPGVPGSRYRRRTQRPSGAASLGTLSTTGSSTDSFGSNLNTNTGTGVRGTPASSKASTRSNATRSAGQSSSSDPHGKRHMSY

SEQ ID NO: 105637 - DNA, 1700 bp, Arabidopsis thaliana
  misc_feature (1)..(1700): Ceres Seq. ID no. 13617632
  misc_feature (1)..(1700): Ortholog of  Ceres SEQ ID NO 14312069 as cited in SEQ ID NO 59191
acttcaaacctcaaaagcaatttagctctctgtcttcaagatgacttctcttttcttctttgttctccttttctcgtctcttctcataagcaatggcgatgccaacccaaattacaaagaagctctctccaagtcattgctcttcttccaaggtcagcgatctggtcctcttcctagaggccaacaaatttcctggagggctagctctggcctttccgatggctctgctgctcatgtggacttaaccggcgggtactatgacgcaggagacaacgtcaagttcaatttaccaatggcgtttaccaccacaatgctctcatggagcgcactggaatacggtaaacggatgggtcctgagctggaaaatgcacgtgtgaacatccgttgggccacagattatctgctgaaatgtgccagagccacgccggggaagctttatgtcggtgtaggagatcctaatgttgatcacaaatgctgggaacggcctgaagacatggacacaccacgtacagtttactctgtatccgcttccaatcctggttctgatgtcgcagctgaaacagcagcagctctagctgcagcttctatggttttcagaaaagttgattccaagtattcacgtttgctgctcgcaacagctaaggatgtgatgcagtttgccattcagtaccagggagcttacagtgattccctttcctcatctgtctgtcctttctactgctcctactctggttacaaggacgagctaatgtggggtgcgtcatggctgctaagagcaacgaataacccgtattacgcaaacttcataaaatctttaggaggtggagatcagcctgacatcttcagctgggacaataaatatgctggtgcctatgttcttctctcacggagagcattacttaacaaagacagcaactttgaacaatataagcaagcagctgagaatttcatctgcaaaatccttccagattctccttcttcctctacccaatacactcaaggaggattaatgtacaagctacctcaaagcaatcttcagtacgtaacctccataacattcttgctcacaacttacgccaaatacatgaaagccacaaaacacacattcaattgcggaagctccgttatcgtccccaacgccttgataagcctatcgaagcgacaagttgattacatactcggagataacccaatcaaaatgtcatacatggttggattctcttccaatttccctaagagaatccaccacagagcatcttctcttccttcacacgcacttcgttctcaatcgttaggctgcaatggtggattccaatcgttctacactcaaaaccctaaccctaacattctcaccggagcaatcgtaggaggtccgaatcaaaacgatgggtatccagatcagagagacgattatagtcacgcggaaccggcgacttatataaacgccgccttcgtcggacctttggcgtacttcgccgccggccgttcgacttgaaattgaattcgccaccgccacattctccgatttgtagttccattgttagttaaagatccgttggtccaagcctaacgtgaaaatcagaagggacaaagttatttaaatgtaaaactcttaatgggctaagacccaatactaaaggacccgacggaaatatttctcgtggtcttatttaactctaaccatcatcattacgcgtttc

SEQ ID NO: 105638 - protein, 484 aa, Arabidopsis thaliana
  peptide (1)..(484): Ceres Seq. ID no. 13617633
MTSLFFFVLLFSSLLISNGDANPNYKEALSKSLLFFQGQRSGPLPRGQQISWRASSGLSDGSAAHVDLTGGYYDAGDNVKFNLPMAFTTTMLSWSALEYGKRMGPELENARVNIRWATDYLLKCARATPGKLYVGVGDPNVDHKCWERPEDMDTPRTVYSVSASNPGSDVAAETAAALAAASMVFRKVDSKYSRLLLATAKDVMQFAIQYQGAYSDSLSSSVCPFYCSYSGYKDELMWGASWLLRATNNPYYANFIKSLGGGDQPDIFSWDNKYAGAYVLLSRRALLNKDSNFEQYKQAAENFICKILPDSPSSSTQYTQGGLMYKLPQSNLQYVTSITFLLTTYAKYMKATKHTFNCGSSVIVPNALISLSKRQVDYILGDNPIKMSYMVGFSSNFPKRIHHRASSLPSHALRSQSLGCNGGFQSFYTQNPNPNILTGAIVGGPNQNDGYPDQRDDYSHAEPATYINAAFVGPLAYFAAGRST

SEQ ID NO: 105639 - protein, 400 aa, Arabidopsis thaliana
  peptide (1)..(400): Ceres Seq. ID no. 13617634
MAFTTTMLSWSALEYGKRMGPELENARVNIRWATDYLLKCARATPGKLYVGVGDPNVDHKCWERPEDMDTPRTVYSVSASNPGSDVAAETAAALAAASMVFRKVDSKYSRLLLATAKDVMQFAIQYQGAYSDSLSSSVCPFYCSYSGYKDELMWGASWLLRATNNPYYANFIKSLGGGDQPDIFSWDNKYAGAYVLLSRRALLNKDSNFEQYKQAAENFICKILPDSPSSSTQYTQGGLMYKLPQSNLQYVTSITFLLTTYAKYMKATKHTFNCGSSVIVPNALISLSKRQVDYILGDNPIKMSYMVGFSSNFPKRIHHRASSLPSHALRSQSLGCNGGFQSFYTQNPNPNILTGAIVGGPNQNDGYPDQRDDYSHAEPATYINAAFVGPLAYFAAGRST

SEQ ID NO: 105640 - protein, 394 aa, Arabidopsis thaliana
  peptide (1)..(394): Ceres Seq. ID no. 13617635
MLSWSALEYGKRMGPELENARVNIRWATDYLLKCARATPGKLYVGVGDPNVDHKCWERPEDMDTPRTVYSVSASNPGSDVAAETAAALAAASMVFRKVDSKYSRLLLATAKDVMQFAIQYQGAYSDSLSSSVCPFYCSYSGYKDELMWGASWLLRATNNPYYANFIKSLGGGDQPDIFSWDNKYAGAYVLLSRRALLNKDSNFEQYKQAAENFICKILPDSPSSSTQYTQGGLMYKLPQSNLQYVTSITFLLTTYAKYMKATKHTFNCGSSVIVPNALISLSKRQVDYILGDNPIKMSYMVGFSSNFPKRIHHRASSLPSHALRSQSLGCNGGFQSFYTQNPNPNILTGAIVGGPNQNDGYPDQRDDYSHAEPATYINAAFVGPLAYFAAGRST

SEQ ID NO: 105641 - DNA, 736 bp, Arabidopsis thaliana
  misc_feature (1)..(736): Ceres Seq. ID no. 13617674
  misc_feature (1)..(736): Ortholog of  Ceres SEQ ID NO 12617704 as cited in SEQ ID NO 65314
gcttagctaatgttgacgactcttcgatctcgttgttcgtctcttcttctaaatcaatcatggaagctagctcccaatcgcatcttcgcttcctctccctctttttcttcatccgccgggatctctaatgtctcagagattctcacacttcccgaagtggagaagattctcgccgacgtgaaagctgataacgtgactgtgattcctacacataatcattgtttctgggctgatttcactgtcatcgccaccggtagatccgattggcacttaagaaacatcgctcaagctttagtttatagggccaagcaaaagcagaaaggagctaaacatgtaatgttaccttctgtgcaagggtacaatagcaagtggattgtcatagactacggaaagtttgtagtccatgcacttgatgagaaagccagaggttatttcaatttggaaagcctttggtctgctgaatcctctggtactgatacttcagatcaggatctccaaaacgtttttgtaaaggtccgaccaaagaacaattcgaaaaggaaaccggctaaagtgagttcttgatcctgtccgatggatacaatttctcataaacttctcgagtctagacgagttaagaataggaggattttaaagcctattaagtatttatctccttaatatttttttttttggtaagttttatctccttaatatttgtagtcatctatctattttttccttaatatctttgctt

SEQ ID NO: 105642 - protein, 184 aa, Arabidopsis thaliana
  peptide (1)..(184): Ceres Seq. ID no. 13617675
MLTTLRSRCSSLLLNQSWKLAPNRIFASSPSFSSSAGISNVSEILTLPEVEKILADVKADNVTVIPTHNHCFWADFTVIATGRSDWHLRNIAQALVYRAKQKQKGAKHVMLPSVQGYNSKWIVIDYGKFVVHALDEKARGYFNLESLWSAESSGTDTSDQDLQNVFVKVRPKNNSKRKPAKVSS

SEQ ID NO: 105643 - DNA, 1220 bp, Arabidopsis thaliana
  misc_feature (1)..(1220): Ceres Seq. ID no. 13617676
  misc_feature (1)..(1220): Ortholog of  Ceres SEQ ID NO 15180785 as cited in SEQ ID NO 0
atgaggctagttcaagtatcttccactgaatccatttcttctatttccgcttcctcggcccggaatggtggagttctctacttgaagcgtggttctgtctgtgtatgtagagtcttgaagccgaataaagttgctctcaacagtatgattctttcagctatgaggacttgctcaatctctgggttccatactcatcttccgaagtcaagcggttcagtttcttcgagaaagaggttttcttctactgctttatcactcatcactcaaaccatttcaccatttgctcatccccgttcatcagtaattgtgtcaagccttctctccccatctgatatccctcagaaatctgaagaatggtttgctttaaggaaagacaagttaaccacaagtacattcagtacagcgctggggttttggaaaggaaaccggcgtgccgagctctggcatgaaaaggtttatgattcagatgcacgagttgttgaggagtctgcacggtttgctatgaactggggtgtacaaatggaatcatctgcgatagaaaggtacaaaagaataatgggttgtgaggttggaacaatgggatttgctattcactccaatgaggaatttcactggcttggcgcttcaccggatggaatcctcgattgctttggtattctagaagtgaaatgtccatataacaaagggaaaaccgaaactgtattaccctggaaaaaagtgccctactattacatgcctcagctgcagggtcaaatggagataatggaccgggaatgggtcaacttatactgctggacacgaaatggaagcacggttttccgtgtgatgagagaccgaagctattggagaatcatacatgatgtattaagggagttctggtgggagagtgtgattcctgcaagggaggctttgttgttagggaaagaggatgaggaggtgaaaaagtatgagccaacatctacgcataaacgaaccaagcttgccatagctaaaagcctaaatttggctgcggaatcaaaactagtatgcagagaaattgctgatcatgtcgagttcttttagatgaaataggagaatgatgattcatcttattagatcacgcattgttgtacttatgaaactggttaaatgatgtaacactctttaatcagatttcactctttggagtttagtggttttctatcgtctgtaaattaattggatgtgaaatgattttcatt

SEQ ID NO: 105644 - protein, 353 aa, Arabidopsis thaliana
  peptide (1)..(353): Ceres Seq. ID no. 13617677
MRLVQVSSTESISSISASSARNGGVLYLKRGSVCVCRVLKPNKVALNSMILSAMRTCSISGFHTHLPKSSGSVSSRKRFSSTALSLITQTISPFAHPRSSVIVSSLLSPSDIPQKSEEWFALRKDKLTTSTFSTALGFWKGNRRAELWHEKVYDSDARVVEESARFAMNWGVQMESSAIERYKRIMGCEVGTMGFAIHSNEEFHWLGASPDGILDCFGILEVKCPYNKGKTETVLPWKKVPYYYMPQLQGQMEIMDREWVNLYCWTRNGSTVFRVMRDRSYWRIIHDVLREFWWESVIPAREALLLGKEDEEVKKYEPTSTHKRTKLAIAKSLNLAAESKLVCREIADHVEFF

SEQ ID NO: 105645 - protein, 305 aa, Arabidopsis thaliana; identical to SEQ ID NO: 73191
  peptide (1)..(305): Ceres Seq. ID no. 13617678

SEQ ID NO: 105646 - protein, 300 aa, Arabidopsis thaliana
  peptide (1)..(300): Ceres Seq. ID no. 13617679
MRTCSISGFHTHLPKSSGSVSSRKRFSSTALSLITQTISPFAHPRSSVIVSSLLSPSDIPQKSEEWFALRKDKLTTSTFSTALGFWKGNRRAELWHEKVYDSDARVVEESARFAMNWGVQMESSAIERYKRIMGCEVGTMGFAIHSNEEFHWLGASPDGILDCFGILEVKCPYNKGKTETVLPWKKVPYYYMPQLQGQMEIMDREWVNLYCWTRNGSTVFRVMRDRSYWRIIHDVLREFWWESVIPAREALLLGKEDEEVKKYEPTSTHKRTKLAIAKSLNLAAESKLVCREIADHVEFF

SEQ ID NO: 105647 - DNA, 1374 bp, Arabidopsis thaliana
  misc_feature (1)..(1374): Ceres Seq. ID no. 13617680
  misc_feature (1)..(1374): Ortholog of  Ceres SEQ ID NO 14302008 as cited in SEQ ID NO 56021
aacacaaagacaataaaattaatcaaaaataaacaaaggagagagacagaagaaacagagagagtagttaattccggtggttttctgctcatctacttctatccaccttcgtcccttccgccccaaaattcaattctctcttcctttctctctctttctccttaaaaactctaactttactcatctcatctccaaagtctcaacctttcttctctaatggagatctgcacttacttcaaatcacaacccacttggctcctcattctcttcgttctggggtcaatctcaatcttcaaattcatcttcaccctcctcagatctttctacatctacttcctccgaccatccaaaaacctccgccgatacggttcatgggcaatcatcaccggaccaacagacggaatcggtaaagctttcgcctttcagttagcccagaaaggtcttaaccttatactcgttgctcgtaacccagacaagctcaaagatgtctctgattccatcagatctaagtatagtcaaactcagatcttgaccgttgtgatggatttctctggagatattgatgaaggtgtgaaacggattaaggagagtattgaaggattagatgttgggattttgattaataatgctggcatgtcttatccttatgctaagtattttcatgaggttgatgaagagttgatcaataacttgattaagatcaatgttgaaggaactactaaagttactcaagctgtgttgcctaatatgcttaagaggaagaaaggtgctattattaatatgggttctggtgctgctgctcttattccttcttatcctttttactctgtttatgctggtgctaaaacgtacgtggatcagttcacaaagtgtctacatgttgagtataagaagagtgggattgatgttcaatgccaggttcccttgtatgttgcaacaaagatgacaaaaataagaagagcatccttcttagttgcatcaccagagggttacgcaaaggcagcactgcgttttgtaggctatgaagcacaatgcacaccgtactggcctcacgctctcatgggtgcagttgtctctgcattgcccgaaagcgtttttgaatcatttaacatcaagagatgcctccagatccggaagaagggtctccaaaaagactccatgaagaaagaatgaatcttccaggtttaagttactaccaagaatttccttcttctgaagttgttggtttcttgaaaagcttctgttctgaatcttttgtaagacttgtactctttagttttctaagttttttatattttaagattaaaaaccctaacgtacacgaataatttacttcctctgtttctatttattaatttaagcagtgttgtattg

SEQ ID NO: 105648 - protein, 318 aa, Arabidopsis thaliana
  peptide (1)..(318): Ceres Seq. ID no. 13617681
MEICTYFKSQPTWLLILFVLGSISIFKFIFTLLRSFYIYFLRPSKNLRRYGSWAIITGPTDGIGKAFAFQLAQKGLNLILVARNPDKLKDVSDSIRSKYSQTQILTVVMDFSGDIDEGVKRIKESIEGLDVGILINNAGMSYPYAKYFHEVDEELINNLIKINVEGTTKVTQAVLPNMLKRKKGAIINMGSGAAALIPSYPFYSVYAGAKTYVDQFTKCLHVEYKKSGIDVQCQVPLYVATKMTKIRRASFLVASPEGYAKAALRFVGYEAQCTPYWPHALMGAVVSALPESVFESFNIKRCLQIRKKGLQKDSMKKE

SEQ ID NO: 105649 - protein, 210 aa, Arabidopsis thaliana; identical to SEQ ID NO: 76409
  peptide (1)..(210): Ceres Seq. ID no. 13617682

SEQ ID NO: 105650 - protein, 179 aa, Arabidopsis thaliana; identical to SEQ ID NO: 76410
  peptide (1)..(179): Ceres Seq. ID no. 13617683

SEQ ID NO: 105651 - DNA, 1151 bp, Arabidopsis thaliana
  misc_feature (1)..(1151): Ceres Seq. ID no. 13617694
  misc_feature (1)..(1151): Ortholog of  Ceres SEQ ID NO 15224330 as cited in SEQ ID NO 58808
gagtgagagagagagagagagagaagatgggggttgatttctataaggttcttgaagttgatcgaagtgctaatgacgacgagcttaagaaagcttatcgcaaactcgccatgaaatggcatcctgataagaaccctaacaacaaaaaagaagccgaagctaaattcaagcagatctctgaagcttacgatgttttgagtgatcctcagaaacgagcaatctacgagcaatacggagaagaaggtttaaaccaagccccacctcccggcgccggtggtggctatcctggaggatcagacgccggagcttctttccggttcaatcccagaagcgctgatgatatcttctccgagttctttggtttcacgaggccttcttttggtacgggaagcgactcacgcgcaggaccttctggctttaggtatggcgatgatatcttcgcttccttcagggctgctactaccggaggagaagcctccattccttctaggaaatctgctcctattgagagacaattgccttgtagcttggaggatttgtataaaggtgtctccaagaagatgaagatctctcgtgatgttcttgactcttccgggaggccaacaccggttgaggagatcttgacgatagaaattaaacccggttggaaaaaaggaacaaagataaccttcctggaaaaaggtaatgagcatcgtggagtcataccatccgatctcgttttcatcgtagacgagaaaccgcatcccgttttcaaacgagacgggaatgatcttgtggtaatgcaaaagatttctctagtggatgctctcacaggttacaccgcacaggtcactactcttgacggaagaaccttaacagttccggtaaacaatgtgatcagtccgtcgtacgaagaggtggtgaaaggagaaggcatgccgatccctaaagatccgtcaagaaaaggaaacttgagaatcagattcatcatcaagttcccttcgaagctaaccactgagcagaaatcagggatcaagcggatgttatcaccttgaatgtccaaagattgaagcatctcgtttcagttttttcaatctgctagcttttttggaatcttttagaagcagaatatgtgcttatggtttttttaatttattttggttgcattttgg

SEQ ID NO: 105652 - protein, 343 aa, Arabidopsis thaliana; identical to SEQ ID NO: 40486
  peptide (1)..(343): Ceres Seq. ID no. 13617695

SEQ ID NO: 105653 - protein, 335 aa, Arabidopsis thaliana; identical to SEQ ID NO: 40487
  peptide (1)..(335): Ceres Seq. ID no. 13617696

SEQ ID NO: 105654 - protein, 307 aa, Arabidopsis thaliana; identical to SEQ ID NO: 40488
  peptide (1)..(307): Ceres Seq. ID no. 13617697

SEQ ID NO: 105655 - DNA, 1295 bp, Arabidopsis thaliana
  misc_feature (1)..(1295): Ceres Seq. ID no. 13617698
  misc_feature (1)..(1295): Ortholog of  Ceres SEQ ID NO 13656147 as cited in SEQ ID NO 64422
  misc_feature (1)..(1295): Ortholog of  Ceres SEQ ID NO 13596496 as cited in SEQ ID NO 68639
tcactataaagccgatccatagataaacgaggaccggccagaaatcgcttcaccattcccaaatctctcttccattttctccacacaaatttctcttcaatctccgataatggaaggaaccggcgttgtggcggtgtacggtaacggtgcgataacggaggcgaagaaatctcccttctccgtgaaggtcggtttggctcagatgctccgtggtggtgttatcatggatgtcgtcaacgccgagcaagctcgtatcgccgaggaggctggtgcttgcgccgtcatggctttggagcgtgttcctgctgatatccgcgctcaaggaggcgtcgctcgtatgagcgatccacaaatgattaaagaaatcaaacaagccgttacgattccggtgatggctaaggctaggattggtcatttcgttgaagctcagatccttgaagcaattggaatcgattacatcgatgagagcgaggttttgactcttgctgatgaagatcatcacatcaacaagcataatttccggatcccgttcgtttgcggttgccggaatctcggcgaggctctgaggaggatccgtgaaggtgcggcgatgattaggaccaaaggtgaagctggaaccggtaacattattgaagctgtgaggcatgtgaggtctgttaatggtgacattagggttttgcgaaacatggatgatgatgaggttttcactttcgctaagaaattagccgctccgtacgatctcgtgatgcagactaagcagcttggtcgtcttcctgtagtccaattcgccgccggtggagtggctactccggctgatgcagctctcatgatgcagcttggatgtgatggtgtctttgttggttctggtatcttcaagagcggtgacccagctcgtcgtgcacgtgccattgttcaggctgtgactcattacagtgaccctgagatgcttgtggaggtgagctgtgggcttggagaagccatggttgggatcaatctcaacgatgagaaggttgagaggttcgctaatcgctccgagtgatcaaagaaataaaaggtaaaatatctcagacgaaatggtttcagaattttctcagaccattttgcagtaatctctttgaaaagaagaagatgatgatattgttggtagtttgtatcctttgtgttttccttataatctttgatagtcttttgttattgtaactcgtaatccctttgcaagaacaagtttgtcagttataataatgtactactctcttgatcgatcagttggttttgaatctgatatattcttcgat

SEQ ID NO: 105656 - protein, 309 aa, Arabidopsis thaliana; identical to SEQ ID NO: 28173
  peptide (1)..(309): Ceres Seq. ID no. 13617699

SEQ ID NO: 105657 - protein, 278 aa, Arabidopsis thaliana; identical to SEQ ID NO: 28174
  peptide (1)..(278): Ceres Seq. ID no. 13617700

SEQ ID NO: 105658 - protein, 271 aa, Arabidopsis thaliana; identical to SEQ ID NO: 28175
  peptide (1)..(271): Ceres Seq. ID no. 13617701

SEQ ID NO: 105659 - DNA, 1635 bp, Arabidopsis thaliana
  misc_feature (1)..(1635): Ceres Seq. ID no. 13617708
  misc_feature (1)..(1635): Ortholog of  Ceres SEQ ID NO 13659033 as cited in SEQ ID NO 66372
  misc_feature (1)..(1635): Ortholog of  Ceres SEQ ID NO 13655724 as cited in SEQ ID NO 68973
  misc_feature (1)..(1635): Ortholog of  Ceres SEQ ID NO 12625899 as cited in SEQ ID NO 69079
agggatgcaatagagccaagaggaggagaaagatgggatctggtaaacaaaacacgtcaaagtcaaattacaaatttatattttataaaacagataacaacaacaaattaaacttttattaatctctctctgcctctactcactggatcatcatagctccaaacttgtaccagtcgcatcaaagcaagttttggtgaagaagaagagacgaggtcttcctcttactgtggtggtgacattttctctaaaaagaaagtctccgatatgtcgcagagatggagtagaaagaagagtagacttccattagcgggtctcctctttattctcgttgtcacctttatgattctcttcaacgagcgtagcattcagcagatccatcaccacgccgcgagtcacactcaaaatctccgagaaccttccacgttcgatttcgtcaagcctaatgttcctcggattaactacttgggagctcatgaggttttggatagattcagcaaatgcaactcgacgaaagagtacagtgggaagaaaatcggatgggttgacccgtttgaagaccacccgggtcaagtaacaaaggaggagcagaaatgtgatgtcttttctgggaaatgggtctttgataattcatcatcataccctttacacaaggaatctcagtgtccttacatgtccgaccagttggcttgtcagaagcatggtaggaaggatttggagtatcagcattggagatggcaacctcatgcctgcaacttgaagagatggaatgcgatagaaatgtgggagaagctgagaggaaagagattgatgtttgttggagactcgttaaacagaggccaatggatttcaatggtttgtctcttacagtctgtcattccacgtgacaagcagtctatgtctcctaacgctcacctcaccattttcagggctgaggactacaatgccacagtggagtttctctgggcaccgttgctcgtggagtcgaattctgatgaccctgttaatcacagattgagcgagcggattatccgacccgattctgttcttaaacatgcatcaaagtggcaacatgctgatattctaatcttcaacacctacttatggtggagacaagactctgtcaagctccgatggagcagtgaagaaaaagggtcatgcgaggaggtgaagagcgccgagggaatggagatggcaatggatagttggggtgattgggttgctaacaatgtcgatccaaacaaaaagcgagttttcttcgttacaatgtctcctacacatcaatggagccgagaatggaacccgggaagcgaaggaaactgctacggggagaagaaaccaatagaggaagagagttattggggaagtgggtcggacattccgacaatgaggatggtgaagagagttttggagagattgggaccaaaggtctcagttataaacatcactcagttgtctgagtatcgaaaagatggtcatccatcggtgtaccggaaattctgggaacctctaaatgaagaccggttgaaaaacccggcatcgtattctgactgtactcattggtgtgtacctggagttcctgatgtctggaatcaattgcttttccattttttgtgaaaatgaaatgaatataacctt

SEQ ID NO: 105660 - protein, 449 aa, Arabidopsis thaliana; identical to SEQ ID NO: 38720
  peptide (1)..(449): Ceres Seq. ID no. 13617709

SEQ ID NO: 105661 - protein, 424 aa, Arabidopsis thaliana; identical to SEQ ID NO: 38721
  peptide (1)..(424): Ceres Seq. ID no. 13617710

SEQ ID NO: 105662 - protein, 314 aa, Arabidopsis thaliana; identical to SEQ ID NO: 38722
  peptide (1)..(314): Ceres Seq. ID no. 13617711

SEQ ID NO: 105663 - DNA, 2115 bp, Arabidopsis thaliana
  misc_feature (1)..(2115): Ceres Seq. ID no. 13617712
  misc_feature (1)..(2115): Ortholog of  Ceres SEQ ID NO 14315473 as cited in SEQ ID NO 57173
ctcttttccgattcctctcaatctctctttcttcttctttttctctcgctccaaattccatgtctgtgtctctttcctcctccgccgtataattcgccggaaaaattatctccctttgattttcgaacacctccgcgaactatgcgcttcttttgcccttatcctccaactacttgtcggatctgcaattcttcttgtcaattcccaaccctaatcggagctaatcacacctctgctcgtttctcttctcgttagtctctgctccatctcctcctcagatttagggatatttgcttccaatttaacaaacaaaccaagagctattctttcgttctttattctctccgtcttgtaaagtagttttagcagtgagatacatacaaatggagacttccatggggaaacccagcttcttacggaatataatggttcgcgtgcttctctttggtgttcttatcatcgttgtgagatttgcttatgttgtcaccatcaccggtgaatcatgcaatcgcggcgacttctgcttcttctctctccctgagaatctcaactttgtcatctccggtgctgcctccggctcttctgctatcgacgccatcagatctacttcccctggggatgatctctacaccaccagggattggatcaaatccgttcagttttactcctccatcttccaggatctgatcgccgacggttatctatcgcctgaatcgaagacgctttgtgtagagacggcgattggacaagaggttcactcgctcagagagattggggtgaagaactccgtcgggatctctaagaaagcttctaggccgttggtggttagaggcgagggacatgctattccctttgaggataacgctttcgattttgtattctccggtggtgaccgccttgggaagtcgttgaagcagttggaattcgccgatgagattactcgaacactgaaacccgaagggtttgcggtggttcatgttggggctacagatacgtacagtttcaattcattccttgatttgtttaattcttgcagattggtgaagatgcgtgatatcgatggttttgatccttcgatgcctcatatcagagaatttgttattcagaaatactcagagattgatggtggtggtcatcaccaccgtggtggtggtgattctggtggaaagtgctggattccgggttacaaaagagatttgattcgggatgcagagccactgattcaagaggagcctcttaagccatggattacacttaagaggaacatcaagaatattaaatatgtgccttctatggttgatatacgtttcaagagtagatacgtttacgttgatgttggtgctagaagttatggatccagtattgggagttggttcaagaaagagtaccctaagcagaacaaaacttttgatgttttcgccattgaggctgacaaagcctttcacgaagagtataagataaagaagaaggtgaacctgttgccatacgcagcgtgggtgaggaacgagacgttatcgtttgagatcaatcacgatccgggaaaggaagtggaagccaaagcaaagggcagggggatgggcagaatccagccggttaaaaagtctgactcgagtgacttagctggagaggtgaatttgattcaagggtttgatttcgctgactggttgaagaagagtgtgagagagagggactttgttgtgatgaagatggatgttgaaggaaccgaattcgatctgatcccgaggctaatcaagacaggagcgatttgtctaatagatgagttgttccttgaatgccattacaacaggtggcagagatgttgtcctggtcaaaggagccaaaagtacaacaagacttataaccaatgcttagagctcttcaattcgctcagacaaagaggggtgcttgtccatcaatggtggtaatggttaggatgctgcataaaagtctccttcttctatgcatttggtgaaaaatgtactttcttcttctagaatatataaagcgggatattgtaggtttctattaaaaatacgttgtctgtgctgaaattcccttttactgtaagaaaaaagaagtttagctttaaatggaaatttgagtttcttttacgct

SEQ ID NO: 105664 - protein, 513 aa, Arabidopsis thaliana; identical to SEQ ID NO: 42328
  peptide (1)..(513): Ceres Seq. ID no. 13617713

SEQ ID NO: 105665 - protein, 509 aa, Arabidopsis thaliana; identical to SEQ ID NO: 42329
  peptide (1)..(509): Ceres Seq. ID no. 13617714

SEQ ID NO: 105666 - protein, 499 aa, Arabidopsis thaliana; identical to SEQ ID NO: 42330
  peptide (1)..(499): Ceres Seq. ID no. 13617715

SEQ ID NO: 105667 - DNA, 1728 bp, Arabidopsis thaliana
  misc_feature (1)..(1728): Ceres Seq. ID no. 13617720
  misc_feature (1)..(1728): Ortholog of  Ceres SEQ ID NO 13599900 as cited in SEQ ID NO 531
  misc_feature (1)..(1728): Ortholog of  Ceres SEQ ID NO 13596509 as cited in SEQ ID NO 62004
  misc_feature (1)..(1728): Ortholog of  Ceres SEQ ID NO 13659971 as cited in SEQ ID NO 67565
  misc_feature (1)..(1728): Ortholog of  Ceres SEQ ID NO 13500385 as cited in SEQ ID NO 67583
attttctctcaattcctcgcagctgaagctatttggcatatacttgtcttcgcttttcgtagctctttcgcgcataataataactgaggttgttgtttaatcaagaagagtgtgcaaaaattggaaggccagggaatgcagaaacatgtatttgaaagctgaactcaattgctctacaccaccctctcagatcctttgtccctttgggcccttgttctccctcatcccttatgtggacacccattttctaaacccctgcttccacaccttccagccttcctctcacaatgctagaaaaaacgccacttggaagcatgatctttgcgaagacggttgatccgacactaacagcctcctcctgagttcctcctctaccctttatgttgtctgcgttttagtatattctagggtggtctttttatttagtggtattagtagtgctctaagctaaccagttagtcaatggagaagaaaggatctgtgttgatgctccgttatgaggttgggaagtttctcggtcaaggtacctttgctaaggtataccatgctaggcatttgaaaactggtgatagtgtagcgattaaggtcatcgacaaagaaagaatcctcaaagttggcatgaccgagcagattaagcgagagatctctgccatgagactcttgaggcatcccaacatcgttgagctccatgaagtcatggccaccaaatctaaaatctacttcgtcatggaacatgttaagggtggtgagctcttcaacaaagtgtcaactgggaagctgagagaagacgttgcgagaaagtactttcagcagcttgtacgcgctgttgacttctgtcacagccgtggagtatgccacagggacctgaagccggagaatctcttgttggatgagcatgggaatcttaagatctctgattttggtctcagcgctctttctgactctagaaggcaagacgggttgctgcatactacatgcgggacccctgcatatgttgcaccggaggtgataagcaggaacgggtatgatgggtttaaagcggatgtgtggtcctgtggagtgatattgttcgtcttgctcgctggatatcttcctttccgtgattccaatctgatggagctgtataagaagataggcaaagctgaagtcaagttccccaactggcttgctccgggggcaaagagattgctcaagaggatcttggatcctaaccccaacacaagggtatcaactgagaaaataatgaagagctcttggttccgtaaaggcctacaagaggaggtgaaagaatcagttgaggaagagacagaagtggacgcagaggcagagggaaacgcaagtgcagagaaggaaaagaagcggtgtatcaacctgaacgcgtttgagatcatatctctgtccacggggtttgatctctcgggactgttcgagaagggagaggagaaggaggagatgaggtttacatcaaacagagaggcatctgagataacagagaagctggtggagattgggaaggaccttaagatgaaagtgaggaagaaggaacacgaatggagggtgaaaatgtcggctgaggctacagtggtggaagcggaagtgtttgagattgcgccgagctatcacatggtggtgctaaagaagagcggtggagatactgctgagtataagagagtcatgaaggagagtataagaccggctttgatcgactttgtattagcttggcactga

SEQ ID NO: 105668 - protein, 421 aa, Arabidopsis thaliana; identical to SEQ ID NO: 85000
  peptide (1)..(421): Ceres Seq. ID no. 13617721

SEQ ID NO: 105669 - protein, 413 aa, Arabidopsis thaliana; identical to SEQ ID NO: 85001
  peptide (1)..(413): Ceres Seq. ID no. 13617722

SEQ ID NO: 105670 - protein, 369 aa, Arabidopsis thaliana; identical to SEQ ID NO: 85002
  peptide (1)..(369): Ceres Seq. ID no. 13617723

SEQ ID NO: 105671 - DNA, 1217 bp, Arabidopsis thaliana
  misc_feature (1)..(1217): Ceres Seq. ID no. 13617736
  misc_feature (1)..(1217): Ortholog of  Ceres SEQ ID NO 13598427 as cited in SEQ ID NO 60899
gaaaaccagactaaagggcagaaacgtcatttgacaaaaagaaggatgattctctccttcctctttccccaatgcaaagaaaaagcattatagacttttcaagttttccgatataagcacgaaatcgctgtttctctcttcgacgaagctttgataatttgatctcaatcgatcgattctattgagaatttgtgtacctgttttcttataaggttaactaaggattgtggaatcagaagtgttgtgtttttgtgatcggagattatggattggggaaacgtaacggttgatgatctcttcgatgctctccgagaagttgactggtcgtctccgccgcgtcctccgtctgagttcttctcaaggttcaccgttcctaaatctgtccctaaatgggatagtcgcctcaagtgcaatctctactactaccgaacaaactatttcatcatgatcgtcgttatacttggattgggagtccttacaaggcctttagcgatcttcgctgcgcttttgacagcattaagtttggcatttctaaatgacagctttgcaggttcttttagtgagaaggcgacacgaaccgtcagaagattctctccacagttagctgctaaaatgagacctcctttgacacctgtcactcgtgggcgtccatcatcaaagagagcaatccatgtatgtggtcaaccccgttgggtttttgtcttgacatgctcacttgtgagttttgctctttggtatatttcctctggtttgctcagagtctcggttgcgctactcattgcacatcttgcaacaattcttcatgcaagcttgagaacaccgaacttgaaggcacgttttaacacatttagggaggaattccgagcagtatggcgtaactacagcgagatttagagtaattctttggcagcttgtaccaccatgatcgtgttctgctgaggacataacgctgtaaagaccaaacttactgcctttctccaagataaacccggtttcgttaacactgtactatggatgttcaatctggatttgttgctcaatgactgggatcatctgttttttctttgatttgagatttgagctctgagctctttttgctagcaaaatcctctcttttttttgctaaagacttgtaaagctagctttgttgttcttcgttctaacacaaaaccctttgtgtaaagtcctagaatcgtttaatagcttgcatttttttc

SEQ ID NO: 105672 - protein, 209 aa, Arabidopsis thaliana; identical to SEQ ID NO: 30712
  peptide (1)..(209): Ceres Seq. ID no. 13617737

SEQ ID NO: 105673 - protein, 149 aa, Arabidopsis thaliana; identical to SEQ ID NO: 30713
  peptide (1)..(149): Ceres Seq. ID no. 13617738

SEQ ID NO: 105674 - DNA, 2007 bp, Arabidopsis thaliana
  misc_feature (1)..(2007): Ceres Seq. ID no. 13617745
  misc_feature (1)..(2007): Ortholog of  Ceres SEQ ID NO 14311103 as cited in SEQ ID NO 52897
aaatggttttctctccattgatatgtttccgtatatagaagaaatctctttgactcgccggaaaacaaaaccccgttgttctccgtctatctctccctctctctctctgcacatttcttctacctttctttgagatttgagaaaacagaggaagaagatgaaactcgacgaagaattcttacacgacagagaccattcgtttctgacagatgacgaggaaaatcaagcagcacttgcttgttccgacgatgaacacgacggagacgacgacggtcggagaggcggagaaaattcagattcctcctctccgttatcacgagaccgttctgataacaatctctcggatgtctcaaaccctccatggccacaaagctatcgacaatcaatggatttgttgaccggaatgactccaccttcggtgagtttcatgcctcaaagcagttcccggagattagcctcttccttccagaagaagcaacaatcttcgttttgcgattcgttgtcttcttcctcaagcaaaccccttctctctcaaccagttcctgacaaagaagaaacgattttacccgtcaaccctcaatctcagctcaagctctccgtcaccgatcttccattaccggaacctaacctctgctccttctctcaatctgttctcaatggaaccaatgtactgtgtggattagggttaataacaatgccttacgctattaaagaaagtggatggcttggtctgcccatactcttgttcttcggagtcataacttgctacacaggtgttctcatgaaaagatgtctagaaagttcccctggtattcaaacttaccccgatatcggtcaagccgcctttggaatcaccggtcgcttcatcatctctattcttctatacgtggagttgtacgcagcttgtgtggaatacataatcatgatgagcgataacttatcagggctattcccaaacgtttcattgagcattgcttcagggatatctttagattctcctcagatctttgcaatcttaaccactcttcttgttcttccaactgtctggcttaaagatcttagcttgctttcttacctttcagttggaggagtcttggcgtcaatcttactcggtatctgcctcttctgggtcggtgcagtcgatggaatagggtttcatgcaacaggacgagttttcgatttaagtaacttacctgtcactatagggatttttggatttggttactcgggtcattcggtttttcccaatatctattcttcaatgaaagatccttcaaggtttcctcttgtcttagttatctgctttagtttctgcacggtcttgtacatagctgttgcggtctgcggctacaccatgtttggcgaagcagtggaatcacagttcacattgaacatgcctaagcacttctttccatctaaagtcgcggtctggacagcggtcattacaccgatgaccaaatacgctttaacaatcaccccaatagttatgagtctcgaagaactcattccaacagctaagatgagatcacgtggtgtatcgatattatttagaacaatgctagttacctctactttggtggttgctctttcagttcctttcttcgcgatcgtggcagcactaatcggatcgttccttgcaatgcttgtggctcttatcttcccatgtctatgttatctcagtatcctcaagggtaaattaagcaacacacaaattggattatgcatattcattatagtcttcggggtggttagtggttgttgtggtacttactcggctatctcaagattagccaaccaaatgacagattaactgaaattttcgacggcgatttaaaattaggtgtgttgtgttctaatgtttattatattatctagtttttattcagttttggttcagatttcttttaattgttttaggaaacaagcagagataaaaccacatatacttcatttcagttttaacaaaatgtatctttcataccctatgtattatggtttgtatttaac

SEQ ID NO: 105675 - protein, 550 aa, Arabidopsis thaliana
  peptide (1)..(550): Ceres Seq. ID no. 13617746
MKLDEEFLHDRDHSFLTDDEENQAALACSDDEHDGDDDGRRGGENSDSSSPLSRDRSDNNLSDVSNPPWPQSYRQSMDLLTGMTPPSVSFMPQSSSRRLASSFQKKQQSSFCDSLSSSSSKPLLSQPVPDKEETILPVNPQSQLKLSVTDLPLPEPNLCSFSQSVLNGTNVLCGLGLITMPYAIKESGWLGLPILLFFGVITCYTGVLMKRCLESSPGIQTYPDIGQAAFGITGRFIISILLYVELYAACVEYIIMMSDNLSGLFPNVSLSIASGISLDSPQIFAILTTLLVLPTVWLKDLSLLSYLSVGGVLASILLGICLFWVGAVDGIGFHATGRVFDLSNLPVTIGIFGFGYSGHSVFPNIYSSMKDPSRFPLVLVICFSFCTVLYIAVAVCGYTMFGEAVESQFTLNMPKHFFPSKVAVWTAVITPMTKYALTITPIVMSLEELIPTAKMRSRGVSILFRTMLVTSTLVVALSVPFFAIVAALIGSFLAMLVALIFPCLCYLSILKGKLSNTQIGLCIFIIVFGVVSGCCGTYSAISRLANQMTD

SEQ ID NO: 105676 - protein, 474 aa, Arabidopsis thaliana
  peptide (1)..(474): Ceres Seq. ID no. 13617747
MDLLTGMTPPSVSFMPQSSSRRLASSFQKKQQSSFCDSLSSSSSKPLLSQPVPDKEETILPVNPQSQLKLSVTDLPLPEPNLCSFSQSVLNGTNVLCGLGLITMPYAIKESGWLGLPILLFFGVITCYTGVLMKRCLESSPGIQTYPDIGQAAFGITGRFIISILLYVELYAACVEYIIMMSDNLSGLFPNVSLSIASGISLDSPQIFAILTTLLVLPTVWLKDLSLLSYLSVGGVLASILLGICLFWVGAVDGIGFHATGRVFDLSNLPVTIGIFGFGYSGHSVFPNIYSSMKDPSRFPLVLVICFSFCTVLYIAVAVCGYTMFGEAVESQFTLNMPKHFFPSKVAVWTAVITPMTKYALTITPIVMSLEELIPTAKMRSRGVSILFRTMLVTSTLVVALSVPFFAIVAALIGSFLAMLVALIFPCLCYLSILKGKLSNTQIGLCIFIIVFGVVSGCCGTYSAISRLANQMTD

SEQ ID NO: 105677 - protein, 468 aa, Arabidopsis thaliana
  peptide (1)..(468): Ceres Seq. ID no. 13617748
MTPPSVSFMPQSSSRRLASSFQKKQQSSFCDSLSSSSSKPLLSQPVPDKEETILPVNPQSQLKLSVTDLPLPEPNLCSFSQSVLNGTNVLCGLGLITMPYAIKESGWLGLPILLFFGVITCYTGVLMKRCLESSPGIQTYPDIGQAAFGITGRFIISILLYVELYAACVEYIIMMSDNLSGLFPNVSLSIASGISLDSPQIFAILTTLLVLPTVWLKDLSLLSYLSVGGVLASILLGICLFWVGAVDGIGFHATGRVFDLSNLPVTIGIFGFGYSGHSVFPNIYSSMKDPSRFPLVLVICFSFCTVLYIAVAVCGYTMFGEAVESQFTLNMPKHFFPSKVAVWTAVITPMTKYALTITPIVMSLEELIPTAKMRSRGVSILFRTMLVTSTLVVALSVPFFAIVAALIGSFLAMLVALIFPCLCYLSILKGKLSNTQIGLCIFIIVFGVVSGCCGTYSAISRLANQMTD

SEQ ID NO: 105678 - DNA, 1063 bp, Arabidopsis thaliana
  misc_feature (1)..(1063): Ceres Seq. ID no. 13617749
  misc_feature (1)..(1063): Ortholog of  Ceres SEQ ID NO 14316161 as cited in SEQ ID NO 52384
  misc_feature (1)..(1063): Ortholog of  Ceres SEQ ID NO 14315249 as cited in SEQ ID NO 52512
  misc_feature (1)..(1063): Ortholog of  Ceres SEQ ID NO 15174595 as cited in SEQ ID NO 53460
  misc_feature (1)..(1063): Ortholog of  Ceres SEQ ID NO 13503553 as cited in SEQ ID NO 64822
  misc_feature (1)..(1063): Ortholog of  Ceres SEQ ID NO 13660155 as cited in SEQ ID NO 67635
agaactaaaaccctaaaaaagaaacacaaatatttaagattttcttccctgatccaatcaattgtttcagaaaaaatggagttcgagaaccggtacggacttgcaacgtcgcagaagtacgactgtctcttgttcgatttggacgatactctttatcctcttagctccggaatcgcaagagaatgtgggaacaacatcaaagattacatgaccgagaaactcggtatacctaaggacaaaatcgtcgaattgtctgatcttctatacaagaactatggaacaacaatggctggtcttagggcgatcggatatgaatttgactacgatgagtaccacagcttcgtccacggtcgtttaccctatgacaacataaaacccgaccttgttcttcgcagcctcttgcttagcctccctctccgcaaagtcatctttaccaacgcggacagagttcacgcggccaaggcgttgaagaagttgggattagaggattgtttcgaaggaatcatatgtttcgaaacgctaaacctcatgcacacaaacgctgcgtctaacaattccgagatttttgatatcgttggacattttaaccggtctgaaccggtcggttcacttcccaaaacgcctgttgtgtgtaaaccatctgaatctgctatcgagaaagctcttgaaatcgccaatattgatcctaaccgaacgctgttctttgaggacagtgtccgaaacgtacaagctggaaaacgcgttggtctttacacggttctggttggtaaatcgaccaaagtcaaaggagcggattacgcgttggaaaacattcacaacatgaaagaggcgataccggagttatgggaatccgacaggaaatcgtcggatgttggatattccggcaaggtcgccgttgagacttctgttagagcttaggaggagtactgtttcgccgttgtacctaattttccaccactgtcattttcattttcttttttcaaatgacgtaatgtcatttttgttttttttttcgacttgtgtttataaaagattaataaaaaatgagaaaataatttccatc

SEQ ID NO: 105679 - protein, 305 aa, Arabidopsis thaliana
  peptide (1)..(305): Ceres Seq. ID no. 13617750
RTKTLKKKHKYLRFSSLIQSIVSEKMEFENRYGLATSQKYDCLLFDLDDTLYPLSSGIARECGNNIKDYMTEKLGIPKDKIVELSDLLYKNYGTTMAGLRAIGYEFDYDEYHSFVHGRLPYDNIKPDLVLRSLLLSLPLRKVIFTNADRVHAAKALKKLGLEDCFEGIICFETLNLMHTNAASNNSEIFDIVGHFNRSEPVGSLPKTPVVCKPSESAIEKALEIANIDPNRTLFFEDSVRNVQAGKRVGLYTVLVGKSTKVKGADYALENIHNMKEAIPELWESDRKSSDVGYSGKVAVETSVRA

SEQ ID NO: 105680 - protein, 280 aa, Arabidopsis thaliana; identical to SEQ ID NO: 29464
  peptide (1)..(280): Ceres Seq. ID no. 13617751

SEQ ID NO: 105681 - protein, 236 aa, Arabidopsis thaliana; identical to SEQ ID NO: 23607
  peptide (1)..(236): Ceres Seq. ID no. 13617752

SEQ ID NO: 105682 - DNA, 1188 bp, Arabidopsis thaliana
  misc_feature (1)..(1188): Ceres Seq. ID no. 13617766
  misc_feature (1)..(1188): Ortholog of  Ceres SEQ ID NO 13654574 as cited in SEQ ID NO 68569
actaaagactttttcttaaatttcttgtaaaccatacaaaacatgttgtgtgcttctcaagcatcaacaacaaccctttgctcaaccatggatcaaacctcacaaccttcttcttcttcttcagccacgatccggctcggtggtcgagccattgaccgtcataacccaatcatacgtgacggtcggagactcactcctccaccttccccaaaccttaatccctcttcttcgtcttcttctacttatcatactcctcttatgactagactaggtctcgagagtagtgaacaaaaacggttagcgaagaggaagagcaagaaaggtgacagtgatgttggtaagtcaccggttagttgttttagcagtgacacacctcagggttcttcaaggtacttattgagtaacccggttttctttgacgggtttgtggattccgacccgattccaatacctattgatgaaccggagataaccaaagctgatgatttaaataattttcatgaagatcgactcataataaacgcctcaaagtatctatcaacttctgcttctttcttggagaagaagcaacccgatttcttcgaggggttcttggattatgaaccggttctatctcccgataatcctttctctgaacccacaaaagcttctcctacagcttctctgagctctcttgaagataaagatgtttcgtccccggatttcaaattctctcctcctcctcccccacctccttctcctcctcagtcgtcgccgccatcaccaccggagaaaaactcatcttccgatcaagtggttgttttgagagtgtcacttcattgcaaaggctgtgcagggaaagttaagaaacatctatcgaaattgaaaggagtgacgtcgtataacatagacttcgcagcaaagaaggttaccgtgacgggagacgtgacaccgttaactgtgttggcgagtatttccaaagttaaaaacgctcagttttggcctgagattattcagaagtaattctctttctttttccctctgttttcttctatgctcttatctttactttggaagacaaaacttgtgaagatgttactttcttttgtgcgtttatttgtctcggttatgattaaagattggtattcagaaatgttttatatgaacacacttcataatttgtttttgtgatactaaatctctactatt

SEQ ID NO: 105683 - protein, 319 aa, Arabidopsis thaliana
  peptide (1)..(319): Ceres Seq. ID no. 13617767
MLCASQASTTTLCSTMDQTSQPSSSSSATIRLGGRAIDRHNPIIRDGRRLTPPPSPNLNPSSSSSSTYHTPLMTRLGLESSEQKRLAKRKSKKGDSDVGKSPVSCFSSDTPQGSSRYLLSNPVFFDGFVDSDPIPIPIDEPEITKADDLNNFHEDRLIINASKYLSTSASFLEKKQPDFFEGFLDYEPVLSPDNPFSEPTKASPTASLSSLEDKDVSSPDFKFSPPPPPPPSPPQSSPPSPPEKNSSSDQVVVLRVSLHCKGCAGKVKKHLSKLKGVTSYNIDFAAKKVTVTGDVTPLTVLASISKVKNAQFWPEIIQK

SEQ ID NO: 105684 - protein, 304 aa, Arabidopsis thaliana
  peptide (1)..(304): Ceres Seq. ID no. 13617768
MDQTSQPSSSSSATIRLGGRAIDRHNPIIRDGRRLTPPPSPNLNPSSSSSSTYHTPLMTRLGLESSEQKRLAKRKSKKGDSDVGKSPVSCFSSDTPQGSSRYLLSNPVFFDGFVDSDPIPIPIDEPEITKADDLNNFHEDRLIINASKYLSTSASFLEKKQPDFFEGFLDYEPVLSPDNPFSEPTKASPTASLSSLEDKDVSSPDFKFSPPPPPPPSPPQSSPPSPPEKNSSSDQVVVLRVSLHCKGCAGKVKKHLSKLKGVTSYNIDFAAKKVTVTGDVTPLTVLASISKVKNAQFWPEIIQK

SEQ ID NO: 105685 - protein, 247 aa, Arabidopsis thaliana
  peptide (1)..(247): Ceres Seq. ID no. 13617769
MTRLGLESSEQKRLAKRKSKKGDSDVGKSPVSCFSSDTPQGSSRYLLSNPVFFDGFVDSDPIPIPIDEPEITKADDLNNFHEDRLIINASKYLSTSASFLEKKQPDFFEGFLDYEPVLSPDNPFSEPTKASPTASLSSLEDKDVSSPDFKFSPPPPPPPSPPQSSPPSPPEKNSSSDQVVVLRVSLHCKGCAGKVKKHLSKLKGVTSYNIDFAAKKVTVTGDVTPLTVLASISKVKNAQFWPEIIQK

SEQ ID NO: 105686 - DNA, 987 bp, Arabidopsis thaliana
  misc_feature (1)..(987): Ceres Seq. ID no. 13617784
  misc_feature (1)..(987): Ortholog of  Ceres SEQ ID NO 15174396 as cited in SEQ ID NO 0
gaaacttgttttctctttcccttcttcaatcaaaacctatttgcatgctctcaaacccgaattaaatcgacacttttcagtttttgttttaacaagtagagtttcccaaaatattggatatatttctttttcaaatttcggaaaagaaatgagttgcaatggatgtagagttcttcgaaaaggttgcagtgaaacatgcatccttcgtccttgccttcaatggatcgaatccgccgagtcacaaggccacgccaccgtcttcgtcgctaaattctttggtcgtgctggtctcatgtctttcatctcctccgtacctgaactccaacgtcctgctttgtttcagtcgttgttgtttgaagcgtgtgggagaacggtgaatccggttaacggagcggttggtatgttgtggaccaggaactggcacgtatgccaagcggcggttgagactgttcttcgcggcggaactttacgaccgatatcagatcttcttgaatctccgtcgttgatgatctcctgtgatgagtcttcagagatttggcatcaagacgtttcaagaaaccaaacccaccattgtcgcttctccacctccagatccacgacggagatgaaagactctctggttaaccgaaaacgattgaagtccgattcggatcttgatctccaagtgaaccacggtttaaccctaaccgctccggctgtaccggttccttttcttcctccgtcgtcgttttgtaaggtggttaagggtgatcgtccgggaagtccatcggaggaatctgtaacgacgtcgtgttgggaaaatgggatgagaggagataataaacaaaaaagaaacaaaggagagaaaaagttattgaacctttttgtttaaaaccgacgacgcaaaacactcaaagattttgaggctctcttttttagggttttgagtgggaatggatatttagttaatgatttttctctatcgagaaatatgataaaattttgggg

SEQ ID NO: 105687 - protein, 289 aa, Arabidopsis thaliana
  peptide (1)..(289): Ceres Seq. ID no. 13617785
KLVFSFPSSIKTYLHALKPELNRHFSVFVLTSRVSQNIGYISFSNFGKEMSCNGCRVLRKGCSETCILRPCLQWIESAESQGHATVFVAKFFGRAGLMSFISSVPELQRPALFQSLLFEACGRTVNPVNGAVGMLWTRNWHVCQAAVETVLRGGTLRPISDLLESPSLMISCDESSEIWHQDVSRNQTHHCRFSTSRSTTEMKDSLVNRKRLKSDSDLDLQVNHGLTLTAPAVPVPFLPPSSFCKVVKGDRPGSPSEESVTTSCWENGMRGDNKQKRNKGEKKLLNLFV

SEQ ID NO: 105688 - protein, 240 aa, Arabidopsis thaliana; identical to SEQ ID NO: 22523
  peptide (1)..(240): Ceres Seq. ID no. 13617786

SEQ ID NO: 105689 - protein, 192 aa, Arabidopsis thaliana; identical to SEQ ID NO: 22524
  peptide (1)..(192): Ceres Seq. ID no. 13617787

SEQ ID NO: 105690 - DNA, 1494 bp, Arabidopsis thaliana
  misc_feature (1)..(1494): Ceres Seq. ID no. 13617788
  misc_feature (1)..(1494): Ortholog of  Ceres SEQ ID NO 15169533 as cited in SEQ ID NO 67374
gagagatcactgtacttattgggttttgatctttgatggctccactgagtccaagagtagtggtgaaggtggatttgaagaagaagccatggcagcaggaccagccattgcacaatagatggcatccggagataccaccagtagcagaggtcaaggctggtgagtttttccgggtagaaatgattgatgcaatgggaggtgttatcaaagacaatgactctgcaagcgatatcaagaacctagtcctaactactactcatcacctaagtgggccgattagggttgtagatgaggaaggtgttgcagctaaagcaggtgatcttcttgctgttgagatatgcaacttgggtcctcttccaggagatgaatggggattcactggttcgtttgatagagagaatggtggcggtttcttgactgaccatttcccttgtgcgaccaaagctatttggtactttgaagggatctatgcctactctcctcagattcctggagtacgatttccgggtttgacacacccaggagtcattggcactgcaccatcgaatgaactcttgagaatatggaatgatagggaaagacaattagaagaaagtggtgttgagtccctaacactatgtgaggtagtgcatcagcggccattagcatgcctaccaacaactaaaggatgtctcctcgggaatattgaagaaggaacaccagaatgggaaaggattgcaaacgaggctgcgaggacaataccaggaagagaaaacggaggaaactgtgacattaaaaacctaagcagaggctctaaaatatatcttccagtatttgttgaaggggctaatctaagcacaggagacatgcatttctcacaaggtgatggtgagatctcgttctgcggagccatcgagatgagtggatttctagaactcaagtgtgaaatcataagaaatgggatgcaagagtaccttacgccaatgggacctacccctctccatgtaaacccaatctttgagataggaccagtggaaccgaggttctcagagtggcttgtcttcgaaggtatcagtgtcgatgagagcggaaaacagcattacctagatgcaacagttgcttacaaacgggcagttctcaacgccatagactatcttttcaaatttggttactcaaaagaacaggtgtacctcttactctcatgttgtccatgtgaaggaagactatctgggatagttgattctccgaatgccgttgctacactagcaatacctacagccatctttgatcaggatattaggccaaagaatcggaaggttccagtaggacctcgggttgtgaggaaaccagatgtactgaagagcacatatgatggaaagcttccaattacaaagaatccaagttcttcctcttagcttctacaaaaaaattaaaattaaaatttagaagctaataccaagattgtataatcaagcatatgttccaataataaagcaataacttggtgttttcttt

SEQ ID NO: 105691 - protein, 452 aa, Arabidopsis thaliana
  peptide (1)..(452): Ceres Seq. ID no. 13617789
MAPLSPRVVVKVDLKKKPWQQDQPLHNRWHPEIPPVAEVKAGEFFRVEMIDAMGGVIKDNDSASDIKNLVLTTTHHLSGPIRVVDEEGVAAKAGDLLAVEICNLGPLPGDEWGFTGSFDRENGGGFLTDHFPCATKAIWYFEGIYAYSPQIPGVRFPGLTHPGVIGTAPSNELLRIWNDRERQLEESGVESLTLCEVVHQRPLACLPTTKGCLLGNIEEGTPEWERIANEAARTIPGRENGGNCDIKNLSRGSKIYLPVFVEGANLSTGDMHFSQGDGEISFCGAIEMSGFLELKCEIIRNGMQEYLTPMGPTPLHVNPIFEIGPVEPRFSEWLVFEGISVDESGKQHYLDATVAYKRAVLNAIDYLFKFGYSKEQVYLLLSCCPCEGRLSGIVDSPNAVATLAIPTAIFDQDIRPKNRKVPVGPRVVRKPDVLKSTYDGKLPITKNPSSSS

SEQ ID NO: 105692 - protein, 404 aa, Arabidopsis thaliana
  peptide (1)..(404): Ceres Seq. ID no. 13617790
MIDAMGGVIKDNDSASDIKNLVLTTTHHLSGPIRVVDEEGVAAKAGDLLAVEICNLGPLPGDEWGFTGSFDRENGGGFLTDHFPCATKAIWYFEGIYAYSPQIPGVRFPGLTHPGVIGTAPSNELLRIWNDRERQLEESGVESLTLCEVVHQRPLACLPTTKGCLLGNIEEGTPEWERIANEAARTIPGRENGGNCDIKNLSRGSKIYLPVFVEGANLSTGDMHFSQGDGEISFCGAIEMSGFLELKCEIIRNGMQEYLTPMGPTPLHVNPIFEIGPVEPRFSEWLVFEGISVDESGKQHYLDATVAYKRAVLNAIDYLFKFGYSKEQVYLLLSCCPCEGRLSGIVDSPNAVATLAIPTAIFDQDIRPKNRKVPVGPRVVRKPDVLKSTYDGKLPITKNPSSSS

SEQ ID NO: 105693 - protein, 400 aa, Arabidopsis thaliana
  peptide (1)..(400): Ceres Seq. ID no. 13617791
MGGVIKDNDSASDIKNLVLTTTHHLSGPIRVVDEEGVAAKAGDLLAVEICNLGPLPGDEWGFTGSFDRENGGGFLTDHFPCATKAIWYFEGIYAYSPQIPGVRFPGLTHPGVIGTAPSNELLRIWNDRERQLEESGVESLTLCEVVHQRPLACLPTTKGCLLGNIEEGTPEWERIANEAARTIPGRENGGNCDIKNLSRGSKIYLPVFVEGANLSTGDMHFSQGDGEISFCGAIEMSGFLELKCEIIRNGMQEYLTPMGPTPLHVNPIFEIGPVEPRFSEWLVFEGISVDESGKQHYLDATVAYKRAVLNAIDYLFKFGYSKEQVYLLLSCCPCEGRLSGIVDSPNAVATLAIPTAIFDQDIRPKNRKVPVGPRVVRKPDVLKSTYDGKLPITKNPSSSS

SEQ ID NO: 105694 - DNA, 1405 bp, Arabidopsis thaliana
  misc_feature (1)..(1405): Ceres Seq. ID no. 13617796
  misc_feature (1)..(1405): Ortholog of  Ceres SEQ ID NO 12590542 as cited in SEQ ID NO 621
  misc_feature (1)..(1405): Ortholog of  Ceres SEQ ID NO 12421854 as cited in SEQ ID NO 20723
  misc_feature (1)..(1405): Ortholog of  Ceres SEQ ID NO 13597847 as cited in SEQ ID NO 64858
attttcctattcttgaaaacacacaacacatctcatttctccgctgtttcgtcggcaaattttcccatttttgattccgaagataatagatattatcaacagaggataaggataaaacccagaacaatcattataatttagtggtgaagttgaccaaatttataaactgatccaattttaaaatctaagagatatggagaacatggacgatttctcaccggagaatgttttagcaccaccaccaccacctcctccaatgaagaagtcaacggatctgtttatgcaaagaagcaatagctttgtttctaaagctacgagagattcatgggatcgtatgttcgacgaagctcatggagctgatgttttgattcatactgatgataatggtttgatttacgcacattctaatgtcatcggaatggcttcagatgtaatcagaggaatgatgaagcaacataagagaaaatctcatcgtaaatcgatttcaatcctcggtgttcctcaccacgctcttcgagttttcattcgattcttatactcttcttgctatgagaaacaagatatggaggattttgcaatacatctacttgtgttatcacatgtctacgttgtaccgcatttgaagcgagtctgcgaatcagaattcgaaagtagtttgctcaacaaagagaatgtgattgatgtgtttcagctagctcttctatgtgatgctcctcgtctcggtcttctctgtcatagaatgattctaaacaactttgaagaagtttctacttctgaaggatggcaagcaatgaaagagagccatcctagacttcaaaaagagcttttacgctctgtcgcttacgagcttaatagcttgaagcaaagaaacaggaaacagaaggagatacagacttatacacagctctatgaagcaatggaggcttttgttcatatatgtagagatggatgcagagaaataggtccaacaaagaccgaaaccccgcatatgtcatgcggatttcaagcgtgtaatggtttagagcagctattgaaacatttggcgggatgcaaactaagatcaatccctggtggttgtagccgttgcaagagaatgtggcagcttcttgagcttcattcgcgcatttgcgtagactcggaacaatgcaaagtccctctttgcagtagtttgaaagagaggatgaagacacagagcaggaaagatgagaaaagatggaaacttttggtgaggaatgttttgagcaccaagagaattggaggatctccattctttttgcaagcaattgatgttactttatgagttatgacattattatttgattgcttttagatgtagaaattacatatttatacatgtacataggttgcagattctttgtaaagatagattcaaaattttcaaacc

SEQ ID NO: 105695 - protein, 368 aa, Arabidopsis thaliana
  peptide (1)..(368): Ceres Seq. ID no. 13617797
MENMDDFSPENVLAPPPPPPPMKKSTDLFMQRSNSFVSKATRDSWDRMFDEAHGADVLIHTDDNGLIYAHSNVIGMASDVIRGMMKQHKRKSHRKSISILGVPHHALRVFIRFLYSSCYEKQDMEDFAIHLLVLSHVYVVPHLKRVCESEFESSLLNKENVIDVFQLALLCDAPRLGLLCHRMILNNFEEVSTSEGWQAMKESHPRLQKELLRSVAYELNSLKQRNRKQKEIQTYTQLYEAMEAFVHICRDGCREIGPTKTETPHMSCGFQACNGLEQLLKHLAGCKLRSIPGGCSRCKRMWQLLELHSRICVDSEQCKVPLCSSLKERMKTQSRKDEKRWKLLVRNVLSTKRIGGSPFFLQAIDVTL

SEQ ID NO: 105696 - protein, 365 aa, Arabidopsis thaliana
  peptide (1)..(365): Ceres Seq. ID no. 13617798
MDDFSPENVLAPPPPPPPMKKSTDLFMQRSNSFVSKATRDSWDRMFDEAHGADVLIHTDDNGLIYAHSNVIGMASDVIRGMMKQHKRKSHRKSISILGVPHHALRVFIRFLYSSCYEKQDMEDFAIHLLVLSHVYVVPHLKRVCESEFESSLLNKENVIDVFQLALLCDAPRLGLLCHRMILNNFEEVSTSEGWQAMKESHPRLQKELLRSVAYELNSLKQRNRKQKEIQTYTQLYEAMEAFVHICRDGCREIGPTKTETPHMSCGFQACNGLEQLLKHLAGCKLRSIPGGCSRCKRMWQLLELHSRICVDSEQCKVPLCSSLKERMKTQSRKDEKRWKLLVRNVLSTKRIGGSPFFLQAIDVTL

SEQ ID NO: 105697 - protein, 347 aa, Arabidopsis thaliana
  peptide (1)..(347): Ceres Seq. ID no. 13617799
MKKSTDLFMQRSNSFVSKATRDSWDRMFDEAHGADVLIHTDDNGLIYAHSNVIGMASDVIRGMMKQHKRKSHRKSISILGVPHHALRVFIRFLYSSCYEKQDMEDFAIHLLVLSHVYVVPHLKRVCESEFESSLLNKENVIDVFQLALLCDAPRLGLLCHRMILNNFEEVSTSEGWQAMKESHPRLQKELLRSVAYELNSLKQRNRKQKEIQTYTQLYEAMEAFVHICRDGCREIGPTKTETPHMSCGFQACNGLEQLLKHLAGCKLRSIPGGCSRCKRMWQLLELHSRICVDSEQCKVPLCSSLKERMKTQSRKDEKRWKLLVRNVLSTKRIGGSPFFLQAIDVTL

SEQ ID NO: 105698 - DNA, 1710 bp, Arabidopsis thaliana
  misc_feature (1)..(1710): Ceres Seq. ID no. 13617800
  misc_feature (1)..(1710): Ortholog of  Ceres SEQ ID NO 12779893 as cited in SEQ ID NO 66238
aaccgattcatatctttcttcttcttcctctacagcttcttcataaatctctctctcttctcctctcttctcaaagatcgaacctttcgatttcagtctcttcagagttctttcgttttcatcgaaacaatggcgaagaacgttgggattttggctatggatatctatttccctcccacctgtgttcaacaggaagctttggaagcacatgatggagcaagtaaagggaaatacactattggacttggccaagattgtttagctttttgcactgagcttgaagatgttatctctatgagtttcaatgcggtgacatcactttttgagaagtataagattgaccctaaccaaatcgggcgtcttgaagtaggaagtgagactgttattgacaaaagcaagtccatcaagaccttcttgatgcagctctttgagaaatgtggaaacactgatgtcgaaggtgttgactcgaccaatgcttgctatggtggaactgcagctttgttaaactgtgtcaattgggttgagagtaactcttgggatggacgttatggcctcgtcatttgtactgacagcgcggtttatgcagaaggacccgcaaggcccactggaggagctgcagcgattgctatgttgataggacctgatgctcctatcgttttcgaaagcaaattgagagcaagccacatggctcatgtctatgacttttacaagcccaatcttgctagcgagtacccggttgttgatggtaagctttcacagacttgctacctcatggctcttgactcctgctataaacatttatgcaacaagttcgagaagatcgagggcaaagagttctccataaatgatgctgattacattgttttccattctccatacaataaacttgtacagaaaagctttgctcgtctcttgtacaacgacttcttgagaaacgcaagctccattgacgaggctgccaaagaaaagttcaccccttattcatctttgacccttgacgagagttaccaaagccgtgatcttgaaaaggtgtcacaacaaattgcgaaaccgttttatgatgctaaagtgcaaccaacgactttaataccaaaggaagtcggtaacatgtacactgcttctctctacgctgcatttgcttccctcatccacaagaaacacaatgatttggcgggaaagcgggtggttatgttctcttatggaagtggctcaaccgcaacaatgttctcattacgcctcaacgacaataagcctcctttcagcatttcaaacattgcatctgtaatggatgttggcggtaaattgaaagctagacatgagtatgcacctgagaagtttgtggagacaatgaagctaatggaacataggtatggagcaaaggactttgtgacaaccaaggagggtattatagatcttttggcaccgggaacttattatctgaaagaggttgattccttgtaccggagattctatggcaagaaaggtgaagatggatctgtagccaatggacactgattcttgaaaaggaacaaatcataaaaagtcacctgaaaatgttatgttttacttgcaccattttaatcgttttataagtttgttgttactttgatttagggacaaagaaggaatgtattctctgtttttatttactgtttgatttactctctcatgcaaatgataatttggaaattattggaatctctattttgt

SEQ ID NO: 105699 - protein, 504 aa, Arabidopsis thaliana
  peptide (1)..(504): Ceres Seq. ID no. 13617801
NRFISFFFFLYSFFINLSLFSSLLKDRTFRFQSLQSSFVFIETMAKNVGILAMDIYFPPTCVQQEALEAHDGASKGKYTIGLGQDCLAFCTELEDVISMSFNAVTSLFEKYKIDPNQIGRLEVGSETVIDKSKSIKTFLMQLFEKCGNTDVEGVDSTNACYGGTAALLNCVNWVESNSWDGRYGLVICTDSAVYAEGPARPTGGAAAIAMLIGPDAPIVFESKLRASHMAHVYDFYKPNLASEYPVVDGKLSQTCYLMALDSCYKHLCNKFEKIEGKEFSINDADYIVFHSPYNKLVQKSFARLLYNDFLRNASSIDEAAKEKFTPYSSLTLDESYQSRDLEKVSQQIAKPFYDAKVQPTTLIPKEVGNMYTASLYAAFASLIHKKHNDLAGKRVVMFSYGSGSTATMFSLRLNDNKPPFSISNIASVMDVGGKLKARHEYAPEKFVETMKLMEHRYGAKDFVTTKEGIIDLLAPGTYYLKEVDSLYRRFYGKKGEDGSVANGH

SEQ ID NO: 105700 - protein, 461 aa, Arabidopsis thaliana
  peptide (1)..(461): Ceres Seq. ID no. 13617802
MAKNVGILAMDIYFPPTCVQQEALEAHDGASKGKYTIGLGQDCLAFCTELEDVISMSFNAVTSLFEKYKIDPNQIGRLEVGSETVIDKSKSIKTFLMQLFEKCGNTDVEGVDSTNACYGGTAALLNCVNWVESNSWDGRYGLVICTDSAVYAEGPARPTGGAAAIAMLIGPDAPIVFESKLRASHMAHVYDFYKPNLASEYPVVDGKLSQTCYLMALDSCYKHLCNKFEKIEGKEFSINDADYIVFHSPYNKLVQKSFARLLYNDFLRNASSIDEAAKEKFTPYSSLTLDESYQSRDLEKVSQQIAKPFYDAKVQPTTLIPKEVGNMYTASLYAAFASLIHKKHNDLAGKRVVMFSYGSGSTATMFSLRLNDNKPPFSISNIASVMDVGGKLKARHEYAPEKFVETMKLMEHRYGAKDFVTTKEGIIDLLAPGTYYLKEVDSLYRRFYGKKGEDGSVANGH

SEQ ID NO: 105701 - protein, 452 aa, Arabidopsis thaliana
  peptide (1)..(452): Ceres Seq. ID no. 13617803
MDIYFPPTCVQQEALEAHDGASKGKYTIGLGQDCLAFCTELEDVISMSFNAVTSLFEKYKIDPNQIGRLEVGSETVIDKSKSIKTFLMQLFEKCGNTDVEGVDSTNACYGGTAALLNCVNWVESNSWDGRYGLVICTDSAVYAEGPARPTGGAAAIAMLIGPDAPIVFESKLRASHMAHVYDFYKPNLASEYPVVDGKLSQTCYLMALDSCYKHLCNKFEKIEGKEFSINDADYIVFHSPYNKLVQKSFARLLYNDFLRNASSIDEAAKEKFTPYSSLTLDESYQSRDLEKVSQQIAKPFYDAKVQPTTLIPKEVGNMYTASLYAAFASLIHKKHNDLAGKRVVMFSYGSGSTATMFSLRLNDNKPPFSISNIASVMDVGGKLKARHEYAPEKFVETMKLMEHRYGAKDFVTTKEGIIDLLAPGTYYLKEVDSLYRRFYGKKGEDGSVANGH

SEQ ID NO: 105702 - DNA, 892 bp, Arabidopsis thaliana
  misc_feature (1)..(892): Ceres Seq. ID no. 13617804
  misc_feature (1)..(892): Ortholog of  Ceres SEQ ID NO 12610385 as cited in SEQ ID NO 55938
  misc_feature (1)..(892): Ortholog of  Ceres SEQ ID NO 13661939 as cited in SEQ ID NO 61170
  misc_feature (1)..(892): Ortholog of  Ceres SEQ ID NO 14309041 as cited in SEQ ID NO 0
  misc_feature (1)..(892): Ortholog of  Ceres SEQ ID NO 14309611 as cited in SEQ ID NO 0
caaccattgttgcgtgtttggttatctcttctttcttctctctcacctaaatcaagggatttgttctgatcaactttgaacagaatttacaacaaatccctagaaaaatctgacccttccttcttcctcaggaagatttaagatacttgttgataaggatattcggaagaagcttttgaaatttttggcaaaggtctcatttgatccgacttttctgttgaaggtgaaatagatacaaaaaaaatgggctcagaggaaaacaacagcacaagctttccaccaacagagccaaagctctgtgataacggatgtggattcttcgggtcaccatccaacatgaatctctgctcgaaatgttacagaagcttaagagccgaggaagatcaaaccgcggtagcgaaagctgcggtgaagaactctttaaagcttccatcttgcagtatcattgcacctggacaaaaacatcctctggaaattaaaccagctcatttggaaaccgttgttgtaaccgctgagccgtcttctgtacctgtagccgcggaacaggacgaggctgagccgtcgagacctgttagaccgaacaacaggtgtttcagctgtaacaagaaggttggtgtaatggggtttaagtgcaaatgcggtagcacgttttgcgggagtcataggtacccggagaagcatgagtgtagcttcgatttcaaagaagttggacgtgatgcaattgcaaaggctaatcctttggttaaggcggataaagttcagaggatttgaagaaaacaaactttgttatttttaagtattttcgttgtcttctgcatttgatcagtttctgcctgggatgttcgatgtttggtttccatgaatcaaaatgaaaattgctgttcttgctttc

SEQ ID NO: 105703 - protein, 175 aa, Arabidopsis thaliana; identical to SEQ ID NO: 25636
  peptide (1)..(175): Ceres Seq. ID no. 13617805

SEQ ID NO: 105704 - protein, 144 aa, Arabidopsis thaliana; identical to SEQ ID NO: 25637
  peptide (1)..(144): Ceres Seq. ID no. 13617806

SEQ ID NO: 105705 - DNA, 868 bp, Arabidopsis thaliana
  misc_feature (1)..(868): Ceres Seq. ID no. 13617807
  misc_feature (1)..(868): Ortholog of  Ceres SEQ ID NO 15178887 as cited in SEQ ID NO 1099
  misc_feature (1)..(868): Ortholog of  Ceres SEQ ID NO 15177541 as cited in SEQ ID NO 0
gacgttctttcatttttcccgttatccagacacactcgcgaaaatggcggctcactcttcttgcaactttgctttgacgaatccgatcatctcacaaatcgattctttctctaagaagaaactatctgttccattatacttcttctctacaagaaaagcattgacgaatccttggttaggcgttgttgattcatccctctctctcacttctccagtctccgctctacaaactaatcgcccaagaagaatccataaatccgccatctccagcttacccaccgcgaatccagatttagtggtttctgatgcgaaaaagcccaaatggtcatggagggcaattaaatcatttgcaatgggagagcttgaagctaggaagctcaagtatccaaatactggaactgaagcacttctcatgggtattttgattgaaggaactagttttacttcaaagtttttgcgggcgaataagattatgctttacaaagtgcgtgaagaaacggtcaagttactaggaaaggcagatatgtatttctttagcccggaacatcctcctttaactgaagatgctcaaagagcacttgactctgctctggatcagaatctaaaagcaggtggtatcggggaagtaatgccagcacatatactacttgggatttggtctgaagttgaatctccaggtcacaagatactggcaactcttggtttcactgatgagaaatctaaagagttagagtcttttgcctctgaatctggctttttagatgaatagtatattacatccatatcatttctccattaatgcaaaatctccaagttcatagttgctgtttgcaataatattcgtatgtgttcgtctttgctcattctt

SEQ ID NO: 105706 - protein, 255 aa, Arabidopsis thaliana; identical to SEQ ID NO: 22051
  peptide (1)..(255): Ceres Seq. ID no. 13617808

SEQ ID NO: 105707 - protein, 241 aa, Arabidopsis thaliana; identical to SEQ ID NO: 22052
  peptide (1)..(241): Ceres Seq. ID no. 13617809

SEQ ID NO: 105708 - protein, 138 aa, Arabidopsis thaliana; identical to SEQ ID NO: 22053
  peptide (1)..(138): Ceres Seq. ID no. 13617810

SEQ ID NO: 105709 - DNA, 844 bp, Arabidopsis thaliana
  misc_feature (1)..(844): Ceres Seq. ID no. 13617827
  misc_feature (1)..(844): Ortholog of  Ceres SEQ ID NO 13638838 as cited in SEQ ID NO 52011
  misc_feature (1)..(844): Ortholog of  Ceres SEQ ID NO 13585554 as cited in SEQ ID NO 64455
atgacttttgaactaatagcgtcgcagtttcgcagctgtaacaagatttcttctggcgaagaagagagaatcgccgttcaccgattcgtttctttgttcatctcctcccaggtaattatgggagatttctcgattcagatcagttctaagctgatcaatcagctagctgaaggtaacgatcaaccaaagaggagggcaaagaaaaccaaacctaaagtctcaccacagagcaaacagaaaacaaaccaagatgaagagaagaaacctaatccagtggctgaattaccgatgcagccaccgtttttcttcccaataccaccacaaggagcagcaagcacagagctggaatcgataaaatccgttgtgaaagagagtgagaaggttcttgagaagctggagttacaagagaagaacattgttcgtgaagttacggagagagccaaggatctgagggagaaagagtttaagatcccggaacctaaaccaatgccttgttcgtcagatcacgaagcctggatgaaatgctacaaggagaacatcggtagtccgttgaaatgtagcggtttcgttaagagtttccaggattgtgcacgccggtccagacagcaagtgaatcctgaagaaaagtagagataataagattcaaaaggacttttttgagacacgaagggaatagtttttgctttctgagatcatatgaatgacacagaagaattgtgcttgtttccttttgatttcatgaaagcaaaaaagaaagaaaaaaaataagcagaatctgtgattatgttcatgagataaaactttcaaaactatgttcttgattaactattttggcttatcttct

SEQ ID NO: 105710 - protein, 209 aa, Arabidopsis thaliana
  peptide (1)..(209): Ceres Seq. ID no. 13617828
MTFELIASQFRSCNKISSGEEERIAVHRFVSLFISSQVIMGDFSIQISSKLINQLAEGNDQPKRRAKKTKPKVSPQSKQKTNQDEEKKPNPVAELPMQPPFFFPIPPQGAASTELESIKSVVKESEKVLEKLELQEKNIVREVTERAKDLREKEFKIPEPKPMPCSSDHEAWMKCYKENIGSPLKCSGFVKSFQDCARRSRQQVNPEEK

SEQ ID NO: 105711 - protein, 170 aa, Arabidopsis thaliana; identical to SEQ ID NO: 35053
  peptide (1)..(170): Ceres Seq. ID no. 13617829

SEQ ID NO: 105712 - protein, 113 aa, Arabidopsis thaliana; identical to SEQ ID NO: 35054
  peptide (1)..(113): Ceres Seq. ID no. 13617830

SEQ ID NO: 105713 - DNA, 715 bp, Arabidopsis thaliana
  misc_feature (1)..(715): Ceres Seq. ID no. 13617831
  misc_feature (1)..(715): Ortholog of  Ceres SEQ ID NO 14309653 as cited in SEQ ID NO 0
aaactaaaaccctagctaccttgttctcctcaccgcttctttcttccctgaactcagaacttagaacaaagaactctcgtagacgaagaagaagatgacggtagaaggagtgaaccctaaggcgtatccgttagctgattctcagttatcgataacgattcttgatcttgttcaacaagctacgaattacaaacagttaaagaaaggagctaatgaagctaccaagacattgaaccgtgggatctctgagttcattgttatggctgctgatactgagcctctcgagattcttcttcatcttcctcttcttgctgaagataagaatgtgccgtatgtgtttgtgccatcgaaacaagcccttggaagagcatgtgatgtaaccagacccgtgatcgcttgttccgttacatcaaacgaggctagtcagttgaaatctcaaattcagcaccttaaggatgccattgagaagctcctcatctagattcttggtggaatgaatgaatgatgggtctctccatttatgaagaggcttggactgaagtgagtttatgtgcaactttttagcctatgagaaaaacaaaaaacttgtgaacgaatcctatcctttttgaagattgtaatgctttttatttgatattgtgttggtgccaatgcatttatgaacaacaagaatccttttaaagtgagtttcttcaatttggttatttgtttggtg

SEQ ID NO: 105714 - protein, 128 aa, Arabidopsis thaliana; identical to SEQ ID NO: 22375
  peptide (1)..(128): Ceres Seq. ID no. 13617832

SEQ ID NO: 105715 - protein, 73 aa, Arabidopsis thaliana; identical to SEQ ID NO: 22376
  peptide (1)..(73): Ceres Seq. ID no. 13617833

SEQ ID NO: 105716 - DNA, 1955 bp, Arabidopsis thaliana
  misc_feature (1)..(1955): Ceres Seq. ID no. 13617838
  misc_feature (1)..(1955): Ortholog of  Ceres SEQ ID NO 14308413 as cited in SEQ ID NO 55196
atgtcgataataaagtatctgataataaatatgttagagagtccattttcttcttcttcctcacaccaaaaagcttccattgatttcgcatcagatcttgctctctcttctatctctgcgattcttctggatcttctcaaatccatgaaggaatcagatctaaccaccgaaccaatcgcacaaaatctaatcaagctaataagcaatgtctgtttctcagtcttcgttttcacagttctcatcttcacagtaatcgcagtaacttaccaaccaccagatccatggcttgaatctgctccagcactcaccaaactcctaaccgaaaccgaaaacgcaactttcaaaatcgacggttcgattctcaaaaccggcgaagatctcgcttcatctccgtcatcatcacctccgtcgaactccacagagcaagtcacggaggcgacgattgagaaatccgaggcgaaaatcggtaatatgactgtgaagaactctatagattgtgatgaggatttgaagattgtgaattgttctgatccgagagttttagttgctgttgagaggtttaatttgaaggtttttaaatctattgtgttcttagagtacgaaactccggttaacggatcgaaactagacgaatgcgatgtttcttggaggtttaggaataagaaggagaagtcatggaggagatacagagatttcaggaggtttaggtttggatttggtgagaattgtacttataaagtgtttcatactagtggttggcattctggtgttaatgctcgtaggcctaggattagtagaccgagctcgagtcgaggagctcgcggtggtgattcggagattaatgatacgattccgactcttggttcgcagacgagtttccggagagggaagtatttgtattattcgcggggtggtgattattgtaagggtatgaatcagtatatgtggagtttcttgtgtggtttaggtgaagcaatgtatttgaataggacttttgtgatggatttgagtttgtgtttgtcttcgagttatagttctaaggggaaagatgaggaaggtaaggattttcggtattattttgatttcgagcatcttaaggagacggcttcgattgttgaagagggtgagttcttgagagattggaagaaatggaatcggttgcataaacggaaagttcctgttaggaaggttaagacgcatagagtgtcgcctttgcagcttagtaaagataagagtacgattatatggaggcagtttgatactcctgagcctgaaaactattggtatagagtttgtgaagggcaagcatcgaagtatgttgagaggccgtggcatgcgttgtggaagtcgaagaggttgatgaatattgtctctgagattagtgggaaaatggactgggattttgatgctgttcatgtggttagaggcgagaaagcgaagaacaagaagctatggccacatttggatgcagacacatggcctgatgcgatattgaccaaacttaaaggattggttcaggtgtggaggaatttgtacgttgcaactaatgaaccgttttataattactttgacaagttgaggtctcagtacaaggttcacttgcttgatgactatagctacttgtggggaaataagagtgaatggtacaatgagactagtctcttgaacaatgggaaaccagttgagtttgatgggtacatgagagtagctgttgatacagaggtgttttatagaggaaagactcgcgtcgagacgttctataaccttaccacggactgcaaagacgggatcaatacatgctaaattgatcattcaggttgtgatatgttttcattgttttatttgtttgtgtatcaaattcagttatgcttgtgttgtttaccttgtgttctactagctattgaagagtgtacgtaacgtttacattttttgattcatatccttaattctgtaag

SEQ ID NO: 105717 - protein, 600 aa, Arabidopsis thaliana
  peptide (1)..(600): Ceres Seq. ID no. 13617839
MSIIKYLIINMLESPFSSSSSHQKASIDFASDLALSSISAILLDLLKSMKESDLTTEPIAQNLIKLISNVCFSVFVFTVLIFTVIAVTYQPPDPWLESAPALTKLLTETENATFKIDGSILKTGEDLASSPSSSPPSNSTEQVTEATIEKSEAKIGNMTVKNSIDCDEDLKIVNCSDPRVLVAVERFNLKVFKSIVFLEYETPVNGSKLDECDVSWRFRNKKEKSWRRYRDFRRFRFGFGENCTYKVFHTSGWHSGVNARRPRISRPSSSRGARGGDSEINDTIPTLGSQTSFRRGKYLYYSRGGDYCKGMNQYMWSFLCGLGEAMYLNRTFVMDLSLCLSSSYSSKGKDEEGKDFRYYFDFEHLKETASIVEEGEFLRDWKKWNRLHKRKVPVRKVKTHRVSPLQLSKDKSTIIWRQFDTPEPENYWYRVCEGQASKYVERPWHALWKSKRLMNIVSEISGKMDWDFDAVHVVRGEKAKNKKLWPHLDADTWPDAILTKLKGLVQVWRNLYVATNEPFYNYFDKLRSQYKVHLLDDYSYLWGNKSEWYNETSLLNNGKPVEFDGYMRVAVDTEVFYRGKTRVETFYNLTTDCKDGINTC

SEQ ID NO: 105718 - protein, 590 aa, Arabidopsis thaliana
  peptide (1)..(590): Ceres Seq. ID no. 13617840
MLESPFSSSSSHQKASIDFASDLALSSISAILLDLLKSMKESDLTTEPIAQNLIKLISNVCFSVFVFTVLIFTVIAVTYQPPDPWLESAPALTKLLTETENATFKIDGSILKTGEDLASSPSSSPPSNSTEQVTEATIEKSEAKIGNMTVKNSIDCDEDLKIVNCSDPRVLVAVERFNLKVFKSIVFLEYETPVNGSKLDECDVSWRFRNKKEKSWRRYRDFRRFRFGFGENCTYKVFHTSGWHSGVNARRPRISRPSSSRGARGGDSEINDTIPTLGSQTSFRRGKYLYYSRGGDYCKGMNQYMWSFLCGLGEAMYLNRTFVMDLSLCLSSSYSSKGKDEEGKDFRYYFDFEHLKETASIVEEGEFLRDWKKWNRLHKRKVPVRKVKTHRVSPLQLSKDKSTIIWRQFDTPEPENYWYRVCEGQASKYVERPWHALWKSKRLMNIVSEISGKMDWDFDAVHVVRGEKAKNKKLWPHLDADTWPDAILTKLKGLVQVWRNLYVATNEPFYNYFDKLRSQYKVHLLDDYSYLWGNKSEWYNETSLLNNGKPVEFDGYMRVAVDTEVFYRGKTRVETFYNLTTDCKDGINTC

SEQ ID NO: 105719 - protein, 552 aa, Arabidopsis thaliana; identical to SEQ ID NO: 23115
  peptide (1)..(552): Ceres Seq. ID no. 13617841

SEQ ID NO: 105720 - DNA, 1276 bp, Arabidopsis thaliana
  misc_feature (1)..(1276): Ceres Seq. ID no. 13617842
  misc_feature (1)..(1276): Ortholog of  Ceres SEQ ID NO 13598495 as cited in SEQ ID NO 63939
acttatacctcactgacttactacaaatcagatatgtggaagattgggcagagaggagttccctatttccagagactcattgctgcgccgttcacgaccttgcggtccttgccaacttctttggtcgagacagggcagaaccgtgtcattgatgcttcgttaactctcatccgtgaaagggcaaaactcaaaggagagttagtgcgactcataggaggagcaaaagctacaacagctcttcttggagtaccacttggtcacaactcttcttttcttgaaggcccagccttggctcctcctcatgtaagggaagctatttggtgtggtagtacaaactccaccactgaagaagggaaggagctaaaagatccacgtgttctaagtgatgttggtgatattccggtacaagagattagagaaatgggggttgatgatgatagacttatgaaagtagtaagtgaatctgtgaagctggtgatggaagaggaaccattgcgcccgctggtcataggtggagaccattccatatcttatcctgttgtgagagctgtttcggagaaacttggaggacccgtggatattcttcatcttgatgcacatcccgatatatatgaccgttttgaaggcaattattactctcatgcatcttcttttgctcgtatcatggaaggtggctatgcgcggcggcttttacaggttgggatcagatccataaacaaagaaggacgggaacaaggcaagaggtttggagtagaacagtatgagatgcgaaccttctcaaaagatcgccaaatgttggaaaacttgaaactaggggaaggagtgaagggcgtgtatatctcgatcgatgttgactgtctcgatccgggattcgcgcacggagtgtcccacttcgaaccaggaggtctttctttccgagacgtccttaacatattacacaaccttcagggagatttggtgggggctgatgttgttgagtacaatccacagcgtgataccgctgatgacatgacggcaatggtcgcggctaagtttgttagagagctagccgcaaaaatgtcaaaatgaatttaaatggtactttggagtttaatcgttgaagcttgtaatatgcaataagtgtggtctcatagacatggtatcgaataagcttaatatcaattgggtttttaggccaaaatatcaatgtataatttgttaaattatgataagatgcattgtaataagttgtaaaagtaatttatcatattgcaatatatgtaaaaataaatttagc

SEQ ID NO: 105721 - protein, 355 aa, Arabidopsis thaliana; identical to SEQ ID NO: 22619
  peptide (1)..(355): Ceres Seq. ID no. 13617843

SEQ ID NO: 105722 - protein, 344 aa, Arabidopsis thaliana; identical to SEQ ID NO: 22620
  peptide (1)..(344): Ceres Seq. ID no. 13617844

SEQ ID NO: 105723 - protein, 215 aa, Arabidopsis thaliana; identical to SEQ ID NO: 22621
  peptide (1)..(215): Ceres Seq. ID no. 13617845

SEQ ID NO: 105724 - DNA, 1212 bp, Arabidopsis thaliana
  misc_feature (1)..(1212): Ceres Seq. ID no. 13617850
  misc_feature (1)..(1212): Ortholog of  Ceres SEQ ID NO 12598859 as cited in SEQ ID NO 62872
  misc_feature (1)..(1212): Ortholog of  Ceres SEQ ID NO 12617350 as cited in SEQ ID NO 63777
  misc_feature (1)..(1212): Ortholog of  Ceres SEQ ID NO 13598749 as cited in SEQ ID NO 64341
  misc_feature (1)..(1212): Ortholog of  Ceres SEQ ID NO 15176153 as cited in SEQ ID NO 0
  misc_feature (1)..(1212): Ortholog of  Ceres SEQ ID NO 15179157 as cited in SEQ ID NO 0
atctcacaaaccaatctaaacatcaaagacaaaaaccaaacctctttcactattacacttttcctcaaaaaaaagaaaaatgtatttgttagtgtttaaactctttctatttttgtctcttcttcaaatctctgtctctgctagaaacctagcttcacaagaaccaaaccagtttcaactactcaagtaccacaaaggagctcttctctccggcaaaatctccgttaacctaatctggtacggcaaattcaaaccatctcaaagagcaatcatctccgacttcattacctcactcacacacacttctcctacgtccaaaactctccaccaaccatctgttgccacgtggtggaaaaccacagaaaaatactacaaactcgcaacacccagcaaaaactcatcacctctgtctctaactctcgggaaacaaatcatcgacgagtcttgctctctaggaaaatctttaaccgataaaaagattcaaaccctagcttcgaaaggagaccaacgcaacgccatcaacgtcgttttgacttcagctgacgttacggttacaggatttggtatgagtcgttgcgggactcacggacacgctcgtggtttaggtaaacgtggctccaagtttgcttacatttgggttggaaactctgagacacaatgtcctggtcaatgcgcgtggcctttccacgcgccggtgtacggtccacagagtccaccactagtggcaccaaacaatgacgtgggactcgatgggatggttattaacttagctagtcttttagctggaaccgcaacgaacccttttggtaatggttactatcaaggtccacaaaacgcaccgcttgaagctgcttctgcttgtcctggcgtttatggtaaaggagcttatcctggttacgctggagatttgcttgtggatactacaacgggaggtagttttaatgcgtatggtgcaaacggcaggaagtttttgcttcctgctttgtatgatcctacgacgtcggcttgctctactatggtctgaatactaaaaaaaagtccaatgtttggtctttggtagtagaaaataatattctagcgtaattcttttgttatgtttggttacaaattctagtataattcaatttattcattaatattattctcatttttcccttcatgttgtatgactgaaatcttgtcgcttggactataatttaacggaatattatt

SEQ ID NO: 105725 - protein, 314 aa, Arabidopsis thaliana; identical to SEQ ID NO: 26705
  peptide (1)..(314): Ceres Seq. ID no. 13617851

SEQ ID NO: 105726 - DNA, 1331 bp, Arabidopsis thaliana
  misc_feature (1)..(1331): Ceres Seq. ID no. 13617860
  misc_feature (1)..(1331): Ortholog of  Ceres SEQ ID NO 14314327 as cited in SEQ ID NO 57354
atccaaaactctctcagtcatggctcttcttcgtcttcctggcatttccctccaaattctaggtcacaaatcaaaccagaagaaccctaatcccaatgttgccttcaccaatcactctctctctttatctactccttcactatgtcgtctccatcgtcacgcgacgtttccagactcaattccagcaaaatccagaaacctcacttcgtacttctccaccacaacacaagagccagtcctcgaatcttcttcttcttcttcttcagctcctgaggtagtagaagaagagatttctaaaaccagattgattgctcagaatgttccatggacatctacacctgaagatattagatcgttgttcgagaagtacgggagtgttatcgacattgagatgtctatgcataagaaggaaagaaatagaggtttggtgttcattgaaatggcttctcctgaagaagctgcaacagctcttaaatctcttgaatcgtgtgaatatgagggtcgtcgtttgaaggtagactatgcaaagaccaaaaagaagaagacatatgcgccgcgtgagacgccttcaccagtgcctacattcaatttgtttgttgcaaacttggcatttgaagcaagggccaagcatcttaaggagttctttgatgcagacactggtaatgttgtctccactgaagttatattccatgaaaatccaaggaggtcgagtggttacgggtttgtctctttcaaaaccaagaaacaggccgaggcagcgcttattgagttccaaggaaaggattttttgggaaggccaatccgattagctaaaagcaaacagtttgtgaagttgcaagcaaaagaagggttgcagccaccagaggaggaagcagaggaggaaccatctcagtctgagacaatgacccaagagcacgaaactccggctgcataaaacttagaagtcttcgttgcaggatcattgttggagatattggaattgacgaagaagcttcgagcttttaggtctttattcttcttagtttttgaccaacaagaggagtgggtacatacaagtagtacctaccttgagtaaatggtggagaggtaagaagtacaagaccgattttgttagaactgaaaactagtaagagacaggtattaccaaacgtcagtatcagaccagatcaaatctcaagaaacaaactcatgtggctcctacgaaacttgctttgttcagttaaacacaatgcttctttgtttgtcatctactttcgattacttgtttgcgtttgttatatgcttagtgtgtaacttcatatatgaacccgtactcttaagaaagttatgtt

SEQ ID NO: 105727 - protein, 310 aa, Arabidopsis thaliana
  peptide (1)..(310): Ceres Seq. ID no. 13617861
SKTLSVMALLRLPGISLQILGHKSNQKNPNPNVAFTNHSLSLSTPSLCRLHRHATFPDSIPAKSRNLTSYFSTTTQEPVLESSSSSSSAPEVVEEEISKTRLIAQNVPWTSTPEDIRSLFEKYGSVIDIEMSMHKKERNRGLVFIEMASPEEAATALKSLESCEYEGRRLKVDYAKTKKKKTYAPRETPSPVPTFNLFVANLAFEARAKHLKEFFDADTGNVVSTEVIFHENPRRSSGYGFVSFKTKKQAEAALIEFQGKDFLGRPIRLAKSKQFVKLQAKEGLQPPEEEAEEEPSQSETMTQEHETPAA

SEQ ID NO: 105728 - protein, 304 aa, Arabidopsis thaliana
  peptide (1)..(304): Ceres Seq. ID no. 13617862
MALLRLPGISLQILGHKSNQKNPNPNVAFTNHSLSLSTPSLCRLHRHATFPDSIPAKSRNLTSYFSTTTQEPVLESSSSSSSAPEVVEEEISKTRLIAQNVPWTSTPEDIRSLFEKYGSVIDIEMSMHKKERNRGLVFIEMASPEEAATALKSLESCEYEGRRLKVDYAKTKKKKTYAPRETPSPVPTFNLFVANLAFEARAKHLKEFFDADTGNVVSTEVIFHENPRRSSGYGFVSFKTKKQAEAALIEFQGKDFLGRPIRLAKSKQFVKLQAKEGLQPPEEEAEEEPSQSETMTQEHETPAA

SEQ ID NO: 105729 - protein, 180 aa, Arabidopsis thaliana; identical to SEQ ID NO: 41784
  peptide (1)..(180): Ceres Seq. ID no. 13617863

SEQ ID NO: 105730 - DNA, 2006 bp, Arabidopsis thaliana
  misc_feature (1)..(2006): Ceres Seq. ID no. 13617874
  misc_feature (1)..(2006): Ortholog of  Ceres SEQ ID NO 12613725 as cited in SEQ ID NO 68196
aagtcgccgggaaaagtaaaataaaaagccgtcacgtctccgataaataatagagtatcgttagataggtagcttcaacgtaaggaatctaaattggttcagctcaaaaaacgaaaacgatgggttccatcgaagaagaagcaagacctctcatcgaagaaggtttaattttacaggaagtgaaattgtatgctgaagatggttcagtggactttaatggaaacccaccattgaaggagaaaacaggaaactggaaagcttgtccttttattcttggtaatgaatgttgtgagaggctagcttactatggtattgctgggaatttaatcacttacctcaccactaagcttcaccaaggaaatgtttctgctgctacaaacgttaccacatggcaagggacttgttatctcactcctctcattggagctgttctggctgatgcttactggggacgttactggaccatcgcttgtttctccgggatttatttcatcgggatgtctgcgttaactctttcagcttcagttccggcattgaagccagcggaatgtattggtgacttttgtccatctgcaacgccagctcagtatgcgatgttctttggtgggctttacctgatcgctcttggaactggaggtatcaaaccgtgtgtctcatccttcggtgccgatcagtttgatgacacggactctcgggaacgagttagaaaagcttcgttctttaactggttttacttctccatcaatattggagcacttgtgtcatctagtcttctagtttggattcaagagaatcgcgggtggggtttagggtttgggataccaacagtgttcatgggactagccattgcaagtttcttctttggcacacctctttataggtttcagaaacctggaggaagccctataactcggatttcccaagtcgtggttgcttcgttccggaaatcgtctgtcaaagtccctgaagacgccacacttctgtatgaaactcaagacaagaactctgctattgctggaagtagaaaaatcgagcataccgatgattgccagtatcttgacaaagccgctgttatctcagaagaagaatcgaaatccggagattattccaactcgtggagactatgcacggttacgcaagtcgaagaactcaagattctgatccgaatgttcccaatctgggcttctggtatcattttctcagctgtatacgcacaaatgtccacaatgtttgttcaacaaggccgagccatgaactgcaaaattggatcattccagcttcctcctgcagcactcgggacattcgacacagcaagcgtcatcatctgggtgccgctctacgaccggttcatcgttcccttagcaagaaagttcacaggagtagacaaaggattcactgagatacaaagaatgggaattggtctgtttgtctctgttctctgtatggcagctgcagctatcgtcgaaatcatccgtctccatatggccaacgatcttggattagtcgagtcaggagccccagttcccatatccgtcttgtggcagattccacagtacttcattctcggtgcagccgaagtattctacttcatcggtcagctcgagttcttctacgaccaatctccagatgcaatgagaagcttgtgcagtgccttggctcttttgaccaatgcacttggtaactacttgagctcgttgatcctcacgctcgtgacttattttacaacaagaaatgggcaagaaggttggatttcggataatctcaattcaggtcatctcgattacttcttctggctcttggctggtcttagccttgtgaacatggcggtttacttcttctctgctgctaggtataagcaaaagaaagcttcgtcgtagtaatgctgttatctatctactttcattacatacaaaagtttgtttctttcaactgtaactgtctctgtatcaataacaacattgctgtgtacttttcctttcaatttcaaaagtttaagtcgcatttgc

SEQ ID NO: 105731 - protein, 585 aa, Arabidopsis thaliana; identical to SEQ ID NO: 23352
  peptide (1)..(585): Ceres Seq. ID no. 13617875

SEQ ID NO: 105732 - protein, 459 aa, Arabidopsis thaliana; identical to SEQ ID NO: 23353
  peptide (1)..(459): Ceres Seq. ID no. 13617876

SEQ ID NO: 105733 - protein, 427 aa, Arabidopsis thaliana; identical to SEQ ID NO: 23354
  peptide (1)..(427): Ceres Seq. ID no. 13617877

SEQ ID NO: 105734 - DNA, 1320 bp, Arabidopsis thaliana
  misc_feature (1)..(1320): Ceres Seq. ID no. 13617890
  misc_feature (1)..(1320): Ortholog of  Ceres SEQ ID NO 14302314 as cited in SEQ ID NO 62543
  misc_feature (1)..(1320): Ortholog of  Ceres SEQ ID NO 13598391 as cited in SEQ ID NO 62769
atttcgggaaaataacaaaaaaagaaagaaataaaaagaggtgattcaaatccagagagttctcattatgtatattcaaaatctgaatcgagaaggaatctgactcgtgtagatgagaatcggcggcgtcgaggttacgaaatttgcgtcggagatgatgtcgtcgtcgtcttcgtcggcggtggagatgttgaatctcaaagaagcttcgaattggtggtcagacgtaaacgaatctccgatttggcaggatcgtatcttccatgttctcgctgttctctacggaatcgtttccctcgttgctgtgattcaacttgtgagaatacaattgagagttcctgaatatggttggacgacgcaaaaggtctttcactttctcaatttcgttgttaatggagttcgtgctgtggtgtttgtcttcaggcgaaatgttcagtttatgcaaccagagattctgcaacatatcttgcttgatattccaagtcttgctttcttcaccacctatgctcttctggttcttttctgggctgaaatttattatcaggcgcgtgcagtatcgactgatggactcaggccaagcttcttcacaattaatgcagttgtatatgtagttcagattgctctatggttggttttgtggtggaagcctgttcgagttatggtaatcctatctaagatgttctttgcaggtgtttcattgttcgctgcccttggatttttactttatggtggaaggcttttcctaatgttgcaacggtttccagtagaatctaaagggcggcgcaaaaagctgcaagaggttggttacgtgacaaccatatgctttacgtgtttcctcatcagatgtatcatgatgtgctttgctgctttcgatgagggggcaaaccttgatgtgttagatcaccccatccttaacttcatatattacctgttggtagagatattaccctcctctctggtcctcttcatcttgagaaagctaccaccaaaacgaggcattacacaataccatcagattcgctgaaatgtaaaggcacgacaactaatgatcagatgaagaagacaagactatggttgtttatgcttttctgtaatcaatagagagaaaagcataagatggaaatgaaatagatctaaagctgataaggccttttggttgatgatgggaatggattctacttgatttttggtaaacggtaaactggggtttgttccctttatataaaggttatgttgtaaaaaatttattataaagtacatgtaagaattgtgtaaatttatgttgaatcatgtggtaaaaaaaaaaaaaagtttcttttt

SEQ ID NO: 105735 - protein, 303 aa, Arabidopsis thaliana; identical to SEQ ID NO: 28982
  peptide (1)..(303): Ceres Seq. ID no. 13617891

SEQ ID NO: 105736 - protein, 289 aa, Arabidopsis thaliana; identical to SEQ ID NO: 28983
  peptide (1)..(289): Ceres Seq. ID no. 13617892

SEQ ID NO: 105737 - protein, 288 aa, Arabidopsis thaliana; identical to SEQ ID NO: 28984
  peptide (1)..(288): Ceres Seq. ID no. 13617893

SEQ ID NO: 105738 - DNA, 2197 bp, Arabidopsis thaliana
  misc_feature (1)..(2197): Ceres Seq. ID no. 13617897
  misc_feature (1)..(2197): Ortholog of  Ceres SEQ ID NO 14310639 as cited in SEQ ID NO 53858
  misc_feature (1)..(2197): Ortholog of  Ceres SEQ ID NO 14312851 as cited in SEQ ID NO 58364
atgattccactctcgtttgcagcattaggagacatagttgataagaagcttgatgaggattatgtaaaggaagaagttgaaatgatgatacaagtatctctgctatccacacaagcagcaccgggagaacgaccaacgatgtcggaagttgaaatttttagaaactcctgcttgtgctacataaactggttttgcaacatcatctccataatatattctaacagtttgcttttgaggattgattcaggatcatcatctatatctgttgtcttcttagtttttactctgtctcggatggagcaacgacggatgttaacggcggctagaccacgtttgtcctcgacgatccgtacgattacgtctcacgtggcgttctcagcaagccgtctcttgaaaccttatgttgcatatcggcttggattggaggacgcgaatcagaggaaaacagagaacgaatccaccggtggagataaagaaatcgccaattcgctcctccactgtcttaaatttcactatcttcttcttcattttccttccttctcacttcaaatccataatcgctctacttctctctctctctctagattcgaaaaaatggcgaaactggtgatgttgttggttctctgtatcttaccggcgatagccatggcggcaaggaggggaaatattggaaagaatacaatggtggttcaaggtagcacctactgtgacatttgcaaattcggcttcgagactcctgaatcctcctacttcatccccggtgcaacggtgaagctatcatgcaaagacaggaagacaatggaagaggtttacacagacaaagctgtatcagacaaagaaggaaagtataagttcattgtccacgacgatcacagagaccagatgtgcgatgttttgcttgtgaaaagctcggataaaacctgctctaaaatctccgttggacgtgagaagtctcgtgtgatcttgaaccattacagtggcattgcctcgcagatcagacatgctaacaacatgggatttgagaaagaagtgagaatggctacttctacgactatgtctcatcaagcgattgggtctgttgtctctcaaagaccattcaaagcttctcagtttctaaaggagcctttgaataatgtaccaatgaaattcagacaaaaaagattcaagattgaagcaactgcttctcagatatctgtcgttgacaacactttcttgtctccgtctccttccaagaacaaaccacatgaatctaagaagaaatcaaatgaagcagctttgatattgattaggcatggagaatcgttatggaatgagaagaatttgttcacgggttgtgttgatgtgccattgactcagaaaggtgttggagaagctattgaagctgggaagaagattagtaacattcctgtagatttgattttcacttcttctttaatccgtgctcagatgactgcaatgcttgccatgactcagcatcgtcgcaagaaggttccaatcatcttgcacaacgagagtgtaaaggcgaaaacttggagtcatgttttcagcgaagaaactagaaaacaatctatcccggttatagcggcttggcaactgaatgagagaatgtatggagagttgcagggtttgaacaagaaagaaacagcggaaagatacgggacacaacaagttcacgaatggcgcaggagttacgaaattcctcctccgaaaggcgagagcttggagatgtgtgctgagagagcagtggcttattttgaagacaatatcaaaccagagcttgcatctggaaacaatgtaatgattgctgctcacgggaactcattgagatctatcattatgtatcttgacgatttaacttctcaggaggttacaactctagacctgtccacaggtgtaccattgctctacatcttcaaagaaggcaagttcatgaaacgaggaagccccgtcggttctactgaagctggtgtctatgcttatacaaagagattggcacaatacagagagaagcttgatgcggcggcgaccatttaactaatgtcttccagaaataaaccagaaaaatcatttgtttttgtgtttctctggcttagctcttatgtagtgacaaaacaatcaagaacagtttaaatatgtagtagatacacaaatcacattcatttcatgttatttcaaatatatatgaaaaagccaatcc

SEQ ID NO: 105739 - protein, 677 aa, Arabidopsis thaliana
  peptide (1)..(677): Ceres Seq. ID no. 13617898
MIPLSFAALGDIVDKKLDEDYVKEEVEMMIQVSLLSTQAAPGERPTMSEVEIFRNSCLCYINWFCNIISIIYSNSLLLRIDSGSSSISVVFLVFTLSRMEQRRMLTAARPRLSSTIRTITSHVAFSASRLLKPYVAYRLGLEDANQRKTENESTGGDKEIANSLLHCLKFHYLLLHFPSFSLQIHNRSTSLSLSRFEKMAKLVMLLVLCILPAIAMAARRGNIGKNTMVVQGSTYCDICKFGFETPESSYFIPGATVKLSCKDRKTMEEVYTDKAVSDKEGKYKFIVHDDHRDQMCDVLLVKSSDKTCSKISVGREKSRVILNHYSGIASQIRHANNMGFEKEVRMATSTTMSHQAIGSVVSQRPFKASQFLKEPLNNVPMKFRQKRFKIEATASQISVVDNTFLSPSPSKNKPHESKKKSNEAALILIRHGESLWNEKNLFTGCVDVPLTQKGVGEAIEAGKKISNIPVDLIFTSSLIRAQMTAMLAMTQHRRKKVPIILHNESVKAKTWSHVFSEETRKQSIPVIAAWQLNERMYGELQGLNKKETAERYGTQQVHEWRRSYEIPPPKGESLEMCAERAVAYFEDNIKPELASGNNVMIAAHGNSLRSIIMYLDDLTSQEVTTLDLSTGVPLLYIFKEGKFMKRGSPVGSTEAGVYAYTKRLAQYREKLDAAATI

SEQ ID NO: 105740 - protein, 650 aa, Arabidopsis thaliana
  peptide (1)..(650): Ceres Seq. ID no. 13617899
MMIQVSLLSTQAAPGERPTMSEVEIFRNSCLCYINWFCNIISIIYSNSLLLRIDSGSSSISVVFLVFTLSRMEQRRMLTAARPRLSSTIRTITSHVAFSASRLLKPYVAYRLGLEDANQRKTENESTGGDKEIANSLLHCLKFHYLLLHFPSFSLQIHNRSTSLSLSRFEKMAKLVMLLVLCILPAIAMAARRGNIGKNTMVVQGSTYCDICKFGFETPESSYFIPGATVKLSCKDRKTMEEVYTDKAVSDKEGKYKFIVHDDHRDQMCDVLLVKSSDKTCSKISVGREKSRVILNHYSGIASQIRHANNMGFEKEVRMATSTTMSHQAIGSVVSQRPFKASQFLKEPLNNVPMKFRQKRFKIEATASQISVVDNTFLSPSPSKNKPHESKKKSNEAALILIRHGESLWNEKNLFTGCVDVPLTQKGVGEAIEAGKKISNIPVDLIFTSSLIRAQMTAMLAMTQHRRKKVPIILHNESVKAKTWSHVFSEETRKQSIPVIAAWQLNERMYGELQGLNKKETAERYGTQQVHEWRRSYEIPPPKGESLEMCAERAVAYFEDNIKPELASGNNVMIAAHGNSLRSIIMYLDDLTSQEVTTLDLSTGVPLLYIFKEGKFMKRGSPVGSTEAGVYAYTKRLAQYREKLDAAATI

SEQ ID NO: 105741 - protein, 649 aa, Arabidopsis thaliana
  peptide (1)..(649): Ceres Seq. ID no. 13617900
MIQVSLLSTQAAPGERPTMSEVEIFRNSCLCYINWFCNIISIIYSNSLLLRIDSGSSSISVVFLVFTLSRMEQRRMLTAARPRLSSTIRTITSHVAFSASRLLKPYVAYRLGLEDANQRKTENESTGGDKEIANSLLHCLKFHYLLLHFPSFSLQIHNRSTSLSLSRFEKMAKLVMLLVLCILPAIAMAARRGNIGKNTMVVQGSTYCDICKFGFETPESSYFIPGATVKLSCKDRKTMEEVYTDKAVSDKEGKYKFIVHDDHRDQMCDVLLVKSSDKTCSKISVGREKSRVILNHYSGIASQIRHANNMGFEKEVRMATSTTMSHQAIGSVVSQRPFKASQFLKEPLNNVPMKFRQKRFKIEATASQISVVDNTFLSPSPSKNKPHESKKKSNEAALILIRHGESLWNEKNLFTGCVDVPLTQKGVGEAIEAGKKISNIPVDLIFTSSLIRAQMTAMLAMTQHRRKKVPIILHNESVKAKTWSHVFSEETRKQSIPVIAAWQLNERMYGELQGLNKKETAERYGTQQVHEWRRSYEIPPPKGESLEMCAERAVAYFEDNIKPELASGNNVMIAAHGNSLRSIIMYLDDLTSQEVTTLDLSTGVPLLYIFKEGKFMKRGSPVGSTEAGVYAYTKRLAQYREKLDAAATI

SEQ ID NO: 105742 - DNA, 1503 bp, Arabidopsis thaliana
  misc_feature (1)..(1503): Ceres Seq. ID no. 13617901
  misc_feature (1)..(1503): Ortholog of  Ceres SEQ ID NO 15176862 as cited in SEQ ID NO 67415
agatttttgttttgtttttaatcgggaaagatgaaggcggagacgatgacgctgcttcttgtgaatctagccggaataatggaaagagccgatgaatctctgcttccaggtgtatacaaagaggtcggtttagctcttcataccgatccaaccggactcgggtcattaacgttgctacgatccatggttcaagccgcttgctatcccttagctgcttacatggccattagacataaccgagctcacgttatagctctgggtgcatttctctggtccgctgctactttccttgtcgctttctcttccactttcttccaggtagcagtgtctagagctctgaatggaattggtcttgctcttgtggctccagctattcagtctctcgttgctgactcaactgatgatgctaaccgtggtactgcttttggatggttacaattaacagcaaatattggttcgattttaggcgggctttgctctgttttaatagctccattaacctttatgggcatacctggttggagagttgctttccatatcgtaggtgtgatcagtgttattgttggtgtgctagttagagttttcgccaatgatccacattttgtgaaggatggtgttgatgtttcgaatcaaccaggttcgaggaaacctttttgtacagaggtgaaggatttggtccgggaagctgatactgtcataaagattcggtcttttcagatcattgtagctcagggagtgacaggatcgtttccttggtctgctctttcttttgcacctatgtggttggaactcattgggttctcacacgggaaaactgcattcttgatgggtcttttcgtggctgcatcttctcttggtggcttgtttggaggcaaaatgggagattttctgtctactcgtcttcccaattccggaagaatcattctcgcgcagattagttcagcctcagcgatcccgctcgctgcaattctcttgttggtcttaccagatgatccatctacagctgcaatccatggtctgatcttagtcctattggggctatttgtttcttggaatgctcctgctaccaacaacccaatcttcgcagagatcgttccagagaaatcaagaacaagcgtctacgcactggacaaatcgtttgagtctatcttgtcatcgtttgcacctcctatagttggaatcctggcacaacatgtttatggatacaagccaatccctgaagggtcatcgaggtcaacagagatagccacagatagagagaatgcagcatctctggcaaaagctctttatacatctataggactcccaatggcggcttgctgcttcatatactcctttctttaccgttcctatcctctagacagagatcgtgctcggatggaagcttttatagattctgagatgcgtgaacttcttccagaaagttccaatcgagacattgagttttcacaagaagaagacccctttgcaaaccatgttaaccccaatttacaagctagataa

SEQ ID NO: 105743 - protein, 490 aa, Arabidopsis thaliana
  peptide (1)..(490): Ceres Seq. ID no. 13617902
MKAETMTLLLVNLAGIMERADESLLPGVYKEVGLALHTDPTGLGSLTLLRSMVQAACYPLAAYMAIRHNRAHVIALGAFLWSAATFLVAFSSTFFQVAVSRALNGIGLALVAPAIQSLVADSTDDANRGTAFGWLQLTANIGSILGGLCSVLIAPLTFMGIPGWRVAFHIVGVISVIVGVLVRVFANDPHFVKDGVDVSNQPGSRKPFCTEVKDLVREADTVIKIRSFQIIVAQGVTGSFPWSALSFAPMWLELIGFSHGKTAFLMGLFVAASSLGGLFGGKMGDFLSTRLPNSGRIILAQISSASAIPLAAILLLVLPDDPSTAAIHGLILVLLGLFVSWNAPATNNPIFAEIVPEKSRTSVYALDKSFESILSSFAPPIVGILAQHVYGYKPIPEGSSRSTEIATDRENAASLAKALYTSIGLPMAACCFIYSFLYRSYPLDRDRARMEAFIDSEMRELLPESSNRDIEFSQEEDPFANHVNPNLQAR

SEQ ID NO: 105744 - protein, 485 aa, Arabidopsis thaliana
  peptide (1)..(485): Ceres Seq. ID no. 13617903
MTLLLVNLAGIMERADESLLPGVYKEVGLALHTDPTGLGSLTLLRSMVQAACYPLAAYMAIRHNRAHVIALGAFLWSAATFLVAFSSTFFQVAVSRALNGIGLALVAPAIQSLVADSTDDANRGTAFGWLQLTANIGSILGGLCSVLIAPLTFMGIPGWRVAFHIVGVISVIVGVLVRVFANDPHFVKDGVDVSNQPGSRKPFCTEVKDLVREADTVIKIRSFQIIVAQGVTGSFPWSALSFAPMWLELIGFSHGKTAFLMGLFVAASSLGGLFGGKMGDFLSTRLPNSGRIILAQISSASAIPLAAILLLVLPDDPSTAAIHGLILVLLGLFVSWNAPATNNPIFAEIVPEKSRTSVYALDKSFESILSSFAPPIVGILAQHVYGYKPIPEGSSRSTEIATDRENAASLAKALYTSIGLPMAACCFIYSFLYRSYPLDRDRARMEAFIDSEMRELLPESSNRDIEFSQEEDPFANHVNPNLQAR

SEQ ID NO: 105745 - protein, 474 aa, Arabidopsis thaliana
  peptide (1)..(474): Ceres Seq. ID no. 13617904
MERADESLLPGVYKEVGLALHTDPTGLGSLTLLRSMVQAACYPLAAYMAIRHNRAHVIALGAFLWSAATFLVAFSSTFFQVAVSRALNGIGLALVAPAIQSLVADSTDDANRGTAFGWLQLTANIGSILGGLCSVLIAPLTFMGIPGWRVAFHIVGVISVIVGVLVRVFANDPHFVKDGVDVSNQPGSRKPFCTEVKDLVREADTVIKIRSFQIIVAQGVTGSFPWSALSFAPMWLELIGFSHGKTAFLMGLFVAASSLGGLFGGKMGDFLSTRLPNSGRIILAQISSASAIPLAAILLLVLPDDPSTAAIHGLILVLLGLFVSWNAPATNNPIFAEIVPEKSRTSVYALDKSFESILSSFAPPIVGILAQHVYGYKPIPEGSSRSTEIATDRENAASLAKALYTSIGLPMAACCFIYSFLYRSYPLDRDRARMEAFIDSEMRELLPESSNRDIEFSQEEDPFANHVNPNLQAR

SEQ ID NO: 105746 - DNA, 1255 bp, Arabidopsis thaliana
  misc_feature (1)..(1255): Ceres Seq. ID no. 13617905
  misc_feature (1)..(1255): Ortholog of  Ceres SEQ ID NO 13595616 as cited in SEQ ID NO 59854
gatttctttctttgcctttaataaagcttcgtgctcaataggctgccacggaggcgagcctgaaaaatgccgatgacggttgtttccggtcgattctcaacggcgttgctccctacttgcttttccttgtcgcggttgcattccgtcaagtacgccgctcaaagacgggttgttttcgtttccagatcagctcacgcctcttcagcctccgtctccgttgagacaaattcgaattcgaatgtggattttgttatcgagaagaaggataagaacagaggagagaagaagattctagcttgtcccatctgttataactccttagcatggattagtcaacctaatggattaatagaatctgctgcctctggtattcaagtacaatgcaatacatgtaaaaggagttactcgggtaatgagacgcatcttgatttggctgttgctagtggaagcaagagatacagtgaaccgatgcctctttccactgagttatttaggactccactggtctcgtttctctatgagaggggttggcgtcagaatttcatatggggaggttttccaggaccagagaaagagtttgaaatggctaaggcctatctgaagcctgttttgggaggcaatatcattgatgctagttgtggaagtgggatgttctcgaggttattcactagaagtgatctattttctctggttattgctctagattactcagagaatatgctgcgacaatgctatgaactcttaaataaagaagaaaactttcccaacaaagagaaacttgttctagtccgagctgacattgctagactccctttcctttcgggttcagttgacgctgtccatgctggtgctgctctgcattgctggccttcaccatcctcagccgttgctgagataagccgtgttcttagacctggaggagtatttgtggccaccacatttatctatgacggtccattcagttttatccccttcttgaagaatcttcgtcaggaaataatgagatattcaggttctcacattttcctaaatgaacgtgagcttgaagatatctgcaaagcctgtggtctcgttaacttcactcgtgttagaaacgggccatttataatgctatctgcaacaaaacccagctaagctcaccctctttaaagtatatatacttttctgtaaaaaattggtataaagttataaacattataacaacttgagttccatacagtatacctaatttgtaaagctttttgcaaatgttcct

SEQ ID NO: 105747 - protein, 355 aa, Arabidopsis thaliana; identical to SEQ ID NO: 21490
  peptide (1)..(355): Ceres Seq. ID no. 13617906

SEQ ID NO: 105748 - protein, 353 aa, Arabidopsis thaliana; identical to SEQ ID NO: 21491
  peptide (1)..(353): Ceres Seq. ID no. 13617907

SEQ ID NO: 105749 - protein, 221 aa, Arabidopsis thaliana; identical to SEQ ID NO: 21492
  peptide (1)..(221): Ceres Seq. ID no. 13617908

SEQ ID NO: 105750 - DNA, 915 bp, Arabidopsis thaliana
  misc_feature (1)..(915): Ceres Seq. ID no. 13617909
  misc_feature (1)..(915): Ortholog of  Ceres SEQ ID NO 14310243 as cited in SEQ ID NO 20666
aagtctatctgctcatttcctcacacgatcaaaaagatagttcaaatttttctttaaagcttaagaaaccactcagtggaaaccaagactaattaaggctaatggtttctcgacaagaaggaaccctctactctagaaagagggatttcacagtctgtggagaagagtttcacaattcattcaagaagagcaaacaagaagatcaatcacagagcactctgttcaatgaacgaccaaaatcggagagtatgagatcaattacctttgattttgaacttcatctccacactcctctaccatcagattggcaaactaagggatattcaagaacatctgatgagcatagggcatatcccaaagatccagtgatttttggacaacctaagatgagcctagaccttgagctgaacctttcaccttcaggttcaccttcacgaaccacaacgaagaaatatgaatcctcctcaattcacaatgaaacagtatcatcatcaaagattaaagttttgacgaacacaagtaagaagagcataattgggacaggactaagtcgatcaccatcctggctagcgtttgaaggtggtgatgataacgatgttgatcacaaggggcaagagatggtaacaacagtttgcatgaaatgccacatgctggttatgttgtgtacatcaactcctgtttgtcccaactgcaagttcatgcacccacacgatcacagctctacaaaactgtttaaaccatcaaatttgcttaggcttctatgctaggctctttcaaggttactgaatctataaaatttgtacggcagataataagccaagagactagatatggacaaagttatgtatatactaaaagtaccagaaagtttgtattaattctctgcttctatgaacgatcatgctttagatctct

SEQ ID NO: 105751 - protein, 221 aa, Arabidopsis thaliana
  peptide (1)..(221): Ceres Seq. ID no. 13617910
MVSRQEGTLYSRKRDFTVCGEEFHNSFKKSKQEDQSQSTLFNERPKSESMRSITFDFELHLHTPLPSDWQTKGYSRTSDEHRAYPKDPVIFGQPKMSLDLELNLSPSGSPSRTTTKKYESSSIHNETVSSSKIKVLTNTSKKSIIGTGLSRSPSWLAFEGGDDNDVDHKGQEMVTTVCMKCHMLVMLCTSTPVCPNCKFMHPHDHSSTKLFKPSNLLRLLC

SEQ ID NO: 105752 - protein, 172 aa, Arabidopsis thaliana
  peptide (1)..(172): Ceres Seq. ID no. 13617911
MRSITFDFELHLHTPLPSDWQTKGYSRTSDEHRAYPKDPVIFGQPKMSLDLELNLSPSGSPSRTTTKKYESSSIHNETVSSSKIKVLTNTSKKSIIGTGLSRSPSWLAFEGGDDNDVDHKGQEMVTTVCMKCHMLVMLCTSTPVCPNCKFMHPHDHSSTKLFKPSNLLRLLC

SEQ ID NO: 105753 - protein, 126 aa, Arabidopsis thaliana; identical to SEQ ID NO: 70719
  peptide (1)..(126): Ceres Seq. ID no. 13617912

SEQ ID NO: 105754 - DNA, 1480 bp, Arabidopsis thaliana
  misc_feature (1)..(1480): Ceres Seq. ID no. 13617913
  misc_feature (1)..(1480): Ortholog of  Ceres SEQ ID NO 15177012 as cited in SEQ ID NO 56256
  misc_feature (1)..(1480): Ortholog of  Ceres SEQ ID NO 13596509 as cited in SEQ ID NO 62004
  misc_feature (1)..(1480): Ortholog of  Ceres SEQ ID NO 13500385 as cited in SEQ ID NO 67583
atctcttcaaataattttattggttcttctgtcttatgaacaagaacagaggagctctgtcttgtttcctcttatttacgtactaccaatcctcatacacacacatgtgtctttggtttcatctccgaaaagtgataatctgttttatttgatttgacttttgagagaacagagcatatataaagaaacagagcagctctgttttttttttttgtgttgcagtttgtagaatcatggagaggtacgaaatagtgaaggatattgggtctggtaacttcggagtagcaaagcttgttcgtgacaaattttccaaagagcttttcgctgttaagttcatcgagcgaggccaaaagattgatgaacatgtacaaagagaaatcatgaaccataggtcgctgatccatcccaatataataagattcaaggaggttttattgacggcaacacatttggcgttagtaatggaatacgccgccggaggagaactgttcggaagaatctgcagcgccggaagattcagtgaagacgaggcaaggtttttctttcagcagcttatatcaggagttaattactgtcacagtcttcaaatatgccatagagatttaaagctagagaacacgttacttgatggaagcgaagcgccacgtgtaaagatttgcgactttggatattcaaaatcaggagttcttcattcgcaaccaaagacaacagtaggaacacctgcttacattgcacctgaagtgctctccacgaaagagtatgacggcaaaatcgctgatgtttggtcttgtggagtcactttgtatgttatgcttgttggtgcttatccttttgaagatccttctgatcctaaagattttcggaagacgatcggtcggattctcaaagctcagtatgctattcctgattatgttcgagtttcggatgaatgcagacatcttctctctcggatattcgttgccaaccctgaaaagagaataacaatagaggagataaagaatcattcttggtttctcaagaacttgccggtagagatgtatgaaggatcattgatgatgaatggtccatcgactcagacagtagaagagatagtgtggatcattgaagaagctcggaaacctatcaccgtagctactggactcgcaggtgctggtggctctggtggaagcagtaatggtgccattggaagtagcagtatggatctcgatgacttggacacagatttcgacgacatcgataccgctgatctcctttcccctttgtgaacaattgtatcaaaaaccaaagatttcatgtttctgaagcctgctgatactactacacattgatgatacacagacgtgaatataattgttcactaaaatgtataattagagtgtgaaaacatttgtctttgattacaaaaatgttctgttagacatttttatacatatgcatggaagatgtatatataaacagaaacataatatctagtcacgtt

SEQ ID NO: 105755 - protein, 343 aa, Arabidopsis thaliana; identical to SEQ ID NO: 38544
  peptide (1)..(343): Ceres Seq. ID no. 13617914

SEQ ID NO: 105756 - protein, 294 aa, Arabidopsis thaliana; identical to SEQ ID NO: 38545
  peptide (1)..(294): Ceres Seq. ID no. 13617915

SEQ ID NO: 105757 - protein, 267 aa, Arabidopsis thaliana; identical to SEQ ID NO: 38546
  peptide (1)..(267): Ceres Seq. ID no. 13617916

SEQ ID NO: 105758 - DNA, 820 bp, Arabidopsis thaliana
  misc_feature (1)..(820): Ceres Seq. ID no. 13617920
  misc_feature (1)..(820): Ortholog of  Ceres SEQ ID NO 14301603 as cited in SEQ ID NO 67721
  misc_feature (1)..(820): Ortholog of  Ceres SEQ ID NO 13596128 as cited in SEQ ID NO 67831
acaccgacagctaaaaatggaggaagagattatcctattggattattgggcgagtatgtacgggatgaggacaaggattgctttggaggagaaaaaagtgaaatatgagtatagagaagaagatctgagtaacaaaagccctttacttcttcagatgaaccctattcacaagaagattccggttttaattcatgaaggtaaaccgatctgcgaatcgataatccaagttcagtatatcgacgagctttggcctgacacaaacccgattcttccttcagatccttaccagagagctcaagctagattttgggcagattacatcgacaagaagacatacgtgccatgcaaggcattatggtcagaatcaggggagaaacaagaggcagcgaagatagagtttatagaagtactcaagacacttgattcagagcttggagacaaatattattttggaggaaacgaatttggactcgttgacattgcctttatcggattctatagttggtttcgtacgtacgaggaggtagcgaatctcagcatcgtgttagagtttcctaagctaatggcgtgggcacagaggtgtttgaagagagagagtgtggctaaggccttgcctgactctgataaggttcttaagtcagtctctgatcatcggaagattattttaggaatcgattaagttcacttacccctgttctgtttttcatgttttttctcattttaaaatgtggcgtgtatttcaagtttgtcaataagtatggtatagaccaaggtatgtttgtggtgggatttgagtgaagctatgatctatttttatttg

SEQ ID NO: 105759 - protein, 225 aa, Arabidopsis thaliana; identical to SEQ ID NO: 30613
  peptide (1)..(225): Ceres Seq. ID no. 13617921

SEQ ID NO: 105760 - protein, 220 aa, Arabidopsis thaliana; identical to SEQ ID NO: 30614
  peptide (1)..(220): Ceres Seq. ID no. 13617922

SEQ ID NO: 105761 - protein, 207 aa, Arabidopsis thaliana; identical to SEQ ID NO: 30615
  peptide (1)..(207): Ceres Seq. ID no. 13617923

SEQ ID NO: 105762 - DNA, 1295 bp, Arabidopsis thaliana
  misc_feature (1)..(1295): Ceres Seq. ID no. 13617926
  misc_feature (1)..(1295): Ortholog of  Ceres SEQ ID NO 14313583 as cited in SEQ ID NO 55431
  misc_feature (1)..(1295): Ortholog of  Ceres SEQ ID NO 12476493 as cited in SEQ ID NO 58163
  misc_feature (1)..(1295): Ortholog of  Ceres SEQ ID NO 12617090 as cited in SEQ ID NO 64005
  misc_feature (1)..(1295): Ortholog of  Ceres SEQ ID NO 13597233 as cited in SEQ ID NO 64370
  misc_feature (1)..(1295): Ortholog of  Ceres SEQ ID NO 14302844 as cited in SEQ ID NO 65379
  misc_feature (1)..(1295): Ortholog of  Ceres SEQ ID NO 15226354 as cited in SEQ ID NO 0
atgtctcagccttcaaagctatcaaaatcaaaaaaattctatcaaacaaggaaatatatcaatggcggtattgtctaaaccggtagcaataccaaaatccgggttctctctaatcccggttatagatatgtctgacccagaatccaaacatgccctcgtgaaagcatgcgaagacttcggcttcttcaaggtgatcaaccatggcgtttccgcagagctagtctctgttttagaacacgagaccgtcgatttcttctcgttgcccaagtcagagaaaacccaagtcgcaggttatcccttcggatacgggaacagtaagattggtcggaatggtgacgtgggttgggttgagtacttgttgatgaacgctaatcatgattccggttcgggtccactatttccaagtcttctcaaaagcccgggaactttcagaaacgcattggaagagtacacaacatcagtgagaaaaatgacattcgatgttttggagaagatcacagatgggctagggatcaaaccgaggaacacacttagcaagcttgtgtctgaccaaaacacggactcgatattgagacttaatcactatccaccatgtcctcttagcaataagaaaaccaatggtggtaagaatgtgattggttttggtgaacacacagatcctcaaatcatctctgtcttaagatctaacaacacttctggtctccaaattaatctaaatgatggctcatggatctctgtccctcccgatcacacttccttcttcttcaacgttggtgactctctccaggtgatgacaaatgggaggttcaagagcgtgaggcatagggttttagctaactgtaaaaaatctagggtttctatgatttacttcgctggaccttcattgactcagagaatcgctccgttgacatgtttgatagacaatgaggacgagaggttgtacgaggagtttacttggtctgaatacaaaaactctacctacaactctagattgtctgataataggcttcaacaattcgaaaggaagactataaaaaatctcctaaattgattgatatatctatttaatctataagtgtgtgctacatacagacaatgcatctgtatattttgaagttaatgttatttgttaatccaataactgtaaaaacatgcaagagtgtgtttgtttgtttcgtaatatcaacatcgctcccatcttttatggataatatcaagttgtttaaacacactgttttgatgtaagctacattttactttatgtgtacatcttattgtgttatataaattatttc

SEQ ID NO: 105763 - protein, 349 aa, Arabidopsis thaliana; identical to SEQ ID NO: 43183
  peptide (1)..(349): Ceres Seq. ID no. 13617927

SEQ ID NO: 105764 - protein, 329 aa, Arabidopsis thaliana; identical to SEQ ID NO: 43184
  peptide (1)..(329): Ceres Seq. ID no. 13617928

SEQ ID NO: 105765 - protein, 307 aa, Arabidopsis thaliana; identical to SEQ ID NO: 43185
  peptide (1)..(307): Ceres Seq. ID no. 13617929

SEQ ID NO: 105766 - DNA, 857 bp, Arabidopsis thaliana
  misc_feature (1)..(857): Ceres Seq. ID no. 13617930
  misc_feature (1)..(857): Ortholog of  Ceres SEQ ID NO 12610554 as cited in SEQ ID NO 59805
  misc_feature (1)..(857): Ortholog of  Ceres SEQ ID NO 12614051 as cited in SEQ ID NO 67827
cgcaacggaaaacaaatccgccaatggaagcggctctgagcatcttcaagctctcgttccttctcacccttctctccggcggttcagaccttatcgactcgttgccgccgaattgtaaccgagccgagtgtccgagttatgaggttgtccacgccgggaatggctacgagattcatcgctacaacaccaccgtttggatttctaccgaaccaattcaagatatctctctcaacgaagcttctggcaacggttggaaccaattgtctgattacatgaacgggaacaacgattatcaccagaggatagagatagcacttccttatatcacccaagtctctcagaacttgagcaccttcatagtctctttcttcgttcccaaggcattccaacctgatccacctccgggaaacaacctccacgtacagagatgggactcgaggtacgtggcggtgaagcaaattagtggatatgttgcggatcataaaattggaaaacaagtggctgagctgaaggcgagcctacaaggtaccgtatgggccaaggcaattgagaaaagcagagaaaccggcggtgtcggatcggcttgggcttacacggtggcgcaatttagctggccgttccagtggagtcagcgggtcaatgagatttggtttccgtttgaaatggaagatgaagaaactgttagtatcgttactcagtgaacaaaaaaatgaacacttttttatctttttatggtgtagtgacaaagcaaagccattgagataagcctatctcctaaaagttgttaaataactgtccattgtcttactctggtcagcacattccctaaagaaaagaaaatcaaaagagtacttttt

SEQ ID NO: 105767 - protein, 232 aa, Arabidopsis thaliana
  peptide (1)..(232): Ceres Seq. ID no. 13617931
QRKTNPPMEAALSIFKLSFLLTLLSGGSDLIDSLPPNCNRAECPSYEVVHAGNGYEIHRYNTTVWISTEPIQDISLNEASGNGWNQLSDYMNGNNDYHQRIEIALPYITQVSQNLSTFIVSFFVPKAFQPDPPPGNNLHVQRWDSRYVAVKQISGYVADHKIGKQVAELKASLQGTVWAKAIEKSRETGGVGSAWAYTVAQFSWPFQWSQRVNEIWFPFEMEDEETVSIVTQ

SEQ ID NO: 105768 - protein, 225 aa, Arabidopsis thaliana
  peptide (1)..(225): Ceres Seq. ID no. 13617932
MEAALSIFKLSFLLTLLSGGSDLIDSLPPNCNRAECPSYEVVHAGNGYEIHRYNTTVWISTEPIQDISLNEASGNGWNQLSDYMNGNNDYHQRIEIALPYITQVSQNLSTFIVSFFVPKAFQPDPPPGNNLHVQRWDSRYVAVKQISGYVADHKIGKQVAELKASLQGTVWAKAIEKSRETGGVGSAWAYTVAQFSWPFQWSQRVNEIWFPFEMEDEETVSIVTQ

SEQ ID NO: 105769 - protein, 142 aa, Arabidopsis thaliana
  peptide (1)..(142): Ceres Seq. ID no. 13617933
MNGNNDYHQRIEIALPYITQVSQNLSTFIVSFFVPKAFQPDPPPGNNLHVQRWDSRYVAVKQISGYVADHKIGKQVAELKASLQGTVWAKAIEKSRETGGVGSAWAYTVAQFSWPFQWSQRVNEIWFPFEMEDEETVSIVTQ

SEQ ID NO: 105770 - DNA, 1676 bp, Arabidopsis thaliana
  misc_feature (1)..(1676): Ceres Seq. ID no. 13617934
  misc_feature (1)..(1676): Ortholog of  Ceres SEQ ID NO 13597546 as cited in SEQ ID NO 65017
  misc_feature (1)..(1676): Ortholog of  Ceres SEQ ID NO 14307912 as cited in SEQ ID NO 66380
  misc_feature (1)..(1676): Ortholog of  Ceres SEQ ID NO 14308045 as cited in SEQ ID NO 67444
  misc_feature (1)..(1676): Ortholog of  Ceres SEQ ID NO 13654353 as cited in SEQ ID NO 68318
atattaatttcttcaattaaccttgataagagttaaaaaagtaaaaaacatcgagaagagttgtagctgtggtcaacacttgagaggcagcacgatgagctccatatggaacgttgcaatgttgatggtagctttggtggttgtgaggatcagccactggctttaccgatggtcaaaccctaagtgccctggcaagttaccacctggatcgatgggttttccaatcattggagagactctcgatttctttaagccttgtggagtcgaaggtatcccaacctttgttaagaagaggatgataaggtatgggccgttgtttcgaacaaacatttttggttccaaaaccgtggtttcgacagatccggatgtgatccaccagattttccggcaagagaacacgtcttttgagctaggctatccagacatatttgtgaaagtatttggaaaagataatttgttcttgaaggaagtgttcatccacaagtacctccaaaaaatcactatgcaaattcttggctccgagggtttgaagcaaacaatgttaggaaacatggacaaagcaacccgcgaccatattaggtccattgctagccaggggagcttcaatgttcgtaaagaagttgaaaacttggtagtagcgtacatgacaccaaagctgataagtaaccttaaaccagagacgcaatcaaagcttatagataatctcaacgccttcaatcttgattggtttaagtccttcttaagactctctacttggaaagctgtcaccaaagccctcaagtcacgcgaagaagctatccaggtgatgaaagacgttctcatgatgagaaaagagacgcgagagaagcaagaagacttccttaacacgcttctagaagaactggagaaagacggtagctttttcgaccaaggatcggctataaatctcatcttccttctggcgtttgccttgagagaaggtacctctagttgtactgctttggccgtgaagttcatatccaaagacccgaaagtgcttgcagagctcaagcgtgagcataaggcaattgtagacaacagaaaagataaggaagctggagttagctgggaagaatatagacacaacatgactttcaccaacatggttagcaatgaggtgcttcgcctagcaaacacgacccctttgttgtttcgaaaggcggtgcaagatgttgagatcaaaggatatacaattccggctggttggattgtggcggttgcaccttcagcggttcattttgatcctgcaatctatgagaacccatttgagtttaatccatggagatgggaggggaaagaaatgatttggggatctaaaacgttcatggcgtttggatatggagttagactttgtgtaggtgcagagttttcacggcttcaaatggcaatcttcctccatcatcttgtggcatattacgatttctcaatggtccaagactccgagatcattcgttcaccattccatcaatacaccaaggatctgcttataaacatctctcagtctcctaccaagtgaaccatgcatgcagtttccaaatcttaataatcagatcattatatgcaataatctcatttcctgcttccgcaaaatctctggagtctttttatatgtaatatgcgatctctataatttttaaaaagtatctatcttgtcaaat

SEQ ID NO: 105771 - protein, 479 aa, Arabidopsis thaliana; identical to SEQ ID NO: 24496
  peptide (1)..(479): Ceres Seq. ID no. 13617935

SEQ ID NO: 105772 - protein, 471 aa, Arabidopsis thaliana; identical to SEQ ID NO: 24497
  peptide (1)..(471): Ceres Seq. ID no. 13617936

SEQ ID NO: 105773 - protein, 469 aa, Arabidopsis thaliana; identical to SEQ ID NO: 24498
  peptide (1)..(469): Ceres Seq. ID no. 13617937

SEQ ID NO: 105774 - DNA, 943 bp, Arabidopsis thaliana
  misc_feature (1)..(943): Ceres Seq. ID no. 13617946
  misc_feature (1)..(943): Ortholog of  Ceres SEQ ID NO 13594593 as cited in SEQ ID NO 52026
ggaaagagcagaagaaatttgcagaagagagaaaaacaaaaatggcggttctttgctcgtcttcgacggtgatactctcttcttcttccgtgaaatcctccggaagtgagagaaagtctccgtttttagggttctctttaacggctatctcgaagccgtcggtacgagtcggcatttatgcgaattcgaaaagaggattgcaagtgaagtgtgaagctgagccgacgacgacgacttctcttgttccggcgaatcaacgatggatgttcgacgaagaagaagctaatggccctgacatctggaacacgacatggtatccaaaagcttcagaccatgtgaacacggacaagccctggtttgtggttgatgcaactgacaaaattcttggtagattggcatcgacaattgctaatcacatccgtgggaagaatcttgcctcttacactcctagtgtcgacatgggagcttttgtgattgtggtgaatgctgagaaagttgctgtatctggaaagaagcgtaaccaaaagctgtacaggaggcattcaggacgacctggtggtatgacagtagagacatttgatcaattgcagcagagaattcctgaaagaatcgttgagcatgctgttcgtggaatgcttccaaagggacggcttgggagagctctgttcaatcacctgaaggtgtacaaaggccctgaccatcctcacgaggcccagaaaccgcttgatctgcctatcagggacaagagaatacagctgcaaaaatagaagctccaccactgttccattatcgccaagcgcagagagttttttcttctcaggtttctgtagtttcttcatcccaaaaccagaggaggctttacagattcttgttttcgcttctatcaactctgttatgctacaaaactttctaatttgaaatatttctcgttatttttttttgc

SEQ ID NO: 105775 - protein, 254 aa, Arabidopsis thaliana
  peptide (1)..(254): Ceres Seq. ID no. 13617947
KEQKKFAEERKTKMAVLCSSSTVILSSSSVKSSGSERKSPFLGFSLTAISKPSVRVGIYANSKRGLQVKCEAEPTTTTSLVPANQRWMFDEEEANGPDIWNTTWYPKASDHVNTDKPWFVVDATDKILGRLASTIANHIRGKNLASYTPSVDMGAFVIVVNAEKVAVSGKKRNQKLYRRHSGRPGGMTVETFDQLQQRIPERIVEHAVRGMLPKGRLGRALFNHLKVYKGPDHPHEAQKPLDLPIRDKRIQLQK

SEQ ID NO: 105776 - protein, 241 aa, Arabidopsis thaliana; identical to SEQ ID NO: 22013
  peptide (1)..(241): Ceres Seq. ID no. 13617948

SEQ ID NO: 105777 - protein, 167 aa, Arabidopsis thaliana; identical to SEQ ID NO: 22014
  peptide (1)..(167): Ceres Seq. ID no. 13617949

SEQ ID NO: 105778 - DNA, 832 bp, Arabidopsis thaliana
  misc_feature (1)..(832): Ceres Seq. ID no. 13617970
  misc_feature (1)..(832): Ortholog of  Ceres SEQ ID NO 12616324 as cited in SEQ ID NO 63414
attaaaaagctaatatggctactagggaagagagagataagtatagatcagtccttgaagatgcaggacaggttcaatggaggtatgataaccctccagacttcaatagtgtgaaccagctctttgaagaaggccagactaaggtgtggccagaaggttcgttagaagagacagtgcaaaacgcgatcaagtcatgggagatggagttctcacataagatccgtttacaggacttcaagactataaaccctgagaagtttaagctctttgtcaatgggagagaaggtttatcagctgaagagacgcttaggcttgggagttacaatgctttgctcaagaactctttgcctgaagagtttcagtactataagcccgaggaagagagctttgagtcatcacatgacgcctttagatctgctttaccacgcgggtttgcgtgggaaatactctctgtgtactcggggcctcctgttatagccttcaaatttagacactggggatactttgaaggaactttcaaaggtcatgctcctactggggaaatggttcaattcctgggtctaggagttctaaaggttgacgaatcacttagagcagaggagattgagatttactatgatccaggagagctgttcgggggactactcaagggacctcctatatcagagaccaaaaccacagacagtggagacaacactgcagagaaacaaagctgcccattcacacactaagataataagaaaagtagaagtgtatttgaccctttaaagaatatattgtaacagtctcttggttattgatgcatggaataaattataagttatgttaggcg

SEQ ID NO: 105779 - protein, 238 aa, Arabidopsis thaliana; identical to SEQ ID NO: 25832
  peptide (1)..(238): Ceres Seq. ID no. 13617971

SEQ ID NO: 105780 - protein, 176 aa, Arabidopsis thaliana; identical to SEQ ID NO: 25833
  peptide (1)..(176): Ceres Seq. ID no. 13617972

SEQ ID NO: 105781 - DNA, 976 bp, Arabidopsis thaliana
  misc_feature (1)..(976): Ceres Seq. ID no. 13617991
  misc_feature (1)..(976): Ortholog of  Ceres SEQ ID NO 12557432 as cited in SEQ ID NO 92
  misc_feature (1)..(976): Ortholog of  Ceres SEQ ID NO 15224319 as cited in SEQ ID NO 66044
  misc_feature (1)..(976): Ortholog of  Ceres SEQ ID NO 13598045 as cited in SEQ ID NO 66822
gggtctcttctctctctcttctcttgcgaccattccgttcgatccatatatcaaagcttgatttagttggttttcaatgggggacagtcagtactcgttttctctcaccaccttcagcccatcagggaagctggttcagatagaacatgccctaacagctgttggatcaggccaaacatcacttggaattaaagcttcaaatggagttgtcattgcaactgaaaagaaacttccttctatattggttgatgaagcgtctgttcaaaagattcaacatttgactcccaacattggaactgtttacagtggtatgggtcctgatttccgagttcttgtgcgaaagagtaggaagcaggctgagcaatatctccgtctgtacaaggaacccatccccgttactcaacttgtaagggaaactgccacggtgatgcaagagttcactcaatcgggtggtgttaggccgtttggagtttctctactggtggctgggtatgatgacaagggtccacaactgtatcaagtggatccatctggctcttatttctcatggaaagcttctgcaatgggaaagaatgtttcgaatgcaaagacgtttcttgagaagaggtacacagaagatatggaacttgatgatgccattcacacggcaatattgacattgaaggaaggtttcgagggagaaatctcaagcaaaaacatcgagattggcaaaatcggtactgacaaagttttcagggtgctaacaccagcagaaatcgatgattacttggctgaagtcgagtaaaactttcacttaaccgtgcaaccaacctgatttgaatctcagtatactctcagagttgatggttcttgcttttgtaaaacttttggaatttgttaaggagactcgtgacccaataatttagaatatgttttttcactcatttaaacgtctgttgtgaaaattcagtttcatataaccaagtttcatgcacac

SEQ ID NO: 105782 - protein, 157 aa, Arabidopsis thaliana; identical to SEQ ID NO: 49829
  peptide (1)..(157): Ceres Seq. ID no. 13617992

SEQ ID NO: 105783 - protein, 118 aa, Arabidopsis thaliana; identical to SEQ ID NO: 49830
  peptide (1)..(118): Ceres Seq. ID no. 13617993

SEQ ID NO: 105784 - protein, 235 aa, Arabidopsis thaliana; identical to SEQ ID NO: 49828
  peptide (1)..(235): Ceres Seq. ID no. 13617994

SEQ ID NO: 105785 - DNA, 1523 bp, Arabidopsis thaliana
  misc_feature (1)..(1523): Ceres Seq. ID no. 13617999
  misc_feature (1)..(1523): Ortholog of  Ceres SEQ ID NO 12784228 as cited in SEQ ID NO 66111
tttgcaaagttgcaacctttttgggtttagtacttgaagagaatcaatctgacagcaaatagttttggcgtctttctaactcaacccatcatctctgttgcattttatcgagagaatatttgaggtggatatggcctcgacccttttctccagaactttcttggctgctagtcaccgactgattactccttctcttccgcaaaagatctttaatccagccacctttctcagtaggtcactccactctcagttaggctccgcttctacagcctataaatcaactacttgggctcgtcgagctatggcttctactggagttgagacaaaagccggttactccacatcatccgtatcaaccagtgaacctgttgtttctgttgattggcttcatgctaatcttagagagcctgatttgaagattttggatgcttcatggtatatgccggatgagcagagaaatccgatccaagaatatcaggttgctcatattccccgcgctctcttctttgatttggatggaatatcagatcgaaaaactagtttgccacatatgttgcccactgaggaagcttttgctgctggttgttctgctcttggaattgataacaaagatgaagtggttgtctatgatggaaaggggatctttagtgcagcccgtgtatggtggatgttccgagtttttggacatgaaaaagtttgggtgctcgatggaggtctaccaagatggcgtgcatcaggttatgatgttgaatctagtgcatcaggtgatgctattctgaaagccagtgccgcaagtgaggctatagagaaaatttatcaaggacaaaccgtcagtccgataacctttcagactaagttccagccacatctagtgtggacacttgatcaggtcaagaacaatatggaggatccgacttatcaacacatagacgctcgttccaaagccaggtttgatggtactgctccagaaccccgtaagggaataagaagcggtcatatacctggaagcaaatgtatcccttttcctcagatgtttgattcttgtaacacattgttaccagcagaggagctgaagaaacgatttgaccaagaagatatctcactggacaagcctattatggcctcgtgtgggactggtgtaacagcttgcatcttggcaatggggcttcaccggctggggaaaaccgacgtgccgatctatgatgggtcgtggactgaatgggcgacacaaccagacttgcccatagagagtgttgaatcttcttcatgaaagtctccaccgtaaaggctagcgacaagattacaagccacagacggaaataattatcatgtttaagttgagggatttgtttgaagttaatcataatcctggctttaaatttgcctcaaccctcaagccgaagaggactgtatctatagaacttggaacttttccttttcgtttctggattcatcttctcagataacaaaaggttgttttctgtgttttctttctaataaaatcaagaaccaggaaatttctc

SEQ ID NO: 105786 - protein, 379 aa, Arabidopsis thaliana; identical to SEQ ID NO: 21914
  peptide (1)..(379): Ceres Seq. ID no. 13618000

SEQ ID NO: 105787 - protein, 322 aa, Arabidopsis thaliana; identical to SEQ ID NO: 21915
  peptide (1)..(322): Ceres Seq. ID no. 13618001

SEQ ID NO: 105788 - protein, 276 aa, Arabidopsis thaliana; identical to SEQ ID NO: 21916
  peptide (1)..(276): Ceres Seq. ID no. 13618002

SEQ ID NO: 105789 - DNA, 2513 bp, Arabidopsis thaliana
  misc_feature (1)..(2513): Ceres Seq. ID no. 13618003
  misc_feature (1)..(2513): Ortholog of  Ceres SEQ ID NO 14308455 as cited in SEQ ID NO 55108
gtttccatagaatatgtattcctatgatttttttttatagaattaattgtgttagttaatgccaaattaagattctcttttttaaaatcactttttgaagaagcacttacaagagagttgtgttaagaatagattccagatggaaaagttggcaagaaaagatgttttaagtttttgccttgtcgtctaatccaacggtcgatcttcgttcatatcaagaatccttatgacgtggaccattctcttccctccatctgtacctcttcccaacctctattttttaatttacatcgaaaataaataagaaggattgcaaaagaaaaaatagaaaaaaaactctctgttcttctttcttcttcttcttcgtcgtaagccattaccatttcttctccctctctctgtttttctttgttgcgtatctgtacttagttttcaaacataaaaataaaacatatctttagctgatgttgtcttcttcttgataaacagattttctacagctttttttctttctaatttaataattcttgagactttttaaaaccctctgcgaaacagatgattcgagttttggtttcttcatctgtgttttgattttttcgtcttttattcttagtcaaacacataaatttcttttactactcttcgtagatgacttctcatgttccaaaacatcctcgtaaatcctttgaagatatggtgaagaatcttaaagtggatcctcttgctaaggtcactgcctccaccacttccatggtttctgcaaaagagaataagaatcagtcagaggcagagccatcatattatgaaactcttgagacatatcaaggcctgccttgtccttatggtggctactatggatactactatccaggtcttgatggttcagttggagaagcaaaggataatggatactatggttatggaacagaagttcagtacccggtaatgcaaggggaaaatgggtctgtgatctacttgatgccagggtttcagtcttatgatgcaagccaaacttatatgcctataaacccggttggtgtatcgagtcaagcacttcattcgccgatgtatgctgctcagggttattatcagaaccaatttggttatgcagatgtttcatcgcccacatatttatgggaccctgttggagacaggtatgtgtatggtgttgcttcatataccccacccttgaaacagaacatatcttcttcaagtcataaccacaacaattattattcaaagagcaagaactccttcacgggtcacggcatgggagatcgtcctaaaacaccgcgaaaagcatcacagaacagctatgccccacccccactgcttaaccaagaaaaaggtcgcattgcttacccgatggacccagtaaagaaaaagtctggagctttaaatcgggatgaaacagagaaggcgaaagcgaggacaaaagaaaatggtacaagtatgaatgacttagcaaacggtcaagatcatattaccaatggagaatgtgagtcatgttcgttggatgctgaagggaatgaaagaagcaacggtgttggttctgtgatcagaagggatcaatataacctccctagctttcagaccaaatacgaggaagcaatcttttttgtgataaaatcgtatagcgaagacgacatacacaagagcatcaagtacaatgtctggtctagtactctcaatgggaacaagaagttagacagtgcatatcaagaatctcagaagaaggctgcagacaaaagtggaaagtgcccggttttcctgttcttctcggtgaatgcaagtggccaattctgcggtgtagctgagatgattggacgagttgattatgagaaaagcatggagttctggcaacaagataagtggactggctattttccggtgaagtggcacatcatcaaagatgttccaaatccgcaactacgacatatcatactagagaacaatgagaacaagcctgtaaccaatagcagagacacacaagaggtgaggttgcctcaagggaatgaagtgttgaacatctttaagaactacgcagctaagacatctattttagatgattttgatttttatgaaaacagagagaaggttatggtacagaagaagctaaggttccctccggtattaaagaagaaagaagaagacttggttgctgattttaaaacaatggagatgtctaatacagtcgaagagggaaacacagagttaaccgggacagtgagctaactagaagaacatgtagtgtttttggtttggttttttaaggatcaatataaaccgtccgattgtttcggattgctttgattttattacaagcgagatggcttcttcttctattgtttcgttgtatggtgtaatgttgggttttttcttcactttttttttttggttttgtgttgtgtttatgatatgttttgcaatttgtaatcattggcaaaaatgataggtttgattttatagtgatataagaaaaccgggatacaaaaagaaaagaggtttag

SEQ ID NO: 105790 - protein, 528 aa, Arabidopsis thaliana; identical to SEQ ID NO: 20813
  peptide (1)..(528): Ceres Seq. ID no. 13618004

SEQ ID NO: 105791 - protein, 513 aa, Arabidopsis thaliana; identical to SEQ ID NO: 20814
  peptide (1)..(513): Ceres Seq. ID no. 13618005

SEQ ID NO: 105792 - protein, 494 aa, Arabidopsis thaliana; identical to SEQ ID NO: 20815
  peptide (1)..(494): Ceres Seq. ID no. 13618006

SEQ ID NO: 105793 - DNA, 833 bp, Arabidopsis thaliana
  misc_feature (1)..(833): Ceres Seq. ID no. 13618007
  misc_feature (1)..(833): Ortholog of  Ceres SEQ ID NO 14308278 as cited in SEQ ID NO 55403
  misc_feature (1)..(833): Ortholog of  Ceres SEQ ID NO 12618176 as cited in SEQ ID NO 64489
  misc_feature (1)..(833): Ortholog of  Ceres SEQ ID NO 15179231 as cited in SEQ ID NO 0
aacactcaaaagagattctcacgatcgagcaagagagagatggatggtcgattacctgacaaaggcattctcaagagcgaggctctaaaacagtacatcatggaaacaacagcgtatccaagagaacacgaattgcttaaagaacttcgagaagctacaatccagagatatggaaatttaagcgagatgggagttccggttgatgaaagtctatttttatcgatgcttgtaaagatcatcaacgcgaaaaacactatcgagatcggtgtgttcaccggttactcacttttcaccgtagctcttgctttgcctgaagatggccgtattactgcgatagacattgatcaagcaggttacaatttgggactagagtttatgaagaaagcaggtgttgatcacaagatcaatttcattcaatctgatgctgttagaggcttagaccaattattgaacggggagaaacaagagtatgattttgcatttgtggatgctgacaagacgaactacgtttacttccttgagaagctccttaagttagtgaaggttggaggaatcattgccttcgacaacactttatggtttggtactctaattcagaaggaaaacgaagttccaggccatatgagagcttatagagaggcacttttagagttcaataagatattggctcgggatcctcgagtcgaaatcgctcaaatatccatcggagatggtctcacgctatgtagacgtcttatatgataaacctatagtaaataatgttatatgcttcaataataactttggcctttgtttgtaatgttatatgctactataatgactcttcatcttcc

SEQ ID NO: 105794 - protein, 246 aa, Arabidopsis thaliana
  peptide (1)..(246): Ceres Seq. ID no. 13618008
NTQKRFSRSSKREMDGRLPDKGILKSEALKQYIMETTAYPREHELLKELREATIQRYGNLSEMGVPVDESLFLSMLVKIINAKNTIEIGVFTGYSLFTVALALPEDGRITAIDIDQAGYNLGLEFMKKAGVDHKINFIQSDAVRGLDQLLNGEKQEYDFAFVDADKTNYVYFLEKLLKLVKVGGIIAFDNTLWFGTLIQKENEVPGHMRAYREALLEFNKILARDPRVEIAQISIGDGLTLCRRLI

SEQ ID NO: 105795 - protein, 233 aa, Arabidopsis thaliana; identical to SEQ ID NO: 27022
  peptide (1)..(233): Ceres Seq. ID no. 13618009

SEQ ID NO: 105796 - protein, 213 aa, Arabidopsis thaliana; identical to SEQ ID NO: 27023
  peptide (1)..(213): Ceres Seq. ID no. 13618010

SEQ ID NO: 105797 - DNA, 1308 bp, Arabidopsis thaliana
  misc_feature (1)..(1308): Ceres Seq. ID no. 13618015
  misc_feature (1)..(1308): Ortholog of  Ceres SEQ ID NO 15169350 as cited in SEQ ID NO 53271
acttttgagtggtactgataggtacaagaaacacaacaaaccctagatttatcttcatctctctcaattctgtatcaagcaaagacggattcaacgatgtcttcacctgaatcaccttccggttccgactcatccacaccacttctccgttcacggcaatcatcaccacgtcgtcaacctgtaatcgcggttctattaaatcgagcttcaggacgacgaggagcttcgatggtggttagagaaacagctgcacaagagcttgaagagcgacgagctgattggggttactcgaaacctgttgttgctttggatatgctttggaacactgcttttgttcttgttgcgattgttatgcttttggtttttaaagaagagaagccaaatgttcctattaggatttggatctgtggttatgcgattcagtgtcttgttcatgttgtccttgtttggcttgagtttagaaagaggaatgctagaagcagacctggagatttagaagctgctcaagctacgaatcaggatagtgaagatgaagacaacgatgagaggtttctgagcactaagacttgtgaatcaatgaacactataatatcatttgtctggtggattgttggattctactggcttgtttctggtggtgatatccttctgcaaaacgcgacgcatttgtattggttaacctttgttttccttgcatttgatgtgttctttgccatcttttgcgttgtgctggcatgtcttattggaatcgccctctgttgttgcctaccttgtattattgctcttctttacgccgtcgcggggcaggagggtgcatcagaagcagatctcagcatccttcccaagtacaggtttcacacgatgaacaatgatgaaaagcaaagtgacggtggtgggaaaatgatacctgtggatgcagcgagtgagaatttaggaaacgagcgtgtgcttcttcccgaggatgctgactgttgtatatgtttgagttcatatgaagatggagcagagctggtctcacttccttgcaaccaccactttcattctacgtgcattgtgaaatggctgaaaatgaatgcgacatgtccactatgcaagttcaatatcctcaaaggtaatgaacaagaatgaagtaatgtagaggaaacttttcttctttttatgttgtgtttctttttgttgtatatagagtagagaaaaaagaaaatgattgtgttgtttgtaagtcataagacagtttgtttctttgttgaaatttgttgtcaattctcttttttttttatcaaataataatagatatattcatcatgt

SEQ ID NO: 105798 - protein, 343 aa, Arabidopsis thaliana
  peptide (1)..(343): Ceres Seq. ID no. 13618016
MSSPESPSGSDSSTPLLRSRQSSPRRQPVIAVLLNRASGRRGASMVVRETAAQELEERRADWGYSKPVVALDMLWNTAFVLVAIVMLLVFKEEKPNVPIRIWICGYAIQCLVHVVLVWLEFRKRNARSRPGDLEAAQATNQDSEDEDNDERFLSTKTCESMNTIISFVWWIVGFYWLVSGGDILLQNATHLYWLTFVFLAFDVFFAIFCVVLACLIGIALCCCLPCIIALLYAVAGQEGASEADLSILPKYRFHTMNNDEKQSDGGGKMIPVDAASENLGNERVLLPEDADCCICLSSYEDGAELVSLPCNHHFHSTCIVKWLKMNATCPLCKFNILKGNEQE

SEQ ID NO: 105799 - protein, 299 aa, Arabidopsis thaliana; identical to SEQ ID NO: 39734
  peptide (1)..(299): Ceres Seq. ID no. 13618017

SEQ ID NO: 105800 - protein, 271 aa, Arabidopsis thaliana; identical to SEQ ID NO: 39735
  peptide (1)..(271): Ceres Seq. ID no. 13618018

SEQ ID NO: 105801 - DNA, 913 bp, Arabidopsis thaliana
  misc_feature (1)..(913): Ceres Seq. ID no. 13618023
  misc_feature (1)..(913): Ortholog of  Ceres SEQ ID NO 13595561 as cited in SEQ ID NO 59869
  misc_feature (1)..(913): Ortholog of  Ceres SEQ ID NO 15174355 as cited in SEQ ID NO 0
ataaattgaacaagggacctctccaatggccccttctctcgtccttcttcttctgtctaacaatacactaccacacactttcacgctctcttctctcacacctttcttcttcctcacccaaaattcttctctctatgttcttcttcatcttctagctctctcatctcttcttctcgccatagcttcaccttccttctcaagctgtacagttaaagcttaagattaattttcgttaattttaaattcgaagaaaagatgaatcactttgcggttcaaccaaacgcgttcgctgccggcggagatttgagaagcagctccgtttcagttgttgaaagagatcaaaccaccgtcgtttgtccaaaaccacgtcgtattggtctccgtaacaaccatcaccatccttctcgatctctccgttgttacttcagtcatcaattggagctttgtgaatccaaagcagagactgatatcttagatatcatactcaccaaggatggttatggtgcagaacaagttaataagcaggtaatagactcgccgtccccgtttttatgtgggtcgccgccgagcagagtcgctaacccattaacacaggatgctcgatttcgagatgagattgtatcggtttcttcagtgattccgcctcagttgggtttacctccttcttcatctccttcttcttcctctgggaggaaaggaggatgtgttgttagaggcaattttggtaacagcccaaaggttagagttgaagggtttgattgtcttgacagggatagcagaaactgcagcatccctgccttggcttagaaacgaaacccgaaacgaacccttttaggattttcatacatactcttttgagttaactcacaaaaaaaaaaaaacaattagtgcgtcgtaaatataagtgttaagg

SEQ ID NO: 105802 - protein, 183 aa, Arabidopsis thaliana; identical to SEQ ID NO: 23781
  peptide (1)..(183): Ceres Seq. ID no. 13618024

SEQ ID NO: 105803 - DNA, 1336 bp, Arabidopsis thaliana
  misc_feature (1)..(1336): Ceres Seq. ID no. 13618044
  misc_feature (1)..(1336): Ortholog of  Ceres SEQ ID NO 13597638 as cited in SEQ ID NO 65448
  misc_feature (1)..(1336): Ortholog of  Ceres SEQ ID NO 14302772 as cited in SEQ ID NO 69055
gtaacaacgtcacctaaatctctctcacccaatttgtgtttcttctttctgctaaaaggttataatttttgtttcttggtttggtgagaatcttcaagaaactgaaacaaagaaaatggattctagttgcatagacgagataagttcctccacttcagaatctttctccgccaccaccgccaagaagctctctcctcctcccgcggcggcgttacgcctctaccggatgggaagcggcgggagcagcgtcgtgttggatcccgagaacggcctagagacggagtcacgaaagctaccatcttcaaaatacaaaggtgttgttcctcagcctaacggaagatggggagctcagatctacgagaagcaccaacgagtatggctcgggactttcaacgagcaagaagaagctgctcgttcctacgacatcgcagcttgtagattccgtggccgcgacgccgtcgtcaacttcaagaacgttctggaagacggcgatttagcttttcttgaagctcactcaaaggccgagatcgtcgacatgttgagaaaacacacttacgccgacgagcttgaacagaacaataaacggcagttgtttctctccgtcgacgctaacggaaaacgtaacggatcgagtactactcaaaacgacaaagttttaaagacgcgtgaagttcttttcgagaaggctgttacacctagcgacgttgggaagctaaaccgtctcgtgatacctaaacaacacgccgagaaacactttccgttaccgtcaccgtcaccggcagtgactaaaggagttttgatcaacttcgaagacgttaacggtaaagtgtggaggttccgttactcatactggaacagtagtcaaagttacgtgttgaccaagggatggagtcgattcgtcaaggagaagaatcttcgagccggtgatgttgttactttcgagagatcgaccggactagagcggcagttatatattgattggaaagttcggtctggtccgagagaaaacccggttcaggtggtggttcggcttttcggagttgatatctttaatgtgaccaccgtgaagccaaacgacgtcgtggccgtttgcggtggaaagagatctcgagatgttgatgatatgtttgcgttacggtgttccaagaagcaggcgataatcaatgctttgtgacatatttccttttccgattttatgctttcgttttttaattttttttttttgtcaagttgtgtaggttgtgattcatgctaggttgtatttaggaaaagagataagaccaaaaaataaattggaacaatggttttgtggaaaagtggtaaatagacctacctc

SEQ ID NO: 105804 - protein, 352 aa, Arabidopsis thaliana; identical to SEQ ID NO: 30911
  peptide (1)..(352): Ceres Seq. ID no. 13618045

SEQ ID NO: 105805 - protein, 315 aa, Arabidopsis thaliana; identical to SEQ ID NO: 30912
  peptide (1)..(315): Ceres Seq. ID no. 13618046

SEQ ID NO: 105806 - protein, 212 aa, Arabidopsis thaliana; identical to SEQ ID NO: 30913
  peptide (1)..(212): Ceres Seq. ID no. 13618047

SEQ ID NO: 105807 - DNA, 934 bp, Arabidopsis thaliana
  misc_feature (1)..(934): Ceres Seq. ID no. 13618061
  misc_feature (1)..(934): Ortholog of  Ceres SEQ ID NO 12781196 as cited in SEQ ID NO 61049
ataaatacaagcctcctaactcataaaataagcataaccctaactctacaaagttcttctgattctttctctctctctctttctttcaagagcggttttcaatccattcgctaaagaccatgaacctagaagagaaaccaaccatgacggcttcaagggcttcccctcaagccgaacatctctactacgtccggtgtagcatctgcaacaccatcctcgcggttgggataccattgaagagaatgcttgacacggtaacggtgaaatgcggccattgtggtaacctctcgtttctcaccacaactcctcctcttcaaggccatgttagcctcacccttcagatgcagagctttggtggaagtgactataagaagggaagctcttcttcttcctcttcctccacctccagcgaccagcccccatctccctcacctccctttgtcgtcaaacctcctgagaagaagcagaggctcccatctgcatacaaccgcttcatgagggatgagatccaacgcatcaaaagtgccaatccggaaataccacaccgtgaagctttcagtgctgctgccaaaaattgggctaagtacatacccaactctcctacttccattacttccggaggccacaacatgatccatggcttgggattcggtgagaagaagtgaacaaaactcaggggaaaagaagcctaaaaataacaaacgcatgcacgtgtgcgagtggctgcgtcgtttttctcatcttgtgttgttcttctgtgtaattttcttatgtatgtcatgttgcagaaaatgatgttgccttagtttttatgactttatatttctgtctgtctttagatttgaaagtaacgtcacttgctatgtccctttggacgtttatgtctggtctttatttgtcttaatcctatcaaaattttatatgcgtattcctt

SEQ ID NO: 105808 - protein, 181 aa, Arabidopsis thaliana; identical to SEQ ID NO: 28231
  peptide (1)..(181): Ceres Seq. ID no. 13618062

SEQ ID NO: 105809 - protein, 173 aa, Arabidopsis thaliana; identical to SEQ ID NO: 28232
  peptide (1)..(173): Ceres Seq. ID no. 13618063

SEQ ID NO: 105810 - protein, 140 aa, Arabidopsis thaliana; identical to SEQ ID NO: 28233
  peptide (1)..(140): Ceres Seq. ID no. 13618064

SEQ ID NO: 105811 - DNA, 1663 bp, Arabidopsis thaliana
  misc_feature (1)..(1663): Ceres Seq. ID no. 13618072
  misc_feature (1)..(1663): Ortholog of  Ceres SEQ ID NO 13648400 as cited in SEQ ID NO 20329
  misc_feature (1)..(1663): Ortholog of  Ceres SEQ ID NO 13659393 as cited in SEQ ID NO 67047
  misc_feature (1)..(1663): Ortholog of  Ceres SEQ ID NO 13654553 as cited in SEQ ID NO 68417
  misc_feature (1)..(1663): Ortholog of  Ceres SEQ ID NO 12635162 as cited in SEQ ID NO 0
  misc_feature (1)..(1663): Ortholog of  Ceres SEQ ID NO 15175178 as cited in SEQ ID NO 0
aacatttgttcgtgtaaggctttttttactatctcttctatttactcaatttcttcttacacatttgttatacgtaaaaggaacatttctttgattctttttttgttgtcactaccaaaacgtactgatttgttttttgaataggtgggttcctagagtaaaaaagagaccgatatttaaacttttgtcccttgactaaaactcaaaacatttctgtttgttttttgttagttaaatatgtttaaaataaataaataatcatatagctatttatgaaagtattaatatacaaataactttcaaaagttattaattaaatttcaaacaataatcctgtgtttcaatatctacttttgcaattgttatttccataattccattaatacaaatttttagatattgatagctacctaactcacactttttaaattttagttatgtcgacaagttttttttttgttacatgatgttaattacgactaatcaggtttttaaagtaataaatcaatattaaaaagtgcctcaacaaagaaaaagtgttggaccatggtcgtctataattatttatcaaaacatagtcacacacacccttgccgttattgtctagaactctctctcgctctcccaaaaactcatctctcaccaccgtctcaaaccaagttcgatctaaaagccttttcctttagattctctccaacaacaaatctctttgaatcactcagtcatgtcggttttacttcctctctgtctgattatctccatgttcacctattcaaacgcagcgtattgtctttgcaaagaggggaacgagcaagtgcttcagaaggcaatagactacgcttgtggaaatggagctgactgtacccagatccaacccaccggagcttgttaccaacctaacaccgtcaaaaaccactgtgacgtcgccgtcaacagttactaccagaaaaaagcttcttccggtgccacctgtgactttaacggcgccgcctccccctctactacccctccgtcaactgcttcaaactgtttaactggttcaagctctagtggcactcctaccacaggaacaccaactactgggacaccaaccagtgggaccccgactaccggaactccgaccaccggaacccccaccactggaactccaaccagtgggactccaactagtggcttcccaaataccgggactccaaacacagggactaacactgggatgccaaattccaacgggatgccaacttcatcgtcatcttcggtgttcccggggactactcttggcccgactgggagcgggggactaggcgatccaaatgctggagagaagctgtctgttcgaactaacacagtggtcttcttattaaccggtgtagcagcaatgcttgtcatatgagggcttagaagtcacacgcggttatggttgtaattgagttgctgagagatcagatcttgccaacggctcatggttgatagagtcatcttttttttcactcgtctttctaggatttggacttaggttggccgagagacgtaatgctggtagtagctagtattttgggttatgtacaactttaactaagagctttacttttgtaaatccggaggatgagatgctcttttgtttcttatattctttttaatccgtttacttggatctttcatc

SEQ ID NO: 105812 - protein, 222 aa, Arabidopsis thaliana; identical to SEQ ID NO: 30065
  peptide (1)..(222): Ceres Seq. ID no. 13618073

SEQ ID NO: 105813 - protein, 210 aa, Arabidopsis thaliana; identical to SEQ ID NO: 30066
  peptide (1)..(210): Ceres Seq. ID no. 13618074

SEQ ID NO: 105814 - DNA, 1215 bp, Arabidopsis thaliana
  misc_feature (1)..(1215): Ceres Seq. ID no. 13618083
  misc_feature (1)..(1215): Ortholog of  Ceres SEQ ID NO 14302757 as cited in SEQ ID NO 56631
gagataacgttcttctccaaaattgcttgaggaagtggttttgttgtgtctctctgggtttgaaatatgagcggagatagacttgaatttgaaaaccctatagaggatgcggtttcgaggctcagattctcccctcaatcaaacaatctcctcgttgcttcttgggattcttatctgagattgtatgatgtggagagctcttcgctaagtcttgaattaaactctcaagctgctcttcttgattgttgtttcgagaatgaatcaacttcatttacctctggttctgatggattcatccgaaggtatgatttaaacgctggaacagttgatacaattggaaggcatgatgacatttcaacatccattgtctactcttatgaaaaaggtgaagttatctcgactgggtttgatgagaagatcaaattctgggatacaagacaaagagaaagtcttgtgttttcgactgatgctggtggagcagtgggatgtgtcactgtatctggaaacaacttagttgtttgtgtggacgcatcgatgcatatatacgatttacgtaacttagatgaagcttttcaatcgtatgcatcccaagtggaggtgccaatcagatgtatcacctctgtaccttattccagaggatatgcagttgggtcagtagacggacgagtagctgtggatttccccaatacatcatgctccagtgagattaaatacagtttccgatgccatcccaagagtaggaatggaagacttgatggtgtatgcataaatgcaatcgaattcagtccatgtgggtcagggacttttgtaacaggtgacaatgaaggatacgtgatctcatggaatgctaaaagcagaagaagactcaatgagttgccaaggtactcaaatagcatcgcgtctttagcatttgaccacactggagaactcttggccattgcatcaagccacacttaccaagatgctaaagagaaggaagaagctcctcaagtgttcatacacaggctttgaaagattcgtaagcttcttgaatctcagtgtctacttgtatctatctagttatttttttgtgtgtttttggtagcacgttttagcttgatctcagaactgactcgtgtcaaccaacatgtaatgattgtatctctcacgtctctttatactacttgttctctaaactttgttttgactttttagtcaactatatgctttgacttt

SEQ ID NO: 105815 - protein, 314 aa, Arabidopsis thaliana
  peptide (1)..(314): Ceres Seq. ID no. 13618084
MSGDRLEFENPIEDAVSRLRFSPQSNNLLVASWDSYLRLYDVESSSLSLELNSQAALLDCCFENESTSFTSGSDGFIRRYDLNAGTVDTIGRHDDISTSIVYSYEKGEVISTGFDEKIKFWDTRQRESLVFSTDAGGAVGCVTVSGNNLVVCVDASMHIYDLRNLDEAFQSYASQVEVPIRCITSVPYSRGYAVGSVDGRVAVDFPNTSCSSEIKYSFRCHPKSRNGRLDGVCINAIEFSPCGSGTFVTGDNEGYVISWNAKSRRRLNELPRYSNSIASLAFDHTGELLAIASSHTYQDAKEKEEAPQVFIHRL

SEQ ID NO: 105816 - protein, 158 aa, Arabidopsis thaliana; identical to SEQ ID NO: 25545
  peptide (1)..(158): Ceres Seq. ID no. 13618085

SEQ ID NO: 105817 - DNA, 1304 bp, Arabidopsis thaliana
  misc_feature (1)..(1304): Ceres Seq. ID no. 13618086
  misc_feature (1)..(1304): Ortholog of  Ceres SEQ ID NO 13598387 as cited in SEQ ID NO 62757
  misc_feature (1)..(1304): Ortholog of  Ceres SEQ ID NO 13662984 as cited in SEQ ID NO 64419
cctgtttttaggctcactcgtggactttttttaatttctttcctttgccatatttataaaataaaagagagagaaagaattttcaataattttcaacaagcaaagttcatgatggggaataagcgaaatctcggatttgtgatcttcttctgggctctggtggttgcagtagtagccacggccatcgagcatcgtcgcaatgagaggactaaaggcgtcaatggtcttgacaagatcatcatccgcgaccgtcgtggccgatctgctgaggtttacttgtatggaggtcaagtcagttcttggaaaaatgagaatggagaggagttacttgttatgagtagcaaggctatattccagcctccaacaccgattcgtggaggaattccagtattgtttccgcaatacagtaacaccggtccacttccctcacatggatttgtaagacagaggttctgggaggttgagactaaaccacctcctttgccatcactttctactgctcatgttgacctgatcgtaagatcatccaatgaggatttgaagatctggccgcataagtttgagtatagactgagagtagcattgggacatgatggagatttgacgttaacatctcgtgttaagaatactgatacaaaaccatttaacttcacatttgctcttcacccctacttcgctgtttccaatatcagtgaaatccatgtcgaaggattacacaacttggattaccttgaccaacaaaagaacagaacacgtttcactgatcatgagaaggttataactttcaatgctcaacttgacaggttgtacctaagcactccagatcaactaagaatcgtggaccataagaaaaagaagactattgttgtacacaaggagggacaagttgatgccgtggtgtggaatccatgggataagaaagtatccgatttgggagttgaagactataagcgttttgtaacggtggaaagcgcggctgtcgcgaaaccgatcacagtgaaccccggcaaagaatggaaaggaatactccatgtttctgtggttccatcaaatcggaaagcttgaccctataaaagtcttgcattcatcatcctcatcctttaaaaaaaaaaacttaaaactgtctttattaaagtatacttaatgttcccgagagacatcacatggtgaacacaaagttagttgggttccaaactggactcttgaccagttttattgttttgtaactttagcattcatgaataaaaaaagtgcgttaattacaataattgttaaatgtaattaaataaaagtgcgttaactac

SEQ ID NO: 105818 - protein, 354 aa, Arabidopsis thaliana
  peptide (1)..(354): Ceres Seq. ID no. 13618087
PVFRLTRGLFLISFLCHIYKIKERERIFNNFQQAKFMMGNKRNLGFVIFFWALVVAVVATAIEHRRNERTKGVNGLDKIIIRDRRGRSAEVYLYGGQVSSWKNENGEELLVMSSKAIFQPPTPIRGGIPVLFPQYSNTGPLPSHGFVRQRFWEVETKPPPLPSLSTAHVDLIVRSSNEDLKIWPHKFEYRLRVALGHDGDLTLTSRVKNTDTKPFNFTFALHPYFAVSNISEIHVEGLHNLDYLDQQKNRTRFTDHEKVITFNAQLDRLYLSTPDQLRIVDHKKKKTIVVHKEGQVDAVVWNPWDKKVSDLGVEDYKRFVTVESAAVAKPITVNPGKEWKGILHVSVVPSNRKA

SEQ ID NO: 105819 - protein, 318 aa, Arabidopsis thaliana; identical to SEQ ID NO: 39077
  peptide (1)..(318): Ceres Seq. ID no. 13618088

SEQ ID NO: 105820 - protein, 317 aa, Arabidopsis thaliana; identical to SEQ ID NO: 39078
  peptide (1)..(317): Ceres Seq. ID no. 13618089

SEQ ID NO: 105821 - DNA, 1134 bp, Arabidopsis thaliana
  misc_feature (1)..(1134): Ceres Seq. ID no. 13618098
  misc_feature (1)..(1134): Ortholog of  Ceres SEQ ID NO 13594298 as cited in SEQ ID NO 57803
  misc_feature (1)..(1134): Ortholog of  Ceres SEQ ID NO 13503476 as cited in SEQ ID NO 61978
  misc_feature (1)..(1134): Ortholog of  Ceres SEQ ID NO 12578438 as cited in SEQ ID NO 62201
  misc_feature (1)..(1134): Ortholog of  Ceres SEQ ID NO 12617675 as cited in SEQ ID NO 64656
acaaactcatcatcataagcaacaatggtggtgtcactcttctcttccagaaatgttttctatacgttaagcttatgcttatttgcagcattataccagccggttatgagtagaccggctaagtttgaagatgactttaggatcgcatggtccgatactcatatcactcaaattgacggaggcagagccattcagctcaaattggaccctagctcaggatgtggatttgcttcgaagaagcaatacttgttcggccgtgtgagcatgaaaatcaaactgatccccggtgattctgccgggactgtcactgccttctacatgaattcagataccgattcggtacgagacgagcttgattttgagttcttaggaaatcgaagtggacaaccttacacagtgcaaaccaatgtgtttgctcatggtaaaggcgatagagagcaaagagttaacctttggttcgacccttctcgtgatttccacgaatatgccatctcatggaaccatctccgtattgtcttctacgtagacaatgtgcccatcagggtttacaagaacaatgaggcaaggaaagtaccatacccaagattccaaccaatgggtgtatattccacgttatgggaagccgatgattgggcgacacgtggaggaatagagaaaatcaattggtcgagagcgccattttatgcttattacaaagattttgatatagaaggatgtccggttccaggacccgcagattgtcccgctaattcgaagaattggtgggaaggcagtgcgtaccaccagttgagtccggtggaagctcgaagttatagatgggtccgagtgaaccatatggtctacgattattgcactgacaaatctcgttttcctgttccacctccagaatgctcggctggaatctgatccaaacattattgtcttaaaagcaaaacaagtgcgaagtggttccataagcaacgttgcaatgtatgtgaagtgattaatgagtcttgtggtatgtggtgaattgctcataatcgatctgattgtggtcaaatgttcatatatatatgtatatctttgaattttactttgttttcatgatgtcttatgttttgttgatctattgaagagaaccatgtttgtttgttg

SEQ ID NO: 105822 - protein, 293 aa, Arabidopsis thaliana; identical to SEQ ID NO: 42261
  peptide (1)..(293): Ceres Seq. ID no. 13618099

SEQ ID NO: 105823 - protein, 266 aa, Arabidopsis thaliana; identical to SEQ ID NO: 42262
  peptide (1)..(266): Ceres Seq. ID no. 13618100

SEQ ID NO: 105824 - protein, 213 aa, Arabidopsis thaliana; identical to SEQ ID NO: 42263
  peptide (1)..(213): Ceres Seq. ID no. 13618101

SEQ ID NO: 105825 - DNA, 1334 bp, Arabidopsis thaliana
  misc_feature (1)..(1334): Ceres Seq. ID no. 13618105
  misc_feature (1)..(1334): Ortholog of  Ceres SEQ ID NO 14307404 as cited in SEQ ID NO 54231
  misc_feature (1)..(1334): Ortholog of  Ceres SEQ ID NO 14315052 as cited in SEQ ID NO 56951
aacgaaaaacaaaaaaaaaaagacagaagacaaaaaaaaatcacgaaatctgattttcctctcttttgctcgaagccaagtctctgcttttactttgatccaccaacttcatcttcaacctctcgattttaggtaagattcttagagtgattttgacttatctaagaatggagctaaagagcattaaggatgcgtttgatcgtgttgcgacgaagcagaagctctcttatagcaaaactaatgagattgttcatatgttgtctcaagaaatcgataaggctttgagcatattagaggagacaccatcatcagatactatgcttcttgatcatagatctatcctcgctgatgtgaagaaagtgtttatggagattgctccaatcactcaacttgaagctactgagaaagagctacatgcggctttgaccaagtaccctaaagttcttgagaaacagctgaatccagacatatcaaaggcttatagacacaatgttgagtttgatactcatatcgttaaccagattatcgccaactttttctaccgtcaaggaatgtttgacattggtgactgttttgttgctgaaactggtgaatctgaatgttctacaagacaatctttcgtggagatgtatcggatactagaagctatgaagagacgagatcttgaaccggctcttaattgggctgtttcgaactctgacaaactaaaggaagcaaggtctgatcttgagatgaagcttcatagtctacactttctggaaatagcacgaggcaaaaactccaaagaagctatcgactatgcgagaaagcatatcgccacgtttgcagatagctgcctcccggagatccagaagctcatgtgttctctcttatggaacagaaaactcgataaatcaccatactccgagtttctctcccccgctctgtggaacaatgcagtcaaagagctaacccgacagtactgcaacctactcggtgaatcatctgaaagcccgttgagtataacagtaacagcgggcacacaagcgttaccagtactattgaaatacatgaacgtggtgatggcgaataagaagcttgattggcagaccatggaacaacttcctgttgatgcgcaactatccgaggagtttcagtttcattcggtgtttgtctgtccagtctctaaagaacagtcaagtgatgataaccctccgatgatgatgtcttgtggacatgtgctttgcaagcagacgatcaacaaaatgtcaaagaatggctctaagtcgtcgttcaagtgtccttattgcccaaccgatgtagacatctcaaggtgtaggcagttgcacttttga

SEQ ID NO: 105826 - protein, 388 aa, Arabidopsis thaliana
  peptide (1)..(388): Ceres Seq. ID no. 13618106
MELKSIKDAFDRVATKQKLSYSKTNEIVHMLSQEIDKALSILEETPSSDTMLLDHRSILADVKKVFMEIAPITQLEATEKELHAALTKYPKVLEKQLNPDISKAYRHNVEFDTHIVNQIIANFFYRQGMFDIGDCFVAETGESECSTRQSFVEMYRILEAMKRRDLEPALNWAVSNSDKLKEARSDLEMKLHSLHFLEIARGKNSKEAIDYARKHIATFADSCLPEIQKLMCSLLWNRKLDKSPYSEFLSPALWNNAVKELTRQYCNLLGESSESPLSITVTAGTQALPVLLKYMNVVMANKKLDWQTMEQLPVDAQLSEEFQFHSVFVCPVSKEQSSDDNPPMMMSCGHVLCKQTINKMSKNGSKSSFKCPYCPTDVDISRCRQLHF

SEQ ID NO: 105827 - protein, 359 aa, Arabidopsis thaliana
  peptide (1)..(359): Ceres Seq. ID no. 13618107
MLSQEIDKALSILEETPSSDTMLLDHRSILADVKKVFMEIAPITQLEATEKELHAALTKYPKVLEKQLNPDISKAYRHNVEFDTHIVNQIIANFFYRQGMFDIGDCFVAETGESECSTRQSFVEMYRILEAMKRRDLEPALNWAVSNSDKLKEARSDLEMKLHSLHFLEIARGKNSKEAIDYARKHIATFADSCLPEIQKLMCSLLWNRKLDKSPYSEFLSPALWNNAVKELTRQYCNLLGESSESPLSITVTAGTQALPVLLKYMNVVMANKKLDWQTMEQLPVDAQLSEEFQFHSVFVCPVSKEQSSDDNPPMMMSCGHVLCKQTINKMSKNGSKSSFKCPYCPTDVDISRCRQLHF

SEQ ID NO: 105828 - protein, 338 aa, Arabidopsis thaliana
  peptide (1)..(338): Ceres Seq. ID no. 13618108
MLLDHRSILADVKKVFMEIAPITQLEATEKELHAALTKYPKVLEKQLNPDISKAYRHNVEFDTHIVNQIIANFFYRQGMFDIGDCFVAETGESECSTRQSFVEMYRILEAMKRRDLEPALNWAVSNSDKLKEARSDLEMKLHSLHFLEIARGKNSKEAIDYARKHIATFADSCLPEIQKLMCSLLWNRKLDKSPYSEFLSPALWNNAVKELTRQYCNLLGESSESPLSITVTAGTQALPVLLKYMNVVMANKKLDWQTMEQLPVDAQLSEEFQFHSVFVCPVSKEQSSDDNPPMMMSCGHVLCKQTINKMSKNGSKSSFKCPYCPTDVDISRCRQLHF

SEQ ID NO: 105829 - DNA, 1783 bp, Arabidopsis thaliana
  misc_feature (1)..(1783): Ceres Seq. ID no. 13618113
  misc_feature (1)..(1783): Ortholog of  Ceres SEQ ID NO 13597732 as cited in SEQ ID NO 64810
  misc_feature (1)..(1783): Ortholog of  Ceres SEQ ID NO 14301912 as cited in SEQ ID NO 67786
aagataaacccaattttgttatttttgttctctcttctctctcgttcatgtttcaaatctgtttctagggtttcacaaaccagagatagagagaggtttagcgaaaaatggcgatggccatggctcttcgaaggctttcttcttcaattgacaaacccattcgtcctcttattcgatccacttcatgttacatgtcttctttgcccagtgaagctgttgatgagaaggaaagatctcgtgtcacttggccaaaacagcttaacgcacctttagaggaggttgatcctgagattgctgacattattgagcatgagaaagctagacaatggaagggacttgaacttattccatctgagaacttcacatctgtgtcggtgatgcaagctgttgggtctgtcatgactaacaaatacagtgaaggctatcctggtgccagatactatggaggaaatgagtatatagacatggcagaaaccttatgccagaagcgcgctcttgaagctttccggttagatcctgaaaagtggggagtgaatgttcaacctttgtctggatctcctgccaacttccatgtgtacactgcattgttaaagcctcatgaaagaatcatggcacttgatcttcctcatggtggtcatctttctcatggttatcagactgacaccaagaagatatcagctgtgtctatcttctttgaaacaatgccctatagattggacgagagcactggctacatcgactacgatcagatggagaaaagtgctactcttttcaggccaaaattgattgttgctggtgcaagtgcttatgctagattgtatgactatgcccgcatcagaaaggtctgtaacaagcaaaaagctgtaatgctagcagatatggcacacatcagtggtttggttgctgctaatgtaatcccttcaccgttcgactatgctgatgttgtaaccaccacaactcacaagtcacttcgtggaccccgtggagccatgattttcttcagaaagggtgttaaggaaattaacaagcaagggaaagaggttttgtatgattttgaagacaagatcaaccaagctgtcttccctggtcttcaaggtggtccacacaaccacactatcacaggactagctgttgctttgaaacaggcaactacttcagagtacaaagcataccaagaacaagtcctgagtaacagtgcaaagtttgctcagactctaatggagagaggatatgaacttgtttctggtggaactgacaaccatctggttctagtgaatctaaagcccaagggaattgatggatctagagttgagaaagtgttggaagctgttcacattgcatccaacaaaaacactgttcctggagatgtttctgccatggttcctggtggaatcagaatgggtactcctgctctcacttccagaggctttgttgaggaagactttgccaaagtagctgaatacttcgacaaagctgtgacaatagctctcaaagtcaaatctgaagctcaaggaaccaagttgaaggatttcgtgtcagcaatggaatcctcttcaaccatccaatccgagattgcgaaactgcgccatgaagtcgaggaattcgctaagcagttcccaacaattgggtttgagaaagaaaccatgaagtacaagaactaaactgtttcaccccacaagtgttttctgttatgctttgaattcccatggaatgtatagatgatacatgtaaaactctattttcacgctatgcgaaaaataatgatctgttaaattttctctct

SEQ ID NO: 105830 - protein, 517 aa, Arabidopsis thaliana
  peptide (1)..(517): Ceres Seq. ID no. 13618114
MAMAMALRRLSSSIDKPIRPLIRSTSCYMSSLPSEAVDEKERSRVTWPKQLNAPLEEVDPEIADIIEHEKARQWKGLELIPSENFTSVSVMQAVGSVMTNKYSEGYPGARYYGGNEYIDMAETLCQKRALEAFRLDPEKWGVNVQPLSGSPANFHVYTALLKPHERIMALDLPHGGHLSHGYQTDTKKISAVSIFFETMPYRLDESTGYIDYDQMEKSATLFRPKLIVAGASAYARLYDYARIRKVCNKQKAVMLADMAHISGLVAANVIPSPFDYADVVTTTTHKSLRGPRGAMIFFRKGVKEINKQGKEVLYDFEDKINQAVFPGLQGGPHNHTITGLAVALKQATTSEYKAYQEQVLSNSAKFAQTLMERGYELVSGGTDNHLVLVNLKPKGIDGSRVEKVLEAVHIASNKNTVPGDVSAMVPGGIRMGTPALTSRGFVEEDFAKVAEYFDKAVTIALKVKSEAQGTKLKDFVSAMESSSTIQSEIAKLRHEVEEFAKQFPTIGFEKETMKYKN

SEQ ID NO: 105831 - protein, 515 aa, Arabidopsis thaliana
  peptide (1)..(515): Ceres Seq. ID no. 13618115
MAMALRRLSSSIDKPIRPLIRSTSCYMSSLPSEAVDEKERSRVTWPKQLNAPLEEVDPEIADIIEHEKARQWKGLELIPSENFTSVSVMQAVGSVMTNKYSEGYPGARYYGGNEYIDMAETLCQKRALEAFRLDPEKWGVNVQPLSGSPANFHVYTALLKPHERIMALDLPHGGHLSHGYQTDTKKISAVSIFFETMPYRLDESTGYIDYDQMEKSATLFRPKLIVAGASAYARLYDYARIRKVCNKQKAVMLADMAHISGLVAANVIPSPFDYADVVTTTTHKSLRGPRGAMIFFRKGVKEINKQGKEVLYDFEDKINQAVFPGLQGGPHNHTITGLAVALKQATTSEYKAYQEQVLSNSAKFAQTLMERGYELVSGGTDNHLVLVNLKPKGIDGSRVEKVLEAVHIASNKNTVPGDVSAMVPGGIRMGTPALTSRGFVEEDFAKVAEYFDKAVTIALKVKSEAQGTKLKDFVSAMESSSTIQSEIAKLRHEVEEFAKQFPTIGFEKETMKYKN

SEQ ID NO: 105832 - protein, 513 aa, Arabidopsis thaliana
  peptide (1)..(513): Ceres Seq. ID no. 13618116
MALRRLSSSIDKPIRPLIRSTSCYMSSLPSEAVDEKERSRVTWPKQLNAPLEEVDPEIADIIEHEKARQWKGLELIPSENFTSVSVMQAVGSVMTNKYSEGYPGARYYGGNEYIDMAETLCQKRALEAFRLDPEKWGVNVQPLSGSPANFHVYTALLKPHERIMALDLPHGGHLSHGYQTDTKKISAVSIFFETMPYRLDESTGYIDYDQMEKSATLFRPKLIVAGASAYARLYDYARIRKVCNKQKAVMLADMAHISGLVAANVIPSPFDYADVVTTTTHKSLRGPRGAMIFFRKGVKEINKQGKEVLYDFEDKINQAVFPGLQGGPHNHTITGLAVALKQATTSEYKAYQEQVLSNSAKFAQTLMERGYELVSGGTDNHLVLVNLKPKGIDGSRVEKVLEAVHIASNKNTVPGDVSAMVPGGIRMGTPALTSRGFVEEDFAKVAEYFDKAVTIALKVKSEAQGTKLKDFVSAMESSSTIQSEIAKLRHEVEEFAKQFPTIGFEKETMKYKN

SEQ ID NO: 105833 - DNA, 1139 bp, Arabidopsis thaliana
  misc_feature (1)..(1139): Ceres Seq. ID no. 13618136
  misc_feature (1)..(1139): Ortholog of  Ceres SEQ ID NO 13596519 as cited in SEQ ID NO 62572
  misc_feature (1)..(1139): Ortholog of  Ceres SEQ ID NO 12625108 as cited in SEQ ID NO 68102
aaaacatgtcagagcaatcttttgtcgcatccccacaagtcttgaaaagcggagcctgatgatcaaaaggaacccccaaaactctctcaaacgcatcacttttgtctgccacctgtgactgactgtgaggatcccaacaacacttcttgttcatggattctgggcttcagcaactcgcattgtgcctcttcttcattctctgccgcctctttcaagccactgccgaagatgactggaagatagccacagccacgctttctagagacagagacggctcctcctccgtcgctactggaggcgcttgtgggtatggagatctgaggcagagcagctttgccggctacagcgcaggcctgagcgggaagctgttcaacaggggaagcagctgcggagcttgtctagaagtgcggtgcgtgaaccacatccgttggtgtcttcaaggcagcccctccgtggtggtcaccgccaccgatttctgtcctcccaattcgggactctcctccgattacggaggttggtgcaacttcccaaaggaacacttggaactatctcatgccgccttcacagggatcgcagaaaccagagctgagatgatacctatacagtataggagggtcaagtgtgggcggagaggcgggttgagattcagcttgagcgggagctcccactttttccaggtgttgataagcaatgtgggcctcgacggggaagtggttggtgtgaaagtgaagggccacacaacggcttggatcccaatggccagaaactggggacagaactggcactcctctctcgatctcatcggacagtctctctctttcgaggttactctcaaaggcggcaaaaccattgcctcttatgatgtggctcctccgtattggcgcttcggaatgacataccaaggaaagcagttccactcctgactcctttatcttcttcaaatcatgattcactttcggtgactttattatgactttggagtcattagatatcatcacttcatttcaaggaggtataaatgactttccacgagtggctcatctttgtcttctcttttcttttttctttttatataatatatccttcacaatccttacttggaccgcatttagctgtgtgagagtatattatgcacattg

SEQ ID NO: 105834 - protein, 256 aa, Arabidopsis thaliana; identical to SEQ ID NO: 21891
  peptide (1)..(256): Ceres Seq. ID no. 13618137

SEQ ID NO: 105835 - DNA, 956 bp, Arabidopsis thaliana
  misc_feature (1)..(956): Ceres Seq. ID no. 13618148
  misc_feature (1)..(956): Ortholog of  Ceres SEQ ID NO 12638274 as cited in SEQ ID NO 0
  misc_feature (1)..(956): Ortholog of  Ceres SEQ ID NO 13600563 as cited in SEQ ID NO 0
aaatgaaatgtatagagaggtaaagtgggaattttgacattggtgggtttaggggaaaaacagagagaaagagatggattcgtcgtcagtagggaacaccaacaggtactgggtcctccgccacggcaagagcattcccaacgagagaggcctcgtcgtctcttccatggaaaatggtgtcctccccgagtaccagttagcccctgatggtgtcgctcaggctcgtctcgccggcgaatcgttcctccagcaactcaaggaaagtaacatagaactggacaaggttcgcatttgctactcccccttctccagaaccactcacaccgctagggttgttgctaaggtcctcaatctcccctttgatgctcctcaatgcaagatgatggaagatctgcgcgaacgctattttggacctacatttgaactcaagtcccatgacaagtacccagagatatgggctcttgatgaaaaagatccttttatgggaccagaaggaggtgaaagtgctgatgatgttgtttcccgacttgccactgccatgaaatccatggaagctgaatatcaaaggtgtgcaattctggtggtgagtcatggagatcctctgcagatgttgcagaacgttttccattcagcaaagcaacaggaaggagatggtttggcagagaagtttcagttgagcagagttgcttctgtcttgtcacagcaccgcaagtttgctttgctcactggggaactccgacccctcatctgattggcaatcaatgtattcagcttttggaatgtctttccttgaactcttttgttatcaattcctatttctctcccattggcattcttgcaattgccaaacttggattagcctgtttattatcacctctgtttgttagagaaaacatgaagatttactcctgtaataagaaatcatgctcatttatgttatatgtatcttcaaatct

SEQ ID NO: 105836 - protein, 225 aa, Arabidopsis thaliana
  peptide (1)..(225): Ceres Seq. ID no. 13618149
MDSSSVGNTNRYWVLRHGKSIPNERGLVVSSMENGVLPEYQLAPDGVAQARLAGESFLQQLKESNIELDKVRICYSPFSRTTHTARVVAKVLNLPFDAPQCKMMEDLRERYFGPTFELKSHDKYPEIWALDEKDPFMGPEGGESADDVVSRLATAMKSMEAEYQRCAILVVSHGDPLQMLQNVFHSAKQQEGDGLAEKFQLSRVASVLSQHRKFALLTGELRPLI

SEQ ID NO: 105837 - protein, 194 aa, Arabidopsis thaliana
  peptide (1)..(194): Ceres Seq. ID no. 13618150
MENGVLPEYQLAPDGVAQARLAGESFLQQLKESNIELDKVRICYSPFSRTTHTARVVAKVLNLPFDAPQCKMMEDLRERYFGPTFELKSHDKYPEIWALDEKDPFMGPEGGESADDVVSRLATAMKSMEAEYQRCAILVVSHGDPLQMLQNVFHSAKQQEGDGLAEKFQLSRVASVLSQHRKFALLTGELRPLI

SEQ ID NO: 105838 - protein, 123 aa, Arabidopsis thaliana; identical to SEQ ID NO: 36453
  peptide (1)..(123): Ceres Seq. ID no. 13618151

SEQ ID NO: 105839 - DNA, 1286 bp, Arabidopsis thaliana
  misc_feature (1)..(1286): Ceres Seq. ID no. 13618156
  misc_feature (1)..(1286): Ortholog of  Ceres SEQ ID NO 13595569 as cited in SEQ ID NO 56778
  misc_feature (1)..(1286): Ortholog of  Ceres SEQ ID NO 12611159 as cited in SEQ ID NO 59821
atcatctagaagcatttgtgtatatatatatatgtgtgtatattcctctctagctttaagtcaaaaccctatataaactatacaccaaagctttgaaccttcaaccaaacccaaaatccaagtgccccaccaaatgcttcaatcctcttccactacacaaaaaaacaacttaatccctttatacccttttagccaaaaccctcgctaaaagccaatccctcaatataaaataacaagtagaattgatctgcctatatataagattttgagacgaaataagatctaaaccacaagaaagaaagtaaacataaaagtatgggaaggtcaccgtgctgtgagaaagctcacacaaacaaaggagcatggacgaaagaagaggacgagaggctcgtcgcctacattaaagctcatggagaaggctgctggagatctctccccaaagccgccggacttcttcgctgtggcaagagctgccgtctccggtggatcaactatctccggcctgaccttaagcgtggaaacttcaccgaggaagaagacgaactcatcatcaagctccatagccttcttggcaacaaatggtcgcttattgccgggagattaccgggaagaacagataacgagataaagaactattggaacacgcatatacgaagaaagcttataaacagagggattgatccaacgagtcatagaccaatccaagaatcatcagcttctcaagattctaaacctacacaactagaaccagttacgagtaataccattaatatctcattcacttctgctccaaaggtcgaaacgttccatgaaagtataagctttccgggaaaatcagagaaaatctcaatgcttacgttcaaagaagaaaaagatgagtgcccagttcaagaaaagttcccagatttgaatcttgagctcagaatcagtcttcctgatgatgttgatcgtcttcaagggcatggaaagtcaacaacgccacgttgtttcaagtgcagcttagggatgataaacggcatggagtgcagatgcggaagaatgagatgcgatgtagtcggaggtagcagcaaggggagtgacatgagcaatggatttgattttttagggttggcaaagaaagagaccacttctcttttgggctttcgaagcttggagatgaaataatattgtcaaattttaggcgtaactgtacaaaacttttgcctagataatttgaaagtatatcttcaacttgtatgagaaatttaactggtgaattataatatatagaatttgtttttttttct

SEQ ID NO: 105840 - protein, 282 aa, Arabidopsis thaliana; identical to SEQ ID NO: 41372
  peptide (1)..(282): Ceres Seq. ID no. 13618157

SEQ ID NO: 105841 - DNA, 1395 bp, Arabidopsis thaliana
  misc_feature (1)..(1395): Ceres Seq. ID no. 13618158
  misc_feature (1)..(1395): Ortholog of  Ceres SEQ ID NO 14304120 as cited in SEQ ID NO 58862
  misc_feature (1)..(1395): Ortholog of  Ceres SEQ ID NO 13595658 as cited in SEQ ID NO 59888
  misc_feature (1)..(1395): Ortholog of  Ceres SEQ ID NO 13661330 as cited in SEQ ID NO 61614
  misc_feature (1)..(1395): Ortholog of  Ceres SEQ ID NO 13596025 as cited in SEQ ID NO 62024
  misc_feature (1)..(1395): Ortholog of  Ceres SEQ ID NO 13662324 as cited in SEQ ID NO 62162
  misc_feature (1)..(1395): Ortholog of  Ceres SEQ ID NO 12625713 as cited in SEQ ID NO 64160
  misc_feature (1)..(1395): Ortholog of  Ceres SEQ ID NO 14303564 as cited in SEQ ID NO 65360
  misc_feature (1)..(1395): Ortholog of  Ceres SEQ ID NO 14302860 as cited in SEQ ID NO 67667
tttcaactcaaatagcttcacagttttactaatctctctcatcttcttcccaacatcaaagaagacctttacttctggttagaatagaccaagaacactgagtacgacaaagaaccatgatgaatctttcttctcgtcgcgcctcttccactctcacattgagcttcactgttctccttttagcttccacaggttcgtatggctcaacattcacattcgctaatcggtgcggctacaccgtatggcctggaatcctatcgaatgctggctcacctactctctccaccaccggatttgagctccctaaaggcacctctcgctctctccaagctcccaccggttggtccggtcgattctgggctcgtaccggttgcaagttcgacagttctggctccggtacatgcaaaaccggtgactgcggctccaacgctgtcgaatgcgccgggcttggtgccgcaccgcctgtaactctcgcggagttcactctaggcactggcggcgatgatttctacgacgttagtctcgtcgacggttacaacattccgatgatagttgaagtcgccggtggatctgggcagtgcgcttctaccggatgcactacggatcttaacattcagtgccctgctgagctgcgtttcggcgacggagacgcttgcaaaagcgcgtgtttagcgtttcggagtcctgaatactgttgcagcggcgcgtatgctacaccttctagttgtcggccttccgtgtattcggagatgtttaaagccgcgtgtcctcgctcctatagctacgcttacgacgatgctacgagcactttcacttgcgccggtggagattatacggtgacgttttgcccttcttcccctagtcaaaaatcgactagctactcccctccagtgacagactcgtcgtcgacctcacaaggttccgatcctgtgcctggttctgatactggttacgctggtcagggtcaacagactccaggtcaaggtaatgtgtacgggtcacaggggactgggtcggagatgggtacgggtgagaccatgttacaagacggatcatggatggctggtttggccatgggagaggcaagcagaccagccggcgtttcattgacagtgctgcttgctgcatttacttttccgtttattttctcgtagcatcatcgtctttagatttggtagtcgttttgttagcattgcctttgtttagtttttgttgatactcgatgattatcgcttaagactgcgacaatttgggttttaggcttttagggttttgcattgtagctttgtcgtgtacgcgcgtgtttgcttgtatcatctgtcattgaagattgtttatcatgttcgaaattgtgagatatgctttgtgatttaaagaaagatcttttgtggcttt

SEQ ID NO: 105842 - protein, 345 aa, Arabidopsis thaliana; identical to SEQ ID NO: 21922
  peptide (1)..(345): Ceres Seq. ID no. 13618159

SEQ ID NO: 105843 - protein, 344 aa, Arabidopsis thaliana; identical to SEQ ID NO: 21923
  peptide (1)..(344): Ceres Seq. ID no. 13618160

SEQ ID NO: 105844 - protein, 202 aa, Arabidopsis thaliana; identical to SEQ ID NO: 21924
  peptide (1)..(202): Ceres Seq. ID no. 13618161

SEQ ID NO: 105845 - DNA, 1835 bp, Arabidopsis thaliana
  misc_feature (1)..(1835): Ceres Seq. ID no. 13618170
  misc_feature (1)..(1835): Ortholog of  Ceres SEQ ID NO 15171476 as cited in SEQ ID NO 55569
  misc_feature (1)..(1835): Ortholog of  Ceres SEQ ID NO 14312069 as cited in SEQ ID NO 59191
gtagttgcaaacaccgatcagtcacagacagtagcctctcaccatcaccaccacggcggccgtcaccgacgccgatacaccatgaaattacatttacaccctctctcacttgtcttcttctttttcttcttcttcttccgaccgacaatgtcgtcgaaccagcacgattactccgacgcactctcaaaatcaattctcttcttcgaaggccagcgctccggttacctcccaaacgaccagcgtatgacctggcgccgtaactccggtctgagcgacggttggacacacaacatcgatttaaccggcggttattacgacgccggagacaacgtcaaattcaatttcccgatggctttcaccaccacaatgctcgcctggagcgtaattgagttcggcgaattcatgccttcgtcggagctacgtaactctctcgtggctctccggtggagctctaattacctcctcaaatccgtttcacagctacctaaccggatcttcgtccaggtaggtgatccgatagcagatcataattgctgggaaagaccagaagacatggatacaccacggactgcttacgccgttaatgccccgaatccggcttctgaagttgccggagaaactacggcggccctctcagctgcttcgattgctttccgatcatcggatccaggatactctcaaacattgctccaaaatgctgtcaaaacttttcagttcgctgatatgtatcgcggtgcttatagcagcaatgacgatatcaaaaatgatgtgtgtcctttctactgcgatttcaacggatttcaggatgagttattgtggggagcagcttggctaagaaaagcgactggtgatgaaagctaccttaattacatagagagtaaccgtgaaccgtttggtgctaacgataacgtagacgaatttggctgggacaacaaagttggtggacttaatgttctcgtttcgaaggaagttattgaaggaaatatgtacaacttagaggcgtacaaggcatcagcagagagcttcatgtgtagtctggtcccggaatcttcgggaccgcatgttgagtatacttccgctggtctactttacaagcccggcggtagccagctccaacatgcgaccaccatatctttcctcctcctcgtatacgctcaatatctttcaagaagctctctctccctcaattgcggcacccttaccgtccctcctgattatctccgccgtcttgccaagaaacaggtggactatatattggggaataatccgatgggattatcgtacatggtcggatacggagagagatatccaaagaggatccatcaccgtggctcatcattgccatcgattgtggaccatccagaagccatcagatgcaaagacgggtcggtttatttcaattctaccgaaccgaacccgaacgttttgattggagcggtggtgggtgggcccggagaggacgatatgtacgatgatgatcggtccgatttccgcaagtccgagcccactacttacatcaatgctcctttcgttggcgttttggcgtactttgcagccaatcctggttctagctaagctgacgacatgggagtaaaattggaaaacattattcttaagttccaagagtatgggagttcttttttttcttacaagtctctcatcttcttgcccaagtaaagaaggaaaaagttcttacagttaaaatagtttttcttttacgcaaaattaatctgaataacttattcggattattcacctgttgatcatttgatacttctttttttatcaaatgtaattaatagtctattcatatatacatatatataatggttgct

SEQ ID NO: 105846 - protein, 524 aa, Arabidopsis thaliana; identical to SEQ ID NO: 43421
  peptide (1)..(524): Ceres Seq. ID no. 13618171

SEQ ID NO: 105847 - protein, 497 aa, Arabidopsis thaliana; identical to SEQ ID NO: 43422
  peptide (1)..(497): Ceres Seq. ID no. 13618172

SEQ ID NO: 105848 - protein, 475 aa, Arabidopsis thaliana; identical to SEQ ID NO: 43423
  peptide (1)..(475): Ceres Seq. ID no. 13618173

SEQ ID NO: 105849 - DNA, 1358 bp, Arabidopsis thaliana
  misc_feature (1)..(1358): Ceres Seq. ID no. 13618192
  misc_feature (1)..(1358): Ortholog of  Ceres SEQ ID NO 13655375 as cited in SEQ ID NO 63347
  misc_feature (1)..(1358): Ortholog of  Ceres SEQ ID NO 12626166 as cited in SEQ ID NO 64505
  misc_feature (1)..(1358): Ortholog of  Ceres SEQ ID NO 13654415 as cited in SEQ ID NO 68820
  misc_feature (1)..(1358): Ortholog of  Ceres SEQ ID NO 14303290 as cited in SEQ ID NO 0
aagttcataactgaaaaataaaaataagacagaaaacaaagttaaaaataaaataaaaacggaagagagaaaataaataaataaaatcactcaaaggatttccacagtttttctttccatgttgatttagcccattcgtagacttcctccgcgccgccgttagacgccgcctcggaagtatcagcaaccgccgtggtgttcgtcgccttcaaaggctcgtttctctcctctctctgagatctgaatttgagatgtttaaaaaaatgagtgctactacaagcaagacggatcagaaagcggcattagacattgcatcatggctattcaatgtggttacttccgttggaatcatcctcgttaacaaagctttaatggctacttatggctttagtttcgctactacattaaccggtttgcatttcggaacaacgacattgttgacaactttcttgacatggcttggttatatccaaccttctcagcttccttggcctgatcttttgaaattcgttttgttcgctaacttctctatcgttgggatgaacgtcagtctcatgtggaattctgttggcttctaccagattgcgaagctgagtatgatcccggtttcttgtcttctagaagttatgcttgacaatgtcaggtattcaagagatacaaagcttagcattttgttagttcttgctggtgttgccgtctgtactgtaaccgatgttagtgtcaatctcaacggatttctagctgccgctattgctgtctggagcaccgcgcttcagcaatactatgtacattatctacaacggaaatattcactcggttctttcaatttactggcgcataccgctccagttcaagctgcgtcattgttgttggtcggaccatttctagactactggttgactaaccaaagagtggatgcatacaacttttcatttgtatctctgttcttcttaatactctcgtgcagtatcgcggttgggaccaatctcagccaattcatctgtattggaagattcacggcggtgtctttccaagtacttggtcacatgaagacaattctggttttggttttgggattcactttcttcggtaaggaaggattaaacctacaagtagtgcttggaatgctgattgctatactcggtatgatctggtacggtaatgcatcttctaaaccgggtggtaaagaacgtcgtagcctgtctattcccataaccaagtcacagaaactatctgaaacaaacgaatctgatgaaaaggtgtagaagaaagaagtgaatcgcattgacatagaaacaaaaacaagatactcagatacaaacaggtagagttatcaaatgggatattatttataaacc

SEQ ID NO: 105850 - protein, 337 aa, Arabidopsis thaliana; identical to SEQ ID NO: 22961
  peptide (1)..(337): Ceres Seq. ID no. 13618193

SEQ ID NO: 105851 - protein, 333 aa, Arabidopsis thaliana; identical to SEQ ID NO: 22962
  peptide (1)..(333): Ceres Seq. ID no. 13618194

SEQ ID NO: 105852 - protein, 297 aa, Arabidopsis thaliana; identical to SEQ ID NO: 22963
  peptide (1)..(297): Ceres Seq. ID no. 13618195

SEQ ID NO: 105853 - DNA, 1943 bp, Arabidopsis thaliana
  misc_feature (1)..(1943): Ceres Seq. ID no. 13618204
  misc_feature (1)..(1943): Ortholog of  Ceres SEQ ID NO 12623695 as cited in SEQ ID NO 61286
tttttccccattttcttactctcttgccctttcttctctcactctccggcgactgttacgagtttttaacacttccgtcgtcttctcagttgttgttgttgtttatgacaagatcttgttctatccattaaaaccaaagaaatggaggaaggtcataaagaaccattggtgctaagagttgaaggatcacattgttctttatcagagatggatgattttgatctaactcgggctttagagaagccgaggcagctaaagatcgaacggaagagatcgtttgacgaaaggtcgatgagcgagttatcgactggctatgtaagacaagatagcattttagaaatggctcattctcctggaagtaggtcaatggtggacactcctctctctgttaggaactctttcgagcctcatccgatggttgctgaggcttgggaagctttgagaaggtcaatggtgttctttcgtggtcaacccgttggtaccattgcagcttatgaccatgcctccgaggaggtcttgaactatgatcaggtgtttgtacgtgactttgtaccaagtgcattggcgtttctgatgaatggagagcccgatatagtgaaaaacttcttgctcaagacacttcagcttcaaggttgggagaaacgggttgaccggttcaagcttggggaaggcgttatgccagcgagtttcaaggtgcttcatgatccagttcgtaaaaccgacacaattattgcggattttggagaaagcgctataggaagagtagcaccggtggattcaggattctggtggatcatacttctccgtgcttacacgaaatctacgggagatttgactttatctgagacaccagagtgtcagaggggaatgaggcttatactctctctttgcttatccgaaggttttgatactttccctacgcttctttgtgctgacggttgttctatggttgataggagaatgggtgtttatggatatccaatagagattcaagctctgtttttcatggcattgagatgcgccttgtcgatgcttaaaccagacgaggaaggtcgagatttcatagaaaggattgtgaagagacttcacgcgctgagtttccatatgcgcagttacttttggcttgactttcaacaactcaacgatatctataggtacaagacagaggagtactcacacaccgcggtgaacaagttcaacgtgatgccggactcgataccagactgggttttcgactttatgcctctccgtggaggatattttgtcggcaatgtaagcccggcccgtatggatttcaggtggttttccttaggaaattgtgtctccatcctttcttccttggcaactccggatcagtcaatggctattatggacctcctcgagcaccgttgggaggagctagtaggcgagatgccgctcaagatatgttacccttgcatcgaaagccacgagtggcggattgttaccggttgtgatcctaaaaacacgaggtggagttaccacaacggtggatcttggccagtattgctgtggacgctgacggcggcatgcatcaagactggacggcctcaaatagcgagacgtgcgattgatctaattgaatcacggctacaccgagattgctggccggaatactatgatggtaagcaaggaaggtacgttggaaaacaagcaaggaagtaccagacttggtcaatcgcgggttacttggttgcgaaaatgatgcttgaagatccttcacatattggaatgatctctcttgaagaagacaaacagatgaaacctgttatcaagagatctgcttcatggacttgctgaattttgtttcttgttttgtattataatgtcatttgattaagcattcaaaagacctttaatcagcgagagagtagttctgtttgtatttctctttgatccaactatggtttattttcacttgaggc

SEQ ID NO: 105854 - protein, 558 aa, Arabidopsis thaliana
  peptide (1)..(558): Ceres Seq. ID no. 13618205
MEEGHKEPLVLRVEGSHCSLSEMDDFDLTRALEKPRQLKIERKRSFDERSMSELSTGYVRQDSILEMAHSPGSRSMVDTPLSVRNSFEPHPMVAEAWEALRRSMVFFRGQPVGTIAAYDHASEEVLNYDQVFVRDFVPSALAFLMNGEPDIVKNFLLKTLQLQGWEKRVDRFKLGEGVMPASFKVLHDPVRKTDTIIADFGESAIGRVAPVDSGFWWIILLRAYTKSTGDLTLSETPECQRGMRLILSLCLSEGFDTFPTLLCADGCSMVDRRMGVYGYPIEIQALFFMALRCALSMLKPDEEGRDFIERIVKRLHALSFHMRSYFWLDFQQLNDIYRYKTEEYSHTAVNKFNVMPDSIPDWVFDFMPLRGGYFVGNVSPARMDFRWFSLGNCVSILSSLATPDQSMAIMDLLEHRWEELVGEMPLKICYPCIESHEWRIVTGCDPKNTRWSYHNGGSWPVLLWTLTAACIKTGRPQIARRAIDLIESRLHRDCWPEYYDGKQGRYVGKQARKYQTWSIAGYLVAKMMLEDPSHIGMISLEEDKQMKPVIKRSASWTC

SEQ ID NO: 105855 - protein, 536 aa, Arabidopsis thaliana
  peptide (1)..(536): Ceres Seq. ID no. 13618206
MDDFDLTRALEKPRQLKIERKRSFDERSMSELSTGYVRQDSILEMAHSPGSRSMVDTPLSVRNSFEPHPMVAEAWEALRRSMVFFRGQPVGTIAAYDHASEEVLNYDQVFVRDFVPSALAFLMNGEPDIVKNFLLKTLQLQGWEKRVDRFKLGEGVMPASFKVLHDPVRKTDTIIADFGESAIGRVAPVDSGFWWIILLRAYTKSTGDLTLSETPECQRGMRLILSLCLSEGFDTFPTLLCADGCSMVDRRMGVYGYPIEIQALFFMALRCALSMLKPDEEGRDFIERIVKRLHALSFHMRSYFWLDFQQLNDIYRYKTEEYSHTAVNKFNVMPDSIPDWVFDFMPLRGGYFVGNVSPARMDFRWFSLGNCVSILSSLATPDQSMAIMDLLEHRWEELVGEMPLKICYPCIESHEWRIVTGCDPKNTRWSYHNGGSWPVLLWTLTAACIKTGRPQIARRAIDLIESRLHRDCWPEYYDGKQGRYVGKQARKYQTWSIAGYLVAKMMLEDPSHIGMISLEEDKQMKPVIKRSASWTC

SEQ ID NO: 105856 - protein, 508 aa, Arabidopsis thaliana
  peptide (1)..(508): Ceres Seq. ID no. 13618207
MSELSTGYVRQDSILEMAHSPGSRSMVDTPLSVRNSFEPHPMVAEAWEALRRSMVFFRGQPVGTIAAYDHASEEVLNYDQVFVRDFVPSALAFLMNGEPDIVKNFLLKTLQLQGWEKRVDRFKLGEGVMPASFKVLHDPVRKTDTIIADFGESAIGRVAPVDSGFWWIILLRAYTKSTGDLTLSETPECQRGMRLILSLCLSEGFDTFPTLLCADGCSMVDRRMGVYGYPIEIQALFFMALRCALSMLKPDEEGRDFIERIVKRLHALSFHMRSYFWLDFQQLNDIYRYKTEEYSHTAVNKFNVMPDSIPDWVFDFMPLRGGYFVGNVSPARMDFRWFSLGNCVSILSSLATPDQSMAIMDLLEHRWEELVGEMPLKICYPCIESHEWRIVTGCDPKNTRWSYHNGGSWPVLLWTLTAACIKTGRPQIARRAIDLIESRLHRDCWPEYYDGKQGRYVGKQARKYQTWSIAGYLVAKMMLEDPSHIGMISLEEDKQMKPVIKRSASWTC

SEQ ID NO: 105857 - DNA, 1304 bp, Arabidopsis thaliana
  misc_feature (1)..(1304): Ceres Seq. ID no. 13618208
  misc_feature (1)..(1304): Ortholog of  Ceres SEQ ID NO 15169191 as cited in SEQ ID NO 58440
  misc_feature (1)..(1304): Ortholog of  Ceres SEQ ID NO 13597523 as cited in SEQ ID NO 64778
atatccaacaaatgttaagttcttcagtttccttcaaaattgggttttcttgagaaagcattacagacacagtaatggcggctcctcggaatttaacaggtgacggtggagcaagacagctagtaaaagacgaagaaagccccgcagcttcatcggcagctaaaggactcttaaacgatgactcaccgactggtaaacgaaccaaatcggagagatttcctctctcacggtgggaattcgccgtgtttttcaccgtctttctcgttttcaccaccggactcttttgtatttacctcaccatgcctgccgctgaatacggcaagctcaaagttcctagaactatctccgatcttcgattgctcaaagagaatcttgggtcttatgcaagtgagtaccaagcacggttcattttaggttactgttcgacgtatatctttatgcagacatttatgatacctggaacgatctttatgtcattgcttgctggagctcttttcggtgtggttagaggttttgttcttgttgtccttaatgcaactgctggagcatgttcttgcttcttcttatcgaaattggtcggtaggccattggttaactggttatggcctgaaaagttgaggtttttccaagctgagattgcgaaaagaagagataggctgctaaactacatgctgttcttaaggataacaccaacacttccaaacctctttatcaatttgtcttctccaatcgttgacataccctttcacgtcttctttttggcgactctagtcggtcttatgccagcttcgtacatcacagttagagctggtttggctcttggagatctcagatcagtaaaggatttgtatgatttcaagaccttgtcagtgctgttcctcattggatccatctccatattccctgcccttctaaagagaaagagagtatatgaatgaagagtcgaagactgaagagtataatcatttatatagatattgatgagcagcacctttcagtcgcatggcagcatttcaaaggtgtttatgagctcaagataaaagaagaagattgtttctgcaacatcgcggagcttaaaatcgctaactctggctttgatttgtttattgtcttcgatttgagagcttctcttacccccttgtagtagtaagtgtttgtgtagctagtttactgaatcatgattggctttgtatattgaatacttgattcagagatctgactctgcagcctattggcttatgtataacaaacatgattatgtaaatgcttgaagacattgctttgaccaaatatgggtgattctg

SEQ ID NO: 105858 - protein, 287 aa, Arabidopsis thaliana; identical to SEQ ID NO: 23979
  peptide (1)..(287): Ceres Seq. ID no. 13618209

SEQ ID NO: 105859 - protein, 212 aa, Arabidopsis thaliana; identical to SEQ ID NO: 23980
  peptide (1)..(212): Ceres Seq. ID no. 13618210

SEQ ID NO: 105860 - protein, 166 aa, Arabidopsis thaliana; identical to SEQ ID NO: 23981
  peptide (1)..(166): Ceres Seq. ID no. 13618211

SEQ ID NO: 105861 - DNA, 813 bp, Arabidopsis thaliana
  misc_feature (1)..(813): Ceres Seq. ID no. 13618212
  misc_feature (1)..(813): Ortholog of  Ceres SEQ ID NO 13639250 as cited in SEQ ID NO 56555
  misc_feature (1)..(813): Ortholog of  Ceres SEQ ID NO 15177034 as cited in SEQ ID NO 60024
  misc_feature (1)..(813): Ortholog of  Ceres SEQ ID NO 13598257 as cited in SEQ ID NO 63008
  misc_feature (1)..(813): Ortholog of  Ceres SEQ ID NO 13597309 as cited in SEQ ID NO 63851
  misc_feature (1)..(813): Ortholog of  Ceres SEQ ID NO 12599167 as cited in SEQ ID NO 64443
cactcatacatcttctccatccatcacacgacgaagcataatggcaaaccgtaaatacataataccaatgacgaccaaagagtgcggaaaccacggtggtggcggtggaggaggcggaaccgcctgtagaatctgtggagcaatcatcggcttcatcatcatcgtcttgatgacaatcttcctcgtttggataatcctccaaccgaaaaacccagaattcatcctccaagacaccaccgtctacgcctttaacctctcgcagcctaacctcctcacctcaaagtttcagataacaatcgcttcacgcaaccgaaactccaacatcggaatctactacgaccatcttcacgcctacgcttcttaccggaaccagcaaatcactctagctagcgaccttcctccgacgtaccaaagacacaaagaagatagcgtttggtcacctctcttatatggaaaccaagtccctatcgctcctttcaacgccgtggctctcggggacgagcagaatagtggggttttcacgttgactatatgcgttgatggacaagtgaggtggaaggtcgggactcttactatagggaattatcatctccatgttcgttgtcaggcgttcataaaccaggctgataaagccgccggagttcatgtcggcgaaaacaccgttaagtacacgttgatcaataagtgcagtgtcaatttttaggaggtaaaaggacacaactttgacgacgtcaatgtttgcttttactctttcttcttcttttcatttttcttctactcagataatgtttttgcttctatatcgtttaattt

SEQ ID NO: 105862 - protein, 233 aa, Arabidopsis thaliana
  peptide (1)..(233): Ceres Seq. ID no. 13618213
THTSSPSITRRSIMANRKYIIPMTTKECGNHGGGGGGGGTACRICGAIIGFIIIVLMTIFLVWIILQPKNPEFILQDTTVYAFNLSQPNLLTSKFQITIASRNRNSNIGIYYDHLHAYASYRNQQITLASDLPPTYQRHKEDSVWSPLLYGNQVPIAPFNAVALGDEQNSGVFTLTICVDGQVRWKVGTLTIGNYHLHVRCQAFINQADKAAGVHVGENTVKYTLINKCSVNF

SEQ ID NO: 105863 - protein, 220 aa, Arabidopsis thaliana
  peptide (1)..(220): Ceres Seq. ID no. 13618214
MANRKYIIPMTTKECGNHGGGGGGGGTACRICGAIIGFIIIVLMTIFLVWIILQPKNPEFILQDTTVYAFNLSQPNLLTSKFQITIASRNRNSNIGIYYDHLHAYASYRNQQITLASDLPPTYQRHKEDSVWSPLLYGNQVPIAPFNAVALGDEQNSGVFTLTICVDGQVRWKVGTLTIGNYHLHVRCQAFINQADKAAGVHVGENTVKYTLINKCSVNF

SEQ ID NO: 105864 - protein, 211 aa, Arabidopsis thaliana; identical to SEQ ID NO: 81818
  peptide (1)..(211): Ceres Seq. ID no. 13618215

SEQ ID NO: 105865 - DNA, 1376 bp, Arabidopsis thaliana
  misc_feature (1)..(1376): Ceres Seq. ID no. 13618216
  misc_feature (1)..(1376): Ortholog of  Ceres SEQ ID NO 13655992 as cited in SEQ ID NO 65504
  misc_feature (1)..(1376): Ortholog of  Ceres SEQ ID NO 13587581 as cited in SEQ ID NO 0
ctctctcacactcaccatgcaatttttctttccttgtgaccaagacttctctccaactctaaaccaaaaaacacccagattttttctctctgatttcaagattccccaaaactttttctccaagaccctctacaactttcttgatggcggtaggaatctttggattgatcccaagctcatcaccagacgagctaaggaagattcttcaagcgctttcgacgaaatggggagacgtagttgaggattttgagagtcttgaagtgaagccaatgaaaggagcgatgactaacgaagtgttcatggttagttggcctagaaaagaaacgaatcttcgatgtaggaagcttcttgttcgtgtttatggtgaaggtgttgagcttttcttcaatagagacgatgagattcgtacttttgagtatgttgctcgtcatggtcacggtcctacacttcttggtcgcttcgccggcggtagagtcgaagagtttatccatgcccggacactatcggcaaccgatcttcgtgatccgaacatatcagctcttgttgcatctaagctaagaagatttcacagcatacacattcctggagatagaattatgctcatctgggacaggatgaggacttgggtaggacaagccaagaatctatgttcaaatgaacattcaacagagtttggtctagacgacattgaagatgaaatcaacctgctggaacaagaagtgaacaatgaacaagagattggcttctgtcacaatgacttgcagtatggtaacatcatgattgatgaagaaaccaatgcaattactatcattgattatgagtatgcaagttataatccgatcgcttacgacatagcaaatcatttctgtgaaatggcggcagattatcattcaaacactcctcatatcttggactacactctatatccaggggaagaagaaaggaggagattcatatgtaactacttaacctcttcaggtgaagaagcaagagaagaagacatagaacaacttttggatgatattgagaagtatacattggcaagccatctcttctggggtttatggggaatcatatctggttatgtgaacaagattgagtttgattatatcgagtattcgaggcagagattcaaacagtattggcttcgcaagccaaagcttttatctttcttcccatcctaataagtaaattctctgtttacttatgtttactctttgcgaataacgcggtaaaaacccgatgatggatccatgatatagctatgccaaagctaaaactatgtgtaattcttctgttctgaacttctgatactatgtaataagtaaaagatataaatattccatactataatatttccacaataatgagaaaag

SEQ ID NO: 105866 - protein, 346 aa, Arabidopsis thaliana; identical to SEQ ID NO: 74472
  peptide (1)..(346): Ceres Seq. ID no. 13618217

SEQ ID NO: 105867 - protein, 304 aa, Arabidopsis thaliana; identical to SEQ ID NO: 42058
  peptide (1)..(304): Ceres Seq. ID no. 13618218

SEQ ID NO: 105868 - protein, 300 aa, Arabidopsis thaliana; identical to SEQ ID NO: 42059
  peptide (1)..(300): Ceres Seq. ID no. 13618219

SEQ ID NO: 105869 - DNA, 1229 bp, Arabidopsis thaliana
  misc_feature (1)..(1229): Ceres Seq. ID no. 13618228
  misc_feature (1)..(1229): Ortholog of  Ceres SEQ ID NO 14304170 as cited in SEQ ID NO 53453
  misc_feature (1)..(1229): Ortholog of  Ceres SEQ ID NO 14315911 as cited in SEQ ID NO 56998
  misc_feature (1)..(1229): Ortholog of  Ceres SEQ ID NO 13656028 as cited in SEQ ID NO 64728
tttggtgaatcgattgttctcctttcttcgatatcgaattagggtttctgtagaatccagtttttgataggaacaatgtcaatttcggtggttgatagcagtctctgccatccgactgcgtcgtttccgtcatccatggttcattctaatcgattctcgaagagaatatcagggaacgggaattgggttcgcgaaaggagaagactttatgtgaaatcgagtaactcagaaggtaaaaaggaggaagcagcacagaaatcgagcagtaataatacatctagcttcttgtcttttctctgtccattgcttaaagttttctctggaggtgatccttctcaacagcggaatcatgctctcgaggttgcaacttcttcattggcatctgttgcaagacttccatggggatctcgagtatcaactgggagtatagataaccaggatgtctcttctaatccgcctttgcgattgcagctttttgaatttgaggcatgtcccttttgtcggagagtgcgggaagccatgactgagctagacctttcagtagaagtttatccttgtcctaaaggatctataagacacagagaactggttagaagatctggcggaaaagagatgtttccatttctcgtcgacccgaatactgaaactttaatgtatgagagtggtgacatcgtaaagtacctatttaaacaatatggaaatggaagaggcccttccacaggacttctggaaagcaccttgttcactggatggatgccaactcttctccgagcaggtagaggcatgtcattgtgggataaggcttcaacagatctgccacctaaaatgctcgagctcttctcttacgaaaacaacccgtattcacggttggtgcgtgaagcactgtgtgagctggagcttccctatgtattacacaacattggagaagggtccacacggatgaaatcacttctaaatgcttcaggatccaataaggttccattcttggttgatccaaacaccggtgtccaattaggtgattacgagaagattctggcttacctcttcaagacatattcttcagcagcatttgcatagtccatagaacctatacatcattattcccaaggtacaagcttttgagtccacatgttttaacaatactgagaaactggttgacatggaagttacatacatggtcaaaatctgaacttttgaatatatgatgagtcggtaggtatcgcaagttg

SEQ ID NO: 105870 - protein, 333 aa, Arabidopsis thaliana
  peptide (1)..(333): Ceres Seq. ID no. 13618229
MSISVVDSSLCHPTASFPSSMVHSNRFSKRISGNGNWVRERRRLYVKSSNSEGKKEEAAQKSSSNNTSSFLSFLCPLLKVFSGGDPSQQRNHALEVATSSLASVARLPWGSRVSTGSIDNQDVSSNPPLRLQLFEFEACPFCRRVREAMTELDLSVEVYPCPKGSIRHRELVRRSGGKEMFPFLVDPNTETLMYESGDIVKYLFKQYGNGRGPSTGLLESTLFTGWMPTLLRAGRGMSLWDKASTDLPPKMLELFSYENNPYSRLVREALCELELPYVLHNIGEGSTRMKSLLNASGSNKVPFLVDPNTGVQLGDYEKILAYLFKTYSSAAFA

SEQ ID NO: 105871 - protein, 313 aa, Arabidopsis thaliana
  peptide (1)..(313): Ceres Seq. ID no. 13618230
MVHSNRFSKRISGNGNWVRERRRLYVKSSNSEGKKEEAAQKSSSNNTSSFLSFLCPLLKVFSGGDPSQQRNHALEVATSSLASVARLPWGSRVSTGSIDNQDVSSNPPLRLQLFEFEACPFCRRVREAMTELDLSVEVYPCPKGSIRHRELVRRSGGKEMFPFLVDPNTETLMYESGDIVKYLFKQYGNGRGPSTGLLESTLFTGWMPTLLRAGRGMSLWDKASTDLPPKMLELFSYENNPYSRLVREALCELELPYVLHNIGEGSTRMKSLLNASGSNKVPFLVDPNTGVQLGDYEKILAYLFKTYSSAAFA

SEQ ID NO: 105872 - protein, 185 aa, Arabidopsis thaliana
  peptide (1)..(185): Ceres Seq. ID no. 13618231
MTELDLSVEVYPCPKGSIRHRELVRRSGGKEMFPFLVDPNTETLMYESGDIVKYLFKQYGNGRGPSTGLLESTLFTGWMPTLLRAGRGMSLWDKASTDLPPKMLELFSYENNPYSRLVREALCELELPYVLHNIGEGSTRMKSLLNASGSNKVPFLVDPNTGVQLGDYEKILAYLFKTYSSAAFA

SEQ ID NO: 105873 - DNA, 1518 bp, Arabidopsis thaliana
  misc_feature (1)..(1518): Ceres Seq. ID no. 13618232
  misc_feature (1)..(1518): Ortholog of  Ceres SEQ ID NO 15177368 as cited in SEQ ID NO 57336
acagaggaggaaaagaagcacattgtcgccgtctctttaacttccttcatcaatctccgtctcgtgaatctctgtttctttgatctgtaattgcgaattcgtcgtttcccaattttgaaattgttgtaatgtcggcggtctcgtgctccacggcgagttctagcggaggatgtgcatttaggtttcgatcaaagacatcaatccattctcctaatttcatcagaattgggacaaattctcagagtgacagattctgtaatcatcgtttggaattggtacatggaactcgtaaagtgaaaggagcatctgtacgtatggcattagttgaggagagacaatcaacgagcaaagatgttgctgagcctcctcgggtcctggcgtatgatcttgttcaaggagcacttgtgaaatggagatggaaggatgacaaatctgttccagatacacctactgctgttctcctacacggaattttagggagcgggaaaaactggggcacttttgctcgtagattggctcatgaattcccaacgtggcagtttctattggtagacctgcgttgccatggggattcaacatctctcaagaagagaggtccacactcggttgctactactgcttctgatgttctaaaacttgttggtcagttgaggttaacacctcgggtccttgttggtcatagctttggggggaaagttgtattaagcatggtagagcaagcagctaagcctcttccacgaccagtccgagcttgggtattggatgctactcctggtaaagttcgtgcaggaggagatggagaagatcatccacgagagcttatatcatttctacgtaaattgccaaaagtggtcttgtcaaagcgcgaggttcttaaagctcttataaatgaagggttttccaatgatgtcgcacagtgggtcattaccaatctcagacctactggaccatcagcttctagcttctcgtggacatttgacctagacgggatcgctgaactttaccagtcttacgaagagacaaatctatggaactttgttgagaatcttccaagaggagtacatgtgaattttctgaaagcggaaagaagcttgcaccgttgggccctagaagaccttcagcgaatccacgccgctgaagagctagcctctgaagaaggcggtggtgtagaaatgcatgtcttggaagatgccggtcattgggttcacacggataacccggatggtctcttcaggatcttgtcatcttctttccaggttctcagagcctagaggtgctgaacggtcttggttcggctctttttctgtgtaatacttgtggagaagttaggtctaaaaacagttgacagatacaatatcatatacatcaacactgtgtccgtgtaatgttctgtgtgacataagtaattcagaagtaacatcatatggctgtatcatccggtattattcttgactcgatgtcctttacattgcttttctttttttgtggttcacttggtcagagaaagttctaaagctc

SEQ ID NO: 105874 - protein, 380 aa, Arabidopsis thaliana; identical to SEQ ID NO: 27590
  peptide (1)..(380): Ceres Seq. ID no. 13618233

SEQ ID NO: 105875 - protein, 318 aa, Arabidopsis thaliana; identical to SEQ ID NO: 27591
  peptide (1)..(318): Ceres Seq. ID no. 13618234

SEQ ID NO: 105876 - DNA, 1308 bp, Arabidopsis thaliana
  misc_feature (1)..(1308): Ceres Seq. ID no. 13618235
  misc_feature (1)..(1308): Ortholog of  Ceres SEQ ID NO 13638292 as cited in SEQ ID NO 57738
agaagaagaagaagaagagtgatactgagaagatctgtgagattattatattcgattttgatcagtttctaaaaagctttcaacaatggattcgtcttcaaatttgaatcctcttcgtgaagatacctcagaggaacatttagaacccatagaagctccggcgtctgtcttcgccgctcgtcctcttcgtcctccttctacgaattcgtcggagaagtattcgcctgtagaatggaaaagctattttgataaagaagatgatatatcaatcactggctctgatgatgtgtttcatgtgtatatggcaggaaatgaaggacctgttgtcttttgtctccatggtggtggctactctgggctctcgttttctatagtagcaagtaaaattaaggagaaagcacgtgtggttgcgatggacttgagagggcacggtaaatcggtttcggagaacgaattggagttatcgcttgagacaatgagcaatgatgttttggctgtcattaaggaattgtatggagactctcctccagctattgtgctagttggtcacagcatgggaggttcggtcgctgtgcaagttgctgcaaacaaaacattgcctagcttggctgggcttgtcgttgtggatgttgttgagggtactgctatttcctcattgattcacatgcagaaaattctttcaaacagaatgcaacattttcccagcatcgaaaaagcaattgaatacagcgttagaggagggtcattaagaaacattgattcagcccgtgtctctatccccacaactctcaaatatgatgattcaaagcattgctacgtttaccgaacacgtctagaggaaacagagcaatattggaaaggctggtacgatggtctctcagagaagtttttgtcatccccagttccgaaactcttgctattagctggaactgataggttggacaggaccctcacaattggtcaaatgcaaggaaagtttcagatgattgtggtcaaacacaccggacatgccatacaggaagatgtaccggaggagtttgcgaatctagttctgaatttcatatcacgtaacagaattggtcctcatggtgttgagataccaggaatgtggaaaccttcacaacagactaagacttgaagcagccatcactggacaatgccaaagtcgtcgtgtggctctactcacttgtttcgctttgtccgtttatgaataaacagaattaacaaactctagctcgtgttaaggagttggcaatacaagaagaaaacagagtaaaaagattaaaatcactttctatatttttccat

SEQ ID NO: 105877 - protein, 350 aa, Arabidopsis thaliana; identical to SEQ ID NO: 27633
  peptide (1)..(350): Ceres Seq. ID no. 13618236

SEQ ID NO: 105878 - protein, 278 aa, Arabidopsis thaliana; identical to SEQ ID NO: 27634
  peptide (1)..(278): Ceres Seq. ID no. 13618237

SEQ ID NO: 105879 - protein, 241 aa, Arabidopsis thaliana; identical to SEQ ID NO: 27635
  peptide (1)..(241): Ceres Seq. ID no. 13618238

SEQ ID NO: 105880 - DNA, 1009 bp, Arabidopsis thaliana
  misc_feature (1)..(1009): Ceres Seq. ID no. 13618239
  misc_feature (1)..(1009): Ortholog of  Ceres SEQ ID NO 12377905 as cited in SEQ ID NO 1260
ccaaatttctccatggatcgttctttgaatctcctcgatttagccttagggttcgatgagcagctagctattccatcgccactaaatggaaaagtaatactaatagaagactgtgtagagacgagtggttcctttgtacttcaccagctaatgaaacgtgttctctcctctaactcctccgacgcacttatctttctcgcttttgctcgccctttctctcattatgatcgaatcttgcgtaaactgggatgtaatttagctacccataagtcgaataatcgattggtgttctttgacatgctcatggttaagtgttcagatggggatcaaatggaagacaatgtgagtgcagttgcgaaactatttcgggagatacaagaaaccgttcgaaagctacagagtgtaacaagtggtaacataactgttatggtggatgacatgtctctgctggaaattgctactaccggcagcaactcagatcacgtattggacttcttgcattattgccacacattaagttctgaaagcaattgttcattggtcatcctcaatcatgaagatatatacgcgagcatggagagacctgcatttttgctacagatggtatgccttgcagatgttgtgataaaggcagagcctttagcctctggtttagcaaatgatgtacatggccaattgactgttctgaacaaagggataagcaactcaggtagaggaagctcgaggaacaagttgcagaattttcaattcaggatcaaagaaaatggtatcgactatttctatcctggttgcagaagctgaggattagacaccgttctgagcattagcatggtagtgagatgtttttctagacagttttgttatttgcgtttaggttaaacagagacactctgttaaacatttttactttagtgtctcttctggttgtaacttgatgacttagctaaagttgaatgcttgagacacagaaacttgtagacatggaaaattagtaacattctatatcttt

SEQ ID NO: 105881 - protein, 266 aa, Arabidopsis thaliana; identical to SEQ ID NO: 37643
  peptide (1)..(266): Ceres Seq. ID no. 13618240

SEQ ID NO: 105882 - protein, 262 aa, Arabidopsis thaliana; identical to SEQ ID NO: 37644
  peptide (1)..(262): Ceres Seq. ID no. 13618241

SEQ ID NO: 105883 - protein, 216 aa, Arabidopsis thaliana; identical to SEQ ID NO: 37645
  peptide (1)..(216): Ceres Seq. ID no. 13618242

SEQ ID NO: 105884 - DNA, 1032 bp, Arabidopsis thaliana
  misc_feature (1)..(1032): Ceres Seq. ID no. 13618266
  misc_feature (1)..(1032): Ortholog of  Ceres SEQ ID NO 12557497 as cited in SEQ ID NO 43
accttataggagcagtttcgtctcttcctccttctttcacttagctcttcctagtgttaaaccagagtaaagcttgaaactttggactaaaagaatggcgtctttgggtgtgtcggaaatgcttggtactccccttaacttcagggcagtttcaagatcgtctgctccgttggcatcaagcccatccacgttcaagactgttgctctcttctctaagaaaaagccagctcctgctaagtccaaggctgtctctgagactagcgatgagctcgccaagtggtatggtcctgacaggagaattttcttgcctgatggtcttttggatagatcagagatcccagagtacttaaacggtgaagttgctggagattatggttatgacccatttggtcttggaaagaagcctgagaactttgctaaataccaagcttttgaattgatccatgcgagatgggctatgttaggagcagctggtttcatcattcctgaagctttaaacaaatatggcgctaactgtggccctgaagctgtctggtttaagactggtgctttgcttcttgatggaaacacattgaactactttggcaagaacatccctatcaaccttgttctcgccgtagttgctgaggttgttctcctcggtggagccgagtactacagaatcaccaacggattggatttcgaggacaagctacacccaggaggtccatttgatcctctaggccttgctaaggaccctgagcaaggagctcttctcaaagtcaaagagatcaagaacgggagattagccatgtttgcgatgctcggtttctttatccaagcgtatgttaccggagaaggtcctgttgagaaccttgcaaagcatctcagtgatccttttggaaacaacttgcttaccgtcatcgctggaactgccgagagagctcccactctctaagccatttctactttttttaagagcttccaaaatgtacactttgttcgattggaactccttttgacaatgttaaaaaaacttccatctgaatcttc

SEQ ID NO: 105885 - protein, 280 aa, Arabidopsis thaliana; identical to SEQ ID NO: 25086
  peptide (1)..(280): Ceres Seq. ID no. 13618267

SEQ ID NO: 105886 - protein, 272 aa, Arabidopsis thaliana; identical to SEQ ID NO: 25087
  peptide (1)..(272): Ceres Seq. ID no. 13618268

SEQ ID NO: 105887 - protein, 159 aa, Arabidopsis thaliana; identical to SEQ ID NO: 25088
  peptide (1)..(159): Ceres Seq. ID no. 13618269

SEQ ID NO: 105888 - DNA, 1763 bp, Arabidopsis thaliana
  misc_feature (1)..(1763): Ceres Seq. ID no. 13618270
  misc_feature (1)..(1763): Ortholog of  Ceres SEQ ID NO 13594193 as cited in SEQ ID NO 58558
ataagctcaaagactaaccaaacccatcatcttcattccaacttcttttctctttttattcacaaccttagctttgagaatcagtctttgttcagtgttaacgtaggcatatctctctatgtgtgtgttgtctttgctttttataagattcggtttctgagtttggtttttatttcttaaggtggctatctttcttgttcttcttcttaaaacgtagtaacagctttataaaaatctttcaaagcatgtaaatttaagtcctagctccattttcgttttcttcttctcaaaaaaaaaaacaaaaaaaaagtttttgatcgattgatgagttttctcatttattgatctctctagttttaacttgtgtttggtgaaaccggtactggcgaagtttaaaacacaagtgtaaacacaaatttataaaaatttcaaatcatgtaaatttcgtctctatcaatttatttcccctcaccaaaaaaaaacaaaaaaaaattagaatttagtacttttattttaaacaaaaaccaaaaaaaaaaccaaaaaaaaaaacgttggaaatggctccaccggaggctgaggtgggtgcggtaatggtgatggctcctccaacgccggggacaccgggaacaccgggaggaccgttgatcacggggatgagagtggattcaatgtcgtttgatcatcggaaaccaacgcctcgatgcaaatgcttgccggtgatgggatcaacttggggtcaacatgacacatgcttcaccgattttccctctcctgatgtctccctcactcgcaagcttggagccgagttcgtgggaacattcatcttgatattcaccgcgacagccggtccaatcgtgaaccagaaatacgatggagcagaaaccctaatcggtaacgctgcatgcgcaggactcgcagtgatgatcataatactctcaacaggtcatatctcaggggctcacctaaacccatcactgaccatagcattcgctgctctaaggcacttcccttgggcacacgtccctgcttacatagcggctcaagtctcagcttccatttgcgcttcattcgcacttaaaggagtgttccatccttttatgtccggtggtgtcactattccatctgttagccttggacaagcctttgctcttgagttcatcatcactttcattctcctctttgttgtaactgccgtcgctaccgacactcgtgccgttggagaattggcaggtatagccgttggagccacggtcatgctcaatattctagtcgcagggccatcgactggtggatctatgaatcctgtgagaactctaggaccagccgttgcatcaggaaactataggtcactatgggtgtatctggtggctcctacacttggtgccatatctggtgcagcggtctacacaggtgttaagcttaacgatagcgtgactgacccgcctcgtccggttaggagctttcgtcgttaagtgagtgagagacttgtttacaagtcttttgctttgtataattttactgtatgattatgtaatgatatgaaaaagctttggaagcttgtgtgaagaataaaaggcgatgtgactataagtccacgcatggcatcggtctatataaacctgatgcgaacttgtctcgtcattgtcaaattgtgtctgtgtaataatacacttttatgtgtggtttgggtttctttgttggtttgctgttgtatgttacctcggagacgaggctgtttttattaataaaatctatggcatgtg

SEQ ID NO: 105889 - protein, 304 aa, Arabidopsis thaliana; identical to SEQ ID NO: 23583
  peptide (1)..(304): Ceres Seq. ID no. 13618271

SEQ ID NO: 105890 - protein, 293 aa, Arabidopsis thaliana; identical to SEQ ID NO: 23584
  peptide (1)..(293): Ceres Seq. ID no. 13618272

SEQ ID NO: 105891 - protein, 291 aa, Arabidopsis thaliana; identical to SEQ ID NO: 23585
  peptide (1)..(291): Ceres Seq. ID no. 13618273

SEQ ID NO: 105892 - DNA, 634 bp, Arabidopsis thaliana
  misc_feature (1)..(634): Ceres Seq. ID no. 13618282
  misc_feature (1)..(634): Ortholog of  Ceres SEQ ID NO 12584812 as cited in SEQ ID NO 62672
gaaccctaaaaaccccaggtgagaagaacggagagagagagagagatgtcgttcatgtatgagaagagcaatacatggagatggctagtgatgaagacgcgagattcgagatccttcttcttcacgttcgctgctttatgtggtgtcattcctggcgttattggctatggagttatgcaggtcaccaattccagtaaccctgagctcgaagcccgcctccgtaaatctgctcgcccagatactctcatgatgggtaaagtaaaccaagagaggctagctgaatatcttggtgagttgaaacagaagcaggatacaaacgacagatacgttgctgctcttaggggagagactcttaccaggaagccttatcaaagaatccaaccaatgccaaagccagatgacacggtgacaaccaaaactcagtaaggatgaattattttaagagtcaatgttagtgaatgcctctcactcgaatcttttgtcgatacaaaaatggcgtgtttcctggccgtaatatcttttgtttttgaaaccggcatctagcgacacaacttttgtgctatgcaaacggctacaatgtcaatcacttcaaaccttttgttatgatgaataaaatgtaaaacttatgttttgt

SEQ ID NO: 105893 - protein, 126 aa, Arabidopsis thaliana; identical to SEQ ID NO: 43068
  peptide (1)..(126): Ceres Seq. ID no. 13618283

SEQ ID NO: 105894 - protein, 123 aa, Arabidopsis thaliana; identical to SEQ ID NO: 43069
  peptide (1)..(123): Ceres Seq. ID no. 13618284

SEQ ID NO: 105895 - protein, 111 aa, Arabidopsis thaliana; identical to SEQ ID NO: 43070
  peptide (1)..(111): Ceres Seq. ID no. 13618285

SEQ ID NO: 105896 - DNA, 1883 bp, Arabidopsis thaliana
  misc_feature (1)..(1883): Ceres Seq. ID no. 13618286
  misc_feature (1)..(1883): Ortholog of  Ceres SEQ ID NO 15170811 as cited in SEQ ID NO 52649
  misc_feature (1)..(1883): Ortholog of  Ceres SEQ ID NO 13638331 as cited in SEQ ID NO 58047
  misc_feature (1)..(1883): Ortholog of  Ceres SEQ ID NO 15225845 as cited in SEQ ID NO 65125
  misc_feature (1)..(1883): Ortholog of  Ceres SEQ ID NO 15170135 as cited in SEQ ID NO 67647
acagcttctgatctcactagtgttcgtcatctttgttcgattgaagtttgggaagtggtgatggtaataggagcagcagcgcgtgtagccatcggcggttgtcgaaagctcatctcgtcacatacctccctcctcctcgtctcttctcagtgtcgccagatgagtatggacgcacaaagcgtttctgaaaagcttaggagttctggtctattacgaactcaaggtctaattggaggcaagtggcttgactcgtatgacaataagacaatcaaggttaacaatccagcaaccggtgaaattatagctgatgttgcatgtatgggaacaaaagagacaaatgatgctattgcttcttcttatgaagcatttacttcttggagcagattgactgctggagagaggagtaaagttttacggagatggtatgacctcctgattgcacacaaggaagaacttggacaacttataactttggagcaaggaaaaccactcaaggaagccatcggagaggtagcatatggggcaagttttattgagtactatgcggaggaggcaaaacgtgtatatggtgatataattcctccgaatctgtctgatcgccgactgttggttctaaaacagcctgtcggtgttgttggtgcaattaccccttggaacttccccttagccatgattactcggaaggtcggccctgctcttgcttctggatgcacggtggttgttaaaccatctgaacttacgcccctaacagcacttgctgcggctgaacttgcacttcaagctggagttcctccgggggcacttaatgtggtcatgggaaatgctcctgaaattggggatgctttgcttacgagtccacaggtgagaaaaatcacgttcacgggatcaacagcagttgggaagaagttgatggcagctgctgcacctaccgtcaagaaggtttctctagaacttggcggcaacgcaccctctatagtatttgatgatgcagacctggatgtagctgtaaaaggaacgcttgcagcgaaatttaggaatagtggtcagacatgtgtttgtgcgaacagagtacttgtgcaagatggtatctatgataaatttgctgaggccttttctgaagcggttcaaaaattagaagtaggagatgggtttagggatgggacaacccagggtccacttataaatgatgcagcagtgcaaaaggtagagacatttgtacaagatgctgtttctaagggagcaaaaatcatcattggtggcaaaaggcacagtctagggatgactttctatgagcctactgttatccgcgatgtttcggataacatgatcatgtctaaggaggagatttttggacctgtagctccccttattcggttcaaaaccgaggaggacgctatcagaattgctaatgacacaattgcaggacttgctgcttatatattcacaaacagtgtccaaagatcttggcgtgtatttgaagcacttgaatatggacttgtaggggtgaacgaaggactcatatcaacagaggtggctccattcgggggagtgaagcagtctggtcttggaagggaaggatccaagtatggtatggacgaataccttgagatcaaatacgtatgcttgggagatatgaatagacactgatttggtttgtttgaaaagctttagaaattgtaagtttttctcctccactcgtatccttctaataaaagcttactgtggaacataataaggattcggaggatacttcttaagaaataaagatttggtctacgaccaattgttagcatgatttttaagtaataatttggggtttccattttatttatctttgtttacgttatttttttctttgttttacgttaatttttgtaattcgg

SEQ ID NO: 105897 - protein, 548 aa, Arabidopsis thaliana
  peptide (1)..(548): Ceres Seq. ID no. 13618287
TASDLTSVRHLCSIEVWEVVMVIGAAARVAIGGCRKLISSHTSLLLVSSQCRQMSMDAQSVSEKLRSSGLLRTQGLIGGKWLDSYDNKTIKVNNPATGEIIADVACMGTKETNDAIASSYEAFTSWSRLTAGERSKVLRRWYDLLIAHKEELGQLITLEQGKPLKEAIGEVAYGASFIEYYAEEAKRVYGDIIPPNLSDRRLLVLKQPVGVVGAITPWNFPLAMITRKVGPALASGCTVVVKPSELTPLTALAAAELALQAGVPPGALNVVMGNAPEIGDALLTSPQVRKITFTGSTAVGKKLMAAAAPTVKKVSLELGGNAPSIVFDDADLDVAVKGTLAAKFRNSGQTCVCANRVLVQDGIYDKFAEAFSEAVQKLEVGDGFRDGTTQGPLINDAAVQKVETFVQDAVSKGAKIIIGGKRHSLGMTFYEPTVIRDVSDNMIMSKEEIFGPVAPLIRFKTEEDAIRIANDTIAGLAAYIFTNSVQRSWRVFEALEYGLVGVNEGLISTEVAPFGGVKQSGLGREGSKYGMDEYLEIKYVCLGDMNRH

SEQ ID NO: 105898 - protein, 528 aa, Arabidopsis thaliana; identical to SEQ ID NO: 40529
  peptide (1)..(528): Ceres Seq. ID no. 13618288

SEQ ID NO: 105899 - protein, 495 aa, Arabidopsis thaliana; identical to SEQ ID NO: 40530
  peptide (1)..(495): Ceres Seq. ID no. 13618289

SEQ ID NO: 105900 - DNA, 1540 bp, Arabidopsis thaliana
  misc_feature (1)..(1540): Ceres Seq. ID no. 13618290
  misc_feature (1)..(1540): Ortholog of  Ceres SEQ ID NO 14303770 as cited in SEQ ID NO 53890
agattccgattgttttcttcgattaagttttgagctagattctctagatctgtttcaccgatttggttgatttctccgtcaatctgaactcgcggtgtgcatcttgttgtttgcagtgtttttagtttgttttacgaagaatcaactatggcgacgaagagaagcgttggaactttgaaggaagcggatctgaagggaaagagtgtgttcgtgagggttgatctcaacgttcctttggatgataactctaacatcaccgatgacaccaggattcgtgccgctgttcccaccatcaagtacttgatgggtaatggatctagggttgttctctgcagtcacttgggccgcccaaaaggtgttactcctaagtacagcttaaagcctcttgtgcccagattgtctgaacttcttggtgttgaggttgtaatggcaaatgactctattggtgaggaagtccagaagttggttgcaggactacctgaaggtggtgttttgctcttggagaatgtgaggttctacgccgaggaagagaagaatgatcctgaatttgcaaagaagcttgctgctcttgccgatgtttacgttaatgatgccttcggaactgctcacagagctcatgcttccactgagggagttgccaaattcttgaagccttcagttgctggtttcctcatgcagaaggaacttgattaccttgtcggagctgtggcaaaccccaagaagccttttgctgccattgttggaggctcaaaggtttcaacaaagattggtgtcattgagtctctcttgaacacagttgacatcctcctgctcggtggaggtatgatttttactttctacaaggcacaaggactctcagtcggatcttcccttgtggaggaggacaagcttgacttggcaaagtcactcatggagaaagcaaaggccaaaggtgtctctctcttgctcccaaccgatgtggttattgctgacaagtttgctcccgatgctaacagcaagatagtgccagccactgccatccctgatggctggatgggtctagatattggtccagactccatcaagacattcagcgaagctctggacacaaccaaaaccatcatctggaatggtcccatgggtgtgtttgaattcgataagtttgctgctggaactgaggccgtagcaaagcagcttgcagaactaagcggaaagggagtaaccacaatcattggaggaggtgactctgttgctgccgtcgagaaggttggtttggcagacaagatgagccacatctctaccggaggcggtgctagtttggagcttcttgagggtaagccacttccaggagtcctcgctctcgacgaagcttgaaaatcctcacgttggatttcatcgctattttgtgttgttatatgtataacaagtcgtctggttatcttgtgaccagacgagcaagccattatttatcagcttgagattttcgtctacggctctctttttatgagttttttagtttggagcctttttttaataataagagatgaaactctgattgacg

SEQ ID NO: 105901 - protein, 401 aa, Arabidopsis thaliana; identical to SEQ ID NO: 24557
  peptide (1)..(401): Ceres Seq. ID no. 13618291

SEQ ID NO: 105902 - protein, 349 aa, Arabidopsis thaliana; identical to SEQ ID NO: 24558
  peptide (1)..(349): Ceres Seq. ID no. 13618292

SEQ ID NO: 105903 - protein, 308 aa, Arabidopsis thaliana; identical to SEQ ID NO: 40269
  peptide (1)..(308): Ceres Seq. ID no. 13618293

SEQ ID NO: 105904 - DNA, 1135 bp, Arabidopsis thaliana
  misc_feature (1)..(1135): Ceres Seq. ID no. 13618294
  misc_feature (1)..(1135): Ortholog of  Ceres SEQ ID NO 14309591 as cited in SEQ ID NO 52617
  misc_feature (1)..(1135): Ortholog of  Ceres SEQ ID NO 13597418 as cited in SEQ ID NO 63764
tcattcttcaaataaattaaaatcttcgttggcgttgttgttggttgcgttacagattttggactaatcattattttcgtgcctgcaaagtcagcacgacgatcgcgtttcgatcttcaaagtagaagaagacccgccacaatcacaaatcgcggtgcatatagtctaaagggtcaatggcctcttcttcggatccatggatgagagagtacaatgaggctttgaaactctctgaggatattaatggcatgatgtctgaaaggaatgcctccgggttaaccgggcctgatgctcaacgtcgtgcctctgcaattcgaagaaagatcaccattttggggactcgattagacagtctgcaatcccttcttgtcaaggttcctggcaagcagcatgtttcggagaaagagatgaatcgtcgcaaggatatggttgggaatttgagatcaaaaacaaatcaggtggcctctgctttgaatatgtcaaactttgcaaacagagacagcttgtttggaacagatttaaagccggatgatgcgataaatagagtctctggcatggacaaccaaggaattgttgtatttcaacggcaagttatgagagaacaagacgagggacttgagaagttggaggaaacagtcatgagtaccaaacacattgctctcgctgttaacgaggagctcaccctgcagacaaggcttattgatgacttagattacgatgtggatatcactgactctcgcttacggcgtgttcaaaagagccttgccttgatgaacaagagcatgaaaagtggttgctcatgcatgtctatgctcttgtctgtgcttggaatcgttggtcttgctcttgtaatttggctgctggttaagtacctgtaatgccaatgtggtggcaacttgtgaaagctcatccttttctctcagcctatcctctgtgcttaatggttgttttctattccttctatcgattgattcgtgtctgtgaggcaaagaagaataccactgcgtgtaagaaaccctcagaagtacataatctgtattaccttcgtatcaaccacgaattgtaaactaagttgacatttgtctatatatggtatggctcctacttggttcaataaagagaactagtggcttgg

SEQ ID NO: 105905 - protein, 233 aa, Arabidopsis thaliana; identical to SEQ ID NO: 35486
  peptide (1)..(233): Ceres Seq. ID no. 13618295

SEQ ID NO: 105906 - protein, 225 aa, Arabidopsis thaliana; identical to SEQ ID NO: 35487
  peptide (1)..(225): Ceres Seq. ID no. 13618296

SEQ ID NO: 105907 - protein, 209 aa, Arabidopsis thaliana; identical to SEQ ID NO: 35488
  peptide (1)..(209): Ceres Seq. ID no. 13618297

SEQ ID NO: 105908 - DNA, 3145 bp, Arabidopsis thaliana
  misc_feature (1)..(3145): Ceres Seq. ID no. 13618312
  misc_feature (1)..(3145): Ortholog of  Ceres SEQ ID NO 14306557 as cited in SEQ ID NO 53442
gcactggaagtgggatcaccaccactgcgcttcttcttcttcgtcatctctgatcccccctgcgatcaggggccatttccgtcgataatccgatctccggttcagacattcgtttggacttgcaaagatgccactgagactcgaaatcaagcgtaagtttgctcaaagatcagaaagagtcaaatctgtagatctccatccaacagagccatggatcctggcaagtttgtattccggaactctgtgcatctggaattaccagacccagacaatggtaaaatctttcgacgtgactgaattgcctgttcggtcagcaaagttcattgcacggaagcagtgggttgtagctggagctgatgacatgtttattcgtgtctacaactacaacactatggataagatcaaagtatttgaggctcatgctgattacattcgctgtgttgctgttcatcccacgcttccctatgtcttatcatcatctgatgatatgctcatcaagctctgggactgggaaaagggttggctttgcactcaaattttcgaaggccattcccattatgttatgcaagtcactttcaaccccaaagacaccaatacttttgctagtgcatcccttgaccgtaccataaaaatatggaatcttggctctccggatccaaattttactttggatgcacatctcaaaggggtaaactgtgtagactactttactggtggggataaaccatacctaatcactggttctgatgatcatactgctaaggtgtgggattaccaaacaaagagttgcgttcagactctcgaaggtcatacacacaatgtttctgcagtatcttttcatccagagctacctataattattacaggatccgaggatggaactgttcgcatatggcacgccaccacttacaggcttgagaatacattgaactatggccttgagagggtttgggctattggacacattaaaggttcacgccgggttgtaattggttatgacgaaggatccataatggtgaaacttggccgtgaaataccagtggctagtatggataacagcggaaaaattatttgggctaaacacaatgagatacatactgtaaacatcaagagtgtgggcgcagatgaggtcactgatggtgagagacttcctttggccgttaaagagctagggacctgcgatctttatcctcaaagcttgaagcacaaccctaatggtaggtttgtggtagtttgtggagatggtgagtatattatctacactgccttggcgtggcgaaataggtcatttggctctgcgctagaatttgtttggtcatctgatggggagcatgctgtcagggaaagctcgacaaagatcaagatcttcagcaagaatttccaggaaaagaagactgtgagacccaccttctcagcagagcacatttttggtgggacgttattgacaatgtgctcaagtgattttatatgcttctatgattgggcggaatgtaggttgattaggcgaatagatgttactgtcaaaaatctttattgggcggacagtggtgatctagttgcaattgccagtgatacatcattctacatccttaagttcaatcgtgacattgtttcctcttattttgatggcggtaaacaaattgatgaggaaggcattgaggacgcatttgagcttctcaatgaaaccaatgaacgtgttcggactggcttatgggttggggattgttttatctataccaactcttcttggaggcttaattactgtgttggtggtgaggtaactacaatgtatcatctggaccgtcctatgtacttgttgggttatctcgctaatcaaagcagggtttatttgattgacaaagagttcaatgttattggatacactttacttttaagtttgattgagtacaagactcttgtgatgcgtggagatttggaacaggctaatgaagtcttaccttcaattcctaaggagcaccataatagcgtggcacactttttggagtcacgtggcatgacagaagatgctctagaagtagcaactgatcctgactacagatttgagttggccatacagctcggtagattggctgtcgcaaaggacattgctgtagaggcacaaaatgaatctaaatggaagcaacttggagaattagctatgtcaagtgggaagctggatatggctgaggaatgcatgaggcatgctatggatttgagtggtctgctgctgctttattcttcattgggagatgcagatggaatgatgaagctggcagcacttgcaaaagagcaaggaaagaacaatgtcgcttttctttgcttgttcatgttgggtcaagtagaagactgcctgcatctgttggtggaaagtaatcgaatacctgaagccgctctgatggcgagatcgtaccttccaagcaaggtctccgaaatagtggcattgtggagaaacgatttgaccaagataagtccaaaggctgctgaatctctggctgatcccgaagagtatcccaatctctttgaggagtggcaagtcgccctgtcccttgaaaatagagctgcagagacgaggggcgtccatcctcctgctggggattattgtagtcatgcagacagagatcatacaactttagtggatgcttttagaattatgcaaatagaggaagagggtcgacttgagcaaggggatgttctcgacgaggttggggaagagggggaagatggagaggaagaggaggaggaggatcgtcaggaagagagtagtgatgggagacagcagaatgtggaagaagaggctgttgtggtggacgctgactctacggatggtgctgtgctagttaatggtaacgagtctgaagaacagtgggttctaacaccgccacaagagtagggttggtgaagagtgaagacatacacagatagatattttcttggctttgaaacttgatacattcagcagagaaatgaggcagcacagagagagattagtttccattgttaaaaaactgatctattgatagcttccgctttgtgcttttaatacagatacatattaaaaaaaaagggggttttgggactcttatgtagctttaacttatgagagatttcacctgtagaatatctgttttgaactgagatttcaccc

SEQ ID NO: 105909 - protein, 920 aa, Arabidopsis thaliana
  peptide (1)..(920): Ceres Seq. ID no. 13618313
MPLRLEIKRKFAQRSERVKSVDLHPTEPWILASLYSGTLCIWNYQTQTMVKSFDVTELPVRSAKFIARKQWVVAGADDMFIRVYNYNTMDKIKVFEAHADYIRCVAVHPTLPYVLSSSDDMLIKLWDWEKGWLCTQIFEGHSHYVMQVTFNPKDTNTFASASLDRTIKIWNLGSPDPNFTLDAHLKGVNCVDYFTGGDKPYLITGSDDHTAKVWDYQTKSCVQTLEGHTHNVSAVSFHPELPIIITGSEDGTVRIWHATTYRLENTLNYGLERVWAIGHIKGSRRVVIGYDEGSIMVKLGREIPVASMDNSGKIIWAKHNEIHTVNIKSVGADEVTDGERLPLAVKELGTCDLYPQSLKHNPNGRFVVVCGDGEYIIYTALAWRNRSFGSALEFVWSSDGEHAVRESSTKIKIFSKNFQEKKTVRPTFSAEHIFGGTLLTMCSSDFICFYDWAECRLIRRIDVTVKNLYWADSGDLVAIASDTSFYILKFNRDIVSSYFDGGKQIDEEGIEDAFELLNETNERVRTGLWVGDCFIYTNSSWRLNYCVGGEVTTMYHLDRPMYLLGYLANQSRVYLIDKEFNVIGYTLLLSLIEYKTLVMRGDLEQANEVLPSIPKEHHNSVAHFLESRGMTEDALEVATDPDYRFELAIQLGRLAVAKDIAVEAQNESKWKQLGELAMSSGKLDMAEECMRHAMDLSGLLLLYSSLGDADGMMKLAALAKEQGKNNVAFLCLFMLGQVEDCLHLLVESNRIPEAALMARSYLPSKVSEIVALWRNDLTKISPKAAESLADPEEYPNLFEEWQVALSLENRAAETRGVHPPAGDYCSHADRDHTTLVDAFRIMQIEEEGRLEQGDVLDEVGEEGEDGEEEEEEDRQEESSDGRQQNVEEEAVVVDADSTDGAVLVNGNESEEQWVLTPPQE

SEQ ID NO: 105910 - protein, 872 aa, Arabidopsis thaliana
  peptide (1)..(872): Ceres Seq. ID no. 13618314
MVKSFDVTELPVRSAKFIARKQWVVAGADDMFIRVYNYNTMDKIKVFEAHADYIRCVAVHPTLPYVLSSSDDMLIKLWDWEKGWLCTQIFEGHSHYVMQVTFNPKDTNTFASASLDRTIKIWNLGSPDPNFTLDAHLKGVNCVDYFTGGDKPYLITGSDDHTAKVWDYQTKSCVQTLEGHTHNVSAVSFHPELPIIITGSEDGTVRIWHATTYRLENTLNYGLERVWAIGHIKGSRRVVIGYDEGSIMVKLGREIPVASMDNSGKIIWAKHNEIHTVNIKSVGADEVTDGERLPLAVKELGTCDLYPQSLKHNPNGRFVVVCGDGEYIIYTALAWRNRSFGSALEFVWSSDGEHAVRESSTKIKIFSKNFQEKKTVRPTFSAEHIFGGTLLTMCSSDFICFYDWAECRLIRRIDVTVKNLYWADSGDLVAIASDTSFYILKFNRDIVSSYFDGGKQIDEEGIEDAFELLNETNERVRTGLWVGDCFIYTNSSWRLNYCVGGEVTTMYHLDRPMYLLGYLANQSRVYLIDKEFNVIGYTLLLSLIEYKTLVMRGDLEQANEVLPSIPKEHHNSVAHFLESRGMTEDALEVATDPDYRFELAIQLGRLAVAKDIAVEAQNESKWKQLGELAMSSGKLDMAEECMRHAMDLSGLLLLYSSLGDADGMMKLAALAKEQGKNNVAFLCLFMLGQVEDCLHLLVESNRIPEAALMARSYLPSKVSEIVALWRNDLTKISPKAAESLADPEEYPNLFEEWQVALSLENRAAETRGVHPPAGDYCSHADRDHTTLVDAFRIMQIEEEGRLEQGDVLDEVGEEGEDGEEEEEEDRQEESSDGRQQNVEEEAVVVDADSTDGAVLVNGNESEEQWVLTPPQE

SEQ ID NO: 105911 - protein, 842 aa, Arabidopsis thaliana
  peptide (1)..(842): Ceres Seq. ID no. 13618315
MFIRVYNYNTMDKIKVFEAHADYIRCVAVHPTLPYVLSSSDDMLIKLWDWEKGWLCTQIFEGHSHYVMQVTFNPKDTNTFASASLDRTIKIWNLGSPDPNFTLDAHLKGVNCVDYFTGGDKPYLITGSDDHTAKVWDYQTKSCVQTLEGHTHNVSAVSFHPELPIIITGSEDGTVRIWHATTYRLENTLNYGLERVWAIGHIKGSRRVVIGYDEGSIMVKLGREIPVASMDNSGKIIWAKHNEIHTVNIKSVGADEVTDGERLPLAVKELGTCDLYPQSLKHNPNGRFVVVCGDGEYIIYTALAWRNRSFGSALEFVWSSDGEHAVRESSTKIKIFSKNFQEKKTVRPTFSAEHIFGGTLLTMCSSDFICFYDWAECRLIRRIDVTVKNLYWADSGDLVAIASDTSFYILKFNRDIVSSYFDGGKQIDEEGIEDAFELLNETNERVRTGLWVGDCFIYTNSSWRLNYCVGGEVTTMYHLDRPMYLLGYLANQSRVYLIDKEFNVIGYTLLLSLIEYKTLVMRGDLEQANEVLPSIPKEHHNSVAHFLESRGMTEDALEVATDPDYRFELAIQLGRLAVAKDIAVEAQNESKWKQLGELAMSSGKLDMAEECMRHAMDLSGLLLLYSSLGDADGMMKLAALAKEQGKNNVAFLCLFMLGQVEDCLHLLVESNRIPEAALMARSYLPSKVSEIVALWRNDLTKISPKAAESLADPEEYPNLFEEWQVALSLENRAAETRGVHPPAGDYCSHADRDHTTLVDAFRIMQIEEEGRLEQGDVLDEVGEEGEDGEEEEEEDRQEESSDGRQQNVEEEAVVVDADSTDGAVLVNGNESEEQWVLTPPQE

SEQ ID NO: 105912 - DNA, 1166 bp, Arabidopsis thaliana
  misc_feature (1)..(1166): Ceres Seq. ID no. 13618316
  misc_feature (1)..(1166): Ortholog of  Ceres SEQ ID NO 14315013 as cited in SEQ ID NO 57760
  misc_feature (1)..(1166): Ortholog of  Ceres SEQ ID NO 13598248 as cited in SEQ ID NO 64224
ggcctttaagataaagaaaaggaaacccaatcgaaaacctaaaacccgattagattttcttagatacgaaacctctcttacgacgctccttcctcaatctctctcgatcgtcggagattctttcttcaagagtcatcttcttcttcttctccttctccctaaaccctaatttatcgcgtttggatcgaatcagctgtcaattcttgttttggttttcacggccagggccatgtctgccgtatattgcggaaccaagagatcttacttcgacgataattcttctccgccctcttctaagaggttccgatgtttttcgccttccaattctccaatctggtcctctcctccttcctcatcgctcgatcagcttcactctgcgtttcctcatattgaactcacggttctcgtcaaggcactagaagataatggaagtgattttaatgctgctatgaagagcttatactctttcgcatcttctgaggagaagaaagctgaagaattggccgcaggaggtgctgctactcaggaaactgatgccgtttgtggtggaaaccccccgaccagtggtgatgactgggttgaattgttagtcagggaagtgttacaatcgtctggtacagatgatgcaaaagtacgtgcagcaagagtccttgaggccttagagaagatgttaagtgcacgtgctcgtgaagaagctggaaacaaattccaagaggagaaagtggcagtgcagcaacaggtggagaccttggtgaaggacaacacagtcctcaaacgtgctgttgctatccagcatgagcggcagaaggcattggaggatgcgaaccatcagctaggacttttgaagcaactggttcctcagtatcaggaaaagcttagaaatctggaggtgaacaattacgcgttgagaatgcagctgcagcaagtggaacatggcaactcaatgccagcaagattcaatccggacgtcttctaaagctctccaagaagacaaggacacttgcagaggaggagaaggcaataaacgaaagtagagggagagagagagagagagcgatatcaaactacaaaacaaaagtgcttttgcattgtaatactgtgtagtcaggacaaacaaacattctgtttcctttccttttttttttatatatttctttggtttgctg

SEQ ID NO: 105913 - protein, 248 aa, Arabidopsis thaliana; identical to SEQ ID NO: 23147
  peptide (1)..(248): Ceres Seq. ID no. 13618317

SEQ ID NO: 105914 - protein, 175 aa, Arabidopsis thaliana; identical to SEQ ID NO: 23148
  peptide (1)..(175): Ceres Seq. ID no. 13618318

SEQ ID NO: 105915 - DNA, 802 bp, Arabidopsis thaliana
  misc_feature (1)..(802): Ceres Seq. ID no. 13618319
  misc_feature (1)..(802): Ortholog of  Ceres SEQ ID NO 13595495 as cited in SEQ ID NO 56624
  misc_feature (1)..(802): Ortholog of  Ceres SEQ ID NO 12608406 as cited in SEQ ID NO 58017
  misc_feature (1)..(802): Ortholog of  Ceres SEQ ID NO 13599397 as cited in SEQ ID NO 0
attcattatataggcgtatatttcggaattctaagttttgttgctacgatcgagccagcgttctgtttctgtacgtctctctgggtaagaaagaaaaaatgaaggacgaaacgggaaaccctctgcatatcaagtctttgaatcacatctctcttctctgtcgatccgtcgaggaatccattagcttttaccaaaacgttttagggttcctccctattcgcagacctgactcttttgatttcgatggcgcgtggttgtttggacatggaattgggattcatcttcttcaatctcctgaacctgagaaattactcaagaaaacagagattaatcccaaggataatcacatttctttccagtgcgaaagcatggaagcagtggagaagaagctcaaggagatggagatagagtatgtgagagcagtggttgaagaaggtggcatccaagtggaccaactcttcttccacgaccctgatgccttcatgatcgagatatgcaactgcgatagcctccccgttatccctctcgctggagaaatggctcgttcatgctctcgacttaatatccgccagctcgttcagccaactcagatccacccctagttctctctgtcttccctaatttctgttttcgtaaataatttcaagtgtccatgtgattgtctctttgattgcgtgtgaatataattgcatgtaataaacagctagtggtaagttgatgtgattcctcaaccgggaaaatgaccatttgcttcacactctagtctctctctaccattatttgagataccaaactctctctc

SEQ ID NO: 105916 - protein, 199 aa, Arabidopsis thaliana
  peptide (1)..(199): Ceres Seq. ID no. 13618320
SLYRRIFRNSKFCCYDRASVLFLYVSLGKKEKMKDETGNPLHIKSLNHISLLCRSVEESISFYQNVLGFLPIRRPDSFDFDGAWLFGHGIGIHLLQSPEPEKLLKKTEINPKDNHISFQCESMEAVEKKLKEMEIEYVRAVVEEGGIQVDQLFFHDPDAFMIEICNCDSLPVIPLAGEMARSCSRLNIRQLVQPTQIHP

SEQ ID NO: 105917 - protein, 167 aa, Arabidopsis thaliana; identical to SEQ ID NO: 35082
  peptide (1)..(167): Ceres Seq. ID no. 13618321

SEQ ID NO: 105918 - DNA, 1280 bp, Arabidopsis thaliana
  misc_feature (1)..(1280): Ceres Seq. ID no. 13618330
  misc_feature (1)..(1280): Ortholog of  Ceres SEQ ID NO 15174863 as cited in SEQ ID NO 51281
  misc_feature (1)..(1280): Ortholog of  Ceres SEQ ID NO 12614972 as cited in SEQ ID NO 61986
  misc_feature (1)..(1280): Ortholog of  Ceres SEQ ID NO 14302317 as cited in SEQ ID NO 63244
  misc_feature (1)..(1280): Ortholog of  Ceres SEQ ID NO 12625706 as cited in SEQ ID NO 64144
  misc_feature (1)..(1280): Ortholog of  Ceres SEQ ID NO 13584933 as cited in SEQ ID NO 65009
  misc_feature (1)..(1280): Ortholog of  Ceres SEQ ID NO 12634984 as cited in SEQ ID NO 0
  misc_feature (1)..(1280): Ortholog of  Ceres SEQ ID NO 13599377 as cited in SEQ ID NO 0
aaagccaatctgatctttgtccaaacacagaccatcatcactcatttcctacagaactcagcacaattctttcaaattctctttctaatcttcaatggaatcagaaaccctaaccgccaaggctacgatcacgaccacgaccctaccgagtcacgacgagaccaagacagaatcaacagagttcgagaaaaatcaaaaacggtatcaagacctcatctccacgtttcctcacgagaaaggctggagaccgaaagagcccctgatcgagtatggtggttactggtggctaccgtctctcctcgaaggttgtattcacgcgcaagagttctttcaagcacgacccagtgacttcctcgtctgtagctacccaaagacaggcaccacttggctcaaagccctgactttcgccatcgcaaatcgttcccgcttcgatgattcctccaaccctctcctgaaacgtaaccctcacgagtttgttccttacattgagatagatttccctttcttccctgaagttgatgttctcaaagacaaagggaacactctgttttcgactcatatcccatacgagttattacctgattcggttgtgaaatccggttgtaagatggtttacatatggagagaaccaaaggacactttcatctccatgtggactttccttcacaaggaaaggacagagcttggacctgtcagcaatcttgaggagtcttttgatatgttctgtcgtggtctgtctgggtatggtccttatcttaatcatatcctggcgtattggaaagcataccaagagaatccagataggatcttgttcctcaagtacgagacgatgagagctgatcctttaccgtacgtgaagagtctggctgagtttatgggtcatggattcacagccgaggaagaggagaaaggtgttgttgagaaagtggtgaatctttgcagcttcgagacgttgaagaatcttgaagctaacaaaggggagaaagacagagaggatcgtcctggtgtttacgcgaatagcgcgtatttcaggaaaggaaaggtgggagattggtcgaactatctgactccggagatggctgctcgtatagatgggttaatggaagagaaatttaagggcaccggcttgcttgaacatggtaaatgaatgactaactcttgttccgagcaatgactgatctttatatgctttgtttacaacataagtttgcttcttatgttagtatggctccaaaatgtattaagttatatagtggaagaataaatgttgcttgtgtttc

SEQ ID NO: 105919 - protein, 350 aa, Arabidopsis thaliana; identical to SEQ ID NO: 25619
  peptide (1)..(350): Ceres Seq. ID no. 13618331

SEQ ID NO: 105920 - protein, 179 aa, Arabidopsis thaliana; identical to SEQ ID NO: 25620
  peptide (1)..(179): Ceres Seq. ID no. 13618332

SEQ ID NO: 105921 - DNA, 1346 bp, Arabidopsis thaliana
  misc_feature (1)..(1346): Ceres Seq. ID no. 13618333
  misc_feature (1)..(1346): Ortholog of  Ceres SEQ ID NO 15174863 as cited in SEQ ID NO 51281
  misc_feature (1)..(1346): Ortholog of  Ceres SEQ ID NO 12614972 as cited in SEQ ID NO 61986
  misc_feature (1)..(1346): Ortholog of  Ceres SEQ ID NO 14302317 as cited in SEQ ID NO 63244
  misc_feature (1)..(1346): Ortholog of  Ceres SEQ ID NO 12625706 as cited in SEQ ID NO 64144
  misc_feature (1)..(1346): Ortholog of  Ceres SEQ ID NO 13584933 as cited in SEQ ID NO 65009
  misc_feature (1)..(1346): Ortholog of  Ceres SEQ ID NO 12634984 as cited in SEQ ID NO 0
  misc_feature (1)..(1346): Ortholog of  Ceres SEQ ID NO 13599377 as cited in SEQ ID NO 0
aataattttacattggtttgttcaactgatgcgacccttatcgagccatcatcatcacctacctaaatctttcttcctattataaaacccattttctcatctctcaagaatctcaatcccatcttccacaactctaacaaaccttcccgattcatcctctttgactcccttcactcgatctcatccgcaatggaatcaaagacaacccaaaacggatccgaagtcgtcgaactcacagagttcgagaaaacccagaagaagtatcaagatttcatcgctacacttccaaagagcaaaggctggagaccagatgagatcttaacccaatacggtggacactggtggcaagaatgtctcctcgaaggtctttttcacgctaaagaccatttcgaagcacgaccaactgatttcctcgtctgtagctacccaaaaaccggtacaacttggctcaaagcactaacttacgcaatcgtcaatcgttctcgttacgacgacgccgcaaacccactcctcaaacgaaaccctcacgagtttgtcccttacgttgagatcgacttcgcgttttaccccaccgttgatgttcttcaagacagaaagaacccacttttctctactcatatcccaaacgggttattacccgattcgattgtgaactctggttgtaagatggtgtacatatggagagacccgaaagatactttcatctccatgtggactttcttacacaaggagaagtctcaagaaggtcaattagcgagtcttgaggacagctttgatatgttttgtaaaggtttatctgtgtatggtccttatctggatcatgttttgggttattggaaagcttaccaagagaatccagataggattttgttccttaggtacgagaccatgagggccaatcctttgccttttgtgaagagattggctgagttcatgggttatggattcactgatgaggaagaggagaatggtgttgctgagaaagtggtgaagctttgtagctttgagacgttgaagaatcttgaagctaacaaaggtgataaagaaagagaggatcgtcctgctgtttatgcgaatagcgcgtattttaggaaaggaaaggttggagattgggctaattatttgactcctgagatggctgctcgtattgatggcttagtggaggagaaattcaaagatactggcttgcttcaacatgataactgaatgtgttttattctggtccttctgttatttggtgcggcgaaacagaggatgctctgttttgctttgtttggttctgtattctcattattgtctgtatcatcttatttacaacaagagaaagatatttcgatttatgatcc

SEQ ID NO: 105922 - protein, 338 aa, Arabidopsis thaliana; identical to SEQ ID NO: 23272
  peptide (1)..(338): Ceres Seq. ID no. 13618334

SEQ ID NO: 105923 - protein, 179 aa, Arabidopsis thaliana; identical to SEQ ID NO: 23273
  peptide (1)..(179): Ceres Seq. ID no. 13618335

SEQ ID NO: 105924 - DNA, 1352 bp, Arabidopsis thaliana
  misc_feature (1)..(1352): Ceres Seq. ID no. 13618340
  misc_feature (1)..(1352): Ortholog of  Ceres SEQ ID NO 15225493 as cited in SEQ ID NO 65438
  misc_feature (1)..(1352): Ortholog of  Ceres SEQ ID NO 14313344 as cited in SEQ ID NO 69148
ggacaagaactgatagagtgggataagagacaaataaggagaatcaaacaagcaatccgatcgatctaccagatcgccatgattcttacaagatgcttacccttgatatggctatctctacttactgtgtgtgctgctgggaggacattgcaccctctccctgttaaaggacccaaaactgtcaagcttcaacttcagacttcacgtccttataacatcgcacacagaggttccaatggagagatcccagaagaaactacagctgcatacttgaaagcaattgaagaaggcacagacttcatagaaacagatatcttatcatccaaagatggtgtgctcatatgtttccatgattgtattctcgacgaaacaaccaatgttgcgagccacaaggagtttgcagatcgtaaaaggacatatgatgtccaaggattcaacattactggctttttcacttttgattttacacttaaagaactaaagcaactacgtataaagcagcgatatgcttttcgggatcagcaatacaacggaatgtaccctatcattacatttgaggaatttcttaccattgctcgggatgctccaagagttgttggaatatatcctgagattaaaaatccagttttaatgaaccagcatgtcaaatggcctggtggtaagaaatttgaggataaagttgtggagacacttaagaagtatgggtatggaggctcgtatttgtccaagaagtggttgaaaaaaccactatttattcagtcatttgccccaacttcactcgtgtacatatcaaacttgacagactcgccgaaagtccttctaatagacgatgttaccatgccaacgcaagacactaaccagacatatgcagagatcacatcagatgcgtatttcgaatacatcaagcaatatgttgtgggtatcggaccatggaaggatacaattgttccggtaaacaacaactatgtgctagcccccacagatttggtcaaaagagctcacgcacacaatctgcaggtgcatccctatacgtacaggaatgaacacgaattcttacactataactttagccaagacccgtataaggagtacgactactggatcaatgagattggagttgatggactcttcactgatttcacaggcagcctccataactttcaagaatggacatctccattacctgatacctccaagtctccacgacagcttcttagtcaaattgcctcattggtcctcccttatgcaaaggcttgaagttccacataaacacctatcagtaatcctattgtttgcaattaattgtattgaataaagttacaatgattattctgaagaagaacacagttgtt

SEQ ID NO: 105925 - protein, 418 aa, Arabidopsis thaliana; identical to SEQ ID NO: 35618
  peptide (1)..(418): Ceres Seq. ID no. 13618341

SEQ ID NO: 105926 - protein, 392 aa, Arabidopsis thaliana; identical to SEQ ID NO: 35619
  peptide (1)..(392): Ceres Seq. ID no. 13618342

SEQ ID NO: 105927 - protein, 240 aa, Arabidopsis thaliana; identical to SEQ ID NO: 35620
  peptide (1)..(240): Ceres Seq. ID no. 13618343

SEQ ID NO: 105928 - DNA, 1313 bp, Arabidopsis thaliana
  misc_feature (1)..(1313): Ceres Seq. ID no. 13618344
  misc_feature (1)..(1313): Ortholog of  Ceres SEQ ID NO 14308615 as cited in SEQ ID NO 58538
  misc_feature (1)..(1313): Ortholog of  Ceres SEQ ID NO 13585342 as cited in SEQ ID NO 63601
tctctatgttgtagttcttgaacagttggctctcttttcaagaatcgtcgccgttgacctccgtgcctctccgatcaacttcccattcttttaaatgacgagagattcatcaaggaacagctcattaaagccatggcctcgaaaaaaatttctttttccttctgttgtgattgtcattgttgggataatcgtggcgtttacttatcagtccaagttgaaaccacctccgccgaagctatgtggctcctccggtggtccaccgatcacagcgccgcggataaagcttcaagatgggaggtatttggcttacaaagagcatggacttccaagagagaaagctaaccgcaaaatcgtcttcatccatggatccgattgttgtagacacgatgccgttttcgccactctgctttctccggatttagtagaggaactaggtgtatatatggtttcattcgacagaccgggctattgtgagagtgatccgcatccaagtcgtacaccgcgaagcttggtttcggatattgaagagctagctgatcagttgagtctaggatcgaaattttatgtgctcgggtactcgatgggaggacaagcagcatggggatgtcttaaatacattcctcataggttagccggagtaacactagttgctccagtggttaactattattggaagaacttacctttgaacgtttccactgaaggttttaactttcaacaaaagagagatcaattggcagttcgtgttgctcactatactccttggcttatctattggtggaacacacaaaaatggttccctggttcgagtattgcaaaccgagatcacagtctcttggcacagccggataaagatatcatttcgaagcttggttcttcgaggaaaccacattgggcagaggtaaggcagcaaggaatacatgagagtattaaccgtgacatgatcgttggttttgggaactgggaatttggtcctttagacctcgagaatccgtttttgaataaggaaggctctgtgcatttgtggcaaggagatgaggacatgttagtacctgcgaagctgcagcgttaccttgctcatcagcttccatgggttcactatcatgaggttccgagaagtggccacttcttccactacactaaaggtgtagttgatgacattgtaaagtcgctcttaacctccgatgtaagagcatctagagtttgtatttgatcatttgtagcttccaaaaactctgaaaaaaaatcccaaaaaaatacacggatacaatagagttatgtactagttacatttgtcagcatcgtagtttatt

SEQ ID NO: 105929 - protein, 372 aa, Arabidopsis thaliana; identical to SEQ ID NO: 41280
  peptide (1)..(372): Ceres Seq. ID no. 13618345

SEQ ID NO: 105930 - protein, 256 aa, Arabidopsis thaliana; identical to SEQ ID NO: 41281
  peptide (1)..(256): Ceres Seq. ID no. 13618346

SEQ ID NO: 105931 - protein, 210 aa, Arabidopsis thaliana; identical to SEQ ID NO: 41282
  peptide (1)..(210): Ceres Seq. ID no. 13618347

SEQ ID NO: 105932 - DNA, 1222 bp, Arabidopsis thaliana
  misc_feature (1)..(1222): Ceres Seq. ID no. 13618348
  misc_feature (1)..(1222): Ortholog of  Ceres SEQ ID NO 14308615 as cited in SEQ ID NO 58538
  misc_feature (1)..(1222): Ortholog of  Ceres SEQ ID NO 13585342 as cited in SEQ ID NO 63601
  misc_feature (1)..(1222): Ortholog of  Ceres SEQ ID NO 15177459 as cited in SEQ ID NO 0
taatataatttggtttctccccaaattctccacttgttcacttaatctttctcactacctgatcgtggaaatggcgattggaccatcaagtgtgatcattattgttgggataatcttggcgttgacttatcagtcaatcttgaaacctcctccaccgaatctatgtggctcccccggtggtccaccgatcacagcaccgcgtataaagctgcgagacgggagacatttggcatacaaggagtatggacttccaagagagaaagctaaacacaaaatagtcttcatccatggatccgatagttgtagacacgacgccgttttcgccactcttctttctccggatttagttcaagaacgaggcgtgtatatggtttcgtttgacaaaccgggttatggagagagtgatccggatccaatccgtacaccaaaaagcttggctttggatattgaagagctagctgatcaactgagtctaggatcaaagttctacgtgattgggaaatcaatgggaggacaagcggcgtggggatgccttaagtacacccctcaccggttagccggagtaacactagttgctcctgtggttaactactattggaggaacttacctttgaacatttccactgaaggatttaacttgcagcaaaagagagatcaatgggcggttcgtgttgctcactacgctccttggcttatttactggtggaacacacaaaactggttcccgggttcgagtgttgtgaaccgagatggcggtgtcttgtcacagcccgataaagatatcattttgaagctgggatcttcgaggaaaccgcatttggcagaagtaaggcagcaaggaatacatgagagtattaaccgtgatatgattgtgggttttggaaattgggaatttgatcctttagaactcgagaatccgtttttaaacagagaaggctctgttcatttgtggcaaggagacgaggacatgttagtgcctgtgacgctgcaacgttacattgcagataagcttccttggcttcactatcatgaggttgccggaggtggccacttcttccccctcgctaaaggtgtcgttgatgagattgttaagacagctcttaaccactgatgcgtagcattaagtaagataagatcccaaaggtatgaaaaaaccccaaaagattatgggacgtacaatggatttcttatgtaaaatgatttacatatacgaaaacataat

SEQ ID NO: 105933 - protein, 369 aa, Arabidopsis thaliana
  peptide (1)..(369): Ceres Seq. ID no. 13618349
NIIWFLPKFSTCSLNLSHYLIVEMAIGPSSVIIIVGIILALTYQSILKPPPPNLCGSPGGPPITAPRIKLRDGRHLAYKEYGLPREKAKHKIVFIHGSDSCRHDAVFATLLSPDLVQERGVYMVSFDKPGYGESDPDPIRTPKSLALDIEELADQLSLGSKFYVIGKSMGGQAAWGCLKYTPHRLAGVTLVAPVVNYYWRNLPLNISTEGFNLQQKRDQWAVRVAHYAPWLIYWWNTQNWFPGSSVVNRDGGVLSQPDKDIILKLGSSRKPHLAEVRQQGIHESINRDMIVGFGNWEFDPLELENPFLNREGSVHLWQGDEDMLVPVTLQRYIADKLPWLHYHEVAGGGHFFPLAKGVVDEIVKTALNH

SEQ ID NO: 105934 - protein, 346 aa, Arabidopsis thaliana
  peptide (1)..(346): Ceres Seq. ID no. 13618350
MAIGPSSVIIIVGIILALTYQSILKPPPPNLCGSPGGPPITAPRIKLRDGRHLAYKEYGLPREKAKHKIVFIHGSDSCRHDAVFATLLSPDLVQERGVYMVSFDKPGYGESDPDPIRTPKSLALDIEELADQLSLGSKFYVIGKSMGGQAAWGCLKYTPHRLAGVTLVAPVVNYYWRNLPLNISTEGFNLQQKRDQWAVRVAHYAPWLIYWWNTQNWFPGSSVVNRDGGVLSQPDKDIILKLGSSRKPHLAEVRQQGIHESINRDMIVGFGNWEFDPLELENPFLNREGSVHLWQGDEDMLVPVTLQRYIADKLPWLHYHEVAGGGHFFPLAKGVVDEIVKTALNH

SEQ ID NO: 105935 - protein, 247 aa, Arabidopsis thaliana; identical to SEQ ID NO: 21676
  peptide (1)..(247): Ceres Seq. ID no. 13618351

SEQ ID NO: 105936 - DNA, 1062 bp, Arabidopsis thaliana
  misc_feature (1)..(1062): Ceres Seq. ID no. 13618352
  misc_feature (1)..(1062): Ortholog of  Ceres SEQ ID NO 12784064 as cited in SEQ ID NO 66982
  misc_feature (1)..(1062): Ortholog of  Ceres SEQ ID NO 15177907 as cited in SEQ ID NO 0
ccgtcttcgttgctttttcgagcggtgcctagtctcaacttccatggctgacatcttaccttcaaattttctcaaaccaaccaaaaagcttcttctccttttctaaaatttcatcaaaccctatagggttttctcaatacaattgattttttttttcttcttcttctctatggatacgaccctttctcccgccgtggaggcggaacaaatcgccgactcaacgatcgacactgtttctcgtttgatcgccggcgttttctccggcgcacttactggaatcttcgctatggctggagcttttactggagctgtaactggtgcggtggcaggaagagctgcacagtatggagttctccgtggggctgcacttggcgctgttgctggagctatcctctctgttgaagtgttggaggcttctcgtgcgtattggtatttagagctgtcaggatcaaggggtccatcatctatggcagattttgtagagcaactgtttcgtgggagactggtagatgaacaacttatgtcaacaatgataaattcacaccattggcagttaaggatttccgatgtaagttatgaagagcgggaggatgtttatggtgaactggaagctagaggcttatcgggtgactctttaaggaaactaccatgctatataatgtcaagtgaaatggtcaggaggcaggtcactcactgcacaatttgtctgcaggacatcaaaacaggggaaatcacacgaagcttaccgaaatgtgatcatacgtttcatctggtatgtgttgataaatggctcatcagacacgggtcatgccccatttgcagacaggcagttaaagattaaaacacgactgttgccgagctgtgtacatagcaaaaacacattatccttatatgttgttgtaacttgtaagtctaaaacccctttcttctgtatttttcctcatttcatttagagcaatctcagcttgagccataggtttcgacttttgaatgtatattgttgtagacatgaataagaatacctacagatgtattgaaaagaatatagaactcgatcaagtc

SEQ ID NO: 105937 - protein, 223 aa, Arabidopsis thaliana; identical to SEQ ID NO: 22725
  peptide (1)..(223): Ceres Seq. ID no. 13618353

SEQ ID NO: 105938 - protein, 184 aa, Arabidopsis thaliana; identical to SEQ ID NO: 22726
  peptide (1)..(184): Ceres Seq. ID no. 13618354

SEQ ID NO: 105939 - protein, 124 aa, Arabidopsis thaliana; identical to SEQ ID NO: 22727
  peptide (1)..(124): Ceres Seq. ID no. 13618355

SEQ ID NO: 105940 - DNA, 1313 bp, Arabidopsis thaliana
  misc_feature (1)..(1313): Ceres Seq. ID no. 13618356
  misc_feature (1)..(1313): Ortholog of  Ceres SEQ ID NO 12364737 as cited in SEQ ID NO 51089
  misc_feature (1)..(1313): Ortholog of  Ceres SEQ ID NO 13595567 as cited in SEQ ID NO 56760
  misc_feature (1)..(1313): Ortholog of  Ceres SEQ ID NO 13655302 as cited in SEQ ID NO 63307
  misc_feature (1)..(1313): Ortholog of  Ceres SEQ ID NO 13597380 as cited in SEQ ID NO 64054
  misc_feature (1)..(1313): Ortholog of  Ceres SEQ ID NO 12625474 as cited in SEQ ID NO 64169
  misc_feature (1)..(1313): Ortholog of  Ceres SEQ ID NO 13597502 as cited in SEQ ID NO 64681
aacacacattcaaatttggcgacatgaagttctgcgcgatattcgtgttattcatcgttcttgcaatcaacggctacgattgcaagatagtccaatttatatttggagattcattgtctgatgtaggcaacaataagaatctacctaggagtttagcgacggcgaatctgcccttttacggtattgattttggcaatggtttgcctaatggaaggttcactaatggccgcactgtttcagacattataggtgataaaattggattgccaagaccagtagccttcttggatccatcaatgaatgaagatgtaatacttgaaaatggagtgaactatgcttcaggaggtggtggaatcttgaacgaaactggtggttatttcatccaaagattttcgctgtggaagcaaatagaattattccaagggacacaagatgtagttgtggcaaagatagggaaaaaagaagcagacaagttctttcaagatgctcgatacgtcgtcgctttaggcagcaatgacttcattaacaactatttgatgcctgtctatagcgactcttggaaatacaatgatcaaaccttcgtcgactacttaatggaaacacttgaatctcaactcaaggtgttacatagtttaggagcgaggaagctaatggtgtttggtttaggaccaatgggttgtatcccactgcaaagagctctaagcctggatggaaattgtcaaaacaaagcgagtaatcttgctaagagattcaacaaagctgccaccacaatgctcctagatctcgagaccaagctccctaacgcaagctacaggtttggtgaagcctatgacctcgtcaacgacgtcatcactaacccaaaaaaatacgggtttgataactcggattcgccgtgttgctcgttctacagaatccggcctgcgctaacgtgtattccagcgtcgacattgtgtaaagacagaagtaagtatgtgttttgggatgagtatcatcccaccgataaggctaacgaactcgtcgctaatatactcatcaaaagatttgacttcatgcgtgccgatgacggtatctcccatgctccatctcccgcgccggatatttctccttcttccgacaataactgatcggaattacagtcttaattatatataatacttccggtttctgtaaattgtgatcatgttgtggagagtttcgtttgtctttcattttgatcatgtcaaataatgtttgattttctgtaattgttcttcttttgttgtatctgttaattcgagaatttgtcttataatagtaaagatattatcatgttt

SEQ ID NO: 105941 - protein, 373 aa, Arabidopsis thaliana
  peptide (1)..(373): Ceres Seq. ID no. 13618357
HTFKFGDMKFCAIFVLFIVLAINGYDCKIVQFIFGDSLSDVGNNKNLPRSLATANLPFYGIDFGNGLPNGRFTNGRTVSDIIGDKIGLPRPVAFLDPSMNEDVILENGVNYASGGGGILNETGGYFIQRFSLWKQIELFQGTQDVVVAKIGKKEADKFFQDARYVVALGSNDFINNYLMPVYSDSWKYNDQTFVDYLMETLESQLKVLHSLGARKLMVFGLGPMGCIPLQRALSLDGNCQNKASNLAKRFNKAATTMLLDLETKLPNASYRFGEAYDLVNDVITNPKKYGFDNSDSPCCSFYRIRPALTCIPASTLCKDRSKYVFWDEYHPTDKANELVANILIKRFDFMRADDGISHAPSPAPDISPSSDNN

SEQ ID NO: 105942 - protein, 366 aa, Arabidopsis thaliana; identical to SEQ ID NO: 21452
  peptide (1)..(366): Ceres Seq. ID no. 13618358

SEQ ID NO: 105943 - protein, 275 aa, Arabidopsis thaliana; identical to SEQ ID NO: 21453
  peptide (1)..(275): Ceres Seq. ID no. 13618359

SEQ ID NO: 105944 - DNA, 1741 bp, Arabidopsis thaliana
  misc_feature (1)..(1741): Ceres Seq. ID no. 13618364
  misc_feature (1)..(1741): Ortholog of  Ceres SEQ ID NO 13594209 as cited in SEQ ID NO 59089
  misc_feature (1)..(1741): Ortholog of  Ceres SEQ ID NO 13664173 as cited in SEQ ID NO 61223
  misc_feature (1)..(1741): Ortholog of  Ceres SEQ ID NO 13502874 as cited in SEQ ID NO 66298
  misc_feature (1)..(1741): Ortholog of  Ceres SEQ ID NO 12614124 as cited in SEQ ID NO 68392
aatgtacatcaaacttacatcaataactgttgtttcacatcgtcgaagcaaaaatgattatatatctaatttcattactccctatcatcgtcgccaccctcatgctttatcaacgatggtggagatccaacataccgccgggaccaaaaccaaagtttctgcttggaaaccttcatcaaatgaaaccactttggacgcattctttctcggagtggtcagagacttatggtcctatcatatcggtgtggatagggtcacagctcactgtcgtggtctcgagctctgatctagccagacaagtgttgagagacaaagaccatcagttgtctaaccgacacaggatcgcaaggatgactcagaccggtactgatcttgtttggtccgattacagtccacattatgtgaaactgaggaaactctgtacactcgagctcttctctctgaaaagcatcgaaaatttcaggtccttgagagagatggaagcaagatcgatggttgtgtcgattctgaaggacttaatgagcaattcaggggatgatcaggagcgaaaaccggtgattgtgaggaagtacctagctgcggttgttttgaataccatctcaaggttaatgatagggaaagagttcgggtctgaggaaggaaaagagtttaaagccatcgttgagaaagaacatcttctcagtggctcagggacgattcttgatcacgtctggtggctcaaatgggtttcttcttggttctttagtgataaggaattcttagcgcacaaggatcggagaacaaagtggtttagaggagctattatggtggaagaagatatagaaatagaggatcacaggggatttgttcggaaattgttggtgttaaaagagcagaaagagctgagcgaagagacggttgggggactagtctggaacatgttaaccgcgggtgctgacacaactgcagttgttatcgaatgggctatggcagagatgatcaaatgcccgaccgtgcaagaaaaggcgcaacaggagcttgattctgtggttggatccgaaaggttaatgactgaatcagatatccccatactgccatatctgcaatgtgtggttaaagaagctctccggcttcacccgtcaacaccattaatgcttccacacaaagcaagtgaaactgtttgggtaggtgggtacaaggttcctaagggagccacagtttatgtcaatgtgcaggcgattgggcgggaccctgcaaactggataaacccatatgagttcagaccagagcggttccttcaggaagaaaccgatgttaaaggtcgagactttagggttcttccatttggatcaggaagacggatgtgtccagcggcacagctcagcatgaacttgatgacattggtgatgggaaatttgttgcattgcttctcatggagttcccctgttcctggagagaggattgacatgagcgagaatcctggattgctttgtaacatgaggactccattgcaggctctagctttgccgagagctgccgcaagagcaatacctttacctttagattaaaatagataaacaatcagacacataagataagataatcaaaatccatataccatgaagactctcataatggacacgaagatgtagctatgtaaaacccaagaggcattgcaagatttgagacatggttgagtatagtttcatacaataacatgtagctattatatatggaaataaaagagtcaatatttacatgg

SEQ ID NO: 105945 - protein, 497 aa, Arabidopsis thaliana
  peptide (1)..(497): Ceres Seq. ID no. 13618365
MIIYLISLLPIIVATLMLYQRWWRSNIPPGPKPKFLLGNLHQMKPLWTHSFSEWSETYGPIISVWIGSQLTVVVSSSDLARQVLRDKDHQLSNRHRIARMTQTGTDLVWSDYSPHYVKLRKLCTLELFSLKSIENFRSLREMEARSMVVSILKDLMSNSGDDQERKPVIVRKYLAAVVLNTISRLMIGKEFGSEEGKEFKAIVEKEHLLSGSGTILDHVWWLKWVSSWFFSDKEFLAHKDRRTKWFRGAIMVEEDIEIEDHRGFVRKLLVLKEQKELSEETVGGLVWNMLTAGADTTAVVIEWAMAEMIKCPTVQEKAQQELDSVVGSERLMTESDIPILPYLQCVVKEALRLHPSTPLMLPHKASETVWVGGYKVPKGATVYVNVQAIGRDPANWINPYEFRPERFLQEETDVKGRDFRVLPFGSGRRMCPAAQLSMNLMTLVMGNLLHCFSWSSPVPGERIDMSENPGLLCNMRTPLQALALPRAAARAIPLPLD

SEQ ID NO: 105946 - protein, 481 aa, Arabidopsis thaliana
  peptide (1)..(481): Ceres Seq. ID no. 13618366
MLYQRWWRSNIPPGPKPKFLLGNLHQMKPLWTHSFSEWSETYGPIISVWIGSQLTVVVSSSDLARQVLRDKDHQLSNRHRIARMTQTGTDLVWSDYSPHYVKLRKLCTLELFSLKSIENFRSLREMEARSMVVSILKDLMSNSGDDQERKPVIVRKYLAAVVLNTISRLMIGKEFGSEEGKEFKAIVEKEHLLSGSGTILDHVWWLKWVSSWFFSDKEFLAHKDRRTKWFRGAIMVEEDIEIEDHRGFVRKLLVLKEQKELSEETVGGLVWNMLTAGADTTAVVIEWAMAEMIKCPTVQEKAQQELDSVVGSERLMTESDIPILPYLQCVVKEALRLHPSTPLMLPHKASETVWVGGYKVPKGATVYVNVQAIGRDPANWINPYEFRPERFLQEETDVKGRDFRVLPFGSGRRMCPAAQLSMNLMTLVMGNLLHCFSWSSPVPGERIDMSENPGLLCNMRTPLQALALPRAAARAIPLPLD

SEQ ID NO: 105947 - protein, 455 aa, Arabidopsis thaliana
  peptide (1)..(455): Ceres Seq. ID no. 13618367
MKPLWTHSFSEWSETYGPIISVWIGSQLTVVVSSSDLARQVLRDKDHQLSNRHRIARMTQTGTDLVWSDYSPHYVKLRKLCTLELFSLKSIENFRSLREMEARSMVVSILKDLMSNSGDDQERKPVIVRKYLAAVVLNTISRLMIGKEFGSEEGKEFKAIVEKEHLLSGSGTILDHVWWLKWVSSWFFSDKEFLAHKDRRTKWFRGAIMVEEDIEIEDHRGFVRKLLVLKEQKELSEETVGGLVWNMLTAGADTTAVVIEWAMAEMIKCPTVQEKAQQELDSVVGSERLMTESDIPILPYLQCVVKEALRLHPSTPLMLPHKASETVWVGGYKVPKGATVYVNVQAIGRDPANWINPYEFRPERFLQEETDVKGRDFRVLPFGSGRRMCPAAQLSMNLMTLVMGNLLHCFSWSSPVPGERIDMSENPGLLCNMRTPLQALALPRAAARAIPLPLD

SEQ ID NO: 105948 - DNA, 1805 bp, Arabidopsis thaliana
  misc_feature (1)..(1805): Ceres Seq. ID no. 13618387
  misc_feature (1)..(1805): Ortholog of  Ceres SEQ ID NO 13589042 as cited in SEQ ID NO 60626
  misc_feature (1)..(1805): Ortholog of  Ceres SEQ ID NO 14302887 as cited in SEQ ID NO 66146
aggtaaagacgagaggtctcgcgcttatccttaaaggactgtggtgaatggtgagtgtgacttggagggaccccatcaccgcaacaatacagcttcttagatctcgataaccacaactaacctgtcacagtttcgattagatcttctcaaaaacttcacctttttttgtttttccagtttctcagaggagatcttccttcaaagctcaaatccttttgtctgaattgtgatactgctgtccccatttttctgcaagttgggaaatttctgtcaaagttttgtgggtctgttaaaaagatctgagctttgaacatggggagctcaatggaggagaaagtggtggctgtgatcatggtcggtggtccaaccaaaggcactcgatttcggccattgtcgctgaatattccaaagcctctgtttcctattgcgggacaaccaatggtgcatcatccaatttcagcttgtaaaagaattccaaatttagctcaaatatatcttgttggcttctatgaggaaagggaatttgcactttatgtttcagccatctctaatgaacttaaagttcctgttagatatctgcgagaagacaaaccacatggttcagctggtgggctgtatcactttagaaatcttattatggaagatagtccgtctcatatcttcctgcttaactgtgatgtttgctgcagtttccccttgcccaaaatgctcgaggctcacaggggatatggtggaattggaactcttcttgtgatcaaggtctctcctgaatcagccagccaatttggagaattggttgcagatccagttactaatgagctgcttcattacaccgagaaacccgaaacttttgtcagtgatcgaattaactgtggtgtttatgtatttacacctgaaatttttaatgccataggagatgtttctactcagaggaaagatagagcaactctaaaacgtgtttccagcttcgaagctcttcaaccggcaacaaggatcccgacagattttgtaagactggatcaagacatcctttcacctctagctgggaagaaacggctatatacttatgagactatggatttctgggagcaaatcaaatctcctgggatgtcgttgaggtgttcaggactctatctttcccaattccgcttgacatctccccaactgttggctagtggtgatggaacaaggagtgccattgtgattggtgatgtttacatacatccttctgcaaaagttcacccaactgcaaagattggtcccaacgtctcaatctctgcaaatgctcgtgttggaccgggcgtcaggcttatgagctgcatcatccttgacgatgttgagatcatggaaaatgcagtggtgactaacgcaattgttgggtggaaatcttctatcgggagatggtcccgcgtccaggctgagggagtctacaattcgaaactcggagttacaattctcggagactcggttgcagttgaagacgaggttgtggtgaccagcagtattgttcttccaaacaagacactgaacgtcagtgttcaagacgagatcattttgtaactgaaaaacggaagttgaaaaatggaaccaacccagtggggagcagccacactatctccctctgattcaatatctactggagaaccacataagcaaatatttgggaactaattcacatgtatcatttatttacaccaagaattttccaacattgtatcaattccattttctatactcacaacacagctactgtaaaaggcactgaatttttgcccagaataataaagcacttgtgtagttttggc

SEQ ID NO: 105949 - protein, 415 aa, Arabidopsis thaliana; identical to SEQ ID NO: 38942
  peptide (1)..(415): Ceres Seq. ID no. 13618388

SEQ ID NO: 105950 - protein, 411 aa, Arabidopsis thaliana; identical to SEQ ID NO: 38943
  peptide (1)..(411): Ceres Seq. ID no. 13618389

SEQ ID NO: 105951 - protein, 402 aa, Arabidopsis thaliana; identical to SEQ ID NO: 38944
  peptide (1)..(402): Ceres Seq. ID no. 13618390

SEQ ID NO: 105952 - DNA, 917 bp, Arabidopsis thaliana
  misc_feature (1)..(917): Ceres Seq. ID no. 13618391
  misc_feature (1)..(917): Ortholog of  Ceres SEQ ID NO 15170337 as cited in SEQ ID NO 57970
aaccagatataacagaattaacctacacaactgaaactcgagttaagaaccggaaacagaatccaattcaaccaaaccgaatcgaaccgaaccggagtttttatccaatggtgaagcaagcgatgaaggaagaggagaagaagagaaacacggcgatgcagtcaaagtacaaaggagtgaggaagaggaaatggggaaaatgggtatcggagatcagacttccacacagcagagaacgaatttggttaggctcttacgacactcccgagaaggcggcgcgtgctttcgacgccgctcaattttgtctccgcggcggcgatgctaatttcaatttccctaataatccaccgtcgatctccgtagaaaagtcgttgacgcctccggagattcaggaagctgctgctagattcgctaacacattccaagacattgtcaagggagaagaagaatcgggtttagtacccggatccgagatccgaccagagtctccttctacatctgcatctgttgctacatcgacggtggattatgatttttcgtttttggatttgcttccgatgaatttcgggtttgattccttctccgacgacttctctggcttctccggtggtgatcgatttacagagattttacccatcgaagattacggaggagagagtttattagatgaatctttgattctttgggatttttgaattcccaaacataatatttttttagagcgaactgtgagattttccttggagtcatggagaaatctggagattttttgtaacacggagctccaatgacccgggaatttctttcgtttcggatccgaatttgatgtggatcatattcacacctatattttttcatttttttgttgtaaagaaaaatcggataagattctagtaataaatgttaaaagtccattt

SEQ ID NO: 105953 - protein, 230 aa, Arabidopsis thaliana
  peptide (1)..(230): Ceres Seq. ID no. 13618392
PDITELTYTTETRVKNRKQNPIQPNRIEPNRSFYPMVKQAMKEEEKKRNTAMQSKYKGVRKRKWGKWVSEIRLPHSRERIWLGSYDTPEKAARAFDAAQFCLRGGDANFNFPNNPPSISVEKSLTPPEIQEAAARFANTFQDIVKGEEESGLVPGSEIRPESPSTSASVATSTVDYDFSFLDLLPMNFGFDSFSDDFSGFSGGDRFTEILPIEDYGGESLLDESLILWDF

SEQ ID NO: 105954 - protein, 195 aa, Arabidopsis thaliana
  peptide (1)..(195): Ceres Seq. ID no. 13618393
MVKQAMKEEEKKRNTAMQSKYKGVRKRKWGKWVSEIRLPHSRERIWLGSYDTPEKAARAFDAAQFCLRGGDANFNFPNNPPSISVEKSLTPPEIQEAAARFANTFQDIVKGEEESGLVPGSEIRPESPSTSASVATSTVDYDFSFLDLLPMNFGFDSFSDDFSGFSGGDRFTEILPIEDYGGESLLDESLILWDF

SEQ ID NO: 105955 - protein, 190 aa, Arabidopsis thaliana
  peptide (1)..(190): Ceres Seq. ID no. 13618394
MKEEEKKRNTAMQSKYKGVRKRKWGKWVSEIRLPHSRERIWLGSYDTPEKAARAFDAAQFCLRGGDANFNFPNNPPSISVEKSLTPPEIQEAAARFANTFQDIVKGEEESGLVPGSEIRPESPSTSASVATSTVDYDFSFLDLLPMNFGFDSFSDDFSGFSGGDRFTEILPIEDYGGESLLDESLILWDF

SEQ ID NO: 105956 - DNA, 608 bp, Arabidopsis thaliana
  misc_feature (1)..(608): Ceres Seq. ID no. 13618399
  misc_feature (1)..(608): Ortholog of  Ceres SEQ ID NO 15178847 as cited in SEQ ID NO 1145
  misc_feature (1)..(608): Ortholog of  Ceres SEQ ID NO 14311253 as cited in SEQ ID NO 56483
  misc_feature (1)..(608): Ortholog of  Ceres SEQ ID NO 13597435 as cited in SEQ ID NO 64073
  misc_feature (1)..(608): Ortholog of  Ceres SEQ ID NO 13656209 as cited in SEQ ID NO 64393
accgactcttctaatctctgcgatcgtacatcagaaacctctatctcatcgccgaggaaaaaagatcttacaatggctattaacaccatcacgaacgaagaagatgatgcatcaaacaactttggatgcaatatctgtcttgaattggcaagagaaccgatcgtgactctatgtggtcatttgttctgttggccttgtctctacaagtggctccattaccattctaaatcaaatcattgtcctgtttgtaaagctttggttaaggaagatactttggttcctttgtatggaatgggtaagccatcttctgatccgagatcgaaactcaatagtggtgttactgtccctaatcgaccagctgcgactaggactgaaacagctcgacctcgtcttgaacaaagacatcatgggtctagtttctttggtgggcattcaagttttgctgccatgccaactggtttacggttttcaaatttcttgttgtaatggaaagtatcttttgatgaatctgagtctgtttttttgacaatgtttttgaaactattattatacattgtctacgatttttgttattttgacaattaatgtttagagctacttttacattc

SEQ ID NO: 105957 - protein, 161 aa, Arabidopsis thaliana
  peptide (1)..(161): Ceres Seq. ID no. 13618400
TDSSNLCDRTSETSISSPRKKDLTMAINTITNEEDDASNNFGCNICLELAREPIVTLCGHLFCWPCLYKWLHYHSKSNHCPVCKALVKEDTLVPLYGMGKPSSDPRSKLNSGVTVPNRPAATRTETARPRLEQRHHGSSFFGGHSSFAAMPTGLRFSNFLL

SEQ ID NO: 105958 - protein, 137 aa, Arabidopsis thaliana; identical to SEQ ID NO: 38333
  peptide (1)..(137): Ceres Seq. ID no. 13618401

SEQ ID NO: 105959 - DNA, 941 bp, Arabidopsis thaliana
  misc_feature (1)..(941): Ceres Seq. ID no. 13618402
  misc_feature (1)..(941): Ortholog of  Ceres SEQ ID NO 14307351 as cited in SEQ ID NO 54892
atacactctgctttttcctctttcttctctcactcttactctgtctttcttcatcagaccaaaaacaaaccctaatttctcagctcgatttctctcttactccatttctcaatccttcacaaaatgcaccaacttccatttccgagatcgtaaaaaagcttgtggtactttctgataatagagagggaaaaaacgagagagagagaaaacacaaaatgctggaagctccggtgaacaagtcaagcatcctcaatggaggaggaggaggattctctcagctacagagttgcttcggcgattgcagtagcgaagaagaattgtcagtgttgccacgtcataccaaagttgtcgttactggaaacaaccgtaccaaatctgttctcgtcggtcttcaaggcgtcgttaagaaagccgtcggactcggtggttggcattggctggttttgactaatggaattgaagtgaagttgcagaggaatgcgcttagtgttcttgaacatcctacagggaacgaagaagacaatgatcttgaagtcgaccattctacacagtggaatcatccctccgatatgacaactgaggacactttgaagcctcataagtcgaagaagagaggacacagatcatcgcggttatctcaaaaggctttgtacagggaagtttcttgtgactcacactcaaaaatctcgagtattactcctcgtctgaacatggttgatcttaccaagttggatatggctgcattactgagatattggcgacattttaacctcgtggatgctcttccgaatcccacaaaggagcaactaattgacattattcagagacacttcatgtctcagcaaatggatgagcttcaggttattgtgggattcgttcaggctgcaacaggaatgaagaaggcttgccaagtggaagaccaaagaagccagaaacactga

SEQ ID NO: 105960 - protein, 312 aa, Arabidopsis thaliana
  peptide (1)..(312): Ceres Seq. ID no. 13618403
TLCFFLFLLSLLLCLSSSDQKQTLISQLDFSLTPFLNPSQNAPTSISEIVKKLVVLSDNREGKNERERKHKMLEAPVNKSSILNGGGGGFSQLQSCFGDCSSEEELSVLPRHTKVVVTGNNRTKSVLVGLQGVVKKAVGLGGWHWLVLTNGIEVKLQRNALSVLEHPTGNEEDNDLEVDHSTQWNHPSDMTTEDTLKPHKSKKRGHRSSRLSQKALYREVSCDSHSKISSITPRLNMVDLTKLDMAALLRYWRHFNLVDALPNPTKEQLIDIIQRHFMSQQMDELQVIVGFVQAATGMKKACQVEDQRSQKH

SEQ ID NO: 105961 - protein, 241 aa, Arabidopsis thaliana
  peptide (1)..(241): Ceres Seq. ID no. 13618404
MLEAPVNKSSILNGGGGGFSQLQSCFGDCSSEEELSVLPRHTKVVVTGNNRTKSVLVGLQGVVKKAVGLGGWHWLVLTNGIEVKLQRNALSVLEHPTGNEEDNDLEVDHSTQWNHPSDMTTEDTLKPHKSKKRGHRSSRLSQKALYREVSCDSHSKISSITPRLNMVDLTKLDMAALLRYWRHFNLVDALPNPTKEQLIDIIQRHFMSQQMDELQVIVGFVQAATGMKKACQVEDQRSQKH

SEQ ID NO: 105962 - DNA, 1520 bp, Arabidopsis thaliana
  misc_feature (1)..(1520): Ceres Seq. ID no. 13618405
  misc_feature (1)..(1520): Ortholog of  Ceres SEQ ID NO 15171297 as cited in SEQ ID NO 51458
agatgaaaaaaatattattatttgttggagaagaaagagagattcttcttcttcgattccagcgaaggaaaagcgtattcctcgtgagcactaacttctcactcctctcttcttcttcttcatcagtctacgttcacacaatctttcacccacctattcaaagctctctccggaagtttcgaggggttggttgttggttttcccgatgacttcggatggagctacgtcgacatcagcagctgcagctgcggcggcggcagcagcggcgaggaggaagccgtcgtggagagaaagggagaataatcggaggagagaaagacggagaagagctgtagctgcgaagatatacactgggcttagagctcaaggtgattataatttgcctaaacattgtgataataatgaagtccttaaagctctttgtgttgaagctggttgggttgttgaagaagatggtactacttatcgcaagggatgcaagcctttacctggtgagatagctgggacttcatctcgagtaactccatattcatcacagaaccagagccctctttcatcagcctttcaaagtcccatcccatcttaccaagttagcccgtcttcttcatcattcccgagtccttctcgcggtgaaccaaataacaacatgtcctctacattcttccctttcctcagaaatggtggcattccttcttctcttccttccctcagaatctcaaacagttgtccagttaccccaccggtctcatcgccgacttctaagaacccgaaaccgttgcctaactgggaatctatcgctaagcaatccatggccattgctaaacaatcaatggcgtcttttaattatcctttctatgcggtttctgcacctgctagtccgacacatcgccaccagtttcataccccggctactatacctgaatgtgatgagtctgactcttccactgttgattctggtcattggataagctttcagaagtttgcacaacaacagccattctctgcctctatggtgccaacctctcctaccttcaatcttgtgaaacctgcgcctcagcagatgtctccaaatactgctgccttccaagagattggtcaaagctctgagtttaaatttgagaatagccaagttaaaccctgggaaggagagaggatacatgatgtgggtatggaggatcttgagcttacacttggaaatgggaaggctcgtggttgacataaacaactaggcaaacccaaatggcatgtcattggaatatgagaaactaatcctcttgagtattttcttcttcgtccaggtatttggatctttatggaatctcatatgttcttcacttattatccaaatatgctgcccaaagccttctccatggaagcattggagtgttagagtggttattcaattcatgaatttggtttcaaaagcattatttgtagataaaaaaatcttaagatgtatgattctgtttccttacatatgttacattaattagtggcttgaaactgtcttgtgtcttgtc

SEQ ID NO: 105963 - protein, 336 aa, Arabidopsis thaliana
  peptide (1)..(336): Ceres Seq. ID no. 13618406
MTSDGATSTSAAAAAAAAAAARRKPSWRERENNRRRERRRRAVAAKIYTGLRAQGDYNLPKHCDNNEVLKALCVEAGWVVEEDGTTYRKGCKPLPGEIAGTSSRVTPYSSQNQSPLSSAFQSPIPSYQVSPSSSSFPSPSRGEPNNNMSSTFFPFLRNGGIPSSLPSLRISNSCPVTPPVSSPTSKNPKPLPNWESIAKQSMAIAKQSMASFNYPFYAVSAPASPTHRHQFHTPATIPECDESDSSTVDSGHWISFQKFAQQQPFSASMVPTSPTFNLVKPAPQQMSPNTAAFQEIGQSSEFKFENSQVKPWEGERIHDVGMEDLELTLGNGKARG

SEQ ID NO: 105964 - protein, 189 aa, Arabidopsis thaliana
  peptide (1)..(189): Ceres Seq. ID no. 13618407
MSSTFFPFLRNGGIPSSLPSLRISNSCPVTPPVSSPTSKNPKPLPNWESIAKQSMAIAKQSMASFNYPFYAVSAPASPTHRHQFHTPATIPECDESDSSTVDSGHWISFQKFAQQQPFSASMVPTSPTFNLVKPAPQQMSPNTAAFQEIGQSSEFKFENSQVKPWEGERIHDVGMEDLELTLGNGKARG

SEQ ID NO: 105965 - DNA, 1640 bp, Arabidopsis thaliana
  misc_feature (1)..(1640): Ceres Seq. ID no. 13618427
  misc_feature (1)..(1640): Ortholog of  Ceres SEQ ID NO 13582281 as cited in SEQ ID NO 51014
  misc_feature (1)..(1640): Ortholog of  Ceres SEQ ID NO 15176795 as cited in SEQ ID NO 54453
  misc_feature (1)..(1640): Ortholog of  Ceres SEQ ID NO 14310508 as cited in SEQ ID NO 58965
  misc_feature (1)..(1640): Ortholog of  Ceres SEQ ID NO 12617417 as cited in SEQ ID NO 65089
aaagcataatagagatacaaagaaacaagaaaacgaaaggaaaaaatacagaaatgggtggtttgaagtttcatgtacttatgtatccatggttcgcaacaggccatatgaccccgttcctttttcttgccaacaaattggctgagaaaggtcatacggtcacttttttgattcccaagaaagctctgaaacagttggaaaatctcaatctgtttccacacaacattgtctttcgctctgtcaccgtccctcatgtggatggtctccccgttggcacagagacagtctctgagatccccgtgacatcagctgatctcttgatgtctgctatggatctcacacgtgatcaagttgaaggtgtggtccgagccgtggaaccggacctgatcttctttgacttcgctcattggattccagaggtagctagagactttggccttaagactgtaaagtacgtcgtggtatctgcatcgactatagctagtatgcttgttccaggtggtgagttaggtgttcctccgccgggatatccttcatcgaaggtgctgcttcgtaaacaagatgcttacaccatgaagaatctggagtctacaaatacaatcaatgtcggaccaaacttattggaaagagtcactacaagtcttatgaactctgatgtcattgcgataaggacagccagagaaatcgaaggaaacttttgcgactatatcgaaaaacattgcaggaaaaaggttctcttgacaggtccggtgttccctgagccagacaagactagagagctagaggaacgatgggttaagtggctaagtgggtatgaaccagactcagtggtgttttgtgcgttgggctcacaagtcattttagagaaagatcaattccaagaactctgcttaggaatggagctaacaggttcaccgtttcttgtagcggttaagccacctagaggctcatcaacgattcaagaagcacttcctgaaggattcgaggagagggttaaaggaagaggagttgtttggggagaatgggttcaacaaccattgctattgtctcatccatcagtcgggtgctttgtgagccattgtgggtttggatcaatgtgggagtctttgctgagtgattgtcagatagtcttggtaccacagttgggtgatcaggtcctcaacacaagattgctgagtgacgaactcaaggtttcggttgaagtggcaagagaggaaacaggatggttctcgaaagagagcttgttcgatgctatcaatagtgtgatgaaaagggacagtgagatcgggaatctggtgaagaagaatcacaccaagtggagggagacactaactagtcctggacttgtgaccggttatgtcgataatttcatagagtcattgcaggatcttgtctctgggaccaaccatgtttcgaagtagaagggagtgatcaataaggttggtacaaaccaaactatatatcttgaagtgcttctgtttccaagtgtgtttttgtttgtttgtatcatgtttctaagtagcagtaggggatttataaggttttataaaccaaaccttacttgaagtacctctgttttccctagttggctttataataatgtgtttcgtagttgtaagggcaagacaataaaatctctt

SEQ ID NO: 105966 - protein, 472 aa, Arabidopsis thaliana
  peptide (1)..(472): Ceres Seq. ID no. 13618428
SIIEIQRNKKTKGKNTEMGGLKFHVLMYPWFATGHMTPFLFLANKLAEKGHTVTFLIPKKALKQLENLNLFPHNIVFRSVTVPHVDGLPVGTETVSEIPVTSADLLMSAMDLTRDQVEGVVRAVEPDLIFFDFAHWIPEVARDFGLKTVKYVVVSASTIASMLVPGGELGVPPPGYPSSKVLLRKQDAYTMKNLESTNTINVGPNLLERVTTSLMNSDVIAIRTAREIEGNFCDYIEKHCRKKVLLTGPVFPEPDKTRELEERWVKWLSGYEPDSVVFCALGSQVILEKDQFQELCLGMELTGSPFLVAVKPPRGSSTIQEALPEGFEERVKGRGVVWGEWVQQPLLLSHPSVGCFVSHCGFGSMWESLLSDCQIVLVPQLGDQVLNTRLLSDELKVSVEVAREETGWFSKESLFDAINSVMKRDSEIGNLVKKNHTKWRETLTSPGLVTGYVDNFIESLQDLVSGTNHVSK

SEQ ID NO: 105967 - protein, 455 aa, Arabidopsis thaliana; identical to SEQ ID NO: 25045
  peptide (1)..(455): Ceres Seq. ID no. 13618429

SEQ ID NO: 105968 - protein, 446 aa, Arabidopsis thaliana; identical to SEQ ID NO: 25046
  peptide (1)..(446): Ceres Seq. ID no. 13618430

SEQ ID NO: 105969 - DNA, 1090 bp, Arabidopsis thaliana
  misc_feature (1)..(1090): Ceres Seq. ID no. 13618451
  misc_feature (1)..(1090): Ortholog of  Ceres SEQ ID NO 15225507 as cited in SEQ ID NO 55551
  misc_feature (1)..(1090): Ortholog of  Ceres SEQ ID NO 15225677 as cited in SEQ ID NO 0
aaaaagaaaaaagactacatttctacaaggacgttggttcttttagtcgtcgtcggtcgtcgaagaaagatcttctccttctttcttcgccgtacgatcgtcgtctaatgggagaatcatcaaatccaatggctacaagttcttcttcctcctcctcctcaattcctccttcgtctccaacaccctctccgacgtccacaaccactccgccacgtcaacatcctctcctccagccaccatcttcaaaaaagaagaaaaacagaacaaacgttttcagagtcttacgcaccgtgtttcgatctttcccaatctttacaacaccatccgtagcatgcaaaatcccggttatacatcccggtttaggcttaccggatccacatcacaacacgtcaagaatcaccggaacgttattcggataccgtaaaggccgagtaagtctttccattcaagaaaaccctaaatgtttaccttctttagtcgtggagctcgccatgcaaaccacaacgcttcaaaaagagctaagcacgggaatggtgagaatagctctcgagactgagaaacagcctcgagctgataataacaattctaaaaccgagaagaagacagatattttggaagaaccgttatggacaatgtattgtaaaggagagaaaacgggttacggtgtgaaacgagaagcgaccgaagaagatcttaacgtgatggagttgttacgtccggtgtctatgggcgccggagttttgccgggaaactcggagtcggaaggacccgacggcgaaatggcgtatatgagagcttattttgagagagttattgggtctaaagattcagagactttttatatgttgagtcctgaagggaataatggacccgaacttagctttttctttgtgagagtttgacttattttgttatggttcaaattaatgtaacgtgtatgtaaatgaccggaaacggcggtggtcgtcgacgttatatactattgtttaggataattgtaagaattttttgttgttctttcgttgttaatctctcgatctttataaaaagattgaattgtaagtgtgtgtatatacacacttcttcgtcc

SEQ ID NO: 105970 - protein, 299 aa, Arabidopsis thaliana
  peptide (1)..(299): Ceres Seq. ID no. 13618452
KEKRLHFYKDVGSFSRRRSSKKDLLLLSSPYDRRLMGESSNPMATSSSSSSSSIPPSSPTPSPTSTTTPPRQHPLLQPPSSKKKKNRTNVFRVLRTVFRSFPIFTTPSVACKIPVIHPGLGLPDPHHNTSRITGTLFGYRKGRVSLSIQENPKCLPSLVVELAMQTTTLQKELSTGMVRIALETEKQPRADNNNSKTEKKTDILEEPLWTMYCKGEKTGYGVKREATEEDLNVMELLRPVSMGAGVLPGNSESEGPDGEMAYMRAYFERVIGSKDSETFYMLSPEGNNGPELSFFFVRV

SEQ ID NO: 105971 - protein, 264 aa, Arabidopsis thaliana; identical to SEQ ID NO: 38461
  peptide (1)..(264): Ceres Seq. ID no. 13618453

SEQ ID NO: 105972 - protein, 257 aa, Arabidopsis thaliana; identical to SEQ ID NO: 38462
  peptide (1)..(257): Ceres Seq. ID no. 13618454

SEQ ID NO: 105973 - DNA, 781 bp, Arabidopsis thaliana
  misc_feature (1)..(781): Ceres Seq. ID no. 13618459
  misc_feature (1)..(781): Ortholog of  Ceres SEQ ID NO 14306299 as cited in SEQ ID NO 56895
  misc_feature (1)..(781): Ortholog of  Ceres SEQ ID NO 13663631 as cited in SEQ ID NO 67073
atatatataacgtgttcaatcctcacttcaaaaacccacaaaaactttagaacgaaaaaagatgaaaatctttaactcatctcaaaacctattcttggccataacctttttccttgttctcatagttcatctaaaagcccaagacagtcctcaagactttttggcagttcacaaccgagcacgagccgaggttggggtgggacccttaagatgggacgagaaggtggctgcttatgcccgtaactatgctaaccagcgtaaaggtgactgcgctatgaaacactcgagcgggtcctatggagagaacatcgcttggagcagcggtagcatgacaggcgtagcagcagttgacatgtgggtggacgagcaatttgactacgattatgattccaatacatgtgcatgggacaaacagtgtggccactatactcaggttgtgtggagaaactcggagaggttgggatgtgcaaaagtgagatgcaacaatggtcaaacctttatcacttgcaactacgatcctcccggtaactgggttggcgagtggccttactaaaagaaaactccatttaaatgttttcgaatatatgttatccacatgtatatatgtattgtttccatgttgttcagttataccaatcatctatcgtcagctaataaagattggtttgtgtggtcctggtccggtccggtcttcttttgtaccacatgtataatgtatgcgtggatttttataatggaataagaaaaatgcaatgctacggcttgcacttgctttgtttgc

SEQ ID NO: 105974 - protein, 163 aa, Arabidopsis thaliana; identical to SEQ ID NO: 27203
  peptide (1)..(163): Ceres Seq. ID no. 13618460

SEQ ID NO: 105975 - protein, 92 aa, Arabidopsis thaliana; identical to SEQ ID NO: 27204
  peptide (1)..(92): Ceres Seq. ID no. 13618461

SEQ ID NO: 105976 - DNA, 1974 bp, Arabidopsis thaliana
  misc_feature (1)..(1974): Ceres Seq. ID no. 13618486
  misc_feature (1)..(1974): Ortholog of  Ceres SEQ ID NO 14302935 as cited in SEQ ID NO 20442
gtctcttctacacgtcttctcttccgaccacacccttcattcaattcaacgtctcctctctggctctctctctcaaatatataaacaccaataatgtctccaatttgagatttttaactgaacccaagtcatgacgaagcttctagagattaatcatattcaaaccctttgttttgccaagggtttttctcctgccagattaaatgttgcaacttcaccttttcggatatctcgtcgtggtggtggtggatattgcagcaatgcttgtatcccttatcggttgaaatttacttgttatgcaacactatctgctgtggtaaaggagcaagcatcagactttagtggaaaagaagcagctttgcttgtagatgagctcagaagcaacttcaactctggcagaacgaagagctacgagtggagaatttctcagcttcaaaacattgctaggatgattgatgagaaggagaaatgcatcaccgaagctttgtatcaagatctttctaagcctgagcttgaagcttttctagctgagatttcgaatacaaaatcatcctgtatgcttgcaatcaaagagttaaagaactggatggctccagaaacggtcaaaacttctgtgacaacatttccctcgtctgcacaaatagtctcagaaccgcttggagttgttttggttatttcagcctggaatttccctttcttattgtctgtcgagccagtcattggagctattgcagctggtaatgcggttgtgctaaaaccttctgaaattgctccagcagcatcttctcttttagcaaagttgtttagtgaatacttggacaatacaacaatcagagttatcgagggaggagtccctgaaacaacggcactactggatcaaaaatgggacaagatctttttcactggtggagcaagagttgctcgcattataatggctgcggctgcgagaaatcttactccagtggttctcgaacttggtgggaagtgcccagctcttgttgattcagatgttaatctacaagtggctgctaggaggatcattgcagggaaatgggcttgtaacagtggacaggcttgcattggtgttgattacgtgatcacaacaaaggattttgcatcaaaattgatagatgctctgaagactgaactggagacattttttgggcaaaacgcattagaatcaaaggacctgtcgcggattgtgaactctttccacttcaaaaggttggaaagtatgttaaaagagaatggagtagccaacaaaattgttcatggtggccgaataaccgaagataaacttaaaatatcaccaacaatactactggatgtgcctgaagcatcttccatgatgcaggaagagatatttggacctttacttcccataattacggtacaaaagattgaagatggctttcaggttatacgttcaaagccaaagcctttagcagcgtatctcttcacaaacaacaaagagttggagaaacaattcgtgcaggacgtatcagcaggaggaattaccatcaatgacactgtcttacacgtgactgtaaaagatctgccatttggtggggttggggagagtgggatcggtgcttaccatgggaaattctcgtatgagacgtttagccataagaaaggagttctttaccggagcttttcaggggacgcggatcttagatatcctccttacacaccaaaaaagaagatggtgcttaaggctttgctctcttcaaacatatttgctgccattttggctttctttgggttctctaaagactcatgatcacatgttataatcactgaacttgctggaatagtacaactgagaaagttgaatatttccatagagaaactaagatcaataaaactatagcctcccctatatatgtaaacagtgaataattttagttacttgaataacaattttacatagttactaggacagctaattatatattggaaattccttctgct

SEQ ID NO: 105977 - protein, 550 aa, Arabidopsis thaliana
  peptide (1)..(550): Ceres Seq. ID no. 13618487
MTKLLEINHIQTLCFAKGFSPARLNVATSPFRISRRGGGGYCSNACIPYRLKFTCYATLSAVVKEQASDFSGKEAALLVDELRSNFNSGRTKSYEWRISQLQNIARMIDEKEKCITEALYQDLSKPELEAFLAEISNTKSSCMLAIKELKNWMAPETVKTSVTTFPSSAQIVSEPLGVVLVISAWNFPFLLSVEPVIGAIAAGNAVVLKPSEIAPAASSLLAKLFSEYLDNTTIRVIEGGVPETTALLDQKWDKIFFTGGARVARIIMAAAARNLTPVVLELGGKCPALVDSDVNLQVAARRIIAGKWACNSGQACIGVDYVITTKDFASKLIDALKTELETFFGQNALESKDLSRIVNSFHFKRLESMLKENGVANKIVHGGRITEDKLKISPTILLDVPEASSMMQEEIFGPLLPIITVQKIEDGFQVIRSKPKPLAAYLFTNNKELEKQFVQDVSAGGITINDTVLHVTVKDLPFGGVGESGIGAYHGKFSYETFSHKKGVLYRSFSGDADLRYPPYTPKKKMVLKALLSSNIFAAILAFFGFSKDS

SEQ ID NO: 105978 - protein, 444 aa, Arabidopsis thaliana; identical to SEQ ID NO: 42150
  peptide (1)..(444): Ceres Seq. ID no. 13618488

SEQ ID NO: 105979 - protein, 408 aa, Arabidopsis thaliana; identical to SEQ ID NO: 42151
  peptide (1)..(408): Ceres Seq. ID no. 13618489

SEQ ID NO: 105980 - DNA, 900 bp, Arabidopsis thaliana
  misc_feature (1)..(900): Ceres Seq. ID no. 13618490
  misc_feature (1)..(900): Ortholog of  Ceres SEQ ID NO 15169972 as cited in SEQ ID NO 51692
tgccaatattagccggcgattcagatggagacggtggtcgataaagatgttctgaagtcttccggggctgagcttcttcccgacggacgtcgaggtttacgcatccatgactgggagatcgaaaccctccgcggcacgattctcacttctctcgctgtcgaagagtgggaaaaaaagcttaagacatctcacttacctgaaatggtttttggcgagaatgcattagtccttaaacacttaggtagcaacactaagattcattttaatgcgtttgacgcactagctggttggaagcaggaagggcttccacctgttgaagttcctgctgcagcacaatggaaattcaggagcaagccgtctcagcaggtgatactagattatgattacacgtttacaacgccatactgtggaagtgaagtagttgagaaagacaaagaaacgcaggttgaggcaaaagctaatccaaagggggaagctactcttcagtgggagaactgtgaagatcagattgatttggctgctctctcacttaaagaacctattctcttctatgatgaggtagttttgtatgaagatgaactggctgacaatggagtgtcacttctgactgtgaaagtgagagtcatgccaagctcatggttcctcctcttgcgattttggctgagagttgatggtgtgcttatgagattgagagagacgagaatgcattataggtttggcgaagatgaggcaccaactgttcttcgtgaaaactgttggagagaagcaacatttcagtctctatctgcgaaagggtatccagttgacttagcagtctggagcgacccgagctccatcagtcagaggcttccagtgattaagcatacgacacagaaactgaagatccctagtaaagtttaa

SEQ ID NO: 105981 - protein, 291 aa, Arabidopsis thaliana; identical to SEQ ID NO: 97876
  peptide (1)..(291): Ceres Seq. ID no. 13618491

SEQ ID NO: 105982 - protein, 232 aa, Arabidopsis thaliana; identical to SEQ ID NO: 97877
  peptide (1)..(232): Ceres Seq. ID no. 13618492

SEQ ID NO: 105983 - DNA, 748 bp, Arabidopsis thaliana
  misc_feature (1)..(748): Ceres Seq. ID no. 13618493
  misc_feature (1)..(748): Ortholog of  Ceres SEQ ID NO 15227036 as cited in SEQ ID NO 61662
  misc_feature (1)..(748): Ortholog of  Ceres SEQ ID NO 12635268 as cited in SEQ ID NO 0
aacacaaaacctctcgtcttctcaaatccactctcatacacagtcacaacaatggctctttcttctggaatcttctctactacttttctctgcgtcgatacggcgccgttgcgcagctcaatgttgtctccatcttcgctccgtttgtcccctaatcatccgactaacctgcgcatggttcgagctgtaacttccgcggcggcggcttcctccgacccgacaaccacgaccaagactcgggagccacgtggcatcatgaagcctcgtccagtgtcccaggcgatgcaggatgtcgttggcgttcctgaaatccctcgtactcaagctctcaaacgcatttgggcttacatcaaggaacatgaccttcaagacccacaaaacaagagggatatactctgcgacgagaagctgaagaagatatttgaaggcaaagaacgtgttgggttcttggagattgcaaaactcattggtcctcactttctctgaatgaattttggctgagagaagacaatcattggcctatgttttgctgagctactaaaggccatgaaagatcagattacatattagtaaatttagggtttaagaagtttttatgcaaccaagtagtttataagcctttggaggatatcttatgtcggttatgtgctcatttgctttcccattgcagttaaaatattcctctcttttttttttttttttgtcttaggacttgaaatctctctaatgcatgaagtaatgcttttat

SEQ ID NO: 105984 - protein, 161 aa, Arabidopsis thaliana; identical to SEQ ID NO: 30485
  peptide (1)..(161): Ceres Seq. ID no. 13618494

SEQ ID NO: 105985 - protein, 144 aa, Arabidopsis thaliana; identical to SEQ ID NO: 30486
  peptide (1)..(144): Ceres Seq. ID no. 13618495

SEQ ID NO: 105986 - protein, 121 aa, Arabidopsis thaliana; identical to SEQ ID NO: 30487
  peptide (1)..(121): Ceres Seq. ID no. 13618496

SEQ ID NO: 105987 - DNA, 1369 bp, Arabidopsis thaliana
  misc_feature (1)..(1369): Ceres Seq. ID no. 13618505
  misc_feature (1)..(1369): Ortholog of  Ceres SEQ ID NO 13596816 as cited in SEQ ID NO 62287
accatcaatggctctctccatctccatctatttcctcctcatcttcctctctcacttcccatcctcacatgcagagcctttcatcggagttaactacggccaagtcgccgacaatctccctccgccttcagaaaccgtcaagctcctccaatccacttcaattcagaaagttcgactttacggcgccgatcccgccatcatcaaagctttggccggaacaggggtcggtatcgtcatcggcgctgctaacggcgacgttccttctcttgcctccgatcctaacgccgctactcaatggatcaactccaatgtccttcctttttatcccgcctccaaaatcatgctcatcaccgtcggcaacgagattctgatgtcgaacgatccaaatctggtgaaccagctacttccggcgatgcaaaatgtccaaaaagcccttgaggcggtgtctctcggcgggaaaatcaaggtctcgacggtgaactcgatgacggtgctcggtagttcagacccgccatcgagcggttcatttgcggccggttatcaaaccggtttaaagggaattttgcaatttctaagcgacactggttcgccttttgctattaacccgtacccgttcttcgcgtaccaaagtgacccgagacccgaaacgctggcgttttgtctctttgagcctaacgccggacgagtcgactccaaaaccggaatcaaatacacgaacatgttcgatgctcaggttgatgcggttcactcggctttgaaatcgatgggattcgagaaggtggagattgtggtggcggaaacaggttgggcgtcaagaggggacgctaacgaggttggagcaagcgtggataacgccaaagcgtacaacggaaacctaatagctcatctaaggtctatggttggcacacctctcatgcctggaaaacctgttgacacttacattttcgcactgtatgatgagaatctaaagcctggaccatcttcagaacgggctttcgggcttttcaaaactgatctttccatggtctatgatgttggccttgccaagagtagcagcagtagtcagacaccatcaggaaaagtgacatcgtcggggtggtgtgtaccaaagaagggtgcaacgaatgaggagttacaagcgagcttggattgggcgtgcggacatggaatagactgtggtgcgatacaaccaggaggggcttgtttcgagccgaacaatgtggtctctcacgcagcatatgccatgaatatgtattttcagaaatctcctaagcagcctacagactgcgatttctctaaaaccgcaacagtcacttcccaaaaccctagtaagatttctctccccgttactttcacaccctaccaatag

SEQ ID NO: 105988 - protein, 455 aa, Arabidopsis thaliana
  peptide (1)..(455): Ceres Seq. ID no. 13618506
PSMALSISIYFLLIFLSHFPSSHAEPFIGVNYGQVADNLPPPSETVKLLQSTSIQKVRLYGADPAIIKALAGTGVGIVIGAANGDVPSLASDPNAATQWINSNVLPFYPASKIMLITVGNEILMSNDPNLVNQLLPAMQNVQKALEAVSLGGKIKVSTVNSMTVLGSSDPPSSGSFAAGYQTGLKGILQFLSDTGSPFAINPYPFFAYQSDPRPETLAFCLFEPNAGRVDSKTGIKYTNMFDAQVDAVHSALKSMGFEKVEIVVAETGWASRGDANEVGASVDNAKAYNGNLIAHLRSMVGTPLMPGKPVDTYIFALYDENLKPGPSSERAFGLFKTDLSMVYDVGLAKSSSSSQTPSGKVTSSGWCVPKKGATNEELQASLDWACGHGIDCGAIQPGGACFEPNNVVSHAAYAMNMYFQKSPKQPTDCDFSKTATVTSQNPSKISLPVTFTPYQ

SEQ ID NO: 105989 - protein, 453 aa, Arabidopsis thaliana
  peptide (1)..(453): Ceres Seq. ID no. 13618507
MALSISIYFLLIFLSHFPSSHAEPFIGVNYGQVADNLPPPSETVKLLQSTSIQKVRLYGADPAIIKALAGTGVGIVIGAANGDVPSLASDPNAATQWINSNVLPFYPASKIMLITVGNEILMSNDPNLVNQLLPAMQNVQKALEAVSLGGKIKVSTVNSMTVLGSSDPPSSGSFAAGYQTGLKGILQFLSDTGSPFAINPYPFFAYQSDPRPETLAFCLFEPNAGRVDSKTGIKYTNMFDAQVDAVHSALKSMGFEKVEIVVAETGWASRGDANEVGASVDNAKAYNGNLIAHLRSMVGTPLMPGKPVDTYIFALYDENLKPGPSSERAFGLFKTDLSMVYDVGLAKSSSSSQTPSGKVTSSGWCVPKKGATNEELQASLDWACGHGIDCGAIQPGGACFEPNNVVSHAAYAMNMYFQKSPKQPTDCDFSKTATVTSQNPSKISLPVTFTPYQ

SEQ ID NO: 105990 - protein, 342 aa, Arabidopsis thaliana
  peptide (1)..(342): Ceres Seq. ID no. 13618508
MLITVGNEILMSNDPNLVNQLLPAMQNVQKALEAVSLGGKIKVSTVNSMTVLGSSDPPSSGSFAAGYQTGLKGILQFLSDTGSPFAINPYPFFAYQSDPRPETLAFCLFEPNAGRVDSKTGIKYTNMFDAQVDAVHSALKSMGFEKVEIVVAETGWASRGDANEVGASVDNAKAYNGNLIAHLRSMVGTPLMPGKPVDTYIFALYDENLKPGPSSERAFGLFKTDLSMVYDVGLAKSSSSSQTPSGKVTSSGWCVPKKGATNEELQASLDWACGHGIDCGAIQPGGACFEPNNVVSHAAYAMNMYFQKSPKQPTDCDFSKTATVTSQNPSKISLPVTFTPYQ

SEQ ID NO: 105991 - DNA, 1693 bp, Arabidopsis thaliana
  misc_feature (1)..(1693): Ceres Seq. ID no. 13618509
  misc_feature (1)..(1693): Ortholog of  Ceres SEQ ID NO 12617887 as cited in SEQ ID NO 65526
aaaaaagaaagaaaaaaaattcagaagcctttgttttcatcgatgaataaattaacaaacaaaactaaaaaataggatattcgctggccgaatcgcgtcgatccacatcgcaggtgagggttcctgcaatttatccctcgtggtctctgaatctcagatcgtcgtcaacgaatcctccattttctgaatcaaaattttctggaaacaatggggagcttggggacgatgctgagatatccggatgacatatatccgctcctgaagatgaaacgagcgattgagaaagcggagaagcagatccctcctgagccacactggggtttctgctattcgatgctccacaaggtttctcgaagcttttctctcgttattcagcaactcaacaccgagctccgtaacgccgtgtgtgtgttctacttggttctccgagctcttgatactgttgaggatgatactagcataccaactgatgaaaaggttcccatcctgatagcttttcaccggcacatatacgatactgattggcattattcatgtggtacgaaggagtacaagattctaatggaccaatttcaccatgtttctgcagcttttttggaacttgaaaaagggtatcaagaggctatcgaggaaattactagaagaatgggtgcagggatggccaagtttatctgccaagaggtagaaactgttgatgactacgatgaatactgccactatgttgctgggcttgttggtttaggtttgtcgaaactcttcctcgctgcaggatcagaggttttgacaccagattgggaggcgatttccaattcaatgggtttatttctgcagaaaacaaacattatcagagattatcttgaggacattaatgagataccaaaatcccgcatgttttggcctcgcgagatttggggcaaatatgctgacaagcttgaggatttaaaatacgaggagaacacaaacaaatccgtacagtgcttaaatgaaatggttaccaatgcgttgatgcatattgaagattgcctgaaatacatggtttccttgcgtgatccttccatatttcggttctgtgccatccctcagatcatggcgattggaacacttgcattatgctataacaatgaacaagtattcagaggcgttgtgaaactgaggcgaggtcttactgctaaagtcattgatcgtacaaagacaatggctgatgtctatggtgctttctatgatttttcctgcatgctgaagacaaaggttgacaagaacgatccaaatgccagtaagacactaaaccgacttgaagccgttcagaaactctgcagagacgctggagttcttcaaaacagaaaatcttatgttaatgacaaaggacaaccaaacagtgtctttattataatggttgtgattctactggccatagtctttgcatatctcagagcaaactgagtgatccatgtaagcgagtctgattgtatcaccatcattcaagatgttcagagcaaatttgagtgatgaagtaatctaggttgattcttattcacgccactgaatcctaagcaagattgtttccagaacaaacagagtttaagcatggtttagtctaaaaccatggattctattttagttactaccttcgttatctaaacgtgcatttgttcatctatttttattccttgtgtttaaagttctttctttgttt

SEQ ID NO: 105992 - protein, 410 aa, Arabidopsis thaliana; identical to SEQ ID NO: 21105
  peptide (1)..(410): Ceres Seq. ID no. 13618510

SEQ ID NO: 105993 - protein, 404 aa, Arabidopsis thaliana; identical to SEQ ID NO: 21106
  peptide (1)..(404): Ceres Seq. ID no. 13618511

SEQ ID NO: 105994 - protein, 391 aa, Arabidopsis thaliana; identical to SEQ ID NO: 21107
  peptide (1)..(391): Ceres Seq. ID no. 13618512

SEQ ID NO: 105995 - DNA, 1494 bp, Arabidopsis thaliana
  misc_feature (1)..(1494): Ceres Seq. ID no. 13618517
  misc_feature (1)..(1494): Ortholog of  Ceres SEQ ID NO 13597740 as cited in SEQ ID NO 64482
  misc_feature (1)..(1494): Ortholog of  Ceres SEQ ID NO 13596056 as cited in SEQ ID NO 68307
  misc_feature (1)..(1494): Ortholog of  Ceres SEQ ID NO 12388689 as cited in SEQ ID NO 0
gttgatcaacaattaaacacaaaaacccttaagttgacgtggctgtatctcttccaactcttaaaaatcaattactattatacccctcagaaaaatggcagagcgtgtgtctctcacactcaacggaaccctcctttctcctcctcccacaacaacaacaacaacaatgtcttcttctctccgatctaccaccgccgcttctcttctcctccgctcctcctcctcctcctccagatccactctcactctctccgcttcctcctctctctccttcgtcagatctctcgtctcttctccacgtctctcttcttcttcatccctctctcagaagaaatatcgaattgcgtcggtgaatcggagtttcaactccaccaccgccgctactaaatcttcatcttcagatcctgatcagttgaagaacgctagagaagatatcaaagagcttctcagcaccaaattctgccatccgattttggttagattaggttggcatgatgctggtacgtataacaagaacattaaggaatggccacaaagaggtggagctaatggaagtttgagattcgatattgagcttaaacatgctgctaacgctggtcttgtgaatgctttaaacttgattaaggatatcaaagagaaatactctgggatcagttatgctgatttgttccagttagctagtgctactgctatagaggaagctggaggaccgaaaataccgatgaaatatggtagagttgatgcctctggtcctgaggattgtccagaagaaggaaggcttccagatgctggtcctccttcacctgctactcatctcagagaagttttttacagaatgggattagatgacaaggacatagttgcattatctggtgctcacacgttaggaagatctaggccagaacgtagtggttgggggaagcctgagacgaagtacacgaaagaaggacctggagcaccaggaggacagtcatggacaccagagtggctgaagtttgataattcttacttcaaggagatcaaggaaaagagagatgaagatctccttgtcctacccactgatgctgccatcttcgaagattcttctttcaaggtctatgctgaaaagtatgctgcagatcaggatgcatttttcaaggattacgctgtagcccatgcgaagctcagcaatcttggagcagaatttaaccctccggagggtatcgttatctaatgggggcacataatttactcaaccagacttatgattttagagaaacgtagttcaataatgaaagagaagaaaaagttgacggagaacttttcatgcgagtacttttcgagataccttttggacaatgtttctggctgttcaaaggattttgtttagccgaaagtatttgatcgttttcatggttttgggctttcatgttttttcttgtaataaattgcggaagtgattattcaaaatctatacaaattttgtctgggattgaattattttatcgatgttat

SEQ ID NO: 105996 - protein, 372 aa, Arabidopsis thaliana; identical to SEQ ID NO: 35940
  peptide (1)..(372): Ceres Seq. ID no. 13618518

SEQ ID NO: 105997 - protein, 348 aa, Arabidopsis thaliana; identical to SEQ ID NO: 35941
  peptide (1)..(348): Ceres Seq. ID no. 13618519

SEQ ID NO: 105998 - DNA, 1401 bp, Arabidopsis thaliana
  misc_feature (1)..(1401): Ceres Seq. ID no. 13618520
  misc_feature (1)..(1401): Ortholog of  Ceres SEQ ID NO 13582332 as cited in SEQ ID NO 59890
aaattaaatcacaaataggttctgttttttgtgggaagatatgagattttcttcaagcaaaaagggagttatgagatgattggtcgtcctcgccggagaaaagatacgagacttgtctctcaatcctgaagcagactcgattcatccatcagtcaacaaatcttccttcacaatggatgaagaagaagcaatgttactgctaaaggaagaagatgaaggaacaagaagaactagtgttcctacacaactcatgaaactaaaacgaacccattggtggattcttgtctttataagtatcttcttcctcatctctgcacaagccattgctgttcttcttggtcggttttattacaacgaaggtggaaacagtaaatggatctctactcttgtccaaacttgtggttttccgattctctatctccctctttgtttccttcctgcttcacactcttcttcatcttcttgttctttcaagactctggtttggatttatctttctcttggttttgctattggtttagacaatcttttatactcttttggtcttttgtatctctctgcttcaacttattcgattctttgttcttcacagttagctttcaatggtgtcttctcttattacatcaattctcagaaaatcacttgtttgattctcttctctgtgttgtttctctctgtctctgctgtgttggtttctcttgacgatgattccaatagcccatcaggagattctaagtggagttacttgattggttgtttatgtactgtttttgcttctcttatctattctcttcagctctctcttatgcagttttctttcgagaatgttctcaagagtgagacgttctctatggttctcgagatgcaaatctatacgtcgcttgtggcttcttgtgttgcggttatcgggttgtttgcgagcggggaatggatgttgttgagtgtggagatggaagagtttcacgagggtcaagtcatttatgttttgactttggttgggaccgcggtttcgtggcaattgggttctgtaggagccgtggcgcttatatttctggtttcttcgctgttttcgaaccttattggtacactctcactcattgttacgcctcttgcagccattgcggtgttccacgacaagctgactgaggttaagatggtcgcgatgctcattgccttcatggggttcgggttttatatctaccagaattatcttgatgacctgaaagtacaaagagcacgagaagctcaggctgaatagttctgctgtgttttattagttaattttgttagtaacctttcttagaacaagctagctacaagtgttgtattgtatatagtagagttcataatccggtgataatatacataatactaattgcatatggagcttgtttttacggg

SEQ ID NO: 105999 - protein, 361 aa, Arabidopsis thaliana; identical to SEQ ID NO: 24738
  peptide (1)..(361): Ceres Seq. ID no. 13618521

SEQ ID NO: 106000 - protein, 355 aa, Arabidopsis thaliana; identical to SEQ ID NO: 24739
  peptide (1)..(355): Ceres Seq. ID no. 13618522

SEQ ID NO: 106001 - protein, 335 aa, Arabidopsis thaliana; identical to SEQ ID NO: 24740
  peptide (1)..(335): Ceres Seq. ID no. 13618523

SEQ ID NO: 106002 - DNA, 930 bp, Arabidopsis thaliana
  misc_feature (1)..(930): Ceres Seq. ID no. 13618530
  misc_feature (1)..(930): Ortholog of  Ceres SEQ ID NO 13584593 as cited in SEQ ID NO 65340
ttttatttgaaagacatttttgcctatttcattcatattttgcttttaaaacgagaattataattcttcgactccgtgggataagttttctaaaaaatcgaagaaagatcgatggctctagatatctgcgtgaaggttgccgtcggtgctcctgatgttctcggcgactgtccgtttagccaacgtgttcttctgacacttgaggagaagaagcttccctacaagacccatctgattaacgtctccgacaaaccccaatggttcttagacattagtccagaggggaaagttccggtggtgaagcttgatggcaaatgggtggctgattctgacgtaattgttggacttcttgaagagaaatatccagagccttctctcaagactcctcctgaatttgcttctgtaggatccaaaatctttggtgcttttgtgactttcttgaagagcaaagacgctaatgacggatccgagaaggctttggttgatgagttagaagcgttggagaatcacttgaagacacattctggtccttttgtagctggagagaagattactgcagtggatttgagtttagcaccaaagctttaccatcttgaggttgctcttggtcattacaagaactggtctgtccctgagagcttgaccagtgttcgtaactacgccaaggctttgttctctagggagtcgtttgagaacaccaaggctaagaaagagattgtggttgcgggttgggaatcgaaggtgaatgcgtgatgtggatccatgcttctctagttaatgttgctttagaactattcttcactgaataataagaatgcacgagtatgtgtgtgttcttgtttttgttagagttggttatcaataatgatgcgataaagcagcatatctttttttgataatatacacctcttattcaatttggtattacag

SEQ ID NO: 106003 - protein, 213 aa, Arabidopsis thaliana; identical to SEQ ID NO: 23177
  peptide (1)..(213): Ceres Seq. ID no. 13618531

SEQ ID NO: 106004 - DNA, 818 bp, Arabidopsis thaliana
  misc_feature (1)..(818): Ceres Seq. ID no. 13618553
  misc_feature (1)..(818): Ortholog of  Ceres SEQ ID NO 15226744 as cited in SEQ ID NO 61720
gaaaaagtgtgagtcagagaataatgattcgagcggttctcctgttccttgtcttcgtcgttgagacgagagtacaagcgcagctagtgccgccggtgaggcaagatggtttcgtttacccaccgggtcatcgtttcgacccggatactatactaattgaggcgtattttgacccggtttgcccggacagtagagactcttggccgccactgaagcaagctcttcatcactatggatctcgcgttgcccttctcctccatctccttcctttaccctaccatgacaatgcctatgtaacatcacgggccttacacattgtgaataccgtacacgccaatgctaccttcagtttgctggaagggttcttcaagcatcagtcattgttttacaacgcgcaaacacaactcctttcaagacctgcagttgtggagaaaatagtcgaacttggaacagtctcgttggggaactcatatcaatcggttcttaaatccggcttcagcgacaaaaaatcggatcgtgcaaccagagtttccttcaagtatagcgcttcaagaggggtttatggtacaccaaccttctacgttaacgggtttgtattgtctgatgctgcttccccttcaaattttggaggatggaagaaaatcattgatcctctggttcaagcacatgagatggaagataacttcattcccttcctttgaagattttaagtgcttttgctgtgtcaattgtcatggtataatactatctgtaatgtatagactttctcaaaacctgtatgttgctcattgtaaatttgtaataaaggaaagtgatcc

SEQ ID NO: 106005 - protein, 232 aa, Arabidopsis thaliana
  peptide (1)..(232): Ceres Seq. ID no. 13618554
KSVSQRIMIRAVLLFLVFVVETRVQAQLVPPVRQDGFVYPPGHRFDPDTILIEAYFDPVCPDSRDSWPPLKQALHHYGSRVALLLHLLPLPYHDNAYVTSRALHIVNTVHANATFSLLEGFFKHQSLFYNAQTQLLSRPAVVEKIVELGTVSLGNSYQSVLKSGFSDKKSDRATRVSFKYSASRGVYGTPTFYVNGFVLSDAASPSNFGGWKKIIDPLVQAHEMEDNFIPFL

SEQ ID NO: 106006 - protein, 225 aa, Arabidopsis thaliana
  peptide (1)..(225): Ceres Seq. ID no. 13618555
MIRAVLLFLVFVVETRVQAQLVPPVRQDGFVYPPGHRFDPDTILIEAYFDPVCPDSRDSWPPLKQALHHYGSRVALLLHLLPLPYHDNAYVTSRALHIVNTVHANATFSLLEGFFKHQSLFYNAQTQLLSRPAVVEKIVELGTVSLGNSYQSVLKSGFSDKKSDRATRVSFKYSASRGVYGTPTFYVNGFVLSDAASPSNFGGWKKIIDPLVQAHEMEDNFIPFL

SEQ ID NO: 106007 - DNA, 1112 bp, Arabidopsis thaliana
  misc_feature (1)..(1112): Ceres Seq. ID no. 13618564
  misc_feature (1)..(1112): Ortholog of  Ceres SEQ ID NO 15179996 as cited in SEQ ID NO 0
attttaaaacatctatccacattaaatcattcactgatctctaaccaatcccacacacactaccacaaacaatggccaccgtcgctaacttcttagccaaaccaatctccaccgtagtcccacggccatcctccgccgttgcttcgacctcctccttcgtattctttaaccataaaactaatcctctgttccggaggaaaaacctcccgaaaagattattctccgccgtgaaaataaaggctggagcggcgtctccgggaaaggtgggtacaccaccggcgaatgacgagaaggtacaaaagattcacagcggagaggaattcgacgtagcgttgaaaaatgcgaagagcaaactcgtggttgcagagtttgctacgagtaagagtgatcagagtaataagatatatccgtttatggtggaactgagcaggacctgtaacgacgtcgttttcttgctcgtcatgggtgatgaatctgacaagaccagagaactctgtcggagagagaagattgagaaagttcctcactttagcttttataagagcatggagaaaatacacgaggaagaaggtattgaaccggaccagttaatgggagacgttctatactacggagacaaccactctgcggtggtgcagctgcacggccgacctgacgtggaaaagctgatcgacgagaatcgcactggaggcaagctgatcgtgcttgacgttggtctaaaacattgtggtccttgcgttaaagtgtatccgaccgtgctgaaactgtcccggtcaatgtccgagacagtcgtattcgctagaatgaacggtgacgagaacgatagttgtatggagtttctcaaggacatgaatgttatcgaagttccaactttcttgttcattagagacggcgagattcgtggccgttatgttggttccggtaaaggagaactcattggagagattcttcggtactcaggcgttcgtgtcacttattaatttgtatcaaaactttaattttattacatctcacttcaaaaaagaatgagtttttggtctttgtctgtaccatccgaaaccggttgatatgaaagaaaaaaaactcaaaatagtgtgattcttgattatttg

SEQ ID NO: 106008 - protein, 302 aa, Arabidopsis thaliana
  peptide (1)..(302): Ceres Seq. ID no. 13618565
MATVANFLAKPISTVVPRPSSAVASTSSFVFFNHKTNPLFRRKNLPKRLFSAVKIKAGAASPGKVGTPPANDEKVQKIHSGEEFDVALKNAKSKLVVAEFATSKSDQSNKIYPFMVELSRTCNDVVFLLVMGDESDKTRELCRREKIEKVPHFSFYKSMEKIHEEEGIEPDQLMGDVLYYGDNHSAVVQLHGRPDVEKLIDENRTGGKLIVLDVGLKHCGPCVKVYPTVLKLSRSMSETVVFARMNGDENDSCMEFLKDMNVIEVPTFLFIRDGEIRGRYVGSGKGELIGEILRYSGVRVTY

SEQ ID NO: 106009 - protein, 188 aa, Arabidopsis thaliana
  peptide (1)..(188): Ceres Seq. ID no. 13618566
MVELSRTCNDVVFLLVMGDESDKTRELCRREKIEKVPHFSFYKSMEKIHEEEGIEPDQLMGDVLYYGDNHSAVVQLHGRPDVEKLIDENRTGGKLIVLDVGLKHCGPCVKVYPTVLKLSRSMSETVVFARMNGDENDSCMEFLKDMNVIEVPTFLFIRDGEIRGRYVGSGKGELIGEILRYSGVRVTY

SEQ ID NO: 106010 - protein, 172 aa, Arabidopsis thaliana
  peptide (1)..(172): Ceres Seq. ID no. 13618567
MGDESDKTRELCRREKIEKVPHFSFYKSMEKIHEEEGIEPDQLMGDVLYYGDNHSAVVQLHGRPDVEKLIDENRTGGKLIVLDVGLKHCGPCVKVYPTVLKLSRSMSETVVFARMNGDENDSCMEFLKDMNVIEVPTFLFIRDGEIRGRYVGSGKGELIGEILRYSGVRVTY

SEQ ID NO: 106011 - DNA, 1240 bp, Arabidopsis thaliana
  misc_feature (1)..(1240): Ceres Seq. ID no. 13618572
  misc_feature (1)..(1240): Ortholog of  Ceres SEQ ID NO 13597854 as cited in SEQ ID NO 64292
caggtgggacacggaagctgagctctaatcctgatcggagatggcgactagcgattctgaattcaattctgatcttcttctcgctcacaagcttcccgagacgcgttacacctacaatgaaagagatgtagcaatctatgctttgggaatcggcgcttgtggccaagatgctgtggattccgatgagctcaagtttgtgtatcacagaaatgggcaggatttgatccaggtcttaccaacttttgcttcactattcacacttggatctttgacagaaggactggatttgccaggttttaaatatgatcctagtctcttgttgcatgggcagcagtatattgaaatatacaggccattaccttccaaggcttccttaattaacaaagtaagcctcgctggtttgcaagataaaggtaaagcagctatccttgaattagaaaccagaagttacgaggaagggtcaggggaactgttatgcatgaataggacgactgttttcctaagaggtgctggtggtttctcaaattcatctcaaccattctcttacaaaaactatccaagtaaccagggcttagctgtgaaaatcccacaaagacaacctttgacagtgtgcgaagagcgcactcagccatcgcaggcattactttataggctgtctggtgactataatcctctgcattcagatccagaatttgcaaaacttgccggattcccacgcccgatattgcatgggctatgcacactcgggtttgcaatcaaggcaatcatcaagtgtgtttgcaagggtgacccaactgctgtcaaaaccatatctggacgattcctcacgactgtttttcctggcgaaactctgataaccgaaatgtggcttgaaggcttgagggttatatatcagacgaaagtgaaggaaaggaacaaaactgtgttagctggttatgttgatattcgtgggttatcttcgtcactttagaatgttaggtccttagatatattgggctgtcataatattgcaaaggtaataaacatgtcagaagactcttgatgtttgcttggcgtaatgagccattgagccatcaataaacactctttgatgacggtcacaatttactgaaatggttagttgtatcgtgttactgttgtaataaatgttgagtgacgcaaaatgcacatgccggatgaagcaaaatgcattgaagaaaatcctttttgggtgtcaatgaactggaacataaagcctgag

SEQ ID NO: 106012 - protein, 309 aa, Arabidopsis thaliana; identical to SEQ ID NO: 39716
  peptide (1)..(309): Ceres Seq. ID no. 13618573

SEQ ID NO: 106013 - protein, 163 aa, Arabidopsis thaliana; identical to SEQ ID NO: 39717
  peptide (1)..(163): Ceres Seq. ID no. 13618574

SEQ ID NO: 106014 - DNA, 1933 bp, Arabidopsis thaliana
  misc_feature (1)..(1933): Ceres Seq. ID no. 13618575
  misc_feature (1)..(1933): Ortholog of  Ceres SEQ ID NO 14313167 as cited in SEQ ID NO 54354
agagttagagagagagagaccacgccagatatacctttcttgtttcaccggttttcatacacaaaaatggcgggcagtgcctcattcgccgccgcattattcatcggactctctcttctcttcgccgtcacggctgaagatccgtacagattctttgaatggaacataacttacggcgatatatacccactcggtgttcgccaacagggtattttgatcaacggggcgtttccgggaccggacattcattcggttactaatgacaatctcatcatcaacgtctacaatagcctcgacgaacctttccttctttcatggaatggaattcaacagaggaggaactctttcgttgatggagtgtatggaacgacatgcccaatcccgccggggaagaactacacttacattcttcagatgaaggatcagatcggaagtttttactacttcccttctctcggctttcacaaagccgccggtggatttggtggcattcgtatcctcagtcgtcctagaatcccggtccctttccctgatcccgccggagataccactgtccttatcggagactggtacaaagcaaaccacacggatttgagagcacagcttgataatggtaagaagcttcctttaccagacggcatcctcatcaatggtcgttcaagtggtgcaactcttaatgttgaacaaggtaagacatacaggtttagaatatccaatgtagggttacaagactctctcaacttccgcattcaagaccataagatgaaagtggtggaagtcgaaggaacacacactcttcagactactttctcttcactagatgttcatgttggacaatcttactcagtccttgtaaccgcggaccagactccacgggattattacgtggtcgtctcttctcggtttacctcaaatgtccttactaccacgggtattttccgatacagtaattctgctggtggtgtttctggacctattcctggtggacctaccattcaaatcgactggtccttgaaccaggctcgagccatcaggactaacctttcagcgagcggaccaaggccaaatccacaaggatcgtaccactacggtatgataaacactacaagaacgatcagacttgctagctctgctggtcaggttgatgggaagcaacgatacgctgtgaacagtgtctcattcaaacccgcagacactcctctgaaaatcgcggactacttcaagattgacggtgtttacagaagtggaagcatacagtaccaacccactggtggaggaatatacctcgacacatctgttatgcaagttgattacagaacctttgtggagattattttcgaaaattctgaggatattgtccagagctggcatcttgatggttactctttctgggttgttggaatggatggtggacagtggagtccagatagtaggaacgagtataacctacgcgatgcagtcgctcgctgcaccgttcaggtatacccaagctcatggacggctatattgatagcactcgacaacgtaggaatgtggaatctaagatccgagttctgggcgaggcaatacttaggacaacaattgtatttacgtgtgtacacaccctcaacttctctcagagatgaatatccaatccccaagaacgctcttctctgcgggagagccagtggtcgcagcaccagaccgctttgagctggtggttagatatagaaatgacggagagatggtcagccaaaccagctgacgcgttcttgaggcgggtttcttgttttatacacattcttcattttgctaatgaatgagaagagtttatgttaaaatcagtatatcagtttgtaacgatctcagctcgaggtctcattcttgattcttatattctttctttttctatggaacgaaacatttattcaatataattccacagtttcatcgt

SEQ ID NO: 106015 - protein, 563 aa, Arabidopsis thaliana
  peptide (1)..(563): Ceres Seq. ID no. 13618576
RVRERETTPDIPFLFHRFSYTKMAGSASFAAALFIGLSLLFAVTAEDPYRFFEWNITYGDIYPLGVRQQGILINGAFPGPDIHSVTNDNLIINVYNSLDEPFLLSWNGIQQRRNSFVDGVYGTTCPIPPGKNYTYILQMKDQIGSFYYFPSLGFHKAAGGFGGIRILSRPRIPVPFPDPAGDTTVLIGDWYKANHTDLRAQLDNGKKLPLPDGILINGRSSGATLNVEQGKTYRFRISNVGLQDSLNFRIQDHKMKVVEVEGTHTLQTTFSSLDVHVGQSYSVLVTADQTPRDYYVVVSSRFTSNVLTTTGIFRYSNSAGGVSGPIPGGPTIQIDWSLNQARAIRTNLSASGPRPNPQGSYHYGMINTTRTIRLASSAGQVDGKQRYAVNSVSFKPADTPLKIADYFKIDGVYRSGSIQYQPTGGGIYLDTSVMQVDYRTFVEIIFENSEDIVQSWHLDGYSFWVVGMDGGQWSPDSRNEYNLRDAVARCTVQVYPSSWTAILIALDNVGMWNLRSEFWARQYLGQQLYLRVYTPSTSLRDEYPIPKNALLCGRASGRSTRPL

SEQ ID NO: 106016 - protein, 541 aa, Arabidopsis thaliana
  peptide (1)..(541): Ceres Seq. ID no. 13618577
MAGSASFAAALFIGLSLLFAVTAEDPYRFFEWNITYGDIYPLGVRQQGILINGAFPGPDIHSVTNDNLIINVYNSLDEPFLLSWNGIQQRRNSFVDGVYGTTCPIPPGKNYTYILQMKDQIGSFYYFPSLGFHKAAGGFGGIRILSRPRIPVPFPDPAGDTTVLIGDWYKANHTDLRAQLDNGKKLPLPDGILINGRSSGATLNVEQGKTYRFRISNVGLQDSLNFRIQDHKMKVVEVEGTHTLQTTFSSLDVHVGQSYSVLVTADQTPRDYYVVVSSRFTSNVLTTTGIFRYSNSAGGVSGPIPGGPTIQIDWSLNQARAIRTNLSASGPRPNPQGSYHYGMINTTRTIRLASSAGQVDGKQRYAVNSVSFKPADTPLKIADYFKIDGVYRSGSIQYQPTGGGIYLDTSVMQVDYRTFVEIIFENSEDIVQSWHLDGYSFWVVGMDGGQWSPDSRNEYNLRDAVARCTVQVYPSSWTAILIALDNVGMWNLRSEFWARQYLGQQLYLRVYTPSTSLRDEYPIPKNALLCGRASGRSTRPL

SEQ ID NO: 106017 - protein, 425 aa, Arabidopsis thaliana
  peptide (1)..(425): Ceres Seq. ID no. 13618578
MKDQIGSFYYFPSLGFHKAAGGFGGIRILSRPRIPVPFPDPAGDTTVLIGDWYKANHTDLRAQLDNGKKLPLPDGILINGRSSGATLNVEQGKTYRFRISNVGLQDSLNFRIQDHKMKVVEVEGTHTLQTTFSSLDVHVGQSYSVLVTADQTPRDYYVVVSSRFTSNVLTTTGIFRYSNSAGGVSGPIPGGPTIQIDWSLNQARAIRTNLSASGPRPNPQGSYHYGMINTTRTIRLASSAGQVDGKQRYAVNSVSFKPADTPLKIADYFKIDGVYRSGSIQYQPTGGGIYLDTSVMQVDYRTFVEIIFENSEDIVQSWHLDGYSFWVVGMDGGQWSPDSRNEYNLRDAVARCTVQVYPSSWTAILIALDNVGMWNLRSEFWARQYLGQQLYLRVYTPSTSLRDEYPIPKNALLCGRASGRSTRPL

SEQ ID NO: 106018 - DNA, 1658 bp, Arabidopsis thaliana
  misc_feature (1)..(1658): Ceres Seq. ID no. 13618587
  misc_feature (1)..(1658): Ortholog of  Ceres SEQ ID NO 15172476 as cited in SEQ ID NO 54945
  misc_feature (1)..(1658): Ortholog of  Ceres SEQ ID NO 13654989 as cited in SEQ ID NO 63117
  misc_feature (1)..(1658): Ortholog of  Ceres SEQ ID NO 13584744 as cited in SEQ ID NO 69137
atgggaaacatctgtcctggctctggatcttccactgttaaccacgaacctgtctccaccaaacccctcccagtgagacgtgtgcagaccccagagaataaaaagtttcctccgccgctggtggcgatgccggcgttacatcccacgtttccactgccggaaacaggacataaactgagacccgccgctaccccgcctcgtgaaaaaccgcaacataggacgacgagatccgtcgagaacccacctcgtgaaaaaccgcaggagaagacaagatccgtcgagaacccgcctcgtgaaaaaccgcaggagaaaacaagatccgttgaaaccccacctcaggagaagacgagacccgtcgataatccgccgtcaaagccggtagaaaaattgggtttaggaaggaaagcagtgccaccgagtgggaagatagtgacacctaatctaaagatgtttacattagtggagcttaagacggctacaaagaactttcgaccagaatctgtgatcggagaaggtggattcggacaggtttttaaaggatgggtggatgagaaaacattagctccgtcgagagctggcgtcggaataccagtcgccgtcaagaaatcaaaccctgatagtgagcaaggcttacatgaatggcagtgtgaagtgagattcttagggaagtttcatcatccaaatttggtgaagctcttgggttattgctgggaagagaaccagttccttttggtctatgagtatttgcctaaaggaagccttgaaaatcacctcttctcaaaaggagcagaggcattaccttgggatacacgtttgaagatagccattgaagcagctcaaggacttacctttttgcataactccgagaagagtgttatctatagagacttcaaagcttccaatattcttctcgattccaacttccacgccaagctttcagacttcggactagctaaaaatgggcccattaatggattctcacacgtgaccacacgtgtcatgggcacacaaggctatgcagctcccgagtacatggctacaggtcatctatatgtgaggagtgatgtttacgggtttggagtggtactcttagagctcttaaccggtttaagagcattagacccaaaccgaccatctgcgcaacaaaatcttgtggaatgggctaaaccggggttgaaccagaagaagaaggttcagaaaatgatggatccacggctcgagcagaagtatccacttttggcggtgaccaaaaccgcggagctcattcttcggtgtctggaggctgacccgaaaaaccgaccgccaatggatgatgtgcttagagaattagaagtcgtaaggactatcagagaccaaccccaagaagagaggcgtaaaaggagcagtggtccagatactaaccgggttcgtggaaatgattcaccatatggccgtagaaccggtcgaaccggatagtcaaagagttcttttggatcagtcatacgtatattacacagtatatacagacgaacaacctttaaagaaaaaaaaatgtaatactttttctctggtagtgaatatatgttattaatttctagacctagtgaaatatttgttgtacacttcaaaataaagccataatttattggaagacatgtaaataaaaattgtgtatctac

SEQ ID NO: 106019 - protein, 484 aa, Arabidopsis thaliana
  peptide (1)..(484): Ceres Seq. ID no. 13618588
MGNICPGSGSSTVNHEPVSTKPLPVRRVQTPENKKFPPPLVAMPALHPTFPLPETGHKLRPAATPPREKPQHRTTRSVENPPREKPQEKTRSVENPPREKPQEKTRSVETPPQEKTRPVDNPPSKPVEKLGLGRKAVPPSGKIVTPNLKMFTLVELKTATKNFRPESVIGEGGFGQVFKGWVDEKTLAPSRAGVGIPVAVKKSNPDSEQGLHEWQCEVRFLGKFHHPNLVKLLGYCWEENQFLLVYEYLPKGSLENHLFSKGAEALPWDTRLKIAIEAAQGLTFLHNSEKSVIYRDFKASNILLDSNFHAKLSDFGLAKNGPINGFSHVTTRVMGTQGYAAPEYMATGHLYVRSDVYGFGVVLLELLTGLRALDPNRPSAQQNLVEWAKPGLNQKKKVQKMMDPRLEQKYPLLAVTKTAELILRCLEADPKNRPPMDDVLRELEVVRTIRDQPQEERRKRSSGPDTNRVRGNDSPYGRRTGRTG

SEQ ID NO: 106020 - protein, 442 aa, Arabidopsis thaliana
  peptide (1)..(442): Ceres Seq. ID no. 13618589
MPALHPTFPLPETGHKLRPAATPPREKPQHRTTRSVENPPREKPQEKTRSVENPPREKPQEKTRSVETPPQEKTRPVDNPPSKPVEKLGLGRKAVPPSGKIVTPNLKMFTLVELKTATKNFRPESVIGEGGFGQVFKGWVDEKTLAPSRAGVGIPVAVKKSNPDSEQGLHEWQCEVRFLGKFHHPNLVKLLGYCWEENQFLLVYEYLPKGSLENHLFSKGAEALPWDTRLKIAIEAAQGLTFLHNSEKSVIYRDFKASNILLDSNFHAKLSDFGLAKNGPINGFSHVTTRVMGTQGYAAPEYMATGHLYVRSDVYGFGVVLLELLTGLRALDPNRPSAQQNLVEWAKPGLNQKKKVQKMMDPRLEQKYPLLAVTKTAELILRCLEADPKNRPPMDDVLRELEVVRTIRDQPQEERRKRSSGPDTNRVRGNDSPYGRRTGRTG

SEQ ID NO: 106021 - protein, 335 aa, Arabidopsis thaliana
  peptide (1)..(335): Ceres Seq. ID no. 13618590
MFTLVELKTATKNFRPESVIGEGGFGQVFKGWVDEKTLAPSRAGVGIPVAVKKSNPDSEQGLHEWQCEVRFLGKFHHPNLVKLLGYCWEENQFLLVYEYLPKGSLENHLFSKGAEALPWDTRLKIAIEAAQGLTFLHNSEKSVIYRDFKASNILLDSNFHAKLSDFGLAKNGPINGFSHVTTRVMGTQGYAAPEYMATGHLYVRSDVYGFGVVLLELLTGLRALDPNRPSAQQNLVEWAKPGLNQKKKVQKMMDPRLEQKYPLLAVTKTAELILRCLEADPKNRPPMDDVLRELEVVRTIRDQPQEERRKRSSGPDTNRVRGNDSPYGRRTGRTG

SEQ ID NO: 106022 - DNA, 986 bp, Arabidopsis thaliana
  misc_feature (1)..(986): Ceres Seq. ID no. 13618591
  misc_feature (1)..(986): Ortholog of  Ceres SEQ ID NO 12608620 as cited in SEQ ID NO 60192
  misc_feature (1)..(986): Ortholog of  Ceres SEQ ID NO 15173077 as cited in SEQ ID NO 64566
  misc_feature (1)..(986): Ortholog of  Ceres SEQ ID NO 13662898 as cited in SEQ ID NO 66199
  misc_feature (1)..(986): Ortholog of  Ceres SEQ ID NO 13654314 as cited in SEQ ID NO 67914
aacataccgaattacatatatatctcgctcgctctcttctttgttcttgctccttgttctagttcggatttttcttttgaagtgaaatggttaacgctacagttgcgagaaacattgccggcatttgtggaaatgtcatctccttgttcttgttcttatctcccatacctacgttcataaccatatacaagaagaaaaaggtggaggagtacaaagctgacccatacttagccacggttctaaattgcgcactatgggtcttttatggcttaccaatggttcaaccagatagtctccttgtgatcaccataaatggtaccggtttagccattgagctggtgtatctcgctatcttcttcttcttttctccaactagtcgcaaggtgaaagtggggctatggttaataggagagatggtgtttgtaggaatagtagccacatgcacattgctattgttccacacacataaccagagatcttcttttgttggaatcttttgtgtcatttttgttagtctcatgtatattgctcctctcaccatcatgagtaaggtgatcaagaccaaaagtgtgaagtacatgccattctctctctcacttgccaatttcctcaatggtgtcgtttgggttatttatgcacttattaagttcgaccttttcattttgattggaaatggacttggaacggtatcaggagcagtacaacttatactctatgcttgctattacaagacaacaccaaaagatgatgaagatgaagaagatgaggagaatctttctaaggttaactctcagttacaacttagtggcaacagtggacaagctaaacgagtttcagcttgattatatgtttggattcatgagatatgaatttagttttatgtttttttttaagcttttggctgatttaactttaagtaactctattattttcgcgtttcctttttgtaaaatgcaaactctttttcttctatgaaagatattaac

SEQ ID NO: 106023 - protein, 251 aa, Arabidopsis thaliana; identical to SEQ ID NO: 35363
  peptide (1)..(251): Ceres Seq. ID no. 13618592

SEQ ID NO: 106024 - protein, 188 aa, Arabidopsis thaliana; identical to SEQ ID NO: 35364
  peptide (1)..(188): Ceres Seq. ID no. 13618593

SEQ ID NO: 106025 - protein, 142 aa, Arabidopsis thaliana; identical to SEQ ID NO: 35365
  peptide (1)..(142): Ceres Seq. ID no. 13618594

SEQ ID NO: 106026 - DNA, 1283 bp, Arabidopsis thaliana
  misc_feature (1)..(1283): Ceres Seq. ID no. 13618595
  misc_feature (1)..(1283): Ortholog of  Ceres SEQ ID NO 13639645 as cited in SEQ ID NO 57488
accatttccaatggccggagcagtaagcctttggcggagagaggccgtgttcttgacggcgatgctggcaggcgaaaccagcatcgtcggactaagtactctgtttaaggtagcaacttcaaagggactcaacatttaccctttcctcagctattcttatcttcttgcttctcttctccttcttccttctctgttcttcaccaacaggtcaagatcacttcctccactaagtgcctcaatactctctaagattggacttcttggctttctaggatcaatgtatgttattacaggaggcataggcatcgaatacagcaacccaaccttagcctccgccataggcaatattgttcctgctcttaccttcatcctcgctgttatcttcaggatggagaaagtatcattcaaagaaaggagcagtgtagccaaagtgatggggacgatactgtcactaataggcgcatttgtggtgattttctaccacggtccacgtgtctttgtcgcatcttctccaccatatctaaacttccgtcagctttctccaccgttgtcatcgtcaaagtctgattggctcatcggaggagctattcttaccatacaaggcatcttcgtttctgtttcttttattctccagacacatataatgagagaatatcctgaagcattcacagtctccattctctacattctatgtatttcaatcgtgacctcaatgattggactagtagtcgaaaagaacaacccaagcatttggatcattcatttcgatattacattgtttacaattgttactacgggaataataacttcagtatactatgtgattcattcatgggcaatacgtcacaaaagacctctatacttagcgatatttaagcctctgtctattttgatagcagtggttatggggaccatttttctcaacgattctctctatctcggatgtttgattggaggaattttgataacattaggcttttatgttgtgatgtggggcaaagcaaacgaagagaagaacaagttgttatcattttcaggaaaagagaaaacccctcttctattgagcggcaaaaacgaccaaatttaaatgaaaaaaaatttataatcaaaggagttacaaactctgaaatagtctcttatatacatagcgtgcaaactattagtgtatactgtgtattgctttgtatataacttagaaaatgactatctaattgttttttaagttacgggtacgtaacgactatctaaattcgttagatcacgacatctaacgaattttggtc

SEQ ID NO: 106027 - protein, 361 aa, Arabidopsis thaliana
  peptide (1)..(361): Ceres Seq. ID no. 13618596
PFPMAGAVSLWRREAVFLTAMLAGETSIVGLSTLFKVATSKGLNIYPFLSYSYLLASLLLLPSLFFTNRSRSLPPLSASILSKIGLLGFLGSMYVITGGIGIEYSNPTLASAIGNIVPALTFILAVIFRMEKVSFKERSSVAKVMGTILSLIGAFVVIFYHGPRVFVASSPPYLNFRQLSPPLSSSKSDWLIGGAILTIQGIFVSVSFILQTHIMREYPEAFTVSILYILCISIVTSMIGLVVEKNNPSIWIIHFDITLFTIVTTGIITSVYYVIHSWAIRHKRPLYLAIFKPLSILIAVVMGTIFLNDSLYLGCLIGGILITLGFYVVMWGKANEEKNKLLSFSGKEKTPLLLSGKNDQI

SEQ ID NO: 106028 - protein, 358 aa, Arabidopsis thaliana
  peptide (1)..(358): Ceres Seq. ID no. 13618597
MAGAVSLWRREAVFLTAMLAGETSIVGLSTLFKVATSKGLNIYPFLSYSYLLASLLLLPSLFFTNRSRSLPPLSASILSKIGLLGFLGSMYVITGGIGIEYSNPTLASAIGNIVPALTFILAVIFRMEKVSFKERSSVAKVMGTILSLIGAFVVIFYHGPRVFVASSPPYLNFRQLSPPLSSSKSDWLIGGAILTIQGIFVSVSFILQTHIMREYPEAFTVSILYILCISIVTSMIGLVVEKNNPSIWIIHFDITLFTIVTTGIITSVYYVIHSWAIRHKRPLYLAIFKPLSILIAVVMGTIFLNDSLYLGCLIGGILITLGFYVVMWGKANEEKNKLLSFSGKEKTPLLLSGKNDQI

SEQ ID NO: 106029 - protein, 341 aa, Arabidopsis thaliana
  peptide (1)..(341): Ceres Seq. ID no. 13618598
MLAGETSIVGLSTLFKVATSKGLNIYPFLSYSYLLASLLLLPSLFFTNRSRSLPPLSASILSKIGLLGFLGSMYVITGGIGIEYSNPTLASAIGNIVPALTFILAVIFRMEKVSFKERSSVAKVMGTILSLIGAFVVIFYHGPRVFVASSPPYLNFRQLSPPLSSSKSDWLIGGAILTIQGIFVSVSFILQTHIMREYPEAFTVSILYILCISIVTSMIGLVVEKNNPSIWIIHFDITLFTIVTTGIITSVYYVIHSWAIRHKRPLYLAIFKPLSILIAVVMGTIFLNDSLYLGCLIGGILITLGFYVVMWGKANEEKNKLLSFSGKEKTPLLLSGKNDQI

SEQ ID NO: 106030 - DNA, 1108 bp, Arabidopsis thaliana
  misc_feature (1)..(1108): Ceres Seq. ID no. 13618602
  misc_feature (1)..(1108): Ortholog of  Ceres SEQ ID NO 13581579 as cited in SEQ ID NO 58361
  misc_feature (1)..(1108): Ortholog of  Ceres SEQ ID NO 13596474 as cited in SEQ ID NO 62169
  misc_feature (1)..(1108): Ortholog of  Ceres SEQ ID NO 13598714 as cited in SEQ ID NO 62656
  misc_feature (1)..(1108): Ortholog of  Ceres SEQ ID NO 13597519 as cited in SEQ ID NO 64759
  misc_feature (1)..(1108): Ortholog of  Ceres SEQ ID NO 13597870 as cited in SEQ ID NO 64982
  misc_feature (1)..(1108): Ortholog of  Ceres SEQ ID NO 13595926 as cited in SEQ ID NO 67778
  misc_feature (1)..(1108): Ortholog of  Ceres SEQ ID NO 12567001 as cited in SEQ ID NO 0
tctctctctctctctcttctcaacaatggcttcactcaaatctctcttcctcctcttcctcttcttcttcacagctcaatctcgcttaaccacaaacttctactcaaaaacatgcccaagattcctcgacatcatccgtgacacaatcacaaacaaacaaatcactaatcccaccaccgcagccgccgttatccgtctcttcttccacgactgtttccctaacggctgcgacgcctccgtcctcatctcctccaccgccttcaacaccgcagaacgtgactcttccatcaacctctcactccccggagacggtttcgacgtcattgtccgagccaaaacagctctcgaactcgcttgtcccaacacagtttcttgctcagacatcatctccgtcgcaacacgtgatcttctaatcaccgtcggtggtccttactacgacgttttcctcggccgtcgtgattcaagaacgtcgaaatcttctcttttaaccgatcttcttcctcttccttccacaccaatctctaaaatcattcaacagtttgaatcaaaaggtttcactgttcaagaaatggttgctcttagtggagcacattctatagggttttcacattgtaaagagtttgtgggtcgggtgggtcggaataataccgggtataacccgagattcgcagtggctttgaagaaagcttgtgctaattaccctaaagatccgactatctctgtgtttaatgatattatgactcctaataagtttgataatatgtattatcagaatcttaaaaagggtcttgggttacttgaatcggatcatggattatattctgaccctagaaccagatattttgttgatctttatgctaagaatcaagatctgtttttcaaagattttgctaaagctatgcagaagttgagtctttttggtatacagactggtagaagaggagagatccgaagaaggtgcgatgctattaattgagtttatgtttttaatttatttaatttttgggttatattggattgtgaatcttctgagttattacactcatatgtttttgtgtaatgtaaaagatatatggttgattgttctaattaagagattggttttggt

SEQ ID NO: 106031 - protein, 324 aa, Arabidopsis thaliana
  peptide (1)..(324): Ceres Seq. ID no. 13618603
LSLSLFSTMASLKSLFLLFLFFFTAQSRLTTNFYSKTCPRFLDIIRDTITNKQITNPTTAAAVIRLFFHDCFPNGCDASVLISSTAFNTAERDSSINLSLPGDGFDVIVRAKTALELACPNTVSCSDIISVATRDLLITVGGPYYDVFLGRRDSRTSKSSLLTDLLPLPSTPISKIIQQFESKGFTVQEMVALSGAHSIGFSHCKEFVGRVGRNNTGYNPRFAVALKKACANYPKDPTISVFNDIMTPNKFDNMYYQNLKKGLGLLESDHGLYSDPRTRYFVDLYAKNQDLFFKDFAKAMQKLSLFGIQTGRRGEIRRRCDAIN

SEQ ID NO: 106032 - protein, 316 aa, Arabidopsis thaliana; identical to SEQ ID NO: 30085
  peptide (1)..(316): Ceres Seq. ID no. 13618604

SEQ ID NO: 106033 - DNA, 1181 bp, Arabidopsis thaliana
  misc_feature (1)..(1181): Ceres Seq. ID no. 13618615
  misc_feature (1)..(1181): Ortholog of  Ceres SEQ ID NO 13639124 as cited in SEQ ID NO 56718
  misc_feature (1)..(1181): Ortholog of  Ceres SEQ ID NO 13596474 as cited in SEQ ID NO 62169
  misc_feature (1)..(1181): Ortholog of  Ceres SEQ ID NO 13598714 as cited in SEQ ID NO 62656
  misc_feature (1)..(1181): Ortholog of  Ceres SEQ ID NO 13596969 as cited in SEQ ID NO 63375
  misc_feature (1)..(1181): Ortholog of  Ceres SEQ ID NO 14302240 as cited in SEQ ID NO 64162
  misc_feature (1)..(1181): Ortholog of  Ceres SEQ ID NO 13584480 as cited in SEQ ID NO 64751
  misc_feature (1)..(1181): Ortholog of  Ceres SEQ ID NO 13597519 as cited in SEQ ID NO 64759
  misc_feature (1)..(1181): Ortholog of  Ceres SEQ ID NO 13595926 as cited in SEQ ID NO 67778
  misc_feature (1)..(1181): Ortholog of  Ceres SEQ ID NO 13596362 as cited in SEQ ID NO 67877
  misc_feature (1)..(1181): Ortholog of  Ceres SEQ ID NO 13587054 as cited in SEQ ID NO 0
atcttaattatactgatctttatcatgttgactagatttaagaaacaaaataataagatggttagggcaaatatagtgagcatggttctgttgatgcatgccatcgttgggtttccttttcatgcgaggggattaagtatgacttactacatgatgagctgtcctttcgctgaacagattgtgaagaacagtgttaacaatgctcttcaagccgatcccactttagccgctggtcttatccgtatgttgttccacgactgtttcatcgagggatgtgatgcgtcaattctgctagattcaacgaaagacaacactgcggaaaaggattcgcctgcgaatctgagtctacgtggctacgagatcatcgatgatgcaaaggagaaaatcgagaatagatgtccaggagttgtatcatgcgcagatatagttgccatggctgctagagatgctgtcttttgggctggtggtccatattatgacataccgaaaggaaggtttgatggtaaaagatcaaagatagaagatacaagaaatctaccttcaccttttcttaatgcctctcaactcattcaaacttttggccaacgtggtttcactccacaagatgttgttgctctctctggagcacataccctaggagttgcacgatgctcctccttcaaggctagacttaccgtcccagactcttcattagactcgacttttgcaaacactctctctaaaacatgcagcgcgggtgacaatgcagagcaaccctttgatgctacgcgcaacgatttcgacaatgcttacttcaatgcgcttcagatgaaatcaggagtcctcttttcagaccaaactttattcaacacaccaaggaccaggaatcttgttaacggctatgcacttaaccaagccaagttcttctttgatttccaacaggccatgcgcaagatgagcaatcttgatgttaaacttggctctcaaggtgaagtccgtcaaaattgtcggagtattaattaggctagaccacatctacttacgatttttgtatttataataagttctctactcttgttatatgaagaatcatgaatcttctaggctactatgtaaaaattgtgtactctcgtaatatgcagttgtatacttattgcttgtgtggttcagatatccatcaaaaagtaatatactttggttgc

SEQ ID NO: 106034 - protein, 333 aa, Arabidopsis thaliana
  peptide (1)..(333): Ceres Seq. ID no. 13618616
ILIILIFIMLTRFKKQNNKMVRANIVSMVLLMHAIVGFPFHARGLSMTYYMMSCPFAEQIVKNSVNNALQADPTLAAGLIRMLFHDCFIEGCDASILLDSTKDNTAEKDSPANLSLRGYEIIDDAKEKIENRCPGVVSCADIVAMAARDAVFWAGGPYYDIPKGRFDGKRSKIEDTRNLPSPFLNASQLIQTFGQRGFTPQDVVALSGAHTLGVARCSSFKARLTVPDSSLDSTFANTLSKTCSAGDNAEQPFDATRNDFDNAYFNALQMKSGVLFSDQTLFNTPRTRNLVNGYALNQAKFFFDFQQAMRKMSNLDVKLGSQGEVRQNCRSIN

SEQ ID NO: 106035 - protein, 325 aa, Arabidopsis thaliana
  peptide (1)..(325): Ceres Seq. ID no. 13618617
MLTRFKKQNNKMVRANIVSMVLLMHAIVGFPFHARGLSMTYYMMSCPFAEQIVKNSVNNALQADPTLAAGLIRMLFHDCFIEGCDASILLDSTKDNTAEKDSPANLSLRGYEIIDDAKEKIENRCPGVVSCADIVAMAARDAVFWAGGPYYDIPKGRFDGKRSKIEDTRNLPSPFLNASQLIQTFGQRGFTPQDVVALSGAHTLGVARCSSFKARLTVPDSSLDSTFANTLSKTCSAGDNAEQPFDATRNDFDNAYFNALQMKSGVLFSDQTLFNTPRTRNLVNGYALNQAKFFFDFQQAMRKMSNLDVKLGSQGEVRQNCRSIN

SEQ ID NO: 106036 - protein, 314 aa, Arabidopsis thaliana; identical to SEQ ID NO: 21993
  peptide (1)..(314): Ceres Seq. ID no. 13618618

SEQ ID NO: 106037 - DNA, 1623 bp, Arabidopsis thaliana
  misc_feature (1)..(1623): Ceres Seq. ID no. 13618629
  misc_feature (1)..(1623): Ortholog of  Ceres SEQ ID NO 12784451 as cited in SEQ ID NO 66483
ggaccaaaatcgtccattgaagtgaacagtcagcatcgttttgcttgcttgtgcgtttctctcgaactctctccatggctgttgcgctccaattcagccgattatgcgttcgaccggatactttcgtgcgggagaatcatctctctggatccggatctctccgccgccggaaagctttatcagtccggtgctcgtctggcgatgagaacgctccttcgccatcggtggtgatggactccgatttcgacgccaaggtgttccgtaagaacttgacgagaagcgataattacaatcgtaaagggttcggtcataaggaggagacactcaagctcatgaatcgagagtacaccagtgatatattggagacactgaaaacaaatgggtatacttattcttggggagatgttactgtgaaactcgctaaagcatatggtttttgctggggtgttgagcgtgctgttcagattgcatatgaagcacgaaagcagtttccagaggagaggctttggattactaacgaaatcattcataacccgaccgtcaataagaggttggaagatatggatgttaaaattattccggttgaggattcaaagaaacagtttgatgtagtagagaaagatgatgtggttatccttcctgcgtttggagctggtgttgacgagatgtatgttcttaatgataaaaaggtgcaaattgttgacacgacttgtccttgggtgacaaaggtctggaacacggttgagaagcacaagaagggggaatacacatcagtaatccatggtaaatataatcatgaagagacgattgcaactgcgtcttttgcaggaaagtacatcattgtaaagaacatgaaagaggcaaattacgtttgtgattacattctcggtggccaatacgatggatctagctccacaaaagaggagttcatggagaaattcaaatacgcaatttcgaagggtttcgatcccgacaatgaccttgtcaaagttggtattgcaaaccaaacaacgatgctaaagggagaaacagaggagataggaagattactcgagacaacaatgatgcgcaagtatggagtggaaaatgtaagcggacatttcatcagcttcaacacaatatgcgacgctactcaagagcgacaagacgcaatctatgagctagtggaagagaagattgacctcatgctagtggttggcggatggaattcaagtaacacctctcaccttcaggaaatctcagaggcacggggaatcccatcttactggatcgatagtgagaaacggataggacctgggaataaaatagcctataagctccactatggagaactggtcgagaaggaaaactttctcccaaagggaccaataacaatcggtgtgacatcaggtgcatcaaccccggataaggtcgtggaagatgctttggtgaaggtgttcgacattaaacgtgaagagttattgcagctggcttgattcggcattgtgatcgtattcaaatactatttgtcatgtcaagagtgtactaaaatatatgtagttgtatgatttgtctttataacttttgtaagaggttttgtaattcaaagtcaacatcctcgttatcttactccacttaatgttc

SEQ ID NO: 106038 - protein, 466 aa, Arabidopsis thaliana; identical to SEQ ID NO: 21125
  peptide (1)..(466): Ceres Seq. ID no. 13618630

SEQ ID NO: 106039 - protein, 414 aa, Arabidopsis thaliana; identical to SEQ ID NO: 21126
  peptide (1)..(414): Ceres Seq. ID no. 13618631

SEQ ID NO: 106040 - protein, 380 aa, Arabidopsis thaliana; identical to SEQ ID NO: 21127
  peptide (1)..(380): Ceres Seq. ID no. 13618632

SEQ ID NO: 106041 - DNA, 1311 bp, Arabidopsis thaliana
  misc_feature (1)..(1311): Ceres Seq. ID no. 13618633
  misc_feature (1)..(1311): Ortholog of  Ceres SEQ ID NO 14315440 as cited in SEQ ID NO 57161
cccctcttctctccttctctcccttttctctctctctcgaagatatcgcctttaattccttcttcttcttctgatttcttcaaagattcatttcttagagatctcagcttctgtaagagtaggctagctaccaaaaaaaaagaaatagaaaaaaacattgatgcttaatcagcagttcttggtgtttgagacacatgtctccaataatactcagtgagatctttctctctgggtttatgttaaattccacaatcaggcgcaggacccatcttgttcaatctttctctgttgtcttcctttactggctttactatgtctcatgatctctgaacttatctccagttttatatctatacgcataattacaacaaaaccctagtttcttttcaaatttctcttcttcgtttttcgtcatctgggtcctgtcctgttctgttgtgtcttgttctgttctgtttttaattcccctaaaaacccattttaaaatattttatctctcttctcttaaaaaaaactcttccctgtttttgtttgtgtgttactaaatggaatcgtcgtcgtcgggaacaacttcgtcgacgattcaaacgtcgtcaggatcggaggagagtctcatggagcagaggaaacgtaaacggatgctctcaaaccgtgaatctgcaaggagatcaagaatgaagaaacaaaagctcctagacgatctaacggctcaggttaatcatctgaaaaaagagaacacggagatcgtgacaagtgtcagcatcacaacgcaacactacctaaccgttgaagcagagaactctgttctcagagctcagcttgatgaacttaaccacaggctccaatctctcaacgacatcatcgagttcctcgacagtagcaacaacaacaacaacaacaacatgggcatgtgttcgaaccctctggttggtttggagtgtgatgatttcttcgtgaatcagatgaacatgtcttatattatgaaccagcctctcatggcgtcttctgatgctttaatgtattaaatgtggacctaaaaaccccctcgaaatcacaaagaaatggggccgtttttatttgtccgatttagagacatgtccaaagagagagatttatatataaaaatgggtctgttgtttgatttgtttccatttcaaatttttgtttgtttgggtccgttttaggcgttaggtatctctaagcatcatcgttatgagtgtgtctgtaataaaggctctgttgccgcatgagtacaaagtgttttcttaatattgtaatatgcttattactttctttttattcttaagtact

SEQ ID NO: 106042 - protein, 159 aa, Arabidopsis thaliana; identical to SEQ ID NO: 25285
  peptide (1)..(159): Ceres Seq. ID no. 13618634

SEQ ID NO: 106043 - protein, 136 aa, Arabidopsis thaliana; identical to SEQ ID NO: 25286
  peptide (1)..(136): Ceres Seq. ID no. 13618635

SEQ ID NO: 106044 - protein, 128 aa, Arabidopsis thaliana; identical to SEQ ID NO: 25287
  peptide (1)..(128): Ceres Seq. ID no. 13618636

SEQ ID NO: 106045 - DNA, 1608 bp, Arabidopsis thaliana
  misc_feature (1)..(1608): Ceres Seq. ID no. 13618637
  misc_feature (1)..(1608): Ortholog of  Ceres SEQ ID NO 13592768 as cited in SEQ ID NO 20317
  misc_feature (1)..(1608): Ortholog of  Ceres SEQ ID NO 14303656 as cited in SEQ ID NO 61363
agagaaatttgttctgagctcaacgccatttttgacgatttcgaatctctgtcttctctgagttgttccaagtaatcggagggaactcgtaaagtggaagaataggagaaagagagaaggaagaagatttgtgaatagctcttgatctggtgaagaatggatgcaattagaaaacaagctagcaggttgagagaacaagttgcgagacagcagcaggctgtctttaagcaatttggaggagggggatatggctctggtttagctgatgaagcagaactcaatcagcatcagaagctagaaaagctttacatatccactcgtgctgctaagcattaccaaagagatattgttcgtggtgtggaaggttatatagttacagggtcaaaacaagttgaaataggtacgaaattgtctgaggatagcaggaaatatggttcagagaatacatgtacgaatggtaacgtattaacacgggctgcactgaactatgggcgtgctcgagcacaaatggagaaggaacgtggaaatatgttgaaggctcttggtacacaggttgctgagccattacgggcaatggttttgggagctccattggaggatgctagacatcttgctcaacgctatgacagaatgcgccaagaagctgaagctcaggctacagaagttgccagacgccaagcaaaggcgagagagtctcaaggtaatcctgacatcttgatgaaactggaatctgctgaagcaaaacttcacgacctaaaatcaaatatgacaatattggggaaagaagctgcttctgctttagcttccgttgaagatcaacaacagaaattgactcttgaacgacttctttcaatggttgaatctgaacgcgcctaccatcaaagagtcctccaaatacttgatcagctcgaaggagagatggtatctgagaggcaacgtatagaagctccctctactccctcaagcgcagacagtatgccgccacctccatcatatgaggaagctaatggagtgtttgcatctcagatgcatgacacgtcaacagatagcatgggttacttcttaggagaggtcttgttcccatatcacggtgtgacagatgtcgagctcagcttatcaactggtgaatacgttgttgttagaaaggttacaggcagtggatgggccgaaggtgaatgcaaaggcaaagctggttggttcccttatgggtacattgaaagacgggaacgagttcttgctagcaaagtgtccgaagttttctgagaatttgaaggtaacattatggttctttgttggttatggaattgagttgcttctgtagaagagttgtgtgttctgtagaagaaaaagaaagaaaagattcacgggctaaaacagaagtccatatgcatgaggatcagagttgatgcgggtttctgccatgttctgaatctaatagtgatgccacttgaacaagagttcagtttttaggtattatcttcatattggatttggatattttctttgtcatttgatgtaaacgccacatctctgtttatcttcgtatgtgaatacacttcttttcgggtcttatttgtgattttttgtccaaattactttcatttgata

SEQ ID NO: 106046 - protein, 368 aa, Arabidopsis thaliana; identical to SEQ ID NO: 21997
  peptide (1)..(368): Ceres Seq. ID no. 13618638

SEQ ID NO: 106047 - protein, 251 aa, Arabidopsis thaliana; identical to SEQ ID NO: 21998
  peptide (1)..(251): Ceres Seq. ID no. 13618639

SEQ ID NO: 106048 - protein, 244 aa, Arabidopsis thaliana; identical to SEQ ID NO: 21999
  peptide (1)..(244): Ceres Seq. ID no. 13618640

SEQ ID NO: 106049 - DNA, 1292 bp, Arabidopsis thaliana
  misc_feature (1)..(1292): Ceres Seq. ID no. 13618643
  misc_feature (1)..(1292): Ortholog of  Ceres SEQ ID NO 14311590 as cited in SEQ ID NO 51709
ataacttcatctctcccattctcttcactcttctcaaaaattcgatctttagggtttttcttttatcctcttatcgctaatctggagctctatagagactataaagggtttttgattgattcgggagctcgagatttgacttcttttagctgattcggcaagtttgtatctagaaaggatcgattggtgaggtcaatagtggttggtgggttttagtaatggaagacggtgagcttgatttctccaatcaggaagtgttttcgagttcggagatgggtgaattaccacctagcaattgttcgatggatagtttctttgatgggcttttaatggatactaatgctgcttgtacccacactcacacctgtaaccccactggaccagagaacactcatactcacacgtgcttccatgtccacaccaagattctcccggatgagagcgatgaaaaagtttctactgatgatacagctgagtcttgtgggaagaagggtgaaaagagacctttgggaaaccgggaagcggttagaaagtatagagagaagaagaaggctaaagctgcttctttggaggatgaggttgcaaggcttagggcggtgaatcagcagctggtgaagaggttgcaaaatcaggctaccttggaagctgaggtttcgaggcttaagtgtttgcttgtggatttgagaggaagaatagatggagagattggatcttttccttatcagaaacctatggctgcaaatattccttctttctcgcacatgatgaatccttgtaatgtacaatgtgatgatgaagtttattgccctcagaatgtgtttggagtgaatagccaagaaggtgcctcgatcaatgaccaagggttaagtggttgtgattttgatcagctacaatgcatggctaatcagaacttaaatggaaatggaaacggatcattcagcaacgtcaatacatctgtctcgaataagagaaaaggtgggcatcgtgcatcaagagcagtttgaagcatcatcaagcttgtactatctatttccaccagcatagatattgtattccaaataagttgtagagttcagctgcaggatcagcttcgctcaggttcctttgtatcctcatttttgttttttgttttctgactctctttcccttccattgtatttccttgttgagcttgacaaactagaaggatgatatattgttaatacaacaaactcaaatgttctgtgtgttcttgccatttgttttcatacttgagctgcttcttcttaagtttatgtcgaagaagttgattg

SEQ ID NO: 106050 - protein, 261 aa, Arabidopsis thaliana; identical to SEQ ID NO: 35160
  peptide (1)..(261): Ceres Seq. ID no. 13618644

SEQ ID NO: 106051 - protein, 243 aa, Arabidopsis thaliana; identical to SEQ ID NO: 35161
  peptide (1)..(243): Ceres Seq. ID no. 13618645

SEQ ID NO: 106052 - protein, 233 aa, Arabidopsis thaliana; identical to SEQ ID NO: 35162
  peptide (1)..(233): Ceres Seq. ID no. 13618646

SEQ ID NO: 106053 - DNA, 834 bp, Arabidopsis thaliana
  misc_feature (1)..(834): Ceres Seq. ID no. 13618647
  misc_feature (1)..(834): Ortholog of  Ceres SEQ ID NO 15172705 as cited in SEQ ID NO 56069
  misc_feature (1)..(834): Ortholog of  Ceres SEQ ID NO 12635657 as cited in SEQ ID NO 0
  misc_feature (1)..(834): Ortholog of  Ceres SEQ ID NO 12635879 as cited in SEQ ID NO 0
  misc_feature (1)..(834): Ortholog of  Ceres SEQ ID NO 13599649 as cited in SEQ ID NO 0
  misc_feature (1)..(834): Ortholog of  Ceres SEQ ID NO 14309205 as cited in SEQ ID NO 0
  misc_feature (1)..(834): Ortholog of  Ceres SEQ ID NO 15177492 as cited in SEQ ID NO 0
atcatcactttcacaatcttcttcatcgatttctctcttccaaatctcccaaaagatgtcgaaccctagagttttcttcgacatgagtctcagcggtactcccatcggacggatcgagatggagcttttcgctgatacaaccccaaacacggcggagaatttccgtgctctctgtaccggcgagaaaggaatgggaaagctaggtaagccacttcacttcaaaggatcgatcttccaccgtgtgattcccggattcatgtgtcaaggaggtgatttcaccgccaagaacggaaccggtggtgaatcgatctacggtgctaagttcaaggacgagaactttatcaagaagcatacaggagctgggattctctcaatggctaactctggtcctaacactaacggatctcagttcttcatctgtaccgataagacgtcgtggttagatggtaagcacgttgtgtttggacaagttgttaaaggcttggacgtcgtgaaggcgattgagaaagttggatctgattctggaaagacttccaaagtcgttaccatcactgattgtggtcagctttcttagatctgagtgagaaagtgagagactttgatctttatgagtaataatggtgtcttttgctttcggttgttcttcctcttaccttaatggattattctgtttagggtttgagttttcgtttcagagtttgtaacaaaacccttttgtgttttctggggtttgaaataattatgagcttacccaattgcttctttgtgtttttgcttctatgaacaagtagtaactgattcgtcttctgattcttcaactgaatcgtgaatctt

SEQ ID NO: 106054 - protein, 190 aa, Arabidopsis thaliana
  peptide (1)..(190): Ceres Seq. ID no. 13618648
SSLSQSSSSISLFQISQKMSNPRVFFDMSLSGTPIGRIEMELFADTTPNTAENFRALCTGEKGMGKLGKPLHFKGSIFHRVIPGFMCQGGDFTAKNGTGGESIYGAKFKDENFIKKHTGAGILSMANSGPNTNGSQFFICTDKTSWLDGKHVVFGQVVKGLDVVKAIEKVGSDSGKTSKVVTITDCGQLS

SEQ ID NO: 106055 - protein, 172 aa, Arabidopsis thaliana; identical to SEQ ID NO: 25632
  peptide (1)..(172): Ceres Seq. ID no. 13618649

SEQ ID NO: 106056 - protein, 163 aa, Arabidopsis thaliana; identical to SEQ ID NO: 25633
  peptide (1)..(163): Ceres Seq. ID no. 13618650

SEQ ID NO: 106057 - DNA, 1299 bp, Arabidopsis thaliana
  misc_feature (1)..(1299): Ceres Seq. ID no. 13618654
  misc_feature (1)..(1299): Ortholog of  Ceres SEQ ID NO 14308787 as cited in SEQ ID NO 55614
  misc_feature (1)..(1299): Ortholog of  Ceres SEQ ID NO 13656547 as cited in SEQ ID NO 65935
agacccaagatttgagtcttcaacaaacagatacaaatgggaagcatcgatgctgcagtgttgggttcagagaagaaatcaaacccgggaaaagccacaattcttgctctgggaaaagcctttcctcaccagctagtaatgcaagagtacttagtcgatggctacttcaaaaccaccaagtgtgatgaccctgaactcaaacagaaacttactcgtctctgcaagacaacaacggtgaagacaaggtatgttgtgatgtcagaggagattctcaagaagtacccagaacttgccattgaaggaggatccacagtgacgcagcgtctagacatctgcaacgatgcagtgaccgagatggcagtagaagcctccagagcctgcatcaagaactggggacgttctatttccgacataactcacgttgtctatgtctcctcaagcgaagctcgtcttcctggtggggacttgtacctggccaaggggcttggactcagtcctgacacacaccgtgttctgctctactttgttggctgttctggtggcgttgcaggtctccgtgtagccaaagacatcgccgagaataatccgggcagtagagttttgcttgccacgtctgagacaaccatcattgggttcaagcccccaagtgtggatagaccgtatgatcttgttggggtcgcgttgtttggtgatggagccggagctatgatcattggatccgatccagacccgatctgcgagaagcctctctttgagcttcatactgcaatacagaactttttacctgaaacagagaagacgatagatggaaggctaacagaacaagggataaacttcaagctatcgagagagcttccacagataatagaagacaatgtggagaatttctgcaagaagctaataggaaaagcgggactggctcataagaactataaccagatgttctgggcggttcatccaggtggaccagccatcttgaaccggattgaaaagcggcttaacctgtcgcctgagaagctgagtccaagcagaagagctctcatggactatggcaatgcgagcagcaattcaattgtttatgtgctggagtatatgttggaggagagcaagaaagtgaggaacatgaatgaagaagaaaacgagtggggtctgattcttgcttttggacctggtgttacatttgaaggcattatcgctcgaaaccttgatgtctgaacaataagtttttaccttgcagatcgagaaagaaccccttatgctttaataaagacatgaagctaaacatacgaaatatttttt

SEQ ID NO: 106058 - protein, 392 aa, Arabidopsis thaliana
  peptide (1)..(392): Ceres Seq. ID no. 13618655
MGSIDAAVLGSEKKSNPGKATILALGKAFPHQLVMQEYLVDGYFKTTKCDDPELKQKLTRLCKTTTVKTRYVVMSEEILKKYPELAIEGGSTVTQRLDICNDAVTEMAVEASRACIKNWGRSISDITHVVYVSSSEARLPGGDLYLAKGLGLSPDTHRVLLYFVGCSGGVAGLRVAKDIAENNPGSRVLLATSETTIIGFKPPSVDRPYDLVGVALFGDGAGAMIIGSDPDPICEKPLFELHTAIQNFLPETEKTIDGRLTEQGINFKLSRELPQIIEDNVENFCKKLIGKAGLAHKNYNQMFWAVHPGGPAILNRIEKRLNLSPEKLSPSRRALMDYGNASSNSIVYVLEYMLEESKKVRNMNEEENEWGLILAFGPGVTFEGIIARNLDV

SEQ ID NO: 106059 - protein, 358 aa, Arabidopsis thaliana
  peptide (1)..(358): Ceres Seq. ID no. 13618656
MQEYLVDGYFKTTKCDDPELKQKLTRLCKTTTVKTRYVVMSEEILKKYPELAIEGGSTVTQRLDICNDAVTEMAVEASRACIKNWGRSISDITHVVYVSSSEARLPGGDLYLAKGLGLSPDTHRVLLYFVGCSGGVAGLRVAKDIAENNPGSRVLLATSETTIIGFKPPSVDRPYDLVGVALFGDGAGAMIIGSDPDPICEKPLFELHTAIQNFLPETEKTIDGRLTEQGINFKLSRELPQIIEDNVENFCKKLIGKAGLAHKNYNQMFWAVHPGGPAILNRIEKRLNLSPEKLSPSRRALMDYGNASSNSIVYVLEYMLEESKKVRNMNEEENEWGLILAFGPGVTFEGIIARNLDV

SEQ ID NO: 106060 - protein, 319 aa, Arabidopsis thaliana
  peptide (1)..(319): Ceres Seq. ID no. 13618657
MSEEILKKYPELAIEGGSTVTQRLDICNDAVTEMAVEASRACIKNWGRSISDITHVVYVSSSEARLPGGDLYLAKGLGLSPDTHRVLLYFVGCSGGVAGLRVAKDIAENNPGSRVLLATSETTIIGFKPPSVDRPYDLVGVALFGDGAGAMIIGSDPDPICEKPLFELHTAIQNFLPETEKTIDGRLTEQGINFKLSRELPQIIEDNVENFCKKLIGKAGLAHKNYNQMFWAVHPGGPAILNRIEKRLNLSPEKLSPSRRALMDYGNASSNSIVYVLEYMLEESKKVRNMNEEENEWGLILAFGPGVTFEGIIARNLDV

SEQ ID NO: 106061 - DNA, 1171 bp, Arabidopsis thaliana
  misc_feature (1)..(1171): Ceres Seq. ID no. 13618658
  misc_feature (1)..(1171): Ortholog of  Ceres SEQ ID NO 15175666 as cited in SEQ ID NO 54985
  misc_feature (1)..(1171): Ortholog of  Ceres SEQ ID NO 14310460 as cited in SEQ ID NO 55105
  misc_feature (1)..(1171): Ortholog of  Ceres SEQ ID NO 13597740 as cited in SEQ ID NO 64482
  misc_feature (1)..(1171): Ortholog of  Ceres SEQ ID NO 15179888 as cited in SEQ ID NO 66879
  misc_feature (1)..(1171): Ortholog of  Ceres SEQ ID NO 13596056 as cited in SEQ ID NO 68307
  misc_feature (1)..(1171): Ortholog of  Ceres SEQ ID NO 12388689 as cited in SEQ ID NO 0
gggtggttttatctctttggcccaaatttcggtgtaaccaaaaaaaatcttcacacacatccttgaccattttcttgttcatcgctctctttcttcttcacaaatcctaaacgagtaggagctatggctgcaccgattgttgatgcggagtacttgaaagagatcactaaggctcgccgtgagctccgttctctcatcgcgaacaagaactgtgctcctatcatgctccgattggcatggcacgatgctggaacctatgatgctcaatcgaagaccggtggacctaatggctctatcaggaacgaagaagagcacactcatggtgccaacagtggtttgaagatcgctctcgatctctgtgagggcgtgaaagctaagcatcccaaaatcacatacgcagacctgtatcagcttgctggtgtggtagcagttgaggttactggtggacctgacatcgtgttcgttcccgggagaaaggattcaaatgtctgccccaaggaaggaagacttcctgatgccaaacaaggtttccaacatctcagagatgtcttctaccgcatgggactatctgataaggatattgtggcactctcagggggtcatactctgggaagggctcacccggagaggtcaggctttgatggaccatggacccaagagccgctgaagtttgacaactcctacttcgtggaactgctgaaaggagaatcagagggcttgttgaaacttccaactgacaagaccttattggaagacccggagttccgtcgtcttgttgagctttatgcaaaggatgaagatgcattcttcagagactacgcggaatcgcacaagaaactctctgagcttggtttcaacccaaactcctcagcaggcaaagcagttgcagacagcacgattctggcacagagtgcgttcggggttgcagttgctgctgcggttgtggcatttggttacttttacgagatccggaagaggatgaagtaaacgaaataggaagtaaaacacgaagcaacgatgctcttatttgggtattaaagaaactattaatcgtctatcgaatctattttgctgctacaagattctaaactctttgaatccacgattctactgtttagtagtaaaaaagttaaaaagtcaatattttgggtccgtgattcatttttgcgat

SEQ ID NO: 106062 - protein, 287 aa, Arabidopsis thaliana; identical to SEQ ID NO: 35212
  peptide (1)..(287): Ceres Seq. ID no. 13618659

SEQ ID NO: 106063 - protein, 254 aa, Arabidopsis thaliana; identical to SEQ ID NO: 35213
  peptide (1)..(254): Ceres Seq. ID no. 13618660

SEQ ID NO: 106064 - DNA, 1347 bp, Arabidopsis thaliana
  misc_feature (1)..(1347): Ceres Seq. ID no. 13618661
  misc_feature (1)..(1347): Ortholog of  Ceres SEQ ID NO 13654989 as cited in SEQ ID NO 63117
  misc_feature (1)..(1347): Ortholog of  Ceres SEQ ID NO 13657138 as cited in SEQ ID NO 65923
  misc_feature (1)..(1347): Ortholog of  Ceres SEQ ID NO 13584744 as cited in SEQ ID NO 69137
atgggtgaagaaaagaggagaatttcaggaagatcagtttcacttccatcgatagacatattactagacgagaaaccaggttggccatttcttaaaagagcaagtttagggacaccacaacaagttcacaaatggcacacacgaaaagtctcagtggtcaattgggtcatgagcttacctgaacggtttccaaatcatcaacagactctaaactatgagacaagcttgataaagaaacaaatcaaggacatattgagagacaataacaaatggttcaactacaatgttcttaggaaagcaacatcagatttctctcaagagaatgtgattgggaaaggaggatgcaacgaagtgtaccgagggattcttgaagatggaaaaggcattgcagtgaaaatcttgaagtcatcatctaaagaagcaatgacaaatttcgttcatgaaatcaacattatctcttctttgagtcaccaaaacatctcaccgttacttggtgtttgtgtccaagacaatgaactaatctccgtttacaatctttcaaacacaggaagtttagaagaaacccttcacggtaagcaaaagggaaagtatgtattatcatgggaagagagattcaagatagctatcgggttggcggaagcattagactatcttcataaccgatgttctaagccagtgattcatagagatgtcaaaacttctaacgtccttctatcacttgagctccaacctcagctgtcagattttggtctgtcgatgtggggaccgacaacatcttctcgatattcgatacaaggtgatgtggtgggaacatttggatatcttgcaccggagtacttcatgtatggaaaagtcagtgataaagttgatgtttacgcctttggagtggttctgcttgaactcatttctggaagaaatcctatttcacctcagaatcctagaggacaagagagtttggtaatgtgggcaaagcctttgattgataccggaaatttaaaagtactgttggatccagacgttacagatatattcgacgagtctcagtttcaaagaatggtacttgctgcttcacattgcctcacaagatcagccacacatcgtcccaatataagacaaatactgaggctactaagagatgaaaacgaagccgggaaatggattatggaagaagaaggaaatgaagattgcttcgatgacgaggtttacccgaattccagcacagaattacacttaaaccttgcgatgcttgaggtggaagacgatgaaactgcatcaatcagcagcatggagagaagtaacaacagccttttttcttctacttgttcatctagggagcttcaaacataa

SEQ ID NO: 106065 - protein, 448 aa, Arabidopsis thaliana
  peptide (1)..(448): Ceres Seq. ID no. 13618662
MGEEKRRISGRSVSLPSIDILLDEKPGWPFLKRASLGTPQQVHKWHTRKVSVVNWVMSLPERFPNHQQTLNYETSLIKKQIKDILRDNNKWFNYNVLRKATSDFSQENVIGKGGCNEVYRGILEDGKGIAVKILKSSSKEAMTNFVHEINIISSLSHQNISPLLGVCVQDNELISVYNLSNTGSLEETLHGKQKGKYVLSWEERFKIAIGLAEALDYLHNRCSKPVIHRDVKTSNVLLSLELQPQLSDFGLSMWGPTTSSRYSIQGDVVGTFGYLAPEYFMYGKVSDKVDVYAFGVVLLELISGRNPISPQNPRGQESLVMWAKPLIDTGNLKVLLDPDVTDIFDESQFQRMVLAASHCLTRSATHRPNIRQILRLLRDENEAGKWIMEEEGNEDCFDDEVYPNSSTELHLNLAMLEVEDDETASISSMERSNNSLFSSTCSSRELQT

SEQ ID NO: 106066 - protein, 392 aa, Arabidopsis thaliana
  peptide (1)..(392): Ceres Seq. ID no. 13618663
MSLPERFPNHQQTLNYETSLIKKQIKDILRDNNKWFNYNVLRKATSDFSQENVIGKGGCNEVYRGILEDGKGIAVKILKSSSKEAMTNFVHEINIISSLSHQNISPLLGVCVQDNELISVYNLSNTGSLEETLHGKQKGKYVLSWEERFKIAIGLAEALDYLHNRCSKPVIHRDVKTSNVLLSLELQPQLSDFGLSMWGPTTSSRYSIQGDVVGTFGYLAPEYFMYGKVSDKVDVYAFGVVLLELISGRNPISPQNPRGQESLVMWAKPLIDTGNLKVLLDPDVTDIFDESQFQRMVLAASHCLTRSATHRPNIRQILRLLRDENEAGKWIMEEEGNEDCFDDEVYPNSSTELHLNLAMLEVEDDETASISSMERSNNSLFSSTCSSRELQT

SEQ ID NO: 106067 - protein, 307 aa, Arabidopsis thaliana
  peptide (1)..(307): Ceres Seq. ID no. 13618664
MTNFVHEINIISSLSHQNISPLLGVCVQDNELISVYNLSNTGSLEETLHGKQKGKYVLSWEERFKIAIGLAEALDYLHNRCSKPVIHRDVKTSNVLLSLELQPQLSDFGLSMWGPTTSSRYSIQGDVVGTFGYLAPEYFMYGKVSDKVDVYAFGVVLLELISGRNPISPQNPRGQESLVMWAKPLIDTGNLKVLLDPDVTDIFDESQFQRMVLAASHCLTRSATHRPNIRQILRLLRDENEAGKWIMEEEGNEDCFDDEVYPNSSTELHLNLAMLEVEDDETASISSMERSNNSLFSSTCSSRELQT

SEQ ID NO: 106068 - DNA, 1416 bp, Arabidopsis thaliana
  misc_feature (1)..(1416): Ceres Seq. ID no. 13618669
  misc_feature (1)..(1416): Ortholog of  Ceres SEQ ID NO 14303843 as cited in SEQ ID NO 53775
  misc_feature (1)..(1416): Ortholog of  Ceres SEQ ID NO 15179800 as cited in SEQ ID NO 58215
  misc_feature (1)..(1416): Ortholog of  Ceres SEQ ID NO 13654549 as cited in SEQ ID NO 68530
tctatctcagtttcgagactcattgcctcgccgagagagaaggagacgccatggaaaggcttcttcaaccatcttcttcttcttcctcaatttctccttccaaattcccttcacggacttctcctttccttccccgtctccgctcatcgggtctgagctttgtctcgactcaccggcccgagtcacgccgagtcagctcaatttcctgcaacagttcccagattccgtcactgtatacgcctataggatctaacacaactaacaattccttcaatgggtctcccaaatcggatgaatcgaaacctaatcccggatttctcacacggatcgcgacgtcggcttctgagcagcgaaagacgttatctactggaaccgttatactaatctctgcagtagctgtgcttttgcttaacccgcttcttgcaccacctgctttcgctagctttcaaactgcagctaaatccggttggctaacaagtgcgtggaccggtttccttgctggttgcttgcacacgctctcaggacctgatcacctcgctgctttagctccgctttcgatcggacgcagcaaaatggaaagtgctgctgttggagctctctggggatgtgggcatgatgctggtcaagtcatctttggtttactgtttctgctacttaaagaccggcttcacattgaagtattacaaacttggggtacaagaattgtgggattgactcttgttattatcggtgctatgggaatcaaggaagcttctgagattccagaaccttgtgtcgctttagaaaccgacatcagcatggtatcaacagagaaagaagccttaccactgcccaaaaagaagaagatcgggtttgctacatttgcaactggagtggttcacgggttgcaaccggatgctctgatgattgttttgcctgcattagctctcccatcacggttagcagggtctgcgtttttgataatgtttctggttgggacagttatagcgatgggaagttacacagcgtttattgggtcttgcagtgaggctttgaaagagaaagttccaaggatcacagagaaactaacttgggtttcgtcacttgtggctattggtcttggattgggaattgtcatcagccctttctttggttttagcctctactgagaaagtaaaagcttcttcaggtaaatgagacaagttgaaatctttgtagttcttatagaagaaagagaggtttttttgggtccatatcactcgtattattgtcacctgtacgaacaaaatctcgtaatcttgcttcagaaactcctctcggagaaaaccatttggtgattctttttattttccttatttttaagagaagtttggttttggttctgaattatcgatcaactgcatgtaaccatactttgtaatattatcaaattttaac

SEQ ID NO: 106069 - protein, 381 aa, Arabidopsis thaliana; identical to SEQ ID NO: 29711
  peptide (1)..(381): Ceres Seq. ID no. 13618670

SEQ ID NO: 106070 - protein, 365 aa, Arabidopsis thaliana; identical to SEQ ID NO: 29712
  peptide (1)..(365): Ceres Seq. ID no. 13618671

SEQ ID NO: 106071 - protein, 191 aa, Arabidopsis thaliana; identical to SEQ ID NO: 29713
  peptide (1)..(191): Ceres Seq. ID no. 13618672

SEQ ID NO: 106072 - DNA, 1214 bp, Arabidopsis thaliana
  misc_feature (1)..(1214): Ceres Seq. ID no. 13618673
  misc_feature (1)..(1214): Ortholog of  Ceres SEQ ID NO 15168549 as cited in SEQ ID NO 56976
  misc_feature (1)..(1214): Ortholog of  Ceres SEQ ID NO 15177588 as cited in SEQ ID NO 60367
attaactatttaatcgtactaataatgattataagcagaattatgtagactatacaaatagtacgtaataccgaaagtacccttggtttatccctggcattacaagggtttcctttttcccctttaaaatggcagaagagatacactgtcgtcgtcacacagcaccacaaactccatagctagctagagagtaaaaagaacaaagatgtcgaaagaagtgagcgaagaaggcaaaacccaccatggaaaagactacgtggatcctccaccagctcctcttctcgacatgggtgagctcaaatcctggtctttctacagagctctcatcgctgagttcatcgctacactcctcttcctctacgtcaccgtcgctactgtcatcggccacaagaagcaaaccggtccttgtgacggcgttggtttacttggtatcgcttgggctttcggtggtatgatcttcgtcctcgtctactgcaccgccggtatctctggtggtcacattaacccagctgtgactttcggtctgttcttggcccgtaaggtctctttggtgcgagctcttggttacatgatagctcagtgtcttggagccatttgtggtgtgggtttcgtgaaagctttcatgaaaactccttacaacactcttggtggaggagctaacaccgtagctgacggttacagcaaaggaactgctctcggagctgagattattggaactttcgtccttgtttacaccgttttctctgcaactgaccctaagagaagcgctcgtgactctcacatccccgttttggctccacttccaattggatttgctgtgttcatggtgcatttggctactatccccattactggaactggtatcaacccagctagaagctttggtgctgctgttatctacaacaacgagaaggcgtgggatgaccaatggatcttttgggttggtccgttcttgggagcactagctgcagcagcttaccaccaatacatattgagagcttcagcaattaaggccttgggctcgttccgaagcaacgcaaccaattaatgaaggctttttttaagataatgtcaagaaacaactttaagatttatatgctttaattattatttgttgttcttttgtgtgtaatgagagagatggtggattgatgttaattatgaaatggctcagtgacttctatttccttctttagtttttgattgtctttgtt

SEQ ID NO: 106073 - protein, 280 aa, Arabidopsis thaliana; identical to SEQ ID NO: 24848
  peptide (1)..(280): Ceres Seq. ID no. 13618674

SEQ ID NO: 106074 - protein, 253 aa, Arabidopsis thaliana; identical to SEQ ID NO: 24849
  peptide (1)..(253): Ceres Seq. ID no. 13618675

SEQ ID NO: 106075 - protein, 198 aa, Arabidopsis thaliana; identical to SEQ ID NO: 24850
  peptide (1)..(198): Ceres Seq. ID no. 13618676

SEQ ID NO: 106076 - DNA, 1242 bp, Arabidopsis thaliana
  misc_feature (1)..(1242): Ceres Seq. ID no. 13618681
  misc_feature (1)..(1242): Ortholog of  Ceres SEQ ID NO 13596090 as cited in SEQ ID NO 68377
ttgggatttggtgtttttctccttttcttcattgaaagttgtcttcttttttaatcttctttgattaaaatgggtaatgtgacgtcaaatgtggcggccaagttcgcattcttcccgccggagccagcaacatacggcgtaacgaaggatgacgagaccgggaagctggtcttcgccggagtgtcggctgacaagaacgtggaagtccaccaactcaccacaaagtccggcaacaaagttgttgccacgttttggagacacccttttgcgagattcacgcttctctattcccatggcaatgccgctgatcttggccaaatggtcgagctattcatcgaactccgtgctcatctccgcgtcaacatcatgagttatgattattcaggatatggagcttcaacaggaaagccgtctgaattcaacacgtattatgacatagaggcagtgtacagttgcttgcggagcgattatgggatcaagcaagaggagataattctgtacggtcagtctgtaggaagcggtccaacgttgcacatggcttctcggttgaagaggcttagaggagttgttcttcacagcgccattctctctggaatcagagtcttgtatcctgtcaaaatgactctctggttcgatatattcaaaaacatagacaagattcgccatgtcaactcacaagtccttgtcatacatggcacaaatgacgagattgttgatttgtctcacgggaaacgactgtgggagctggcgaaggagaagtatgatccgttatgggtgaagggaggagggcattgcaacctcgagacttaccctgagtacatcaagcacctcaaaaagttcgtaaatgcaatggagaaactctctctaaccaatccaccacccaaacaactaactaatgagcccagtatcaccgagactaagcacaatcggtgcttgaaattcgggaaacggtagtagcagaatcacaagacaattggtttggtagatttcttccttggcatcgcatgtgcagagttatttcctcaatgtgatcaaaaccaatgctaaacacagggtcacagacaacggcgtaacagagatcatctagtgaggtatttcactgtagaatgttgccctgcttttgggtatttgatcgatgttcaatctcctgtaaaaatgtagcttcaagtttgggggtttctgtaacacatcattacttgtaggagaagcaacacagaaaagatgtaatcagcatttccttcg

SEQ ID NO: 106077 - protein, 294 aa, Arabidopsis thaliana
  peptide (1)..(294): Ceres Seq. ID no. 13618682
MGNVTSNVAAKFAFFPPEPATYGVTKDDETGKLVFAGVSADKNVEVHQLTTKSGNKVVATFWRHPFARFTLLYSHGNAADLGQMVELFIELRAHLRVNIMSYDYSGYGASTGKPSEFNTYYDIEAVYSCLRSDYGIKQEEIILYGQSVGSGPTLHMASRLKRLRGVVLHSAILSGIRVLYPVKMTLWFDIFKNIDKIRHVNSQVLVIHGTNDEIVDLSHGKRLWELAKEKYDPLWVKGGGHCNLETYPEYIKHLKKFVNAMEKLSLTNPPPKQLTNEPSITETKHNRCLKFGKR

SEQ ID NO: 106078 - protein, 211 aa, Arabidopsis thaliana
  peptide (1)..(211): Ceres Seq. ID no. 13618683
MVELFIELRAHLRVNIMSYDYSGYGASTGKPSEFNTYYDIEAVYSCLRSDYGIKQEEIILYGQSVGSGPTLHMASRLKRLRGVVLHSAILSGIRVLYPVKMTLWFDIFKNIDKIRHVNSQVLVIHGTNDEIVDLSHGKRLWELAKEKYDPLWVKGGGHCNLETYPEYIKHLKKFVNAMEKLSLTNPPPKQLTNEPSITETKHNRCLKFGKR

SEQ ID NO: 106079 - protein, 195 aa, Arabidopsis thaliana
  peptide (1)..(195): Ceres Seq. ID no. 13618684
MSYDYSGYGASTGKPSEFNTYYDIEAVYSCLRSDYGIKQEEIILYGQSVGSGPTLHMASRLKRLRGVVLHSAILSGIRVLYPVKMTLWFDIFKNIDKIRHVNSQVLVIHGTNDEIVDLSHGKRLWELAKEKYDPLWVKGGGHCNLETYPEYIKHLKKFVNAMEKLSLTNPPPKQLTNEPSITETKHNRCLKFGKR

SEQ ID NO: 106080 - DNA, 1658 bp, Arabidopsis thaliana
  misc_feature (1)..(1658): Ceres Seq. ID no. 13618693
  misc_feature (1)..(1658): Ortholog of  Ceres SEQ ID NO 13599859 as cited in SEQ ID NO 1323
  misc_feature (1)..(1658): Ortholog of  Ceres SEQ ID NO 13596244 as cited in SEQ ID NO 69307
aattcgtcgagaaccgagtgaccgtttctagtgctcacagagagagagagagagagagagagagagaggcgctgtggatttgtgggagagtagggacatcagaggattcttcgatcttcagattcttactcgacgaatccttaatcgctcacctgcagttgttcttatcctccgcttattccgtcgagtgccgtggcggccaatttcggcaactctgcgccactgatgattttgatggttagatcttttaattgattctaaagagtgagatgttaaagcagactataagatggatttgatacttcatccagtagtagcttaagaaatattgcggttatgtcagagtctcgtcaaaggcctccttttaagggcccgagatggattatcactttggttgttctggttacggttgttgtcattaccgcattcatatatcctccgcggaattctgtggcttgctatatgttttctggtcctggatgtcctttataccagcagtttttgtttgtacctactcgggaattgactgactctgaagctgctgctcaagttgtcatgaatgaaatcatgaacctacctcaatctaagacagcaaatcccaagttagctttcatgttcttaactccagggacgctgccttttgagcctctctgggaaatgtttttccgtggtcatgagaacaaattttcagtttatgtgcatgcctcaaagaaaagtcctgtacatacaagcagctattttgttggtcgagatattcacagtcacaaggttgcttggggtcagatatcaatggttgatgcagaaagaaggctattagctcatgctctcgttgatcctgataatcaacactttatattgctgtcagatagttgtgtaccgctattcgactttaactatatctataaccacttgatcttcgcgaatctcagcttcattgattgttttgaggatcctggaccacatggatctggtaggtattcacaacatatgctgcctgaggttgaaaagaaggattttcggaagggctcacagtggttttcaatgaagaggagacatgctatagtcgtcatggcggacagcctttactacacaaaattcaagctttactgtaggccaaatatggaaggacgcaactgctatgcggacgagcattattttccaactcttttcaatatgattgatccagatggaatagcaaactggtcggtcacacatgtagattggtccgagggcaaatggcatccgaagctgtacaatgcaagagacatcactccttacctcatcaggaaaatcaagtccatccaacttgcttaccatgtcacaagcgatttaaagaaagtgacgacagtaaagccgtgtctatggaaaggagagcaacgtccatgttacctatttgctcggaagtttaatcctgaaactctagaccgattgatgtatctcttccctaactacacctcgctggtttgaaaggcttatcggattctcgattgtccggtttgttctttgttaagctcttaccaaagcatacaccttgtgtgataattattaggaccattcatattgctgtgattcaaagttgggtttgagcctggcacagacaagaacaagaactgctctggtgtttttttggtttatggttaacaaaacattagcgtgct

SEQ ID NO: 106081 - protein, 376 aa, Arabidopsis thaliana
  peptide (1)..(376): Ceres Seq. ID no. 13618694
MSESRQRPPFKGPRWIITLVVLVTVVVITAFIYPPRNSVACYMFSGPGCPLYQQFLFVPTRELTDSEAAAQVVMNEIMNLPQSKTANPKLAFMFLTPGTLPFEPLWEMFFRGHENKFSVYVHASKKSPVHTSSYFVGRDIHSHKVAWGQISMVDAERRLLAHALVDPDNQHFILLSDSCVPLFDFNYIYNHLIFANLSFIDCFEDPGPHGSGRYSQHMLPEVEKKDFRKGSQWFSMKRRHAIVVMADSLYYTKFKLYCRPNMEGRNCYADEHYFPTLFNMIDPDGIANWSVTHVDWSEGKWHPKLYNARDITPYLIRKIKSIQLAYHVTSDLKKVTTVKPCLWKGEQRPCYLFARKFNPETLDRLMYLFPNYTSLV

SEQ ID NO: 106082 - protein, 334 aa, Arabidopsis thaliana
  peptide (1)..(334): Ceres Seq. ID no. 13618695
MFSGPGCPLYQQFLFVPTRELTDSEAAAQVVMNEIMNLPQSKTANPKLAFMFLTPGTLPFEPLWEMFFRGHENKFSVYVHASKKSPVHTSSYFVGRDIHSHKVAWGQISMVDAERRLLAHALVDPDNQHFILLSDSCVPLFDFNYIYNHLIFANLSFIDCFEDPGPHGSGRYSQHMLPEVEKKDFRKGSQWFSMKRRHAIVVMADSLYYTKFKLYCRPNMEGRNCYADEHYFPTLFNMIDPDGIANWSVTHVDWSEGKWHPKLYNARDITPYLIRKIKSIQLAYHVTSDLKKVTTVKPCLWKGEQRPCYLFARKFNPETLDRLMYLFPNYTSLV

SEQ ID NO: 106083 - protein, 303 aa, Arabidopsis thaliana
  peptide (1)..(303): Ceres Seq. ID no. 13618696
MNEIMNLPQSKTANPKLAFMFLTPGTLPFEPLWEMFFRGHENKFSVYVHASKKSPVHTSSYFVGRDIHSHKVAWGQISMVDAERRLLAHALVDPDNQHFILLSDSCVPLFDFNYIYNHLIFANLSFIDCFEDPGPHGSGRYSQHMLPEVEKKDFRKGSQWFSMKRRHAIVVMADSLYYTKFKLYCRPNMEGRNCYADEHYFPTLFNMIDPDGIANWSVTHVDWSEGKWHPKLYNARDITPYLIRKIKSIQLAYHVTSDLKKVTTVKPCLWKGEQRPCYLFARKFNPETLDRLMYLFPNYTSLV

SEQ ID NO: 106084 - DNA, 846 bp, Arabidopsis thaliana
  misc_feature (1)..(846): Ceres Seq. ID no. 13618697
  misc_feature (1)..(846): Ortholog of  Ceres SEQ ID NO 13583718 as cited in SEQ ID NO 63252
gagaagaaggagaagaagattgttaagacgaaaccctgttgctgtccgtacaatgccgccgaagaagagtaaggcagatggagaagaaaaggcgaaacctttaacgacgttggcgtcgtctagagtgactcggagcatggacagtcgaactcgaagtcagactcaacaaaacggtgctaaagcggctggatccgccactaagccggcgacgaagaaggctaagaggaagaattcagcgattgagactgggagagccaagaagggaaagaaggaagaggaagttgaagagccagaggaagccgttgaggaggaggttgagaaggaagagccagaggttgaggaccctacgagaaccaagattgttatagaacactgtaaacaatgcaatgctttcaagacaagagctattcaggtgaaggaagctttggagggagctgttcctggcgtcacggtgtctcttaatcctgaaaagccaaggcggggttgctttgagatccgggaggaaggtggccaaacattcatcagtcttttggagatgaaacgtccatttgcaccaatgaaggcacttgatatggaagaagtcatcgaggacatcataaagaaagtcaaatgaatctgttctttgtttctgcctcggtctcagtttaatcaattaggtttctgcagaagactttctagagtaatgtcagatttgttaggttcacttttattgtttcggtatgagcactgtaagtgcagtctcgtcgtttggcaatgcatgattagttgatagagaaggatctctgtagtttttggggttaactcgtatttgtaaggctagtttattattcatctcgttgcttgaag

SEQ ID NO: 106085 - protein, 203 aa, Arabidopsis thaliana
  peptide (1)..(203): Ceres Seq. ID no. 13618698
RRRRRRLLRRNPVAVRTMPPKKSKADGEEKAKPLTTLASSRVTRSMDSRTRSQTQQNGAKAAGSATKPATKKAKRKNSAIETGRAKKGKKEEEVEEPEEAVEEEVEKEEPEVEDPTRTKIVIEHCKQCNAFKTRAIQVKEALEGAVPGVTVSLNPEKPRRGCFEIREEGGQTFISLLEMKRPFAPMKALDMEEVIEDIIKKVK

SEQ ID NO: 106086 - protein, 186 aa, Arabidopsis thaliana
  peptide (1)..(186): Ceres Seq. ID no. 13618699
MPPKKSKADGEEKAKPLTTLASSRVTRSMDSRTRSQTQQNGAKAAGSATKPATKKAKRKNSAIETGRAKKGKKEEEVEEPEEAVEEEVEKEEPEVEDPTRTKIVIEHCKQCNAFKTRAIQVKEALEGAVPGVTVSLNPEKPRRGCFEIREEGGQTFISLLEMKRPFAPMKALDMEEVIEDIIKKVK

SEQ ID NO: 106087 - protein, 158 aa, Arabidopsis thaliana
  peptide (1)..(158): Ceres Seq. ID no. 13618700
MDSRTRSQTQQNGAKAAGSATKPATKKAKRKNSAIETGRAKKGKKEEEVEEPEEAVEEEVEKEEPEVEDPTRTKIVIEHCKQCNAFKTRAIQVKEALEGAVPGVTVSLNPEKPRRGCFEIREEGGQTFISLLEMKRPFAPMKALDMEEVIEDIIKKVK

SEQ ID NO: 106088 - DNA, 1531 bp, Arabidopsis thaliana
  misc_feature (1)..(1531): Ceres Seq. ID no. 13618711
  misc_feature (1)..(1531): Ortholog of  Ceres SEQ ID NO 15177947 as cited in SEQ ID NO 60308
aaaacagactttttctcttcttcttctttttggggctacgacaatctgaatttgatcccaaatcaaaactttcttcttcttcgtcttcctctaatcaaaactgtctcctaccaaaggtctttcctttctccagccagatatgtgaggaaaccaagcttctcgtacaacttcatcacctacttccttttgacgttttcaaatcttgagagagatgggtatatatctaagtactccaaaaacagacaagttctcagaagatggcgaaaatcataaactcagatatggtttatcctctatgcaaggttggcgtgcgtccatggaagatgctcatgctgcaatacttgatctcgatgataacacttccttcttgggtgtctatgatggtcatggaggtaaagttgtttctaagttctgtgccaagtatctacaccagcaggttcttagtgatgaggcgtatgcagctggagacgtagggacttctcttcaaaaagcatttttcagaatggatgagatgatgcaaggacaaagagggtggcgagagttagcagtacttggtgacaaaatcaataagttcagtgggatgattgaagggcttatatggtcaccaagaagtggggacagtgctaataaacctgatgcttgggcgtttgaggaaggtcctcattctgattttgctggacctaattctgggagcacggcatgcgtagctgttgttagagacaagcagctatttgttgcaaatgcaggtgactcacgttgtgtgatatccagaaagaatcaggcttataatctttctagagatcacaaaccagatcttgaagctgagaaagaaaggatattgaaagctggtggctttatacatgcagggcgagtcaatggaagcttaaatctatcacgagctatcggtgacatggaattcaagcagaataagtttttgccatctgaaaagcaaatagttaccgctagtccagatgttaacactgttgaactctgtgatgatgatgatttccttgttcttgcctgcgatggaatttgggattgcatgacaagccaacaactcgttgatttcatacatgaacaattgaattcagagaccaaactctcggtggtatgtgaaaaagttctcgatagatgtctggctccaaacacttcaggtggtgaaggctgtgataacatgaccatgatattggttcgattcaagaaccctactccatcagagaccgaactaaaaccagaagcaagccaggcagaaggaaaccacgatgagccgagctcatcaaactaggcccatcctcagagtcacggaagatccctctagatctagtattttggttcagattgtaaatcattttgaaagacagttatatatctcaacctgacgttgatttcagtatatcaccatttcctccgtgtgcagacttttgtctcatgagctcccataatgtagaaaggaataattggtgtaaaaatgttgttggccttaaaagaacatatcatcatgtaaataaacaaaacaataagacatttacac

SEQ ID NO: 106089 - protein, 357 aa, Arabidopsis thaliana; identical to SEQ ID NO: 21021
  peptide (1)..(357): Ceres Seq. ID no. 13618712

SEQ ID NO: 106090 - protein, 329 aa, Arabidopsis thaliana; identical to SEQ ID NO: 21022
  peptide (1)..(329): Ceres Seq. ID no. 13618713

SEQ ID NO: 106091 - protein, 322 aa, Arabidopsis thaliana; identical to SEQ ID NO: 21023
  peptide (1)..(322): Ceres Seq. ID no. 13618714

SEQ ID NO: 106092 - DNA, 1135 bp, Arabidopsis thaliana
  misc_feature (1)..(1135): Ceres Seq. ID no. 13618734
  misc_feature (1)..(1135): Ortholog of  Ceres SEQ ID NO 12609214 as cited in SEQ ID NO 52165
acttagaaatggcttcttcgtcttcacccccggcggcgatggaggtcggagaatctacaaactggacggagcttccaccggaactgacttcagcaatcctgcaccgtcttggcgcgattgagatacttgaaaacgctcagaaagtttgcagatcttggcgtcgtgtttgtaaagacccatcgatgtggcgtaaaattgacatgcataacctcggagatttggacgacatggattacaacctcgagatcatgtgccgtcacgctgttgatcgtagccagggaggcttggttgatatcggtatttggtactttggtactgttgatctcctcaattacatcgcccataggtcgagtaatctgagaagccttagacttataaggtgttctcaaattacagacgatggatttgtcgaagcagttgtgaaacttccacttgaagaactcgagttgtcatactgctcattttcagtagagtctctcagagttgtaggccagtgttgtttaaatatgaagactttgaagctgaacaagcatcctcaaaaggagaatgacgatgatgctctagcaatcgctgaaacaatgccgaaacttcgccatctccagctttgtgggaacgggttgtcagacaccggtttaaacgctattcttgacaattgctcaaacctggaacatcttgatttacgccggtgtttcaatgttaaccttgttggggatttgcagaagcggtgttttgagagtgtcaaagttgtgagacaccctaatgactcgattcatgatatcgacattggttcatcagaagacgaagacccttatgacttctctgatatcgatctgatgtcaggtgatgatgattttgagggttactatgacttctcaggtgctagtgacttttctgactatgaccagtttgatttctagatgcatcggtttcgtgcaggtgaatttttttcgaacttgttcatgacttgttttaagttagctcatagtttcaatggattttatgtgtccttgaagtatgttaccgtttgtaatgatgtcttttgctgtttgtctttcaacaatttctaagctcagaaaagtttcaaagatggtgattgtttcatcttgcttttgacgaaagaaattgagtttattct

SEQ ID NO: 106093 - protein, 304 aa, Arabidopsis thaliana
  peptide (1)..(304): Ceres Seq. ID no. 13618735
LEMASSSSPPAAMEVGESTNWTELPPELTSAILHRLGAIEILENAQKVCRSWRRVCKDPSMWRKIDMHNLGDLDDMDYNLEIMCRHAVDRSQGGLVDIGIWYFGTVDLLNYIAHRSSNLRSLRLIRCSQITDDGFVEAVVKLPLEELELSYCSFSVESLRVVGQCCLNMKTLKLNKHPQKENDDDALAIAETMPKLRHLQLCGNGLSDTGLNAILDNCSNLEHLDLRRCFNVNLVGDLQKRCFESVKVVRHPNDSIHDIDIGSSEDEDPYDFSDIDLMSGDDDFEGYYDFSGASDFSDYDQFDF

SEQ ID NO: 106094 - protein, 302 aa, Arabidopsis thaliana
  peptide (1)..(302): Ceres Seq. ID no. 13618736
MASSSSPPAAMEVGESTNWTELPPELTSAILHRLGAIEILENAQKVCRSWRRVCKDPSMWRKIDMHNLGDLDDMDYNLEIMCRHAVDRSQGGLVDIGIWYFGTVDLLNYIAHRSSNLRSLRLIRCSQITDDGFVEAVVKLPLEELELSYCSFSVESLRVVGQCCLNMKTLKLNKHPQKENDDDALAIAETMPKLRHLQLCGNGLSDTGLNAILDNCSNLEHLDLRRCFNVNLVGDLQKRCFESVKVVRHPNDSIHDIDIGSSEDEDPYDFSDIDLMSGDDDFEGYYDFSGASDFSDYDQFDF

SEQ ID NO: 106095 - protein, 292 aa, Arabidopsis thaliana
  peptide (1)..(292): Ceres Seq. ID no. 13618737
MEVGESTNWTELPPELTSAILHRLGAIEILENAQKVCRSWRRVCKDPSMWRKIDMHNLGDLDDMDYNLEIMCRHAVDRSQGGLVDIGIWYFGTVDLLNYIAHRSSNLRSLRLIRCSQITDDGFVEAVVKLPLEELELSYCSFSVESLRVVGQCCLNMKTLKLNKHPQKENDDDALAIAETMPKLRHLQLCGNGLSDTGLNAILDNCSNLEHLDLRRCFNVNLVGDLQKRCFESVKVVRHPNDSIHDIDIGSSEDEDPYDFSDIDLMSGDDDFEGYYDFSGASDFSDYDQFDF

SEQ ID NO: 106096 - DNA, 1203 bp, Arabidopsis thaliana
  misc_feature (1)..(1203): Ceres Seq. ID no. 13618744
  misc_feature (1)..(1203): Ortholog of  Ceres SEQ ID NO 12583421 as cited in SEQ ID NO 56410
  misc_feature (1)..(1203): Ortholog of  Ceres SEQ ID NO 15169300 as cited in SEQ ID NO 59572
  misc_feature (1)..(1203): Ortholog of  Ceres SEQ ID NO 15176407 as cited in SEQ ID NO 59620
  misc_feature (1)..(1203): Ortholog of  Ceres SEQ ID NO 13596876 as cited in SEQ ID NO 62696
  misc_feature (1)..(1203): Ortholog of  Ceres SEQ ID NO 13655442 as cited in SEQ ID NO 64359
accaacaacaagtctttctcacgaaaatggattctcggatttttctcgcattttccctctgttttctcttcactctccctctaatttcatctgcacctaaccgcttcctcactagatcgagtaacactagagatgggtcagtgataaagatgaaaacaagtgcttcttcttttgggtttgatccaactcgtgtcactcaactctcttggactcctagagtttttttgtatgaagggtttctttctgatgaggaatgtgatcattttatcaaattggcgaaagggaagcttgagaagtcaatggtggctgataatgattctggtgagagtgttgagagtgaagtacgcactagttctggaatgtttctctccaaacgacaggatgatatagtaagtaatgtggaggcaaaacttgctgcgtggacctttcttcccgaagagaatggtgaatccatgcaaatattgcattatgagaatggtcaaaagtatgaaccgcattttgactactttcacgaccaggctaatctagagctcggtggtcatcggattgccacagtattgatgtacttgtccaatgttgaaaagggaggagaaacagtgtttcccatgtggaagggtaaagcaactcagttgaaagacgatagctggaccgaatgtgcaaaacaaggctatgcagtgaaaccgaggaaaggggatgcattactgttcttcaatcttcacccaaatgcaaccacagattcaaatagcttacatggaagctgtccagtggttgagggagagaaatggtcagcaaccagatggattcacgttaagtcattcgaaagagcgtttaataagcaatctggatgtatggacgagaatgtgagctgcgaaaaatgggcaaaggcaggggaatgccagaagaatccaacatacatggttggttcagacaaagaccatggatattgcagaaagagttgcaaagcttgctcatcttaagaacaacaagtaaaatcaaagctcttattaaaggatcaaaatttttgtatagcgaaaaaccgggttttcgccattcgggtagataaacatatcgtcaatagaatgaaaaatttagaactatatactaaaaaaataattctgattctatgttactggtttcatgtgcaagttatgttccttatggttcataactagaccaaaacttaataaaagtcggtttatgtta

SEQ ID NO: 106097 - protein, 324 aa, Arabidopsis thaliana
  peptide (1)..(324): Ceres Seq. ID no. 13618745
QQQVFLTKMDSRIFLAFSLCFLFTLPLISSAPNRFLTRSSNTRDGSVIKMKTSASSFGFDPTRVTQLSWTPRVFLYEGFLSDEECDHFIKLAKGKLEKSMVADNDSGESVESEVRTSSGMFLSKRQDDIVSNVEAKLAAWTFLPEENGESMQILHYENGQKYEPHFDYFHDQANLELGGHRIATVLMYLSNVEKGGETVFPMWKGKATQLKDDSWTECAKQGYAVKPRKGDALLFFNLHPNATTDSNSLHGSCPVVEGEKWSATRWIHVKSFERAFNKQSGCMDENVSCEKWAKAGECQKNPTYMVGSDKDHGYCRKSCKACSS

SEQ ID NO: 106098 - protein, 316 aa, Arabidopsis thaliana; identical to SEQ ID NO: 28039
  peptide (1)..(316): Ceres Seq. ID no. 13618746

SEQ ID NO: 106099 - protein, 275 aa, Arabidopsis thaliana; identical to SEQ ID NO: 28040
  peptide (1)..(275): Ceres Seq. ID no. 13618747

SEQ ID NO: 106100 - DNA, 965 bp, Arabidopsis thaliana
  misc_feature (1)..(965): Ceres Seq. ID no. 13618748
  misc_feature (1)..(965): Ortholog of  Ceres SEQ ID NO 12583421 as cited in SEQ ID NO 56410
  misc_feature (1)..(965): Ortholog of  Ceres SEQ ID NO 15176407 as cited in SEQ ID NO 59620
  misc_feature (1)..(965): Ortholog of  Ceres SEQ ID NO 13596876 as cited in SEQ ID NO 62696
  misc_feature (1)..(965): Ortholog of  Ceres SEQ ID NO 13655442 as cited in SEQ ID NO 64359
  misc_feature (1)..(965): Ortholog of  Ceres SEQ ID NO 14303652 as cited in SEQ ID NO 67569
atggattctcaatattttcttgcattttccctttctcttctcttgattttctctcaaatttcatctttctcctttagtgttgatccaactagaatcactcaactctcttggactcctagggcatttttatacaaaggatttctctcagatgaggaatgtgatcatttgattaagttggcaaaaggaaagcttgagaagtcaatggtggtggctgatgttgattcaggtgagagtgaagacagtgaagtacgcacaagttctggaatgtttctgaccaaaagacaggatgatatagtagctaatgtcgaggctaaacttgctgcatggacctttcttcctgaggaaaatggggaagccttacaaatactgcactatgagaatggtcaaaaatatgatccgcatttcgactatttttacgacaagaaagctctagagctaggtggtcatcggatcgccaccgtactaatgtacttgtccaatgtcacaaagggtggagaaacagtgtttcccaactggaagggtaaaacacctcagctgaaagacgatagctggtcgaaatgtgcaaaacaaggctatgcagtgaaaccgaggaaaggtgacgcattattgttcttcaatcttcatctaaatggaacaacggacccaaatagcttacatggaagttgtccggtgattgagggagagaaatggtcagcaactagatggattcatgttaggtcattcggtaagaagaaacttgtgtgtgtggacgatcatgagagctgccaagaatgggcagatgcaggggaatgcgagaagaatccaatgtacatggtgggttcggaaacttcccttggattttgtagaaagagctgcaaagcttgttgatcttaagaacaacaacaagtgactagattctttcacataacgaaaaacccggtgttttgtaatgaagcatgatgatatctatatttctaatgaagtgt

SEQ ID NO: 106101 - protein, 288 aa, Arabidopsis thaliana
  peptide (1)..(288): Ceres Seq. ID no. 13618749
MDSQYFLAFSLSLLLIFSQISSFSFSVDPTRITQLSWTPRAFLYKGFLSDEECDHLIKLAKGKLEKSMVVADVDSGESEDSEVRTSSGMFLTKRQDDIVANVEAKLAAWTFLPEENGEALQILHYENGQKYDPHFDYFYDKKALELGGHRIATVLMYLSNVTKGGETVFPNWKGKTPQLKDDSWSKCAKQGYAVKPRKGDALLFFNLHLNGTTDPNSLHGSCPVIEGEKWSATRWIHVRSFGKKKLVCVDDHESCQEWADAGECEKNPMYMVGSETSLGFCRKSCKAC

SEQ ID NO: 106102 - protein, 221 aa, Arabidopsis thaliana
  peptide (1)..(221): Ceres Seq. ID no. 13618750
MVVADVDSGESEDSEVRTSSGMFLTKRQDDIVANVEAKLAAWTFLPEENGEALQILHYENGQKYDPHFDYFYDKKALELGGHRIATVLMYLSNVTKGGETVFPNWKGKTPQLKDDSWSKCAKQGYAVKPRKGDALLFFNLHLNGTTDPNSLHGSCPVIEGEKWSATRWIHVRSFGKKKLVCVDDHESCQEWADAGECEKNPMYMVGSETSLGFCRKSCKAC

SEQ ID NO: 106103 - protein, 200 aa, Arabidopsis thaliana
  peptide (1)..(200): Ceres Seq. ID no. 13618751
MFLTKRQDDIVANVEAKLAAWTFLPEENGEALQILHYENGQKYDPHFDYFYDKKALELGGHRIATVLMYLSNVTKGGETVFPNWKGKTPQLKDDSWSKCAKQGYAVKPRKGDALLFFNLHLNGTTDPNSLHGSCPVIEGEKWSATRWIHVRSFGKKKLVCVDDHESCQEWADAGECEKNPMYMVGSETSLGFCRKSCKAC

SEQ ID NO: 106104 - DNA, 1707 bp, Arabidopsis thaliana
  misc_feature (1)..(1707): Ceres Seq. ID no. 13618754
  misc_feature (1)..(1707): Ortholog of  Ceres SEQ ID NO 12612314 as cited in SEQ ID NO 51420
atcttcttcccccataacactcttcttctctcatcaaaatctctaactcaaaccttcctttgatcccaagaaatctcttccaaagccctaagccaaaagcttcaagagaaaaaatggcgatgatgggtcagttatggactaacacaggctctgctcttgcaacactaatgtttgtatacacaatcttcaaacaattcttccctctcttcggaccccagttggaaccattcctttatagactcttcggtcgcttctacccttacatccaaataacattccatgaatacagcggagagcatttcaagagaagcgaagcctacttggggatccagagctatctaagcaaagactcttctgctagagcaaagaaactcaaagccaacacaactaaaggaagcaaatctattgttcttagcatggatgataaggaagagatcactgacgattttgagggcattagggtttggtggcagtcgaagaaagagggagctactaggcaatctttctcgttttaccctgaagctaatgagaagagatattacatgttaaggttccacagacgtgaccgagaagtaatcatagagaggtatcttgagcatgttatgagagaagggaagacgatagagcaaaagaacagagagaggaagctttattcgaatactccgggtcagagccatggaaacaacagtaagtggagtcatgtaacctttgagcatccagctacgtttgatactctagctatggaagagaataagaaggaagagatcaagagtgatctgatcaagtttagtaagagtaaagattattacaagaagatcggaaaagcgtggaagagagggtatcttttgtttggaccacccgggactgggaagtctacaatgatcgcagcgatggctaatttcttggagtatgatgtttatgatcttgagttgacaacggttaaggataatacacatctgagaaggttattgattgagacttcagcgaaatcgattattgtgattgaagatatcgattgttcgcttaatctaacggggcagagaaagaagaaggaggaggaagaggaagatggagacgataagaacacgattgagaagaagatgatgatgaagaatgaaggtgagaataaagagagtaaagttactttatcagggctactaaatttcattgatggtttatggtcagcttgtggtggtgagaggatcattgtattcactacaaactttgtggacaagttagatccggctttgattaggaaaggaagaatggataagcatatagagatgtcgtattgttgtttcgaagcgtttaaggtattggctaagaactatttggatgtggaagagagtgagatgtttgaggagataaagaggttgcttgaggttgaagaaatcaagatgacaccggcggatgttggggagaatctgttaccgaagtcagaaaaggaaggaggtgagacttgtttgaagagattgatcgaagcgttgaaggaagagaaggaggaagcgaagaagaaggtcgaggaagaggaggaagagaagcagaggaaaaaggaaaaggtgaaagaaatagaggcagagaaagagaagaagaaaaagattgaagaagagaattgagtttgaaggaaatttgttggattgtagtatctaactgaaataattgtagtctgattggttcatcttatgaatgttttgtgtttcatttagc

SEQ ID NO: 106105 - protein, 500 aa, Arabidopsis thaliana; identical to SEQ ID NO: 21168
  peptide (1)..(500): Ceres Seq. ID no. 13618755

SEQ ID NO: 106106 - protein, 498 aa, Arabidopsis thaliana; identical to SEQ ID NO: 21169
  peptide (1)..(498): Ceres Seq. ID no. 13618756

SEQ ID NO: 106107 - protein, 497 aa, Arabidopsis thaliana; identical to SEQ ID NO: 21170
  peptide (1)..(497): Ceres Seq. ID no. 13618757

SEQ ID NO: 106108 - DNA, 950 bp, Arabidopsis thaliana
  misc_feature (1)..(950): Ceres Seq. ID no. 13618779
  misc_feature (1)..(950): Ortholog of  Ceres SEQ ID NO 14309328 as cited in SEQ ID NO 0
aatcttcatttcttgagagatccaaaaaaagaatcagaaagaagaagaagaagactccaaaaacgatgccgtattacaccaacgacgacaatgacgtcgacgatttcaccgaatacgatccgatgccttatagtggaggctacgacatcaccgtgacatacggccgttcaattccaccgtccgacgagacttgttaccctctctcctctctctccggcgacgcctttgagtatcagcgacctaatttctcttctaaccacgattcttctgcttatgacgaccaagctcttaaaaccgagtacagtagctatgcacgacccggacccgttggatctggatctgattttggccggaaacctaattctggatatggagggagaacggaggttgagtatggccggaaaactgaatcggagcatggatctggctatggtggaagaattgagagcgattacgtgaagcctagctatggcggtcacgaggatgatggtgacgatggtcacaaaaaacatagtggtaaggattatgatgatggagatgagaagagtaagaagaaggagaaggagaagaagaaggataagaagaaagatggtaataactctgaagatgatgagtttaagaagaagaagaagaaagagcagtacaaggagcatcatgatgatgatgattatgatgagaagaagaagaagaagaaagactataatgatgatgatgagaagaagaagaagaagcattataatgatgatgatgatgagaagaagaagaagcataattacaatgatgatgatgatgagaagaagaagaagaaggagtatcatgatgatgaggataagaagaagaagaagcactatgataatgatgatgatgagaagaagaagaagaaggatcatcgtgatgatgatgatgagaagaagaagaagaaggataagcaccacaagggacatgactaa

SEQ ID NO: 106109 - protein, 315 aa, Arabidopsis thaliana
  peptide (1)..(315): Ceres Seq. ID no. 13618780
SSFLERSKKRIRKKKKKTPKTMPYYTNDDNDVDDFTEYDPMPYSGGYDITVTYGRSIPPSDETCYPLSSLSGDAFEYQRPNFSSNHDSSAYDDQALKTEYSSYARPGPVGSGSDFGRKPNSGYGGRTEVEYGRKTESEHGSGYGGRIESDYVKPSYGGHEDDGDDGHKKHSGKDYDDGDEKSKKKEKEKKKDKKKDGNNSEDDEFKKKKKKEQYKEHHDDDDYDEKKKKKKDYNDDDEKKKKKHYNDDDDEKKKKHNYNDDDDEKKKKKEYHDDEDKKKKKHYDNDDDEKKKKKDHRDDDDEKKKKKDKHHKGHD

SEQ ID NO: 106110 - protein, 294 aa, Arabidopsis thaliana; identical to SEQ ID NO: 84942
  peptide (1)..(294): Ceres Seq. ID no. 13618781

SEQ ID NO: 106111 - protein, 275 aa, Arabidopsis thaliana; identical to SEQ ID NO: 84943
  peptide (1)..(275): Ceres Seq. ID no. 13618782

SEQ ID NO: 106112 - DNA, 1002 bp, Arabidopsis thaliana
  misc_feature (1)..(1002): Ceres Seq. ID no. 13618790
  misc_feature (1)..(1002): Ortholog of  Ceres SEQ ID NO 13594163 as cited in SEQ ID NO 60426
attcaatttttggtggtcttttcaaaagtggaaatacaacaaaacaatgtcgggacttagaagattggatggcaagatcgcaattataacaggcggagctagtgggattggagctgaagcggttaggttgttcacggaccatggagctaaagtggtcatcgtggacatacaagaagagcttggccaaaacctcgccgtttcgatagggctagacaaagcaagtttttaccgttgtaatgtaaccgacgagacggatgtcgagaacgccgttaagttcaccgttgaaaaacacggaaagcttgacgttctgtttagtaacgccggggtcttggaagcgtttggaagcgttcttgatttggatcttgaggcgtttgatcgaacgatggcggttaacgttcgcggtgcggctgcgtttatcaaacacgcggcacgttcgatggtggctagtggtactcgtggctccattgtatgtacgacgagtattgcggcagagataggtggtccgggacctcatagttacacggcttctaagcacgcgcttctcgggctgatccgatcagcgtgtgctggactggggcagtacggtattagagtcaacggtgttgcaccgtatggggttgccacggggatgactagcgcctacaatgaggaagcggtgaagatgcttgaagaatatggtgaagccctagggaatctcaaaggtgtggtgcttaaagctcgccacatcgcagaagcagctttgtttttggcttctgatgattcggtttatattagcggtcagaatctggtggttgatggtggttttagcgtcgttaagctcatgaccacgtgagaaacaactaaaaaatgagggcatagactctcttgacactttcattttatttcttgaataaaaattgaatttataagtactttcgatcattgtgttgtatgttaggctcttgagtttatataaaccttgagtttaatagtttactttttcttttagtttctcaattctat

SEQ ID NO: 106113 - protein, 276 aa, Arabidopsis thaliana
  peptide (1)..(276): Ceres Seq. ID no. 13618791
FNFWWSFQKWKYNKTMSGLRRLDGKIAIITGGASGIGAEAVRLFTDHGAKVVIVDIQEELGQNLAVSIGLDKASFYRCNVTDETDVENAVKFTVEKHGKLDVLFSNAGVLEAFGSVLDLDLEAFDRTMAVNVRGAAAFIKHAARSMVASGTRGSIVCTTSIAAEIGGPGPHSYTASKHALLGLIRSACAGLGQYGIRVNGVAPYGVATGMTSAYNEEAVKMLEEYGEALGNLKGVVLKARHIAEAALFLASDDSVYISGQNLVVDGGFSVVKLMTT

SEQ ID NO: 106114 - protein, 261 aa, Arabidopsis thaliana
  peptide (1)..(261): Ceres Seq. ID no. 13618792
MSGLRRLDGKIAIITGGASGIGAEAVRLFTDHGAKVVIVDIQEELGQNLAVSIGLDKASFYRCNVTDETDVENAVKFTVEKHGKLDVLFSNAGVLEAFGSVLDLDLEAFDRTMAVNVRGAAAFIKHAARSMVASGTRGSIVCTTSIAAEIGGPGPHSYTASKHALLGLIRSACAGLGQYGIRVNGVAPYGVATGMTSAYNEEAVKMLEEYGEALGNLKGVVLKARHIAEAALFLASDDSVYISGQNLVVDGGFSVVKLMTT

SEQ ID NO: 106115 - protein, 149 aa, Arabidopsis thaliana
  peptide (1)..(149): Ceres Seq. ID no. 13618793
MAVNVRGAAAFIKHAARSMVASGTRGSIVCTTSIAAEIGGPGPHSYTASKHALLGLIRSACAGLGQYGIRVNGVAPYGVATGMTSAYNEEAVKMLEEYGEALGNLKGVVLKARHIAEAALFLASDDSVYISGQNLVVDGGFSVVKLMTT

SEQ ID NO: 106116 - DNA, 625 bp, Arabidopsis thaliana
  misc_feature (1)..(625): Ceres Seq. ID no. 13618794
  misc_feature (1)..(625): Ortholog of  Ceres SEQ ID NO 12611212 as cited in SEQ ID NO 56066
  misc_feature (1)..(625): Ortholog of  Ceres SEQ ID NO 15178576 as cited in SEQ ID NO 64133
atggatgaaggaagagaaggagagatagagaagaagaagaagaaagatgaagaaggagaagtgaaggaaggagtagcatcaatagctttgttaccatgtgggactatctctggtcatttcattcagatgcctagctctatctgttatggcctccatggcactgaactagcttgtgagactgagtgtagccgcggtgaggattatcggttgatcaaactcactatcatagactacaatagaaagaaggaacaaacagttgtagtggagtgcaaaggccatgatgctgctcgaattaatgatgtcgagcatgctcacgggtgggaggaagatgtgataggattagtcgaagaaaaacacgggaagaagaaagtatcggtttcgttcgagtgtgagacattgaaggcagatgaagcagcagaggaccatatcagacagtttatgcccaaattagctggacttgatgctgttattaacattggaccgatgaagatttccgggcttgattttgctgcggtggaagagggacacataaactaagacagcttaactctttctttttgtgtatacatcatatttgaatgctctttgagtctttgtttcatatcgtagaacacaattaacgctt

SEQ ID NO: 106117 - protein, 178 aa, Arabidopsis thaliana
  peptide (1)..(178): Ceres Seq. ID no. 13618795
MDEGREGEIEKKKKKDEEGEVKEGVASIALLPCGTISGHFIQMPSSICYGLHGTELACETECSRGEDYRLIKLTIIDYNRKKEQTVVVECKGHDAARINDVEHAHGWEEDVIGLVEEKHGKKKVSVSFECETLKADEAAEDHIRQFMPKLAGLDAVINIGPMKISGLDFAAVEEGHIN

SEQ ID NO: 106118 - protein, 136 aa, Arabidopsis thaliana
  peptide (1)..(136): Ceres Seq. ID no. 13618796
MPSSICYGLHGTELACETECSRGEDYRLIKLTIIDYNRKKEQTVVVECKGHDAARINDVEHAHGWEEDVIGLVEEKHGKKKVSVSFECETLKADEAAEDHIRQFMPKLAGLDAVINIGPMKISGLDFAAVEEGHIN

SEQ ID NO: 106119 - DNA, 1611 bp, Arabidopsis thaliana
  misc_feature (1)..(1611): Ceres Seq. ID no. 13618800
  misc_feature (1)..(1611): Ortholog of  Ceres SEQ ID NO 13594209 as cited in SEQ ID NO 59089
  misc_feature (1)..(1611): Ortholog of  Ceres SEQ ID NO 13502874 as cited in SEQ ID NO 66298
  misc_feature (1)..(1611): Ortholog of  Ceres SEQ ID NO 12614124 as cited in SEQ ID NO 68392
atcgataaccaaataaaaaatggcgatctctttcctctgtgtttttctcatcaccttcgtttcgttaatcttttttgccaagaaaatcaaacgatcaaaatggaatcttcctccaagccctcccaagtttccggtcatcgggaacttacatcagattggagaattgcctcacaggtcacttcaacatctcgccgaaagatacggacctgtgatgcttcttcactttgggtttgtccctataactgtggtctcatcgagagaagccgctgaagaagtgcttagaactcatgacctagactgttgcagcaggcctaagcttgtcgggacaaggttactctcgcgggattttaaagatatcggttttacgccatacggtaacgagtggaaggcgcggcgtaagtttgccctgcgtgagcttttctgtttgaaaaaggttcagtcctttaggcatatccgagaggaagaatgtaactttctggtcaagcaactgtcggaatctgcggttgatcgctctccggtcgatttgagcaaatcccttttctggctaaccgctagtatcctttttagagttgccttaggacagaattttcacgagagcgattttatcgataaagaaaagatcgaagagctcgtgttcgaagctgagactgccctagcaagtttcacttgttctgatttcttccctgttgccggacttggatggctcgttgattggttttccggacaacacaagagactcaacgatgttttttacaagctcgatgctctgtttcaacatgtcatagatgatcatttaaatcctggaagatcaaaagagcacgaagacatcatcgattcaatgttggatgtgattcataaacaaggagaggacagttccttagagctcacaatagatcatatcaaggggtttctcgcgaatatatttcttgcagggatagacacaggggccatcaccatgatatgggcagtgacggagctcgttaaaaacccgaaactgataaagaaagttcaaggcgatatccgagaacaacttggcagcaataaggagagaatcaccgaggaagatatcgagaaagttccttacttgaagatggtaatcaaagaaacattcaggttacacccagcagctcctcttatacttccaagggaaacaatggctcacatcaaagttcaagggtatgatattcctcccaagaggaggatcttggtcaatgtttcggcaataggaagagatcccaaactctggacaaacccgaaagagtttgaccctgagaggtttatggatagctttgttgattataggggacaacattacgagctcttaccatttgggtccggtcgaaggatatgtcccgggatgccaatggggattgctgccgtcgaattgggactcttgaacttactttacttcttcgattggaagttgcctgatgggatgacacataaagatatcgatactgaagaagctggtactcttacaatagtcaagaaagtacctctcaagctcgttccagttcgagttcagtgatcagaccaaactccaaaccttttgaataaatatatcatgcaaatcatgtaagcttctctgatgatgtatgaagtatatttttc

SEQ ID NO: 106120 - protein, 502 aa, Arabidopsis thaliana; identical to SEQ ID NO: 37033
  peptide (1)..(502): Ceres Seq. ID no. 13618801

SEQ ID NO: 106121 - protein, 438 aa, Arabidopsis thaliana; identical to SEQ ID NO: 37034
  peptide (1)..(438): Ceres Seq. ID no. 13618802

SEQ ID NO: 106122 - DNA, 1607 bp, Arabidopsis thaliana
  misc_feature (1)..(1607): Ceres Seq. ID no. 13618803
  misc_feature (1)..(1607): Ortholog of  Ceres SEQ ID NO 13594209 as cited in SEQ ID NO 59089
  misc_feature (1)..(1607): Ortholog of  Ceres SEQ ID NO 14303546 as cited in SEQ ID NO 64893
  misc_feature (1)..(1607): Ortholog of  Ceres SEQ ID NO 13502874 as cited in SEQ ID NO 66298
  misc_feature (1)..(1607): Ortholog of  Ceres SEQ ID NO 12614124 as cited in SEQ ID NO 68392
taaaacaaaataacatacaaatggatagcatttggattctatcacttctcttcttcatcatctttcttcttctggccgccttcaaacgcaaaaatcatgggaaacatcgacgaataccatctcctcctggttttccaatcatcggaaacttacatcagctcggagaattacaacatcagtctctatggaagctctcaaagaagtatggccctgtgatgcttttgaagcttggaaaagtccccacactcatactttcttcatcagaaacagcaaaacaagctctaagagactatgatctccattgttgtagccgtccttccttagcaggaggaagagagctctcttacaacaatctagatatgtcttcatctccttataatgaatattggaaggaactaaggaagctctgcagtcaagaactctttagtgctaataaaattcaatcgattcaacctattaaggacgaggaggtcaagaaagttatcgattcaatcgcggaatcatcttctctaaagaatccggttaacttgagcaagacgtttcttgctttaactacaagtgtagtatgcaaggcagcatttggtgtgagttttgagggaagtgtgctcaacagtgatagattcaataagttagtccgagatactttcgagatgttgggaagcttctctgcctcagattttattccgtatgtcggatggatcatcgataagttcaatggtttacaagggtggagaaagaaaagctttcgagatcttgatgcgttctatgaacaaatttttgatctgcataaggaagagaaggaagtaggaagtgaagatttagtggatgtgctcttgaggttggagaaagaagaaattgttgttggaaatggcaagctcacaagaaatcatatcaaagcaattttgatgaacattcttttaggaggaatcgatacttctgcaataacaatgacatgggcaatggcagaacttgctaaaaaccctagagtgatgaagaaagttcaagcagaaatcagaaaccaaatcaagaacaaagaaagaatcagctttgatgacactgataagctcgagtacttgaaaatggtgatcaaagaaacatggaggttacatcctccaacacctcttctcctcccaagagatgtaatcactgaatttgagatcaatggctacacgattcctgccaaaacacggcttcatgtgaatgtttgggctatcgggcgtgatcctgatacatggaaagatccagaaatgtttctccccgaaaggtttaatgatagtaacattgatgcaaaaggacagaactttgagttgttgtcgtttgggagtggtaggagaatttgtcctggactgtacatgggaacaacaatggtggagtttggcctagctaatatgttgtatcattttgattggaagttaccagaaggcatggtagtcgaagatatcgatatggaagaagctcctggacttactgtgagcaaaaaaagtgagcttgtacttgttccagtgaagtatttagaccattgattcacgtgaattagttcttcatcgattgtactatgaataagaacgaaatgataatgataattttcaatgtaatattttttttct

SEQ ID NO: 106123 - protein, 506 aa, Arabidopsis thaliana
  peptide (1)..(506): Ceres Seq. ID no. 13618804
KQNNIQMDSIWILSLLFFIIFLLLAAFKRKNHGKHRRIPSPPGFPIIGNLHQLGELQHQSLWKLSKKYGPVMLLKLGKVPTLILSSSETAKQALRDYDLHCCSRPSLAGGRELSYNNLDMSSSPYNEYWKELRKLCSQELFSANKIQSIQPIKDEEVKKVIDSIAESSSLKNPVNLSKTFLALTTSVVCKAAFGVSFEGSVLNSDRFNKLVRDTFEMLGSFSASDFIPYVGWIIDKFNGLQGWRKKSFRDLDAFYEQIFDLHKEEKEVGSEDLVDVLLRLEKEEIVVGNGKLTRNHIKAILMNILLGGIDTSAITMTWAMAELAKNPRVMKKVQAEIRNQIKNKERISFDDTDKLEYLKMVIKETWRLHPPTPLLLPRDVITEFEINGYTIPAKTRLHVNVWAIGRDPDTWKDPEMFLPERFNDSNIDAKGQNFELLSFGSGRRICPGLYMGTTMVEFGLANMLYHFDWKLPEGMVVEDIDMEEAPGLTVSKKSELVLVPVKYLDH

SEQ ID NO: 106124 - protein, 500 aa, Arabidopsis thaliana; identical to SEQ ID NO: 38278
  peptide (1)..(500): Ceres Seq. ID no. 13618805

SEQ ID NO: 106125 - protein, 435 aa, Arabidopsis thaliana; identical to SEQ ID NO: 38279
  peptide (1)..(435): Ceres Seq. ID no. 13618806

SEQ ID NO: 106126 - DNA, 674 bp, Arabidopsis thaliana
  misc_feature (1)..(674): Ceres Seq. ID no. 13618807
  misc_feature (1)..(674): Ortholog of  Ceres SEQ ID NO 12610267 as cited in SEQ ID NO 51993
  misc_feature (1)..(674): Ortholog of  Ceres SEQ ID NO 13495070 as cited in SEQ ID NO 53216
  misc_feature (1)..(674): Ortholog of  Ceres SEQ ID NO 13661333 as cited in SEQ ID NO 61620
  misc_feature (1)..(674): Ortholog of  Ceres SEQ ID NO 13596812 as cited in SEQ ID NO 62283
  misc_feature (1)..(674): Ortholog of  Ceres SEQ ID NO 13623021 as cited in SEQ ID NO 0
atggctttgaagacggcgacgagtggtatgtggatgacggatgattgcaagaaatcgttcatggagatgaaatggaagaaagtgcatagatacgtcgtttacaaactcgaggagaagtctcggaaagtcaccgtcgacaaggttggtgccgccggcgagagctacgacgatctcgctgcttctttgccggaggatgactgtcgttacgccgtgtttgatttcgattacgtcaccgtcgataactgtcgtatgagcaagatcttcttcataacttggtcgccggaggcttcaaggataagggagaagatgatgtacgcgacgtcgaagagcggactgagaagagtgttggatggtgttcactacgagcttcaagccaccgacccaaccgagatgggatttgataaaatccaggaccgggccaaatgatcacaacacataactggagttatatcgtcagtaactagctgttcttaacagttatgacttatgagcagcaattaattatctattaatgttatttagtgcttaacctcttccctttggttgtcaaacaaaatgatttacttctattttgttgacaatagtactaaactattattagtgtttcagtttaattgttgttgtttagttttttaaaaactatgttgaatgttattttgtctctttttgtcact

SEQ ID NO: 106127 - protein, 141 aa, Arabidopsis thaliana
  peptide (1)..(141): Ceres Seq. ID no. 13618808
MALKTATSGMWMTDDCKKSFMEMKWKKVHRYVVYKLEEKSRKVTVDKVGAAGESYDDLAASLPEDDCRYAVFDFDYVTVDNCRMSKIFFITWSPEASRIREKMMYATSKSGLRRVLDGVHYELQATDPTEMGFDKIQDRAK

SEQ ID NO: 106128 - protein, 132 aa, Arabidopsis thaliana
  peptide (1)..(132): Ceres Seq. ID no. 13618809
MWMTDDCKKSFMEMKWKKVHRYVVYKLEEKSRKVTVDKVGAAGESYDDLAASLPEDDCRYAVFDFDYVTVDNCRMSKIFFITWSPEASRIREKMMYATSKSGLRRVLDGVHYELQATDPTEMGFDKIQDRAK

SEQ ID NO: 106129 - protein, 130 aa, Arabidopsis thaliana; identical to SEQ ID NO: 73917
  peptide (1)..(130): Ceres Seq. ID no. 13618810

SEQ ID NO: 106130 - DNA, 908 bp, Arabidopsis thaliana
  misc_feature (1)..(908): Ceres Seq. ID no. 13618823
  misc_feature (1)..(908): Ortholog of  Ceres SEQ ID NO 12610239 as cited in SEQ ID NO 56199
  misc_feature (1)..(908): Ortholog of  Ceres SEQ ID NO 12782126 as cited in SEQ ID NO 60168
aaccatatcttccgatttctcttatctctctgaagccacaaatctccagattcattcgtcgtctcggttaaggttagacggagaagaagatacaacaaatatggcggttagtatgaaacaaatgtcgttggtcgtctctgctttgggcgtcttatcctttgttttgggagttatcgccgagaacaagaagcctgcgtctgggactccaataagtggaaaaggagtagttatctgcaaatacccatctgatccaactgttgccttgggatacctttctgctgcttttctccttgcctgcactgtagcaggatacaaatccttgttcatctcttacaagggaaagtctgttcctaactctgtcttgttcaaaagcaccagcttctctgtgttcttcaacattgccttgataacatctggactggccttgtctctgttgctctggccaaccattacagaacaacttcacttgacccgtaatgttcaccgaaacttagaaaccagttgccccacggctaagaccggtctgcttggtggaggtgcctttgtgtctttggactcgtgccttttctggttggttgctctgatgctcgctgataacgcccgtgaagaccattttgatgaagttgaaagcagaagcatcgatgggaactcttcctccagggatgtgaatctcaagattgatgcttgagagaatgatatgcttttattggtattgggtataagaagggtttttcatttgttttctacttgtttgattaggaaaataataatttgtttcttctgttgttttttttttttttaatgattggctagaatgttatgaaacccatctctgcaccttgatgcattgtgattcataagctgtatctgtgaaaaataatcttttggttatatctcttacatttgac

SEQ ID NO: 106131 - protein, 228 aa, Arabidopsis thaliana
  peptide (1)..(228): Ceres Seq. ID no. 13618824
TISSDFSYLSEATNLQIHSSSRLRLDGEEDTTNMAVSMKQMSLVVSALGVLSFVLGVIAENKKPASGTPISGKGVVICKYPSDPTVALGYLSAAFLLACTVAGYKSLFISYKGKSVPNSVLFKSTSFSVFFNIALITSGLALSLLLWPTITEQLHLTRNVHRNLETSCPTAKTGLLGGGAFVSLDSCLFWLVALMLADNAREDHFDEVESRSIDGNSSSRDVNLKIDA

SEQ ID NO: 106132 - protein, 195 aa, Arabidopsis thaliana
  peptide (1)..(195): Ceres Seq. ID no. 13618825
MAVSMKQMSLVVSALGVLSFVLGVIAENKKPASGTPISGKGVVICKYPSDPTVALGYLSAAFLLACTVAGYKSLFISYKGKSVPNSVLFKSTSFSVFFNIALITSGLALSLLLWPTITEQLHLTRNVHRNLETSCPTAKTGLLGGGAFVSLDSCLFWLVALMLADNAREDHFDEVESRSIDGNSSSRDVNLKIDA

SEQ ID NO: 106133 - protein, 191 aa, Arabidopsis thaliana; identical to SEQ ID NO: 27974
  peptide (1)..(191): Ceres Seq. ID no. 13618826

SEQ ID NO: 106134 - DNA, 1794 bp, Arabidopsis thaliana
  misc_feature (1)..(1794): Ceres Seq. ID no. 13618836
  misc_feature (1)..(1794): Ortholog of  Ceres SEQ ID NO 12625388 as cited in SEQ ID NO 63299
actctttcaacttttaaacataatcctaaatgactatcttacccctatcaagacaagcctgagaagtgagaacaacttcgtagacatcgtcgtgtctctctctcgttgaatccttgttaatctttttcttcaatctctcgatctgatcgttatcgaaaccgcgcgattctaaccaagtccagttaattttgtgctccatagcgattccatggcttctttaatgttatctctcggttccacttctctgttaccgcgcgagattaacaaggataagctaaagcttggaacttctgcttcgaacccgttcctaaaagcaaagtcttttagcagagtgactatgacggttgcagtgaagccttctcgtttcgagggtataactatggctccaccagaccctattcttggagtcagtgaagcattcaaagctgacactaacgggatgaaactcaatcttggtgttggtgcttatcgtactgaggaactccagccttatgtgcttaatgttgttaaaaaggcggagaatttgatgttggagagaggagataacaaagagtatcttccaattgaggggttggcagcattcaacaaggctactgctgagttgctatttggagctggtcatcctgttattaaggaacaaagagtagcaacaattcagggtctttcgggaacaggttcactgcgattagcagcggctcttatagagcgttatttccctggagcaaaagttgtgatctcatcaccaacctggggtaatcacaagaatatcttcaatgatgccaaagttccgtggtccgaataccgctactatgatccaaaaacaattggtttggattttgagggaatgatagcagatataaaggaagctccagaaggatccttcatcttgcttcacggatgtgctcacaacccaactggaattgacccaacaccagaacagtgggtaaaaattgctgatgtcattcaggaaaagaaccatatcccatttttcgatgttgcataccagggctttgctagtggaagccttgatgaagatgcagcatctgtgagattatttgctgagcggggaatggagttttttgttgctcagtcatatagtaaaaatttaggtttgtatgcagaaagaattggggcaatcaatgtcgtgtgctcctcagctgatgctgctacaagggtcaagagccagttgaaaaggattgctcggcctatgtactcgaatccaccagttcatggggcgagaatcgtggccaatgtagtgggtgatgtaactatgttcagtgaatggaaagcagagatggaaatgatggcaggaagaataaagacggttagacaagagctgtatgatagcctcgtttcaaaagacaagagcgggaaggactggtccttcattctgaagcaaattggcatgttctctttcaccggcctaaacaaagctcagagcgataacatgacggacaaatggcatgtgtatatgactaaagacgggaggatatcattggccggattatctctggccaaatgcgagtatcttgctgatgcgatcatcgactcataccataacgtaagctgagcttccatctcagtagatgacaataagaaacagttttatataccctttttagcttcttcttgatctttgattgaaaccagatggctaaattaataagctagcatcacactatgattgctagacaattttcaaggaaacttttgatttgatcgtgtttgacaggccttgttgtattgggagactcccatcgagttatagaagaacttgttacgattgtattttac

SEQ ID NO: 106135 - protein, 453 aa, Arabidopsis thaliana; identical to SEQ ID NO: 39108
  peptide (1)..(453): Ceres Seq. ID no. 13618837

SEQ ID NO: 106136 - protein, 449 aa, Arabidopsis thaliana; identical to SEQ ID NO: 39109
  peptide (1)..(449): Ceres Seq. ID no. 13618838

SEQ ID NO: 106137 - protein, 410 aa, Arabidopsis thaliana; identical to SEQ ID NO: 39110
  peptide (1)..(410): Ceres Seq. ID no. 13618839

SEQ ID NO: 106138 - DNA, 810 bp, Arabidopsis thaliana
  misc_feature (1)..(810): Ceres Seq. ID no. 13618840
  misc_feature (1)..(810): Ortholog of  Ceres SEQ ID NO 14306814 as cited in SEQ ID NO 56370
  misc_feature (1)..(810): Ortholog of  Ceres SEQ ID NO 13662830 as cited in SEQ ID NO 61566
  misc_feature (1)..(810): Ortholog of  Ceres SEQ ID NO 14309275 as cited in SEQ ID NO 0
gagttggaccagtcggaggattagggtttcaacggagactcactagtcgatctccgatcctttcttctacccgcccgaaatccgtcgaaacttctcttctttaccattgatttgcctcgtctcagctcaattctcttccgttgctgcttcgtttagttgttgcttcgcttcagtactctggtggtgggagagatgaatcacggccaacaatctggtgaggcaaagcatgaagatgatgctgctcttacagagttccttgcttctctgatggattatactcctactattcctgatgatttagtggagcactacttggctaagagtggatttcagtgccccgacgtacgattgataaggctagttgctgtggctacacaaaagtttgttgcagatgttgccagtgacgcccttcagcattgcaaggctagaccagcaccagttgtgaaagacaaaaaacagcaaaaggataagcgtttggtattgacaatggaagatctttcaaaagctttgcgtgagtatggtgtgaacgtgaagcatccagaatattttgctgatagcccttcgactggaatggaccctgcaacaagggacgaatagaaaccaggaattcctcaaaatctttgcctagtaaggacggtcatgtgtctcagatccctgattctctgttgtgtttcagttaaaaacaaaactcacttgtcttgctagtcctcaattactacattacatgtatattcgtttgttgtttgttctctggtgatttttggggttctacatcacttatccaccattcttgcaagtctccaagtcgtg

SEQ ID NO: 106139 - protein, 134 aa, Arabidopsis thaliana; identical to SEQ ID NO: 36011
  peptide (1)..(134): Ceres Seq. ID no. 13618841

SEQ ID NO: 106140 - protein, 109 aa, Arabidopsis thaliana; identical to SEQ ID NO: 36012
  peptide (1)..(109): Ceres Seq. ID no. 13618842

SEQ ID NO: 106141 - DNA, 1449 bp, Arabidopsis thaliana
  misc_feature (1)..(1449): Ceres Seq. ID no. 13618847
  misc_feature (1)..(1449): Ortholog of  Ceres SEQ ID NO 14315418 as cited in SEQ ID NO 57506
aaaagtaaaaccctaaaatctcaacgaaagggacgaccaattgttcgacgattggtcatggggaaaaccggaatccaattgttcgacgattcgaggaatgggtttttctccgtttccgatttaggattcgattcgagcctaaacagctctaattaccacccaattggtgggttattcgccagcgttaatcagactaatccattcgcatccctctcgtcctcggatctttccaacagaggcaacaacagcttctctacccagctcaatgatctctacaccaagtatatgccgggaaaagaggaggaggaagaagtagttaatggcgagaagaggaagaggaagaagaaaggtgggctcacactgaagattaagatcgctaatccttcgttgcggcggctattaagcggagcagtagctggagcggtgtcgagaacggtggttgcgccgttggagacaatcaggacgcatctaatggtgggaagtggaggaaactccagcactgaagtgttcagtgatatcatgaagcatgaaggttggactggtctcttcaggggcaatttggtcaatgtcattcgtgttgcacctgctcgagccgtcgagctttttgtattcgagaccgtaaacaagaaattgtcgccgccacatggacaagaatcgaaaatcccaattccagcttctttactggctggtgcctgtgctggagttagccagacactcttgacataccctcttgaactagtcaagactcgccttacaattcagagaggtgtttacaaagggatttttgatgcgtttctcaaaatcatacgcgaggaaggacccacagaactctacaggggtcttgctcctagccttattggagttgttccatacgcagctacaaattactttgcatatgattctttgagaaaagcataccggagtttttcaaagcaggagaagattggaaacattgagactcttttgataggttctttagcaggtgcactatcgagcactgcaactttccctcttgaagtggcccggaagcatatgcaggtgggagctgttagcgggagggttgtgtacaagaacatgttgcacgctctggtgaccatacttgagcatgaaggtattctcggttggtacaaagggcttggaccgagttgcttgaagttggttcctgctgctggaatctccttcatgtgttatgaagcttgcaagaagatactcatcgagaacaaccaagaagcttgattttggaattgtatggattcgtggcaaattttaaggattgatcagagaaacacattgtggatactaattgggttcattttacaccacttgagatttcacaaattagtattgaggggggattaaaagattcactctacctttttgtttgaactttacgttttcaatttttgattgatctgattctgattcaaataagagtttacacaatatctc

SEQ ID NO: 106142 - protein, 411 aa, Arabidopsis thaliana; identical to SEQ ID NO: 28871
  peptide (1)..(411): Ceres Seq. ID no. 13618848

SEQ ID NO: 106143 - protein, 392 aa, Arabidopsis thaliana; identical to SEQ ID NO: 28872
  peptide (1)..(392): Ceres Seq. ID no. 13618849

SEQ ID NO: 106144 - protein, 316 aa, Arabidopsis thaliana; identical to SEQ ID NO: 28873
  peptide (1)..(316): Ceres Seq. ID no. 13618850

SEQ ID NO: 106145 - DNA, 1296 bp, Arabidopsis thaliana
  misc_feature (1)..(1296): Ceres Seq. ID no. 13618851
  misc_feature (1)..(1296): Ortholog of  Ceres SEQ ID NO 14312769 as cited in SEQ ID NO 55493
  misc_feature (1)..(1296): Ortholog of  Ceres SEQ ID NO 13639300 as cited in SEQ ID NO 56701
atgtctttgatcgtcatttatttcagatgttcagtctcacctctgctgggattcgggtgcattcaaagagatcattcttcttcttcttcttctttgaagatgctaatatcgcctccgatcaaagccaatgatccaaaatctcgacttgttttacatgcagtatcagagtcaaaatccagctcagagatgagtggtgttgcaaaggatgaagagaaatctgatgaatatagccaagacatgactcaagctatgggtgctgttctaacttacaggcacgagttaggaatgaactacaactttattcgtccagatctaattgttggatcctgcttacagacccctgaagatgttgacaagcttcgtaaaattggagttaaaaccatattttgcttgcaacaagatccagacctggaatattttggagtagacataagcagcatccaagcctatgctaagaaatatagtgatattcagcatattcgctgtgaaattagagactttgatgcatttgatttgagaatgcgtcttccagccgtggttggtactctttacaaagctgttaagcgaaatggaggagttacatatgtgcactgcactgctggaatgggaagggctcctgctgttgcgttgacatacatgttctgggtgcaaggctataagcttatggaagctcataaattacttatgagcaaaaggtcgtgctttccgaagctggatgctatcagaaatgcaacaattgatattcttacaggactcaagaggaagactgttactctgacactgaaagataaggggttctccagagtagaaatttctggccttgacattggatggggacagaggatacctctaacactggacaagggaacaggattctggatcctaaagagagaactgcctgaaggacagtttgaatataaatacatcatagatggtgaatggacacacaatgaggccgaaccgtttataggacctaacaaagacggccataccaacaattacgctaaagtagtggacgatccaacaagtgtggatggtacaactcgggagagactatcgagcgaagaccctgagctgttggaggaagaacgctcgaaactaatccagttcttggagacttgttctgaggcagaagtttgagagttgagagcatccgactagactatgtgaatgtacaacttactagtaacaataaaatgcttcatgttagtaatacatacagttacgcttatagcagcaaaagaaaaaaacatgaagttagtagtactatgttcaagtataatatatagtttaaaa

SEQ ID NO: 106146 - protein, 379 aa, Arabidopsis thaliana
  peptide (1)..(379): Ceres Seq. ID no. 13618852
MSLIVIYFRCSVSPLLGFGCIQRDHSSSSSSLKMLISPPIKANDPKSRLVLHAVSESKSSSEMSGVAKDEEKSDEYSQDMTQAMGAVLTYRHELGMNYNFIRPDLIVGSCLQTPEDVDKLRKIGVKTIFCLQQDPDLEYFGVDISSIQAYAKKYSDIQHIRCEIRDFDAFDLRMRLPAVVGTLYKAVKRNGGVTYVHCTAGMGRAPAVALTYMFWVQGYKLMEAHKLLMSKRSCFPKLDAIRNATIDILTGLKRKTVTLTLKDKGFSRVEISGLDIGWGQRIPLTLDKGTGFWILKRELPEGQFEYKYIIDGEWTHNEAEPFIGPNKDGHTNNYAKVVDDPTSVDGTTRERLSSEDPELLEEERSKLIQFLETCSEAEV

SEQ ID NO: 106147 - protein, 346 aa, Arabidopsis thaliana; identical to SEQ ID NO: 40525
  peptide (1)..(346): Ceres Seq. ID no. 13618853

SEQ ID NO: 106148 - protein, 317 aa, Arabidopsis thaliana; identical to SEQ ID NO: 40526
  peptide (1)..(317): Ceres Seq. ID no. 13618854

SEQ ID NO: 106149 - DNA, 1423 bp, Arabidopsis thaliana
  misc_feature (1)..(1423): Ceres Seq. ID no. 13618855
  misc_feature (1)..(1423): Ortholog of  Ceres SEQ ID NO 13595525 as cited in SEQ ID NO 56679
  misc_feature (1)..(1423): Ortholog of  Ceres SEQ ID NO 15226984 as cited in SEQ ID NO 62173
  misc_feature (1)..(1423): Ortholog of  Ceres SEQ ID NO 14302236 as cited in SEQ ID NO 68793
aattttctgtctatatatatattaaggatccaaattagggagagaccaaagaggaaattaataacaatcaatccaacaacgaatggagattgaagaagcgagtcgtgaaagtggacatgttgtgtgcggatcatggattcgtcgcccgaagaaagtaaactgggttcttatcgctaaagcttccaaacgccgtggctcatctgtttcttctcctgctctcctcaacatcttctcttttgaccccattactgcttctctttcctcctctcctttggcaacacacacgcttaaggatagtgatggtgatcctgtggctgtttcagtgcaccctggtggggattactttgtttgctcaacctccaaaggtggttgcaagttatttgagcttgtcggaggagcaacaggtattacgatcttagccaaagaactccttcctctccaaaatgctggactacaaaagtgtatggccttcagctttgatgggtctaaattagctgttgggggagtggatggatgtcttagaattatggagtggccaaacctaagtgtaattttggatgagccaaaggcacacaaatccatccgggacatggattttagtcttgactcagagttcttagctacaacatcaactgatggatcagctagaatatggaaagcagaagatggttttcctttgtctactttggaacgtagtggggatgaaaatattgaactgtgccgtttctctaaagacggaacaaaaccttttttgttttgtgctgctcaaagaggtgatacgcctatggtcaatgtttatgacattagtacatggaagaagcttgggttcaagaagctgtcaaggaagactgcatcgacaatggcagtgagcttggacgggaaatatattgctttgggtgggaaagatggagatgtatctgttgctgaagttaagacaatggaaatctaccactacagtaagaggctgcatcttggtcaatccattgcttcacttgagttctgccccagtgaaagggttatgctgacaacttctagcgaatggggagagatggtgaccaaactcactgtaccaaaggagtggaaagagtggcagatatatgcactgctgttttgcttgttcatggcatcagtgatagctgcatacgtattcttcgagaactcagattcgttttggaagttaccaatgggaaaagatcaaaaaagaccaaagattagtctatttggaggttcctcctccacgccttctgaggatcatagtaggtggaacttggacctatagaaagattatgtaactttcctctgctttttcttctttcttccttatcttgttgcagcgtttttttttgtttttttcctttcttctgattttgctctgacaaatacctgttgattaattgatttatttacagacaattactgttgc

SEQ ID NO: 106150 - protein, 398 aa, Arabidopsis thaliana; identical to SEQ ID NO: 41856
  peptide (1)..(398): Ceres Seq. ID no. 13618856

SEQ ID NO: 106151 - protein, 271 aa, Arabidopsis thaliana; identical to SEQ ID NO: 41857
  peptide (1)..(271): Ceres Seq. ID no. 13618857

SEQ ID NO: 106152 - protein, 250 aa, Arabidopsis thaliana; identical to SEQ ID NO: 41858
  peptide (1)..(250): Ceres Seq. ID no. 13618858

SEQ ID NO: 106153 - DNA, 861 bp, Arabidopsis thaliana
  misc_feature (1)..(861): Ceres Seq. ID no. 13618865
  misc_feature (1)..(861): Ortholog of  Ceres SEQ ID NO 15172783 as cited in SEQ ID NO 52143
  misc_feature (1)..(861): Ortholog of  Ceres SEQ ID NO 13599514 as cited in SEQ ID NO 0
agggattctagggctttccttcattggtcagatcagacgacgttttacatcttcttcttcttcctcttcgatattcgtcagtgtgtgtattttggggaaaactttgtgagcaaagagcgagaaaatgagcggagccggtaagaaaatcgcggatgtggctttcaaagcttcaaggactatcgattgggatggtatggctaaggtccttgtcacagatgaggctcgtagagagttctctaaccttcgtcgtgctttcgatgaggttaacacacagctccagaccaaatttagtcaggaacctgaacctatagattgggattactataggaagggtattggagctggcattgttgacaagtacaaggaagcttatgacagcattgagattccaaagtacgttgacaaagttactcctgaatacaagccaaagtttgatgctttgttggtggaactgaaagaagcagaacagaaatcgctcaaggagtctgaacggttggagaaagaaattgctgatgtccaagagatcagcaaaaagctcagcaccatgactgcagatgagtactttgagaagcacccggaactcaaaaagaagtttgatgacgaaatccgtaatgacaactggggatactgatcatgtttctccatctccggcttggaaagaaaactctctttctctttctctgttctcttactgtgattttgtgagccaatcataacaataataagtacaccattcacttaagcagtgttgagatcttcattccaaggaagataaacgcatttggttttagttatcaatttcacaaattgtttcgtttcgttcttcagtgaataataagagtcaaaaaaattatcattgtc

SEQ ID NO: 106154 - protein, 168 aa, Arabidopsis thaliana; identical to SEQ ID NO: 20821
  peptide (1)..(168): Ceres Seq. ID no. 13618866

SEQ ID NO: 106155 - protein, 145 aa, Arabidopsis thaliana; identical to SEQ ID NO: 20822
  peptide (1)..(145): Ceres Seq. ID no. 13618867

SEQ ID NO: 106156 - DNA, 1301 bp, Arabidopsis thaliana
  misc_feature (1)..(1301): Ceres Seq. ID no. 13618876
  misc_feature (1)..(1301): Ortholog of  Ceres SEQ ID NO 15179926 as cited in SEQ ID NO 57010
ccatatttgactcgtcaatataaatacaattgtaacaaacagattttgatcaaaagattttacttttctcaattcctttcaactttcaaaatcgaagatctcttaagccatgaacgatcttctctccggctcgtttaaaacctccgtcgcggacggttcatcgccgccgcactcacacaacatcgagatgtcaaaagcgaaagtctccggcggaagttgccacggtggtaacaacctagacacgttcttcctcgacgtggaggttgtaaacgaagaccttaaagagctagatcgtctctgtcacaacctccgatcgagcaacgaacagagcaagacgcttcataacgctaacgcggtgaaggagctgaagaagaagatggacgctgacgtcactgctgcgcttaagacggcgaggcgcttgaaaggaaacctcgaggctttagatcgggctaatgaagtcaaccgaagtttaccggaaagtggaccgggttcgtcgtcggaccggcaaagaacttcggtggttaacgggttgaggaagaagctgaaggatgagatggaaaaatttagtcgagtgagagaaacgatcacgaatgagtacaaagagacggttgggagaatgtgcttcaccgtcaccggcgaatatcccgacgaagctaccctcgagcgtctcatctccacaggtgaaagtgaaacatttttgcagaaagcgattcaagaacaaggtcgtggtaggattttggacactattaacgagatacaggagaggcacgacgcagtgaaagatattgagaagagtttgaatgagttgcaccaagtgtttcttgatatggctgtgttggttgagcatcagggtgcacagcttgatgacattgaaggcaacgtcaaacgagctaactcgcttgttcggtctggtgcggaccggcttgttaaggcacggttttatcagaagaacacacggaagtggacttgctttgccattttgctattgctcattattgtggttttaattgtggtgtttactgttaagccttgggagagtaatggtgggggaggtggaggtgcacctcgtcaagctactccggttcaagctcagccaccgccacctccggctgtgaatcggcggctactacgctaaataattttttttttgaggttccctctgtctatgcatgagcatatctatgttttgaagattgttttttattttacagtattttgtctttaatgtttttgtaatgttttggttggttaaactctgtgtatatataatgcgatcaccacatttctttgttttattatgg

SEQ ID NO: 106157 - protein, 341 aa, Arabidopsis thaliana
  peptide (1)..(341): Ceres Seq. ID no. 13618877
MNDLLSGSFKTSVADGSSPPHSHNIEMSKAKVSGGSCHGGNNLDTFFLDVEVVNEDLKELDRLCHNLRSSNEQSKTLHNANAVKELKKKMDADVTAALKTARRLKGNLEALDRANEVNRSLPESGPGSSSDRQRTSVVNGLRKKLKDEMEKFSRVRETITNEYKETVGRMCFTVTGEYPDEATLERLISTGESETFLQKAIQEQGRGRILDTINEIQERHDAVKDIEKSLNELHQVFLDMAVLVEHQGAQLDDIEGNVKRANSLVRSGADRLVKARFYQKNTRKWTCFAILLLLIIVVLIVVFTVKPWESNGGGGGGAPRQATPVQAQPPPPPAVNRRLLR

SEQ ID NO: 106158 - protein, 315 aa, Arabidopsis thaliana
  peptide (1)..(315): Ceres Seq. ID no. 13618878
MSKAKVSGGSCHGGNNLDTFFLDVEVVNEDLKELDRLCHNLRSSNEQSKTLHNANAVKELKKKMDADVTAALKTARRLKGNLEALDRANEVNRSLPESGPGSSSDRQRTSVVNGLRKKLKDEMEKFSRVRETITNEYKETVGRMCFTVTGEYPDEATLERLISTGESETFLQKAIQEQGRGRILDTINEIQERHDAVKDIEKSLNELHQVFLDMAVLVEHQGAQLDDIEGNVKRANSLVRSGADRLVKARFYQKNTRKWTCFAILLLLIIVVLIVVFTVKPWESNGGGGGGAPRQATPVQAQPPPPPAVNRRLLR

SEQ ID NO: 106159 - protein, 252 aa, Arabidopsis thaliana
  peptide (1)..(252): Ceres Seq. ID no. 13618879
MDADVTAALKTARRLKGNLEALDRANEVNRSLPESGPGSSSDRQRTSVVNGLRKKLKDEMEKFSRVRETITNEYKETVGRMCFTVTGEYPDEATLERLISTGESETFLQKAIQEQGRGRILDTINEIQERHDAVKDIEKSLNELHQVFLDMAVLVEHQGAQLDDIEGNVKRANSLVRSGADRLVKARFYQKNTRKWTCFAILLLLIIVVLIVVFTVKPWESNGGGGGGAPRQATPVQAQPPPPPAVNRRLLR

SEQ ID NO: 106160 - DNA, 645 bp, Arabidopsis thaliana
  misc_feature (1)..(645): Ceres Seq. ID no. 13618899
  misc_feature (1)..(645): Ortholog of  Ceres SEQ ID NO 13596185 as cited in SEQ ID NO 67997
ctgcaaagctttagtgcttcatagagcaaaggagaaaaaaaatggtgaactatgtgctcaaaatcaccgctgatctcgagaatctcactaatctccagccttccggtggctgcgacgattccaacttcccttacctcttcaagttgaaatgtgaaagatgtggagaggtgactccgaaagaaacatgtgtgactttgaatgagacttttactcctccgggaggtaggggtacttgtcatcttgttcagaagtgtaagttctgtggaagggaagggaatgtgactatgattccgggcaaaggtcgacctttaactctggaagattctgaggctggagaacatgcccctcttatggtgtttgactgtcgtggctatgaacccattgatttcggatttggtggatattggaaagctcaagctgaatctggaaccaaatttgatgagattgatttgtcgagcggggaggaattcacagagtacgatgagaagggagaatgcccagtaatgatatcgaatttccgtgcaagcttcagcgtcaccaagtgaagttggtctctgttgtctattttctgattccctacacacttggtgtatgtaaaaaccatggggattatcatttctcaagttctaataaaattctcttttt

SEQ ID NO: 106161 - protein, 167 aa, Arabidopsis thaliana; identical to SEQ ID NO: 28135
  peptide (1)..(167): Ceres Seq. ID no. 13618900

SEQ ID NO: 106162 - protein, 86 aa, Arabidopsis thaliana
  peptide (1)..(86): Ceres Seq. ID no. 13618901
MIPGKGRPLTLEDSEAGEHAPLMVFDCRGYEPIDFGFGGYWKAQAESGTKFDEIDLSSGEEFTEYDEKGECPVMISNFRASFSVTK

SEQ ID NO: 106163 - DNA, 1407 bp, Arabidopsis thaliana
  misc_feature (1)..(1407): Ceres Seq. ID no. 13618906
  misc_feature (1)..(1407): Ortholog of  Ceres SEQ ID NO 12364737 as cited in SEQ ID NO 51089
  misc_feature (1)..(1407): Ortholog of  Ceres SEQ ID NO 12581561 as cited in SEQ ID NO 53617
  misc_feature (1)..(1407): Ortholog of  Ceres SEQ ID NO 14316263 as cited in SEQ ID NO 55294
  misc_feature (1)..(1407): Ortholog of  Ceres SEQ ID NO 15176751 as cited in SEQ ID NO 59719
  misc_feature (1)..(1407): Ortholog of  Ceres SEQ ID NO 13597380 as cited in SEQ ID NO 64054
  misc_feature (1)..(1407): Ortholog of  Ceres SEQ ID NO 12625474 as cited in SEQ ID NO 64169
  misc_feature (1)..(1407): Ortholog of  Ceres SEQ ID NO 13597502 as cited in SEQ ID NO 64681
aacatttcatagtattacaaaacaacgccaaaagtcaaaaggtttcgctttctagatcatgtccacatttctcctaacatggattattatgaccgtcgcgttaagcgtaacgctttttcttatgccgcaacaaacaaatgcggctagagcgttcttcgtgtttggcgactcactcgtggacagtggtaataacaattacttagtcaccactgctcgtgccgattctccaccgtatggaatcgattatccgactggtcgaccaaccggtcgtttctccaacggcttgaacctccctgacatcatcagtgaacaaattggatctgagcctacattaccaattcttagccctgaactcactggagagaagctattgatcggagctaactttgcctctgccggcattggaattctcaacgatactggcgttcaatttttgaacatactaaggatcggtaggcaattcgagctgttccaagagtatcaagagagagtgagtgagattataggttcagacaaaacgcaacagcttgtaaatggggctctcgtcctcatgactctcggcggcaatgatttcgtcaacaactacttcttccccatctctactagaagacgccaatcatctctcggtgaatttagccagcttctcatctccgaatacaagaaaatcctgacgagtctttatgagttgggagcaaggagggtgatggtgacgggaacaggacctttgggttgcgtaccagcggagcttgcctcatcgggaagtgtgaatggagaatgtgcacccgaggcgcaacaggctgcagcaatcttcaatcctcttttagttcaaatgcttcaaggacttaaccgtgagattggttctgatgttttcatcggggctaatgcctttaacacgaatgcggatttcatcaacaatccccaaagatttggttttgtgacgtcaaaagtagcatgttgtggacaaggagcatacaacgggcaaggcgtttgcaccccattgtcgactttatgctctgaccgcaatgcctatgctttctgggaccctttccacccgaccgagaaagccacccgactcatcgtccaacaaatcatgactggttcggttgagtacatgaaccccatgaaccttagtactattatggctttagactccagaatataattaaggatgcaatcttttacagaatctatttccagtttttctcgtatgataaaatatcgcgagtctgccaaacaatggtaaggaactaaggattctatttttccaaattatggttttcttagtttctctctaatgctaatggggagtctctgtctcggctctgtcttttctgttatgtttcaattttgtggttagttgccacttctttcttacgaaggctttataaaactttgtcaattttacac

SEQ ID NO: 106164 - protein, 367 aa, Arabidopsis thaliana; identical to SEQ ID NO: 25704
  peptide (1)..(367): Ceres Seq. ID no. 13618907

SEQ ID NO: 106165 - protein, 357 aa, Arabidopsis thaliana; identical to SEQ ID NO: 25705
  peptide (1)..(357): Ceres Seq. ID no. 13618908

SEQ ID NO: 106166 - protein, 346 aa, Arabidopsis thaliana; identical to SEQ ID NO: 25706
  peptide (1)..(346): Ceres Seq. ID no. 13618909

SEQ ID NO: 106167 - DNA, 1504 bp, Arabidopsis thaliana
  misc_feature (1)..(1504): Ceres Seq. ID no. 13618910
  misc_feature (1)..(1504): Ortholog of  Ceres SEQ ID NO 15177969 as cited in SEQ ID NO 58823
attaatccactgaaacaatcactattcattctctttccttaagtgtcaaactcttgaaaaaactactttgaaggaaaaaatgtctaagaagaagaaaggcagcaacaactttaagcttctctgtttcttcctgtttttgggtggtttggttcagacagatgcttcttttggagtaggaggcggcgttggagtaggaatcggcggcggcggcggtggcggtggcggtggtgtttgggttggcggtggatacaacaacggtggaaatcgtaatgctgttccaggatcatcagctccaaacagggtagcttacaatgctcttcaagtttggaaatcagccatgagagaggatccatcaaatgttctcaaaacatgggttggatcagatgtttgttcttacaaaggtgtgttctgttctggtcaatctataacctctatagatcttaaccatgcaaatctcaaaggcacacttgtcaaagacctagctttactctcagacctcaatattctccatctcaacagtaacagattctcagggcaaatcccagattctttcaaatctttagcttctcttcaagaacttgatctaagcaacaataaactctcaggtcctttccctttagtcacactctacataccaaatctggtttacctcgatctccggtttaatagtttaaccggtttcatccctgaagagcttttcaacaaacggttagacgcgattctcctcaataacaatcaattcgtcggagaaatcccaagaaacctcggaaattctccggcttcggttattaatctcgcgaataacagattttccggcgaaattccgacgagttttggtctgacgggatcgagggttaaggaagttttgcttttgaataaccagttaaccggttgtataccggaatctgttggtatgttctctgaaattgaagtctttgacgttagctacaatgcattgatgggtcatgttccagatacgatctcttgcttgtcggcgattgaaattttgaatcttgctcacaataaattctctggggaggttcctgatttggtttgttcgttgaggaatcttattaatctcactgttgcgttcaatttcttctctgggtttagctctgaatgttcttccagggttagtttcgggtttgatttcgttgggaattgtattcccgggaggaattcgcagcggccgcagccggattgttccggttattccggcggagctatgagctgttttaggattccgacgcagcctttggcttgtgctgcgataagtgttggattgagagagagtaataatcaatactacacttcatctcctccatgaaagtttctaaagttagaagcttttttttattaatggttgatgctgaatgatctatcttttttgtaacttattaattagttgattagtgaccaaattaaacgttaattcctcttctgtgtaatccaatcgttgctaatgttgttttgtaagcagaagaattttgtaaaaatctaacgt

SEQ ID NO: 106168 - protein, 415 aa, Arabidopsis thaliana; identical to SEQ ID NO: 42455
  peptide (1)..(415): Ceres Seq. ID no. 13618911

SEQ ID NO: 106169 - protein, 329 aa, Arabidopsis thaliana; identical to SEQ ID NO: 42456
  peptide (1)..(329): Ceres Seq. ID no. 13618912

SEQ ID NO: 106170 - DNA, 885 bp, Arabidopsis thaliana
  misc_feature (1)..(885): Ceres Seq. ID no. 13618913
  misc_feature (1)..(885): Ortholog of  Ceres SEQ ID NO 12608127 as cited in SEQ ID NO 57579
  misc_feature (1)..(885): Ortholog of  Ceres SEQ ID NO 12634558 as cited in SEQ ID NO 0
  misc_feature (1)..(885): Ortholog of  Ceres SEQ ID NO 15180294 as cited in SEQ ID NO 0
atccaatagttgaaaaacagaaaaagcctctccaatgactttttctcgtagcagctcgattacgttcttcatcgttgctttattcaccgtcttaattaatccggcgatctcttctcgcgccgcgtccttcatcaagctgcctcggtcttccatcgcttcatactgcgagagttggagattagccgctgagaccaacaatgttggaccctggaaggtgattccgtcccaatgcgaaaactatattaaaaactacatcaacggaggccagttcgacaaagactacgatgtagtcgctagttacgccattgactacgctaaaacggtcaaggttggcggagacggcaaggacgcgtgggtctttgacatcgatgagacgcttctctccaatattgagtactacaaggctaatggttacgggtctgaaccgtacgatagtattaaatacaatgaggtggtggaaaaaggaaaagacccaggttatgatgcgagcttgaggctctacaaagctctcaagaaacttggtttcactatcattttactaactggccgagacgaaggtcatagaagtgtcaccgagaaaaatcttcgggatgccggttatttcggttggaaccgactcctcttgaggggtcaaaatgatcaagggaaaacagcaacacaatacaaatcagagcagcgatcacaagttgtaaaagaaggctacacaatccatggtaatactggagatcaatggagtgacttgctaggttttgccgtggcttctcgttctttcaaagtcccaaatcccatgtactatgttgcttgatcaccatctgccattgatatattgcatgataatttatcatttatgtatgaataaggatttatgaatgtatcccataattc

SEQ ID NO: 106171 - protein, 256 aa, Arabidopsis thaliana; identical to SEQ ID NO: 39614
  peptide (1)..(256): Ceres Seq. ID no. 13618914

SEQ ID NO: 106172 - DNA, 1180 bp, Arabidopsis thaliana
  misc_feature (1)..(1180): Ceres Seq. ID no. 13618915
  misc_feature (1)..(1180): Ortholog of  Ceres SEQ ID NO 13654531 as cited in SEQ ID NO 68083
tttttacaaatcagacaaaacccaacaattaatgaaacaatgtcaaaaacggctaattttctcagcctgagatccaatcctctacctccgattttctcctccaccggaaactctcctttcctccgagcttcctcggctctgaatcttccgacaactgcttcgaaacctttccacagttggattcgtgcttcttcacgtcgccggttggttctcggtggttttggcggcgcttctttgtggatgaacaacaatatgtccggtaaatttggcggtaaatctttcattgcttccgctaggcagaccaatccttctcccgtcgaacaggcgttgaataaggtggattggccagagactttccctttcaaagaagaagatttccagagatacgatgagtcgtctgattcaacattctacgaagctccaaggtttgtgacacacattgatgatccagctatagctgcattgacaaagtattactccaaggttttgcctcagagcgatactccaggagtgagcatactcgatatgtgtagcagttgggtcagtcattatccaccggggtataggcaagaacgaatagttggaatgggtatgaatgaagaagagcttaagcgaaatccggttctcaccgagtacatagtccaagacttaaatctcaattcaaatctgccttttgaagacaattctttccaagttataaccaatgtggtaagtgtggattatcttacaaagccgcttgaagtgttcaaggaaatgaacagaatccttaagcccggaggactcgctctaatgagcttctcgaaccgttgcttctttactaaagcaatctcgatatggacatcaactggcgacgcagatcatgctctcattgttggatcatactttcactacgccggaggatttgaagctcctcaggccgttgatatatctccaaatccagggcgttcagatcctatgtacgttgtttactctagaaaactccccatggtttaaacctgagatccaagcacatcatgtatacacatagtagagaccgaggaaactaattcttcgattaagacaagggaacttctgaaatcttgtttataaagaatgtgccactctctcaacactaataacaatgtcatataaagaatctgaagccagattcgcaaatttgacgataatacttttcttcgag

SEQ ID NO: 106173 - protein, 330 aa, Arabidopsis thaliana; identical to SEQ ID NO: 40152
  peptide (1)..(330): Ceres Seq. ID no. 13618916

SEQ ID NO: 106174 - protein, 317 aa, Arabidopsis thaliana; identical to SEQ ID NO: 40153
  peptide (1)..(317): Ceres Seq. ID no. 13618917

SEQ ID NO: 106175 - protein, 250 aa, Arabidopsis thaliana; identical to SEQ ID NO: 40154
  peptide (1)..(250): Ceres Seq. ID no. 13618918

SEQ ID NO: 106176 - DNA, 986 bp, Arabidopsis thaliana
  misc_feature (1)..(986): Ceres Seq. ID no. 13618919
  misc_feature (1)..(986): Ortholog of  Ceres SEQ ID NO 14307801 as cited in SEQ ID NO 59512
  misc_feature (1)..(986): Ortholog of  Ceres SEQ ID NO 14309110 as cited in SEQ ID NO 0
  misc_feature (1)..(986): Ortholog of  Ceres SEQ ID NO 15225903 as cited in SEQ ID NO 0
aattggagagacatgatgagagaaatatcactggaatctgaaccagacagtttctgatcttcttctccttagaggatctctcggagaagattcaaaaccaagaacaatctcagtctctatctctctctctgggtgcatttagatggctggagttgtgcgattaacgacgacgtcggttcaagccattcgtgtctcctcgtccttcagctcctttgccaccgctcttaatcctctgcaaccttgcttacctccaaactcgaatctgaattccgacaagagattgcgtcttctctcatcttctccttcctgctcgtcttctcattaccacccatcttctggtctcggaagccatctcccccttagacgacccaagagccaagtggttcgtgtcaaggtagatgaaaatgtagccgagacagagccaccgaaatggtgggagaggaatgctccaaacatggtcgatattcattctactgaagagttcttgagcgctttaagcggtgcgggtgaaagattagttattgtagagttttatggaacttggtgtgcttcttgcagagcattgttcccaaagctttgcaagacagcggtggaacatcccgatatagtgttccttaaagtaaactttgatgagaataaaccgatgtgcaagagtttgaacgtgagagtgcttccttttttccacttttaccgtggagctgatggtcagcttgagtcattctcatgttctcttgctaagtttcagaagataaaagatgcaatccaactgcacaataccgatcgttgcagcctcggtccagccaaggtacctgaaggcttaacattagccaaaccagctgcatcaagttgaagtgccagatttttagatatattactaaggcaacaatctttggttgctcaagcaaatactcagcttaaaattctgtatatcgtcatatttttgggtgtaaaagaatacttcctaaagccagttacgattcttctgc

SEQ ID NO: 106177 - protein, 235 aa, Arabidopsis thaliana
  peptide (1)..(235): Ceres Seq. ID no. 13618920
MAGVVRLTTTSVQAIRVSSSFSSFATALNPLQPCLPPNSNLNSDKRLRLLSSSPSCSSSHYHPSSGLGSHLPLRRPKSQVVRVKVDENVAETEPPKWWERNAPNMVDIHSTEEFLSALSGAGERLVIVEFYGTWCASCRALFPKLCKTAVEHPDIVFLKVNFDENKPMCKSLNVRVLPFFHFYRGADGQLESFSCSLAKFQKIKDAIQLHNTDRCSLGPAKVPEGLTLAKPAASS

SEQ ID NO: 106178 - protein, 131 aa, Arabidopsis thaliana; identical to SEQ ID NO: 35751
  peptide (1)..(131): Ceres Seq. ID no. 13618921

SEQ ID NO: 106179 - DNA, 729 bp, Arabidopsis thaliana
  misc_feature (1)..(729): Ceres Seq. ID no. 13618923
  misc_feature (1)..(729): Ortholog of  Ceres SEQ ID NO 15171239 as cited in SEQ ID NO 52298
aaacttcgaagattttgatattgtaacgatccgccatggaagagaagaagacagaatccgcgactaagaacgttaaaaaggttaacttgttagaccacatcgcaatcaaacacctccttgatgaatccgtctccgatatcgttacgagcagagggtacaaggaggatgtgagattaagcaacgtcaaatttctgttaggagggattataatcgtggttgctcttgttgctcaattctacaacaagaagtttcctgagaacagagactttttgatctgctgcatcggattatatgtggtgttgactgcggtaatgcagctgattctgtacattaaggagaagaacgctatcttgttcacctatcctcttgagggatcattcaccagcactggtttggtggtatcttccaagttacctagattctctgatcagtacactctaaccatcgacagtgctgatccgcaatcaatctcagctgggaagtcggttcagttcaccaaaagtgtcactcaatggctcacaaaagatggagttcttgtcgagggtttattctggaaagatgttgaagccctagtcaaagagtacacagaagcaggagaaccaaagaagaagagatgatcatctataatgggaaaagtatgttgctccttattagttctaaatgttacattttttttatgactaaaatcgatggtgacttggtttaaaagacgacagagtttttgcctcc

SEQ ID NO: 106180 - protein, 193 aa, Arabidopsis thaliana; identical to SEQ ID NO: 40076
  peptide (1)..(193): Ceres Seq. ID no. 13618924

SEQ ID NO: 106181 - protein, 101 aa, Arabidopsis thaliana; identical to SEQ ID NO: 40077
  peptide (1)..(101): Ceres Seq. ID no. 13618925

SEQ ID NO: 106182 - DNA, 1069 bp, Arabidopsis thaliana
  misc_feature (1)..(1069): Ceres Seq. ID no. 13618930
  misc_feature (1)..(1069): Ortholog of  Ceres SEQ ID NO 13639109 as cited in SEQ ID NO 51131
  misc_feature (1)..(1069): Ortholog of  Ceres SEQ ID NO 13596346 as cited in SEQ ID NO 60879
  misc_feature (1)..(1069): Ortholog of  Ceres SEQ ID NO 15178104 as cited in SEQ ID NO 0
aattctcacacattcttctgcttcgttaattttctactcgatttcgctcttcagaaatttgacaatgaagcttgacactagtggattggagacaactatgcctgtgattggctttggatcaaacagtgagatgcttgatgggttttcgtctgcaccttcgtttgatcttcctcgtaccactgattttgatgggtttcagaaaaaagctgtggagatggtgaagcctgcaaagggtacaactacacttgcgtttatctttaaggaaggtgttatggtagctgctgattctcgagctagcatgggaggatatatctcgtcgcaatctgtgaagaagattattgaaattaatccttatatgcttggtacaatggctggtggtgctgctgattgtcaattctggcacagaaatctgggaattaagtgccgtctacatgagctggcaaacaaaaggagaatctctgtttcaggagcttcaaagcttcttgctaacatgctctattcatatcgtggaatgggactttctgttggcacaatgattgctggatgggatgaaacaggccctggattgtactatgttgacaacgaaggaggacggcttaagggagacagattctctgtcggttcaggttcaccatacgcttatggtgttctggacagcggatacaaattcgatatgtcggttgaagaagcctcagagttagcaaggagatccatctaccatgctacattccgtgatggagctagtggtggagttgctagcgtgtaccacgttgggccgcaaggatggacgaaactctctggagacgacgttggcgagctacattaccattattaccccgtggctccaatcaccgcggaacatgtgatggaagaggctgccgaataagtactgtgattcttgtctatcttactaagagttttattacatcacttatgttttgttcatcaatgaacagaatcatagattcaagtttcttttgtattgcgaatgatgtagacgttagtttggccacaatgatcacgttgcataatagataacataatagataacctgtttctttcttcttct

SEQ ID NO: 106183 - protein, 294 aa, Arabidopsis thaliana
  peptide (1)..(294): Ceres Seq. ID no. 13618931
ILTHSSASLIFYSISLFRNLTMKLDTSGLETTMPVIGFGSNSEMLDGFSSAPSFDLPRTTDFDGFQKKAVEMVKPAKGTTTLAFIFKEGVMVAADSRASMGGYISSQSVKKIIEINPYMLGTMAGGAADCQFWHRNLGIKCRLHELANKRRISVSGASKLLANMLYSYRGMGLSVGTMIAGWDETGPGLYYVDNEGGRLKGDRFSVGSGSPYAYGVLDSGYKFDMSVEEASELARRSIYHATFRDGASGGVASVYHVGPQGWTKLSGDDVGELHYHYYPVAPITAEHVMEEAAE

SEQ ID NO: 106184 - protein, 273 aa, Arabidopsis thaliana; identical to SEQ ID NO: 30157
  peptide (1)..(273): Ceres Seq. ID no. 13618932

SEQ ID NO: 106185 - protein, 262 aa, Arabidopsis thaliana; identical to SEQ ID NO: 30158
  peptide (1)..(262): Ceres Seq. ID no. 13618933

SEQ ID NO: 106186 - DNA, 1522 bp, Arabidopsis thaliana
  misc_feature (1)..(1522): Ceres Seq. ID no. 13618941
  misc_feature (1)..(1522): Ortholog of  Ceres SEQ ID NO 14315279 as cited in SEQ ID NO 52534
  misc_feature (1)..(1522): Ortholog of  Ceres SEQ ID NO 12583190 as cited in SEQ ID NO 56386
gactaataatcacaaaaaccatggatcacgatctcgacaaattccctttactctcttacgtccttcatcaacatgactccaatctccacgcgccgccgtctatggccgcgcaagaaactctccttccttcttttcctcttctctccaatccagaaatcatgtctatgttgactcaatccatccccacaacgatcacacagacgcttttcgtcttcaactctctcggctctcgacctgatcccttagcggtttcctctgctcgattcaagatcgctcaaattatggattcgctctcgccggaggaagcagcgaaggagtcggagatttatgccggggttgtgcggttggatgaagtgcacgatagttacgagaagaagttgaaggatacagaggaggagctttctagggtttattctacggaggtggaatcgatgttgagaagcggtgaagaagtgaacgagaaggttcttgcggtgctcaaggaggcggaatccggcggaaccgttgagaggattgatctctccagccaagaacttaagcttatccctgaagctttttggaaagtagttggcttagtatacttgaatctctctggcaatgacttgacgtttataccggatgcaatctcgaaactcaagaagctagaagagctcgatgtatcttcaaattctttggaatctcttcctgactctatagggatgttgcttaaccttagaatccttaatgtgaatgcgaacaatctaaccgcactccctgagagcatcgcgcattgcaggtcactagttgagttagatgcaagctacaacaacttgacttcattacctacaaacattggatacggattacaaaacctcgagagattatcgatccagctgaacaaactccgttactttccaggttcgataagtgaaatgtataatctaaagtatcttgacgcacacatgaacgagatccacgggataccaaactcgatcgggagactaacgaaacttgaggttctaaacctaagcagcaatttcaacaacttgatgggtgtccctgacactatcactgatctaactaacctgagggagcttgatctaagcaacaaccaaatccaagctataccagactcattttataggctgaggaagctagagaaactgaacttggaccaaaacccgcttgagatcccatctcaagaagtggctactcaaggagctgaagttgttagagagtttatgaggaagagatggggtgatatcatggcagagcagcaacagaggattggcgttgaggctgagcgacatggagatgaaaacgggtgggtctattggggaacctccatggttactaatcttgtttctggagtgacccataccattggatttggaggagcaactagcgatggtggagataagaaaccgggagactcgtacttttatcaccaaatctgacttctgctaaattatcttgtaatctacacttttgtatacaaaaatttggagtgactttcttgtgaacttatcactccttgtttacc

SEQ ID NO: 106187 - protein, 477 aa, Arabidopsis thaliana
  peptide (1)..(477): Ceres Seq. ID no. 13618942
LIITKTMDHDLDKFPLLSYVLHQHDSNLHAPPSMAAQETLLPSFPLLSNPEIMSMLTQSIPTTITQTLFVFNSLGSRPDPLAVSSARFKIAQIMDSLSPEEAAKESEIYAGVVRLDEVHDSYEKKLKDTEEELSRVYSTEVESMLRSGEEVNEKVLAVLKEAESGGTVERIDLSSQELKLIPEAFWKVVGLVYLNLSGNDLTFIPDAISKLKKLEELDVSSNSLESLPDSIGMLLNLRILNVNANNLTALPESIAHCRSLVELDASYNNLTSLPTNIGYGLQNLERLSIQLNKLRYFPGSISEMYNLKYLDAHMNEIHGIPNSIGRLTKLEVLNLSSNFNNLMGVPDTITDLTNLRELDLSNNQIQAIPDSFYRLRKLEKLNLDQNPLEIPSQEVATQGAEVVREFMRKRWGDIMAEQQQRIGVEAERHGDENGWVYWGTSMVTNLVSGVTHTIGFGGATSDGGDKKPGDSYFYHQI

SEQ ID NO: 106188 - protein, 471 aa, Arabidopsis thaliana
  peptide (1)..(471): Ceres Seq. ID no. 13618943
MDHDLDKFPLLSYVLHQHDSNLHAPPSMAAQETLLPSFPLLSNPEIMSMLTQSIPTTITQTLFVFNSLGSRPDPLAVSSARFKIAQIMDSLSPEEAAKESEIYAGVVRLDEVHDSYEKKLKDTEEELSRVYSTEVESMLRSGEEVNEKVLAVLKEAESGGTVERIDLSSQELKLIPEAFWKVVGLVYLNLSGNDLTFIPDAISKLKKLEELDVSSNSLESLPDSIGMLLNLRILNVNANNLTALPESIAHCRSLVELDASYNNLTSLPTNIGYGLQNLERLSIQLNKLRYFPGSISEMYNLKYLDAHMNEIHGIPNSIGRLTKLEVLNLSSNFNNLMGVPDTITDLTNLRELDLSNNQIQAIPDSFYRLRKLEKLNLDQNPLEIPSQEVATQGAEVVREFMRKRWGDIMAEQQQRIGVEAERHGDENGWVYWGTSMVTNLVSGVTHTIGFGGATSDGGDKKPGDSYFYHQI

SEQ ID NO: 106189 - protein, 444 aa, Arabidopsis thaliana
  peptide (1)..(444): Ceres Seq. ID no. 13618944
MAAQETLLPSFPLLSNPEIMSMLTQSIPTTITQTLFVFNSLGSRPDPLAVSSARFKIAQIMDSLSPEEAAKESEIYAGVVRLDEVHDSYEKKLKDTEEELSRVYSTEVESMLRSGEEVNEKVLAVLKEAESGGTVERIDLSSQELKLIPEAFWKVVGLVYLNLSGNDLTFIPDAISKLKKLEELDVSSNSLESLPDSIGMLLNLRILNVNANNLTALPESIAHCRSLVELDASYNNLTSLPTNIGYGLQNLERLSIQLNKLRYFPGSISEMYNLKYLDAHMNEIHGIPNSIGRLTKLEVLNLSSNFNNLMGVPDTITDLTNLRELDLSNNQIQAIPDSFYRLRKLEKLNLDQNPLEIPSQEVATQGAEVVREFMRKRWGDIMAEQQQRIGVEAERHGDENGWVYWGTSMVTNLVSGVTHTIGFGGATSDGGDKKPGDSYFYHQI

SEQ ID NO: 106190 - DNA, 1066 bp, Arabidopsis thaliana
  misc_feature (1)..(1066): Ceres Seq. ID no. 13618949
  misc_feature (1)..(1066): Ortholog of  Ceres SEQ ID NO 15174082 as cited in SEQ ID NO 61896
  misc_feature (1)..(1066): Ortholog of  Ceres SEQ ID NO 13655598 as cited in SEQ ID NO 64077
  misc_feature (1)..(1066): Ortholog of  Ceres SEQ ID NO 15179351 as cited in SEQ ID NO 0
  misc_feature (1)..(1066): Ortholog of  Ceres SEQ ID NO 15180408 as cited in SEQ ID NO 0
aaaccaatcacttcactctctctaatcaaaaagcttttaacctcagccgttaaatctttctccgatcatgccgaccagaaacatcgccattggtggagtccaagaagaggtctatcaccccaacgcacttagggcggcgctcgctgagtttatctcgactttgatcttcgtcttcgccggctcaggctccggaattgctttcaacaagatcactgacaatggagcaaccactccttccggcctcgtcgccgctgccttagctcatgctttcggtctctttgtcgctgtctctgttggcgctaacatttccggtggccacgttaaccctgccgttaccttcggtgtcttactcggtggtaacatcactctcctccgtggtattctctactggattgctcagcttcttggctccgtcgccgcttgtttcctccttagctttgccaccggtggcgagccaattccagcgttcggtctctctgccggagtcggatcattaaacgctctcgtcttcgagatcgtgatgaccttcgggctcgtctacaccgtctacgccacagccgttgaccccaagaacggtagtctcggaacaatcgcaccaatcgccataggtttcatcgttggagctaacatcctcgccggtggagctttcagcggagcttccatgaacccagccgttgctttcggaccagccgtcgtaagctggacgtggaccaaccactgggtttactgggctggtcctcttattggtggtggactcgccggaattatctacgactttgtcttcatcgatgaaaatgcccacgagcaattgcctaccaccgattactgaagacgtcaaattcaacgttgttaatctgatgaatttttcgtgatttgcttttttaatttgcatcgtaatgggtttctggccgttggatcatttttagatgaatctttgtctattgattgatcatttatgtgtctttgggtttgttgttggagttgtaatatctctggaaggcttttgtgcaattgtattgtacggtttaataactataattgagaaaaccagggaatgtgaattatg

SEQ ID NO: 106191 - protein, 253 aa, Arabidopsis thaliana
  peptide (1)..(253): Ceres Seq. ID no. 13618950
MPTRNIAIGGVQEEVYHPNALRAALAEFISTLIFVFAGSGSGIAFNKITDNGATTPSGLVAAALAHAFGLFVAVSVGANISGGHVNPAVTFGVLLGGNITLLRGILYWIAQLLGSVAACFLLSFATGGEPIPAFGLSAGVGSLNALVFEIVMTFGLVYTVYATAVDPKNGSLGTIAPIAIGFIVGANILAGGAFSGASMNPAVAFGPAVVSWTWTNHWVYWAGPLIGGGLAGIIYDFVFIDENAHEQLPTTDY

SEQ ID NO: 106192 - DNA, 1520 bp, Arabidopsis thaliana
  misc_feature (1)..(1520): Ceres Seq. ID no. 13618954
  misc_feature (1)..(1520): Ortholog of  Ceres SEQ ID NO 13654989 as cited in SEQ ID NO 63117
  misc_feature (1)..(1520): Ortholog of  Ceres SEQ ID NO 13584744 as cited in SEQ ID NO 69137
agtggaagcttggagcatcggtgaggaaaagagaaagagagagagaaggcagttttgttttccaaatgtcagcaattcttgcagctgccattggtggtgctgtaggagctcttgcattgattgctttgtttgtttttctcctttggttttgtgtctttcgtcgtaagaatctgtctagaacttctgagactggctcttctgatccatctactcaagaaggaagaaatgttgcaattgagttgtcaatgagagaagctagaagatttgaaatggaggaacttgctcaagccaccaagagttttaccaataaaagtcttattggtattggcaaattcggcgaggtttacaaaggtttgcttcaagatggtgttcttgtagctatcaagaaaagacctggtttgcctactcaagaatttgttaacgaggttcgttatctatcgtctatccatcaccgtaatctcgtcactcttttggggttttgccaagaaagcaacacacagtttcttgtctacgagtatgttcctaatggaagtgtttccagtcacctgtacggtgctggtggtaaagtacctggtaatagactagagttcagacataggcttgcaatatctataggagcagctaaaggcttggcacatcttcactcgttgagtcctcggttgatacacaaggacttcaaaaccgctaatgttcttgtggatgaaaatttcattgctaaggttgcggatgcaggagtccgtaacttcttaggaagagaggatgttggtacatcgtctcacattgttgcagaccagattttcctctccccagaggttcaagagttcaaaagattttcagagaaaagtgatgtctatgcttttggtgtattcctcttggaattagtaagtggaagagaagcatcagaaccatccccttcaagctcaacgcaaactctagtcgattggatgcaaaacttaacggattacgcagatataccaatgatgattgatgagagactaggaggtacatacacagcagaaggagttgaggaacttattacattgacactaagatgtgttgatgtatcaagtgagaagagaccaacaatgagttttgttgtgacagagcttgaaagaatattggataaagaagtgagcttaacaacagtaatgggtgaaggtactccaactgttactcttggaagtcagctttttaaagcaaccaagtgattattataaaggaaccatctttttacatatatatacatatatatatatatattatataagttctctgagacaagaaccaatcagagaacttaaggaggaagaagaagaagactgatcagctgttttgtgttaagtgtataaagaacagctgaagcttattgtttgtttgttttttccctcctttttcacttcctttggaggttattattttcagcaattatttttttgacaatgagtgcagaaaagtataactttgtaaaaacattatttattgatataaaggaagcaaagagtggaatgttgtgtgaaaat

SEQ ID NO: 106193 - protein, 401 aa, Arabidopsis thaliana
  peptide (1)..(401): Ceres Seq. ID no. 13618955
WKLGASVRKREREREGSFVFQMSAILAAAIGGAVGALALIALFVFLLWFCVFRRKNLSRTSETGSSDPSTQEGRNVAIELSMREARRFEMEELAQATKSFTNKSLIGIGKFGEVYKGLLQDGVLVAIKKRPGLPTQEFVNEVRYLSSIHHRNLVTLLGFCQESNTQFLVYEYVPNGSVSSHLYGAGGKVPGNRLEFRHRLAISIGAAKGLAHLHSLSPRLIHKDFKTANVLVDENFIAKVADAGVRNFLGREDVGTSSHIVADQIFLSPEVQEFKRFSEKSDVYAFGVFLLELVSGREASEPSPSSSTQTLVDWMQNLTDYADIPMMIDERLGGTYTAEGVEELITLTLRCVDVSSEKRPTMSFVVTELERILDKEVSLTTVMGEGTPTVTLGSQLFKATK

SEQ ID NO: 106194 - protein, 380 aa, Arabidopsis thaliana
  peptide (1)..(380): Ceres Seq. ID no. 13618956
MSAILAAAIGGAVGALALIALFVFLLWFCVFRRKNLSRTSETGSSDPSTQEGRNVAIELSMREARRFEMEELAQATKSFTNKSLIGIGKFGEVYKGLLQDGVLVAIKKRPGLPTQEFVNEVRYLSSIHHRNLVTLLGFCQESNTQFLVYEYVPNGSVSSHLYGAGGKVPGNRLEFRHRLAISIGAAKGLAHLHSLSPRLIHKDFKTANVLVDENFIAKVADAGVRNFLGREDVGTSSHIVADQIFLSPEVQEFKRFSEKSDVYAFGVFLLELVSGREASEPSPSSSTQTLVDWMQNLTDYADIPMMIDERLGGTYTAEGVEELITLTLRCVDVSSEKRPTMSFVVTELERILDKEVSLTTVMGEGTPTVTLGSQLFKATK

SEQ ID NO: 106195 - protein, 320 aa, Arabidopsis thaliana
  peptide (1)..(320): Ceres Seq. ID no. 13618957
MREARRFEMEELAQATKSFTNKSLIGIGKFGEVYKGLLQDGVLVAIKKRPGLPTQEFVNEVRYLSSIHHRNLVTLLGFCQESNTQFLVYEYVPNGSVSSHLYGAGGKVPGNRLEFRHRLAISIGAAKGLAHLHSLSPRLIHKDFKTANVLVDENFIAKVADAGVRNFLGREDVGTSSHIVADQIFLSPEVQEFKRFSEKSDVYAFGVFLLELVSGREASEPSPSSSTQTLVDWMQNLTDYADIPMMIDERLGGTYTAEGVEELITLTLRCVDVSSEKRPTMSFVVTELERILDKEVSLTTVMGEGTPTVTLGSQLFKATK

SEQ ID NO: 106196 - DNA, 1440 bp, Arabidopsis thaliana
  misc_feature (1)..(1440): Ceres Seq. ID no. 13618980
  misc_feature (1)..(1440): Ortholog of  Ceres SEQ ID NO 13581327 as cited in SEQ ID NO 51165
  misc_feature (1)..(1440): Ortholog of  Ceres SEQ ID NO 12610002 as cited in SEQ ID NO 55823
  misc_feature (1)..(1440): Ortholog of  Ceres SEQ ID NO 14308310 as cited in SEQ ID NO 58573
  misc_feature (1)..(1440): Ortholog of  Ceres SEQ ID NO 14308795 as cited in SEQ ID NO 59140
  misc_feature (1)..(1440): Ortholog of  Ceres SEQ ID NO 14313354 as cited in SEQ ID NO 61520
  misc_feature (1)..(1440): Ortholog of  Ceres SEQ ID NO 13596744 as cited in SEQ ID NO 62765
gaggaccatttcttctctctcattctctcttctgacgtgtttcccttcttcggtttctcatcctcacgtccgccggatttcgaggaaacgaagaagaagaagaacaacaacaacaaaagccttttgagatatggacagcttctggcaattaggtgatgagctacgaggtcagacgagagcatcagaggatcacaaatggtctactgttgcaacgaagctagctgagcaaactagaatgaaaggggagaggatgaacaatcttgatctctccaaaggttacactgagtttagaccaagtgagaaattcagtttccaggagaacaatcttaacttcaacatgttgaatttggatggtaaatttggtgaaagcatcatggggaagacttcgatgcagagcaatgtttataatatgaatactgttttccagaagaatgactttaagagtggaggcaacatgaaagttaacaagtataatggtaatgttgttgctaacaaggagatgagcaacaacaaacataacaacaactgcaatgataatgggaatatgaatttggctgttgacaagaggtttaaaaccttgcctgcttcggagactcttccgaggaatgaagttcttggtggttacatctttgtttgcaacaatgatactatgcaggaggatatgaaacgtcacctctttggtttacctccaagatacagagactctgttcgagctataacacctggattgcctctgtttctttacaactacaccactcaccagcttcatggtatctttgaggcaacaacttttggaggtactaatattgatgctactgcttgggaagacaaaaagtgcaaaggagagtcaaggtttccggctcaggtaaggatcagagtgaggaaaatctgcaaagccttggaagaggactccttcaggccagtacttcaccactatgatggtccaaaattccgccttgagctctctgttcctgagacattggatctgctagatctttgcgaacaagctggttctgcataagccgaaacgatcaaccttgcaatgccacgttgcaaagagggggatgttttgtatgaaatctatctatatatgtaagacctaccgtaagagcgtaagcttttgggatttagttaagagtcggattcaaatgtatgtttactaagaagggatgagagtatgtgtggtcttaaggcaagcaaaagagcgaagaggctctgccgaataagcgactactcttgttctgtgtcgtgtctgatgtgtgagtgtgtgtctgtgtttgtgagagattcgatactctttgaaacaaagatttatgtagaagaatatagagaaagaaagactactataaacagagccaaaaaatgatgtgagctactgtttgtgcttgcttgtgtaaggataaaacaaattgtcctaaatgacaagtttaacttttaagt

SEQ ID NO: 106197 - protein, 296 aa, Arabidopsis thaliana; identical to SEQ ID NO: 30087
  peptide (1)..(296): Ceres Seq. ID no. 13618981

SEQ ID NO: 106198 - protein, 261 aa, Arabidopsis thaliana; identical to SEQ ID NO: 30088
  peptide (1)..(261): Ceres Seq. ID no. 13618982

SEQ ID NO: 106199 - protein, 256 aa, Arabidopsis thaliana; identical to SEQ ID NO: 30089
  peptide (1)..(256): Ceres Seq. ID no. 13618983

SEQ ID NO: 106200 - DNA, 1414 bp, Arabidopsis thaliana
  misc_feature (1)..(1414): Ceres Seq. ID no. 13618992
  misc_feature (1)..(1414): Ortholog of  Ceres SEQ ID NO 13595688 as cited in SEQ ID NO 54342
  misc_feature (1)..(1414): Ortholog of  Ceres SEQ ID NO 13595240 as cited in SEQ ID NO 56316
  misc_feature (1)..(1414): Ortholog of  Ceres SEQ ID NO 15168425 as cited in SEQ ID NO 57370
gccgctgtgtcatcgtggaactcccattttctctcttttacttgttcgttcccaaactcttctccctcgatcgtctccgtcgccgatctcgtttcttcattttccgcgtgttgattggtacaaaggtttaatcaaatggttggaggaggagttatccagcaaattcttaggaggaagcttcactcccaatcacttgcaactccggttttgtcttggttttcttcgaagaaagctcatgaggatgctggttcttctggtgtaagagcacttgccttgttgggtgctggtgttacaggactgttgagtttttctacagtagcatctgctgatgaggctgaacatggattggagagtccagagtacccttggcctcatgatggcattcttagctcatatgaccatgcttcgatccgtcgtgggcatcaagtttatcagcaagtctgtgcatcatgccattcaatgtctctgatctcataccgagacttggtgggtgtcgcctacacagaggaagaggcaaaggcaatggcagctgaaatcgaggtagtagatggacctaatgatgagggtgagatgttcacccgccctggtaaactcagtgaccggtttcctcagccatatgcaaatgaatcagctgcaaggtttgctaatggtggagcgtatcctcctgatctaagtcttataactaaggcacgtcacaatggtccaaactatgtctttgcgcttctgactggttaccgtgatccccctgctggcatatcgattagagaggggttacactacaatccttatttccctgggggagcaattgctatgccgaaaatgctcaatgatgaagctgttgagtatgaagatggtgtccccgccacagaggcacagatgggtaaagatattgtatcattcttggcctgggcagctgaaccagaaatggaagagaggaaactgatgggtttcaaatggatattcctactctctctcgctcttctccaagctgcttactacaggcgactaaaatggtcggttctcaagtcccgcaagctggttcttgacgtggttaactaaagcgccgctgaaaagcttttgcattggcctggccacacacagtcgtattttcaacaaaggatgttaaatagagaagagcctttctctgggtaataacgtatcatcatttttatgtgtcataaaaatctttgatgagaccagttctcacctgaaggtgaaaagacctcatcgttcttctttttccttcgattattactagagagttttatgaggataatcacgaaaacttgtttttttcgcctcataataatcacacatgattttgagattatatcatttgttatgtttttcctcttgtctcaataaaaaataactttgtactctgattttgttgtctattttcggcatttcttgc

SEQ ID NO: 106201 - protein, 307 aa, Arabidopsis thaliana
  peptide (1)..(307): Ceres Seq. ID no. 13618993
MVGGGVIQQILRRKLHSQSLATPVLSWFSSKKAHEDAGSSGVRALALLGAGVTGLLSFSTVASADEAEHGLESPEYPWPHDGILSSYDHASIRRGHQVYQQVCASCHSMSLISYRDLVGVAYTEEEAKAMAAEIEVVDGPNDEGEMFTRPGKLSDRFPQPYANESAARFANGGAYPPDLSLITKARHNGPNYVFALLTGYRDPPAGISIREGLHYNPYFPGGAIAMPKMLNDEAVEYEDGVPATEAQMGKDIVSFLAWAAEPEMEERKLMGFKWIFLLSLALLQAAYYRRLKWSVLKSRKLVLDVVN

SEQ ID NO: 106202 - protein, 199 aa, Arabidopsis thaliana
  peptide (1)..(199): Ceres Seq. ID no. 13618994
MSLISYRDLVGVAYTEEEAKAMAAEIEVVDGPNDEGEMFTRPGKLSDRFPQPYANESAARFANGGAYPPDLSLITKARHNGPNYVFALLTGYRDPPAGISIREGLHYNPYFPGGAIAMPKMLNDEAVEYEDGVPATEAQMGKDIVSFLAWAAEPEMEERKLMGFKWIFLLSLALLQAAYYRRLKWSVLKSRKLVLDVVN

SEQ ID NO: 106203 - protein, 178 aa, Arabidopsis thaliana; identical to SEQ ID NO: 37471
  peptide (1)..(178): Ceres Seq. ID no. 13618995

SEQ ID NO: 106204 - DNA, 1182 bp, Arabidopsis thaliana
  misc_feature (1)..(1182): Ceres Seq. ID no. 13618996
  misc_feature (1)..(1182): Ortholog of  Ceres SEQ ID NO 13599444 as cited in SEQ ID NO 517
  misc_feature (1)..(1182): Ortholog of  Ceres SEQ ID NO 15169431 as cited in SEQ ID NO 60449
  misc_feature (1)..(1182): Ortholog of  Ceres SEQ ID NO 12615444 as cited in SEQ ID NO 62593
  misc_feature (1)..(1182): Ortholog of  Ceres SEQ ID NO 14302204 as cited in SEQ ID NO 63150
aattctctccttcgaagcttttttcttgtgaggtcagaaaagaaaatgggaagtcaacaagtagcgatttcgtttctgacgaacttggcgaaggcggcgtttgggttaggtgtggcggcgacggcactaaactcgtcgctctacactgttgatggtggcgagagagctgttttgttcgatcgattcaggggagtgttggatcagaccgtcggcgaagggactcatttcttgatcccgtatctccagacgccgcacatatacgatattcgtacgaaacctcacactttctcctccaaatctggtactaaggatcttcagatggttaatctcacccttcgtgttctctttcgccctgaggtttcgcgtctcccgtacattttccaaacattgggtcttgaatacgatgagaaggttcttccatcgattggaaatgaggtcttgaaagctgtggttgctaatttcaatgctgatcagctcctcactgagcgtcctcaagtatcagcacttgttcgtgatgctcttatcaagcgtgccagggaatttaacattgagctcgacgacatagccattactcacttatcgtacggtgctgagttctcgagggcagtggaggcgaagcaagtggctcagcaggaagctgaaaggtcaaagtttgtggtgatgaaggctgatcaagagaggagagctgcggttataagagcagaaggtgagagtgaagctgctcagttgatatcagatgcaacagctaaagcaggaatgggactaattgagcttaggaggattgaagcttcaagggaggttgcggctactctggctaggtctccgaacgtggcttacttacctggtggacaaagcatgctctttaatctgaaccctggtcgttgagctataacattggtgggaagaggagcttcagtggagacaaaacgacggagctgtgaagtttattaacgttgatgctcttttatttctgatgaacacgatgtgaaaaaagataattgttttgagccgttctatcttttctgactctagaagtaaagactatgccattgttgtcgaaacccgatcattccaatgaaaggcttcaccaaaaaatctaccataacaatagtcgaaatttgtattgtcaaaaacaatttccaacaccaaggttgttgtacttgtattatttaaaatataaat

SEQ ID NO: 106205 - protein, 294 aa, Arabidopsis thaliana
  peptide (1)..(294): Ceres Seq. ID no. 13618997
NSLLRSFFLVRSEKKMGSQQVAISFLTNLAKAAFGLGVAATALNSSLYTVDGGERAVLFDRFRGVLDQTVGEGTHFLIPYLQTPHIYDIRTKPHTFSSKSGTKDLQMVNLTLRVLFRPEVSRLPYIFQTLGLEYDEKVLPSIGNEVLKAVVANFNADQLLTERPQVSALVRDALIKRAREFNIELDDIAITHLSYGAEFSRAVEAKQVAQQEAERSKFVVMKADQERRAAVIRAEGESEAAQLISDATAKAGMGLIELRRIEASREVAATLARSPNVAYLPGGQSMLFNLNPGR

SEQ ID NO: 106206 - protein, 279 aa, Arabidopsis thaliana
  peptide (1)..(279): Ceres Seq. ID no. 13618998
MGSQQVAISFLTNLAKAAFGLGVAATALNSSLYTVDGGERAVLFDRFRGVLDQTVGEGTHFLIPYLQTPHIYDIRTKPHTFSSKSGTKDLQMVNLTLRVLFRPEVSRLPYIFQTLGLEYDEKVLPSIGNEVLKAVVANFNADQLLTERPQVSALVRDALIKRAREFNIELDDIAITHLSYGAEFSRAVEAKQVAQQEAERSKFVVMKADQERRAAVIRAEGESEAAQLISDATAKAGMGLIELRRIEASREVAATLARSPNVAYLPGGQSMLFNLNPGR

SEQ ID NO: 106207 - protein, 188 aa, Arabidopsis thaliana
  peptide (1)..(188): Ceres Seq. ID no. 13618999
MVNLTLRVLFRPEVSRLPYIFQTLGLEYDEKVLPSIGNEVLKAVVANFNADQLLTERPQVSALVRDALIKRAREFNIELDDIAITHLSYGAEFSRAVEAKQVAQQEAERSKFVVMKADQERRAAVIRAEGESEAAQLISDATAKAGMGLIELRRIEASREVAATLARSPNVAYLPGGQSMLFNLNPGR

SEQ ID NO: 106208 - DNA, 1175 bp, Arabidopsis thaliana
  misc_feature (1)..(1175): Ceres Seq. ID no. 13619003
  misc_feature (1)..(1175): Ortholog of  Ceres SEQ ID NO 13638643 as cited in SEQ ID NO 52149
aagttattataaattaattatcttctgaaaaatataaatacttgaattaattttttagccattttcagatttctccgaggaaaaaaatggcgtctggtttgatcggaagattggttggaacgaaaccgtcgaaattagccacggcggcgaggttaattccggcgagatggacctctacaggagcggaggcggaaacaaaagcttcctctggcggcggaagaggatcgaacttgaagacttttcagatctatcgatggaatccagataatccagggaagccagagcttcaaaattaccagatcgatctcaaagattgtggtccaatggtattagatgctttgattaagatcaaaaacgaaatggatccatctcttactttccgtagatcatgccgtgaagggatctgtggttcatgtgctatgaacattgatggatgtaacggacttgcttgtttgacaaagattcaagatgaagcatcggagacgacgattacaccgttgcctcatatgtttgtgattaaggatttggttgttgatatgactaatttttataatcagtataagagtattgagccgtggttgaagaggaagactccagcgtctgttcctgctaaggagattttgcagagtaagaaggatagagctaagcttgatgggatgtatgaatgtattctttgtgcttgttgtagcacatcttgtcctagttactggtggaatcctgagtcttaccttggtccagctgctttgctacacgctaataggtggataagcgacagtcgtgatgagtacactaaggaaagacttgaggctattgacgacgagttcaagctttaccgttgccatacaatcttgaattgtgctcgtgcctgtccaaagggtttgaacccaggaaaacagattactcacatcaagcaacttcagcgttgaaacagctaagtttgtgtgcgggatccgttgggaaactcatcagtcttaacgtttgaagctaataatcttcacaaaacctcttcggattttcaattcattcttgtattgttgttgccaaatattagcgccttaaaaaaactcgtttgcaagtcttcccaagtagatgagctttgtggttgtatcttgctgaaaatctcctctttaagtaataaaactcgagtaaacttaaacctcatctacttatcatct

SEQ ID NO: 106209 - protein, 279 aa, Arabidopsis thaliana; identical to SEQ ID NO: 29511
  peptide (1)..(279): Ceres Seq. ID no. 13619004

SEQ ID NO: 106210 - protein, 200 aa, Arabidopsis thaliana; identical to SEQ ID NO: 29512
  peptide (1)..(200): Ceres Seq. ID no. 13619005

SEQ ID NO: 106211 - protein, 188 aa, Arabidopsis thaliana
  peptide (1)..(188): Ceres Seq. ID no. 13619006
MDPSLTFRRSCREGICGSCAMNIDGCNGLACLTKIQDEASETTITPLPHMFVIKDLVVDMTNFYNQYKSIEPWLKRKTPASVPAKEILQSKKDRAKLDGMYECILCACCSTSCPSYWWNPESYLGPAALLHANRWISDSRDEYTKERLEAIDDEFKLYRCHTILNCARACPKGLNPGKQITHIKQLQR

SEQ ID NO: 106212 - DNA, 1123 bp, Arabidopsis thaliana
  misc_feature (1)..(1123): Ceres Seq. ID no. 13619007
  misc_feature (1)..(1123): Ortholog of  Ceres SEQ ID NO 15179499 as cited in SEQ ID NO 0
tttttgtaacttttgcttcacctctctcttcttctcttgttctattttttttcccgattcaagcaaaattcatcaagacttgtcaatttgaaaaaatgtcgcaatcaaccgtagatgttccgccaaagggtgggtttagcttcgatctgtgtaagagaaatgatatgcttacacaaaagggtcttaaagctccgtcttttttgaagactggaacaaccattgttggtttgattttcaaggatggtgtgatactaggggcagatacccgagcaactgaggggccaattgttgctgataagaactgtgagaagattcactatatggcaccaaacatatattgctgtggtgcaggaactgcggctgatactgaagcagtcactgatatggtcagctcacagctgcgattgcatcgttaccagactggtcgagactctcgggtcattactgctttgacccttctcaaaaaacatcttttcagctaccaaggtcatgtctctgctgctcttgtactcggtggagttgatatcactggtccacatctgcatactatatacccacacggttcaactgacactcttccattcgccacaatgggttcgggttctcttgctgctatgtctgtgtttgaggcaaagtataaagaaggcctaactagggatgaaggaattaagctggtcgctgaatccatatgctcgggtatattcaatgacctgggtagtggtagcaacgtggacatctgcgtgatcacaaaggggaacaaggaatatctcaggaactacatggaaccaaacccaagaacctatgtcagcagcaaaggctattccttcaccaagaaaactgaggttcttctcaccaaaatcaccccattgctggagcgagtcgaaatcacagaagttggtgaagctatggaggaataattcaatcaatctcatatatcttcttttgcattgatctacatcaaggctctgtgtactctcatgatctcatcttcccagtcttgtcttcttcccatgtttaaggatcattcaaatcttgttactcctctctctccttcttagatttcaatagagagggtcagactcgagagacttcgtcctttcgaaataaaaaaacaactttccct

SEQ ID NO: 106213 - protein, 304 aa, Arabidopsis thaliana
  peptide (1)..(304): Ceres Seq. ID no. 13619008
FVTFASPLSSSLVLFFFPIQAKFIKTCQFEKMSQSTVDVPPKGGFSFDLCKRNDMLTQKGLKAPSFLKTGTTIVGLIFKDGVILGADTRATEGPIVADKNCEKIHYMAPNIYCCGAGTAADTEAVTDMVSSQLRLHRYQTGRDSRVITALTLLKKHLFSYQGHVSAALVLGGVDITGPHLHTIYPHGSTDTLPFATMGSGSLAAMSVFEAKYKEGLTRDEGIKLVAESICSGIFNDLGSGSNVDICVITKGNKEYLRNYMEPNPRTYVSSKGYSFTKKTEVLLTKITPLLERVEITEVGEAMEE

SEQ ID NO: 106214 - protein, 273 aa, Arabidopsis thaliana; identical to SEQ ID NO: 35843
  peptide (1)..(273): Ceres Seq. ID no. 13619009

SEQ ID NO: 106215 - protein, 250 aa, Arabidopsis thaliana; identical to SEQ ID NO: 35844
  peptide (1)..(250): Ceres Seq. ID no. 13619010

SEQ ID NO: 106216 - DNA, 1770 bp, Arabidopsis thaliana
  misc_feature (1)..(1770): Ceres Seq. ID no. 13619011
  misc_feature (1)..(1770): Ortholog of  Ceres SEQ ID NO 14303423 as cited in SEQ ID NO 54243
  misc_feature (1)..(1770): Ortholog of  Ceres SEQ ID NO 12611314 as cited in SEQ ID NO 56535
  misc_feature (1)..(1770): Ortholog of  Ceres SEQ ID NO 13661438 as cited in SEQ ID NO 61414
attcttttgagctaccgattttgccgttttcgtgcagtaatttcgagaaagcgtggaccatttctggattccaaagctgaagaagatccaaacattgtgaagatagaatccgtttactaatgttagaagcatcgaagaatgaaaatgtgatgcaagtgaaggaatgaaagtgcgttgtagttcttcgtatcacgactttggcgtgcatagactgtagatagatatcagataacaacctgtagtggaaatatgagaagacctagtcaaatgatgaggcttctattaacatcctttttcggtgttattgttggtttccttatgggtattacttttccaaccttgactttaactaagatgaatcttccatccacattgtttccctcgattgatcttgcatacattgaggataaatactctgacatatcaagacaaagactatttggttcttggtcttcgacaaaaggcctcaaactcaagaatgacatccctgaccctccatataactataatgacactaagatatgggtttcgactaacccccgtggtgctgagaggctaccaccagatatagtcacgcctgaatcagatttttacctccgtcgactgtggggcgaccctaatgaggatttaacagtcaagcagcggtatctagtaacatttacggttggctatgatcagaggaaaaatatagacactgtgttgaagaagttctcagataacttctctataatgctgtttcactacgatggccgggcaagcgaatgggaagagtttgaatggtccaagcgagccattcatgtgagcattcggaaacaaacaaaatggtggtacgctaagcgatttcttcatcctgacatagttgccccctatgaatatatcttcatatgggatgaggatcttggcgtggaacactttgattcggaaaaatatctggcggtggtgaagaagcatggtttggaaatctcacagcctggattagagccatatgaagggctcacatgggagatgaccaagaaaagagacgacactgaagtccacaagcatgctgaggaaaggaatgggtggtgcactgatcccaatttacccccttgtgcagcgtttgtggagattatggctcctgttttctcccgcaaggcatggcgctgtgtgtggcatatgattcagaacgatttgattcatggatggggtctggactttgccgttcggaaatgtgttcagaacgcacacgagaaaattggagttgtagatgctcaatggattatacatcaaggtgttccatcattagggaatcaaggacaaccagagcaagggaaacaaccatgggaaggggtgagagaacgatgcaggagagagtggacaatgtttcaagacagattggatgatgctgaaaaagcttattttgaagcatctgctcacaagaatgcttcttcacggcctcacgggtaataaggaaacatatagtctctccctccgacttccactctctttgtttaccctgttaattttgttcccggagctgtgctttgatttcgtgtttatggaagagaatagtctggtcgagagaagataaattgttagcagctaagcacattcattaacatctgattagtctttcttttttcttttcttttcttaactctgttaactcttattgttgatgagaactccggtggagagtagagttagaggtagacaacaataaaaaaagggagattaactgtgatgggtaagaaattaggtgttattaccagaacacgacagaactttttt

SEQ ID NO: 106217 - protein, 398 aa, Arabidopsis thaliana
  peptide (1)..(398): Ceres Seq. ID no. 13619012
MRRPSQMMRLLLTSFFGVIVGFLMGITFPTLTLTKMNLPSTLFPSIDLAYIEDKYSDISRQRLFGSWSSTKGLKLKNDIPDPPYNYNDTKIWVSTNPRGAERLPPDIVTPESDFYLRRLWGDPNEDLTVKQRYLVTFTVGYDQRKNIDTVLKKFSDNFSIMLFHYDGRASEWEEFEWSKRAIHVSIRKQTKWWYAKRFLHPDIVAPYEYIFIWDEDLGVEHFDSEKYLAVVKKHGLEISQPGLEPYEGLTWEMTKKRDDTEVHKHAEERNGWCTDPNLPPCAAFVEIMAPVFSRKAWRCVWHMIQNDLIHGWGLDFAVRKCVQNAHEKIGVVDAQWIIHQGVPSLGNQGQPEQGKQPWEGVRERCRREWTMFQDRLDDAEKAYFEASAHKNASSRPHG

SEQ ID NO: 106218 - protein, 392 aa, Arabidopsis thaliana
  peptide (1)..(392): Ceres Seq. ID no. 13619013
MMRLLLTSFFGVIVGFLMGITFPTLTLTKMNLPSTLFPSIDLAYIEDKYSDISRQRLFGSWSSTKGLKLKNDIPDPPYNYNDTKIWVSTNPRGAERLPPDIVTPESDFYLRRLWGDPNEDLTVKQRYLVTFTVGYDQRKNIDTVLKKFSDNFSIMLFHYDGRASEWEEFEWSKRAIHVSIRKQTKWWYAKRFLHPDIVAPYEYIFIWDEDLGVEHFDSEKYLAVVKKHGLEISQPGLEPYEGLTWEMTKKRDDTEVHKHAEERNGWCTDPNLPPCAAFVEIMAPVFSRKAWRCVWHMIQNDLIHGWGLDFAVRKCVQNAHEKIGVVDAQWIIHQGVPSLGNQGQPEQGKQPWEGVRERCRREWTMFQDRLDDAEKAYFEASAHKNASSRPHG

SEQ ID NO: 106219 - protein, 391 aa, Arabidopsis thaliana
  peptide (1)..(391): Ceres Seq. ID no. 13619014
MRLLLTSFFGVIVGFLMGITFPTLTLTKMNLPSTLFPSIDLAYIEDKYSDISRQRLFGSWSSTKGLKLKNDIPDPPYNYNDTKIWVSTNPRGAERLPPDIVTPESDFYLRRLWGDPNEDLTVKQRYLVTFTVGYDQRKNIDTVLKKFSDNFSIMLFHYDGRASEWEEFEWSKRAIHVSIRKQTKWWYAKRFLHPDIVAPYEYIFIWDEDLGVEHFDSEKYLAVVKKHGLEISQPGLEPYEGLTWEMTKKRDDTEVHKHAEERNGWCTDPNLPPCAAFVEIMAPVFSRKAWRCVWHMIQNDLIHGWGLDFAVRKCVQNAHEKIGVVDAQWIIHQGVPSLGNQGQPEQGKQPWEGVRERCRREWTMFQDRLDDAEKAYFEASAHKNASSRPHG

SEQ ID NO: 106220 - DNA, 1351 bp, Arabidopsis thaliana
  misc_feature (1)..(1351): Ceres Seq. ID no. 13619015
  misc_feature (1)..(1351): Ortholog of  Ceres SEQ ID NO 13655244 as cited in SEQ ID NO 62716
tttcgattgattcgcttcttcaactctctctcttcttcttcttctatttgcttctgtgaaaccctagattttggtgtgaggaagaagacttcaatggcggaagaagtagcagagaacgttaacgcagtcccggtttcggaagacgagctttacggatttaaacgatcggagatgtacagtggtactctcgccggttccgttggtccgtacggtcgtcatgttttcctttgttacaagagtcatgagacttggcttcctcgtgttgaaactgaaggacttcctcagcgtttcgcgaagttgtttaaggatcgtaaagctgatttcgctgttgagacgaagcttacggtgtgtggtggtggtggtgaatctgatggagatgtgttgattttcccggagatggttagatacaaggcgattcaggacacagatgtggatgcttttgtggaagatgtgcttgtgaaaggaaaaacatggacttctgggattcaggaagagttgactggttcctttgtgtttgtgtgcgctcatggtagccgagacaagagatgtggtgtttgtggaccagttcttatggagaagttcgagcaggagataagttcacgtggactttcagacaaaatctttgttttgccgtgttctcatatcggtgggcacaagtatgctggaaatttgattgtcttcagccctgattcagctggaaatgtttctggccattggtatggctatgtgactcctgatgacgtgcctgcaatgcttgatcagcatattgcaaaaggagaaatcattcaaaacctttccagaggccagatgagactaagacccgagggtgaggaagctgagaaagaggatgagcataaaatcccaaacggaaacagtgtaatggtggaagaacgcgaacctgtggagcagaaagggttcacaggaggttgttgccaaggtgcaaacggagtttcatgttgccaagaacaagctgcagagccagtcaagaaagaaggatgcatgaagctaaactggttgaaatcgatggggaaagaagaggttctcttgggagcagcagtagtttcagctgtcgcaaccgttgccgtggcttacagcatttacagaaggtcaggttaagaacctgaaccaccctcctctttttacacttttaagaagaaactttatttttggtagccatattatagaagtaaaggaagaaaagaaaacatggagaggtaataatcttttggaactatataaccatcatttggtttcggtatgggcaatgcaggaatgggatgtaatcttgcttttgactcggtttagtttggtttatcttattatgttgtcattggaatatatcaatcttctc

SEQ ID NO: 106221 - protein, 371 aa, Arabidopsis thaliana
  peptide (1)..(371): Ceres Seq. ID no. 13619016
FRLIRFFNSLSSSSSICFCETLDFGVRKKTSMAEEVAENVNAVPVSEDELYGFKRSEMYSGTLAGSVGPYGRHVFLCYKSHETWLPRVETEGLPQRFAKLFKDRKADFAVETKLTVCGGGGESDGDVLIFPEMVRYKAIQDTDVDAFVEDVLVKGKTWTSGIQEELTGSFVFVCAHGSRDKRCGVCGPVLMEKFEQEISSRGLSDKIFVLPCSHIGGHKYAGNLIVFSPDSAGNVSGHWYGYVTPDDVPAMLDQHIAKGEIIQNLSRGQMRLRPEGEEAEKEDEHKIPNGNSVMVEEREPVEQKGFTGGCCQGANGVSCCQEQAAEPVKKEGCMKLNWLKSMGKEEVLLGAAVVSAVATVAVAYSIYRRSG

SEQ ID NO: 106222 - protein, 340 aa, Arabidopsis thaliana; identical to SEQ ID NO: 25247
  peptide (1)..(340): Ceres Seq. ID no. 13619017

SEQ ID NO: 106223 - protein, 314 aa, Arabidopsis thaliana; identical to SEQ ID NO: 25248
  peptide (1)..(314): Ceres Seq. ID no. 13619018

SEQ ID NO: 106224 - DNA, 1007 bp, Arabidopsis thaliana
  misc_feature (1)..(1007): Ceres Seq. ID no. 13619022
  misc_feature (1)..(1007): Ortholog of  Ceres SEQ ID NO 14313599 as cited in SEQ ID NO 54989
  misc_feature (1)..(1007): Ortholog of  Ceres SEQ ID NO 15176204 as cited in SEQ ID NO 55608
  misc_feature (1)..(1007): Ortholog of  Ceres SEQ ID NO 15225111 as cited in SEQ ID NO 58444
  misc_feature (1)..(1007): Ortholog of  Ceres SEQ ID NO 14313064 as cited in SEQ ID NO 59543
  misc_feature (1)..(1007): Ortholog of  Ceres SEQ ID NO 13661001 as cited in SEQ ID NO 67531
  misc_feature (1)..(1007): Ortholog of  Ceres SEQ ID NO 15178920 as cited in SEQ ID NO 0
ctctcttattctctcactcttttttttttatattcctctctctctaaatctataaaatatatttaaaaacttgatcgtatataataaagtaaataaagaataataacaaaaaaaatggagaaaagaggaggaggaagtagtggaggttcgggatcatcagcagaagcagaagtgagaaaaggaccatggacgatggaagaagatcttattcttatcaactatatcgccaaccacggcgatggtgtttggaattctctcgccaaatctgcaggtctaaaacgaaccgggaaaagttgccggctccggtggctgaactatctccgccccgacgtacgacggggaaacatcactccagaagagcaacttatcatcatggaacttcatgctaagtggggaaacaggtggtcgaaaatcgccaaacatcttccaggaagaacggacaacgagatcaaaaatttctggaggacaagaattcaaaaatacatcaagcaatcggatgtaacaacaacatcgtccgttggatctcatcatagctcagagatcaacgatcaagctgcaagcacgtcgagccataatgtcttttgtacacaagatcaagcgatggagacttattctcctacaccgacatcatatcaacataccaatatggaattcaactatggtaactattcggccgcggcagtgacggcaaccgtggattatccagtaccgatgaccgttgatgatcaaaccggtgaaaactattggggcatggatgatatttggtcatcaatgcatttattgaatggtaattgattgatcggtggacaaaacatggaatattaattgagtattatatatgatttttaggagtactattattagtacgtgacatgtatatgtttttgcctcgttgtagaggtttggggttataattaatatataatgttatctaatatgcaaccttgatacatatttggatctttattgaacccatgttatacataaataaaattgttgaaggggtc

SEQ ID NO: 106225 - protein, 226 aa, Arabidopsis thaliana
  peptide (1)..(226): Ceres Seq. ID no. 13619023
MEKRGGGSSGGSGSSAEAEVRKGPWTMEEDLILINYIANHGDGVWNSLAKSAGLKRTGKSCRLRWLNYLRPDVRRGNITPEEQLIIMELHAKWGNRWSKIAKHLPGRTDNEIKNFWRTRIQKYIKQSDVTTTSSVGSHHSSEINDQAASTSSHNVFCTQDQAMETYSPTPTSYQHTNMEFNYGNYSAAAVTATVDYPVPMTVDDQTGENYWGMDDIWSSMHLLNGN

SEQ ID NO: 106226 - protein, 200 aa, Arabidopsis thaliana
  peptide (1)..(200): Ceres Seq. ID no. 13619024
MEEDLILINYIANHGDGVWNSLAKSAGLKRTGKSCRLRWLNYLRPDVRRGNITPEEQLIIMELHAKWGNRWSKIAKHLPGRTDNEIKNFWRTRIQKYIKQSDVTTTSSVGSHHSSEINDQAASTSSHNVFCTQDQAMETYSPTPTSYQHTNMEFNYGNYSAAAVTATVDYPVPMTVDDQTGENYWGMDDIWSSMHLLNGN

SEQ ID NO: 106227 - protein, 140 aa, Arabidopsis thaliana
  peptide (1)..(140): Ceres Seq. ID no. 13619025
MELHAKWGNRWSKIAKHLPGRTDNEIKNFWRTRIQKYIKQSDVTTTSSVGSHHSSEINDQAASTSSHNVFCTQDQAMETYSPTPTSYQHTNMEFNYGNYSAAAVTATVDYPVPMTVDDQTGENYWGMDDIWSSMHLLNGN

SEQ ID NO: 106228 - DNA, 808 bp, Arabidopsis thaliana
  misc_feature (1)..(808): Ceres Seq. ID no. 13619026
  misc_feature (1)..(808): Ortholog of  Ceres SEQ ID NO 12610334 as cited in SEQ ID NO 56235
  misc_feature (1)..(808): Ortholog of  Ceres SEQ ID NO 13654825 as cited in SEQ ID NO 62409
actcacagagacacacaaaacaaatcccaaagcttcagaggaagaagaagaagagagtgagaaacaatggcgtcgacgactctctcaatcgcaacaacaatccgttcctcttctcctctcacttccgcttccactcatcacttcctttccaaacccaccgcaatcgaattcccatttcgtctcagctcttcttctagccaccgtgcaatcaacctccgtcctatctccgccgtcgaagctccggagaaaatcgagaaaatcggatccgaaatctcctccttaaccctcgaagaagctcgtatcctcgtcgactatctccaagacaaattcggtgtctccccactctccttagcccccgcagcagcggccgttgcagctccagccgacggtggcgcggcggctgtagtggaggagcaaacagagttcgatgtggttatcaatgaagttccgagtagttctcgtattgcagtaattaaagctgttagggctttgactagcttggcgttgaaggaagctaaggagctaatcgaaggattaccaaagaagtttaaagaaggtatcactaaagatgaagctgaagaagctaagaagactcttgaagaagctggtgctaaagtctccattgcttaagtttcttcaacaatcggaaaaaaaaaaatgtgatattttcggaatttatgagtctttttgttgtttagtatagtttgtgtttgagttattgattcagcttttgagaaattgttgtactttgaatcaatttggtttcgtattacagttttagtcttcaacaagttcttcctctagatgc

SEQ ID NO: 106229 - protein, 187 aa, Arabidopsis thaliana
  peptide (1)..(187): Ceres Seq. ID no. 13619027
MASTTLSIATTIRSSSPLTSASTHHFLSKPTAIEFPFRLSSSSSHRAINLRPISAVEAPEKIEKIGSEISSLTLEEARILVDYLQDKFGVSPLSLAPAAAAVAAPADGGAAAVVEEQTEFDVVINEVPSSSRIAVIKAVRALTSLALKEAKELIEGLPKKFKEGITKDEAEEAKKTLEEAGAKVSIA

SEQ ID NO: 106230 - protein, 93 aa, Arabidopsis thaliana
  peptide (1)..(93): Ceres Seq. ID no. 13619028
LTETHKTNPKASEEEEEESEKQWRRRLSQSQQQSVPLLLSLPLPLITSFPNPPQSNSHFVSALLLATVQSTSVLSPPSKLRRKSRKSDPKSPP

SEQ ID NO: 106231 - DNA, 861 bp, Arabidopsis thaliana
  misc_feature (1)..(861): Ceres Seq. ID no. 13619034
  misc_feature (1)..(861): Ortholog of  Ceres SEQ ID NO 15170072 as cited in SEQ ID NO 55533
  misc_feature (1)..(861): Ortholog of  Ceres SEQ ID NO 15173959 as cited in SEQ ID NO 63398
  misc_feature (1)..(861): Ortholog of  Ceres SEQ ID NO 13663564 as cited in SEQ ID NO 66903
attttagctttctgtctattcaccagattctctctattcgattctccctttacttcttctcgtctctcttctctgctcgtcagatctcaaaatcaatcggatatcgaaaccacaacttcatcaattatgactcttggctcaggaggatctagcgttgttgttccgaggaattttcggttgttggaggagcttgaacgtggggagaaaggtattggggatggaactgtgagctatggaatggatgatggagatgacatctatatgcgttcttggactggcaccatcatcggtcctcacaacactgttcatgaaggtagaatctatcagttgaagctcttttgtgacaaagattacccggagaaacctccaactgtccgattccattcacgtgtcaacatggcttgtgtcaaccacgaaacaggagtggtggatcctaagaaatttgggctacttgcaaactggcaaagagagtacacaatggaggatatactggtacagttgaagaaggaaatgtctacgtcgcataaccgtaagcttgttcaacctccggaaggtacttgcttctagttacttctggaatcttcttctggtttgctagaaaatcattgccccttctaataccaaagtatgtatctgggggtcctccattgtcgttctcaacgcttttttttttttaattcatcaaaaaatggtctgtgtggatggtatggtgatgatgatgatgttgtccgattgatcatctgaagttttatcattgtgtgcaaatatcaaaaacagcttctcttcctcactccatgtgttcaatcttttgaatttaacattttgtgtcagccctttttttatatataaatgaaatctgct

SEQ ID NO: 106232 - protein, 188 aa, Arabidopsis thaliana; identical to SEQ ID NO: 29977
  peptide (1)..(188): Ceres Seq. ID no. 13619035

SEQ ID NO: 106233 - protein, 146 aa, Arabidopsis thaliana; identical to SEQ ID NO: 29978
  peptide (1)..(146): Ceres Seq. ID no. 13619036

SEQ ID NO: 106234 - protein, 109 aa, Arabidopsis thaliana; identical to SEQ ID NO: 29979
  peptide (1)..(109): Ceres Seq. ID no. 13619037

SEQ ID NO: 106235 - DNA, 1369 bp, Arabidopsis thaliana
  misc_feature (1)..(1369): Ceres Seq. ID no. 13619038
  misc_feature (1)..(1369): Ortholog of  Ceres SEQ ID NO 14310687 as cited in SEQ ID NO 52933
ctccttaaatcacttcgatcaaaacttatctctctctatcgtcttttgttttgatttaaatgcctcaagtcgttgcttcagcatgtaccggtgggtctgaccggaaaatctcatgtgaaactctggccgacgataacgaagactcacctcataactcgaagatccgacccgtatccatctccgccgtcgattttccaccggaatcttactctttatcaaaagaagctcagctcgaatggctaaacgacaacgccttcttcgaacgcaaagaatcacaaaaaggaaactcttctgctccaatttcgaatcccaatacaaaccctaattcgagctctcatcgaatctcactcaaatcaaaagcgtcgatcatcagattaccgaaaccgcagaagacgtgtttcaacgaagcgaagaaacggagaaattgcagaatcgcgaggactttgatgattccgaaacggatcgggtcgagattgaaatcggatcctacgttatcggagccatgttctcccaaggtttcttgtatcggaagggttagatctaaacgtgatcgtagccgacgaatgcagagacaaaaatccggtcgaaccaattcgtttaaggataaaccggttccggttaagaagcctggttttttcgctagcttcagagctattttcagaaccggtggcggttgcaaagacttatctgcgagtggagctcacgcgcctcggagggatgtcgtagtctctccgccgagagtttcggtgagaagatcgacggatattagaggacggcttccgccgggagacgtcgggaaatcctcgccgcagaggaatagtaccggttcgaggagatcaattgacggcggtgaaccggttctgcctggtttaggtgggatgactcggtttacttcagggagaagaccggatttgttggttgaagtttgacgtggcgtgacgtacggcgttttactgtgagtggtggggtccagtcccgagaaaaaacaaggatcgtgattggttagttggctatatggggcccagaagcgtgtgtatatttgaaaagtcgttgtgatgacatggcgagtggtttaacggagttaggaacacggcacagatagaaaaacgcggacgcttttggattgatttcttacgtctcaaccactttcaccgttttattatatagcttttggtgcgttttttcttctttttaagacttttgatatttgaattagtttcgctttttgtcctttttattattttccttgttttgggttgtacataggtattgttatttctttgtgtacatgtgttttttttttgcttagaaaggaatagtagaatgtaaaagatacttgtgatgatcagtcaataatgtgttagacacc

SEQ ID NO: 106236 - protein, 289 aa, Arabidopsis thaliana; identical to SEQ ID NO: 40578
  peptide (1)..(289): Ceres Seq. ID no. 13619039

SEQ ID NO: 106237 - protein, 160 aa, Arabidopsis thaliana; identical to SEQ ID NO: 40579
  peptide (1)..(160): Ceres Seq. ID no. 13619040

SEQ ID NO: 106238 - DNA, 1447 bp, Arabidopsis thaliana
  misc_feature (1)..(1447): Ceres Seq. ID no. 13619053
  misc_feature (1)..(1447): Ortholog of  Ceres SEQ ID NO 15172321 as cited in SEQ ID NO 55415
aagggttctttttggtaattttcccgaatcacacaagtgagctagctcatcagagtccacgagcttcccactaaaaaattgaaaattgttgcttctgtcatctgaaattaaacaaagcgagaaaaggcgatacaaacgatttcgaatgcttcatcttctcctttgaaaatccttcttctgcttaatgctgctagatatggatctcggtgttcttcttccatcattgcaatctgtttatgtgctggtgttttacttcgtttacttggccgttgccggagaaattctccccgggaaagttattcgcggcgtccttttatcagatggctctcaacttcgttaccgatgcaatggtctattggcactaatattgttggtagctattttgggaatctgtgcaaaacttggcattgtatcacctcttgtggttgcggatagaggacttgagttactctcagctacttttattttctgtgttttggtgacattagcattgtatgttactgggcgaagttcctcgaataagggttcttccctaaagcctcatgtctcaggaaatcttgtacatgactggtggtttggaatacagctgaatcctcagtttatgagcattgatctcaagtttttctttgtcagagccgggatgatgggatggctgcttatcaatctctctattctggcaaaaagtgtgcaggatggttccttgagtcagtcgatgattctttaccagatcttctgtgcgttatatatattggactactttgttcatgaagaatacatgacctctacgtgggacataattgcagagagactaggcttcatgctagtgtttggagatctcctgtggattcctttcacttttagcattcagggctggtggcttttgcacaacaaagtagaactaacagttcctgcgattgtagtcaattgccttgtcttcttgatagggtacatggtttttcgaggagctaacaaacaaaaacatatctttaagaagaacccaaaaacaccaatatggggcaagcctccagtggtagttggtggaaagttactggtttcaggctattggggaattgcaaggcactgtaattaccttggcgacttgatgcttgctctgtccttcagtttgccatgtggaataagttctccggttccatatttctacccgatataccttctgatactattgatatggagagaacgaagagacgaggttcgatgtgcagagaagtacaaggagatatgggcagagtatcttagacttgtcccctggagaatacttccttatgtttattagatgtgccaagagccaagtcatgaatcctttcagattcatcctcttgtgtcttattttttcataatcttgttttattttagcaatgctcgagtgaaactttgtagtacacgtttgagaataacttcagtccttattattattttagcattgata

SEQ ID NO: 106239 - protein, 369 aa, Arabidopsis thaliana; identical to SEQ ID NO: 24309
  peptide (1)..(369): Ceres Seq. ID no. 13619054

SEQ ID NO: 106240 - protein, 365 aa, Arabidopsis thaliana; identical to SEQ ID NO: 24310
  peptide (1)..(365): Ceres Seq. ID no. 13619055

SEQ ID NO: 106241 - protein, 230 aa, Arabidopsis thaliana; identical to SEQ ID NO: 24311
  peptide (1)..(230): Ceres Seq. ID no. 13619056

SEQ ID NO: 106242 - DNA, 1757 bp, Arabidopsis thaliana
  misc_feature (1)..(1757): Ceres Seq. ID no. 13619060
  misc_feature (1)..(1757): Ortholog of  Ceres SEQ ID NO 15176262 as cited in SEQ ID NO 54751
  misc_feature (1)..(1757): Ortholog of  Ceres SEQ ID NO 13656177 as cited in SEQ ID NO 64997
gtctccgacttcaaacataacacaaatcgttcatcgtcttccttctctctctctgattctctcattcgcgaatttcaaagctatggcggatacggtagagaaagttcccaccgttgttgagtcatcttcatcatccaccgttgaagcatctaatagcgccgagaagactgagcccacgacggagaagaaaaagtggggcgatgttgaagatgatgatgatgaagaagaagctgtatcggagcttaattcattgagcattaaggaagaagagaaacctgattctattcttgaggaacctgaagattctaacatcaaagctgttacttctggtgacacaccatatacatcagcaagtagatttgaagacttgaacttgtcacctgaattgatgaaaggcttgtacgttgagatgaaattcgaaaagcctagcaagatccaagctattagtttgcctatgataatgacgccgccacacaagcatctgattgcccaggctcataacggatctggaaagacgacttgtttcgttcttggaatgttgagtcgtgttgatcccacattgagagagcctcaagctctctgtatttgtcccactagagaattagctaatcagaatatggaagttcttcagaagatggggaagtttactgggatcactgctgagttggctgtgcctgactcaacgagaggtgcaccggcggcaacaagaggagctcctgtttctgctcatgttgtgattggcacccctggaacgcttaagaaatggatggcatttaagagactaggtctaaatcatttgaagattctggtttttgatgaggctgaccatatgcttgctacggatgggtttagggatgattccttgaagataatgaaagacattgggagagttaatcccaatttccaggttcttcttttctcggcaacttttaacgaaactgtcaaagattttgttgcgcggacagtcaaagatcccaaccaattgtttgtcaaaagagaggatctggctttggactcggtgaagcagtataaagttgtttgcccgaaggagcaaaacaagatcgaagtcatcaaggatcagattatggagcttggggatattgggcaaaccattatctttgtgaaaacaaaagcgtctgctcaaaaggtgcacaaagcccttgcggaaatgggatatgacgttaccagtgtccatggtaatctgactgaatcggacagggataagatagttaaagagtttaaagaatgccttactcaagtgctcattgctaccgatgtcattgcaagaggttttgaccaacagcgggtgaatttggttgtcaattataatcttcccactaaatatgaaactggagagccagattatgaggtgtaccttcacagggttgggagagctggccggtttggtcgcaaaggagcggttttcaacttgctgcttgatgatggctgggataaagaggtgatggagaagatcgagaagtattttgaagcaaatgttaaggagatcaagtcgtggaactcagaggaagagtataagagtgcattaaaggaagctggcctgctggacgagtgaggaagagagacagcatgtgttcaaaccatcttaaaagactatgtcgtctgttttcttgagattgttttaagaaagaaacttgtatacctctttgaggttttcttgtaatctttttatctgattgctgagagtttcagactttgtagattttttgttaagggaaaaggaaaacattttttatgtc

SEQ ID NO: 106243 - protein, 523 aa, Arabidopsis thaliana
  peptide (1)..(523): Ceres Seq. ID no. 13619061
SPTSNITQIVHRLPSLSLILSFANFKAMADTVEKVPTVVESSSSSTVEASNSAEKTEPTTEKKKWGDVEDDDDEEEAVSELNSLSIKEEEKPDSILEEPEDSNIKAVTSGDTPYTSASRFEDLNLSPELMKGLYVEMKFEKPSKIQAISLPMIMTPPHKHLIAQAHNGSGKTTCFVLGMLSRVDPTLREPQALCICPTRELANQNMEVLQKMGKFTGITAELAVPDSTRGAPAATRGAPVSAHVVIGTPGTLKKWMAFKRLGLNHLKILVFDEADHMLATDGFRDDSLKIMKDIGRVNPNFQVLLFSATFNETVKDFVARTVKDPNQLFVKREDLALDSVKQYKVVCPKEQNKIEVIKDQIMELGDIGQTIIFVKTKASAQKVHKALAEMGYDVTSVHGNLTESDRDKIVKEFKECLTQVLIATDVIARGFDQQRVNLVVNYNLPTKYETGEPDYEVYLHRVGRAGRFGRKGAVFNLLLDDGWDKEVMEKIEKYFEANVKEIKSWNSEEEYKSALKEAGLLDE

SEQ ID NO: 106244 - protein, 496 aa, Arabidopsis thaliana; identical to SEQ ID NO: 25901
  peptide (1)..(496): Ceres Seq. ID no. 13619062

SEQ ID NO: 106245 - protein, 394 aa, Arabidopsis thaliana; identical to SEQ ID NO: 25902
  peptide (1)..(394): Ceres Seq. ID no. 13619063

SEQ ID NO: 106246 - DNA, 1347 bp, Arabidopsis thaliana
  misc_feature (1)..(1347): Ceres Seq. ID no. 13619068
  misc_feature (1)..(1347): Ortholog of  Ceres SEQ ID NO 15170760 as cited in SEQ ID NO 52747
  misc_feature (1)..(1347): Ortholog of  Ceres SEQ ID NO 14314335 as cited in SEQ ID NO 57305
  misc_feature (1)..(1347): Ortholog of  Ceres SEQ ID NO 15177588 as cited in SEQ ID NO 60367
atatccaattttttcattgaaaatacaaactttcattccaaaaaaaaacctcaatacacaaaaaaccaaaaaaacatataacgttggcaaaaatactaaaaatattttttaaaagataaagcaataaaaaagtatacaaacaaattaacaagaaggagagctctcactataaaacagagcacatgttcttctcactaaccactccaacagagaagcaaaagaaaaaaaagctattgtttgaaagaagaagaagttaactatggcaaaggatgtggaagccgttcccggagaaggatttcagacaagagactatcaagatccgccaccagctccgtttattgatggagcggagctaaagaagtggtctttctacagagcagttatcgcagagttcgtagccactctcctcttcttatacatcaccgttttgacagtcatcggttacaagattcagtccgatactgatgccggtggcgtagattgcggcggagttggaatcctcggtatcgcttgggcctttggtggtatgatcttcatcctcgtctactgcaccgccggtatctctggtggtcacattaacccagcggtgacatttgggctattcttggcacgtaaagtgtcgttacctagggccctattgtacataatcgctcagtgtttgggtgcgatttgtggagttggttttgtcaaagccttccaaagctcttactacacccgttacggaggtggagccaactctctagccgatggctacagcacagggaccggtctagccgcagagatcattggtactttcgttcttgtctacaccgtcttctctgccactgaccccaaacgtagtgccagagactcccacgttccggtgttggcgccacttccaatcggatttgccgtgttcatggtacatttggctaccattcccattaccggaaccggaattaacccggcaaggagtttcggagctgccgtaatctacaacaagagcaagccatgggatgaccactggatattttgggttggaccattcattggagctgcgatagctgcattctaccaccaattcgttctgagagcttcaggttctaagtctcttggatcattcagaagtgctgccaacgtctaaacacatcaaaccagatttctcaagaataaatgaagttgtgatctctctgtacaaatctaaatcagtcacttgcagttttcatttccctttcttatatttgtgttttccacttgctcttttgtgaattttccttcggtgtaattgttttttctttcgcttttaaacgagtgattggaattataatcaatgaaatcaaagaggttcttatgcgttgtgtttacatt

SEQ ID NO: 106247 - protein, 287 aa, Arabidopsis thaliana; identical to SEQ ID NO: 24770
  peptide (1)..(287): Ceres Seq. ID no. 13619069

SEQ ID NO: 106248 - protein, 198 aa, Arabidopsis thaliana; identical to SEQ ID NO: 24771
  peptide (1)..(198): Ceres Seq. ID no. 13619070

SEQ ID NO: 106249 - DNA, 1665 bp, Arabidopsis thaliana
  misc_feature (1)..(1665): Ceres Seq. ID no. 13619071
  misc_feature (1)..(1665): Ortholog of  Ceres SEQ ID NO 15176911 as cited in SEQ ID NO 54868
  misc_feature (1)..(1665): Ortholog of  Ceres SEQ ID NO 13596433 as cited in SEQ ID NO 68721
  misc_feature (1)..(1665): Ortholog of  Ceres SEQ ID NO 13599169 as cited in SEQ ID NO 0
attcaccatcgctcttacgtttgaatctatccagatccaaagctcttcttcttcccggcaattctgagatctcattttcaccggcgacgagctttaatcggagaacgatgaagcagcttcacaagcaaatgagctcgaagcgtgatgaagaaaccattcccatgagccaatccagtccttactctcccaaaactttaaagcatcccagatctcttcccagatcgcttcactatctctttcgtgaacaacgactcctctttatcctcgtcgggatcttgatcggatccactttcttcatcctccagccttctctctctcgtttaggcgccgctgagtccacctcgttaatcaccagatctgtttcctacgccgtcaccgattccccgccttccaggtcgacttttaattccggaggcggcggaggtagaaccggtcgtgttcccgtcggtatcggacggaagagactgaggattgttgtcaccggtggagctggtttcgtcggtagtcatcttgttgataagcttatcggtaggggagatgaagtgatcgtgattgataacttcttcactggtaggaaggagaatttggttcatctattctcgaatcctaggtttgagctaattcgacacgatgttgttgagccaatcctccttgaggtcgatcagatttaccatttagcttgtccagcttcacctgttcattacaagtataatccagtcaagactatcataacaaatgtaatgggcactctcaatatgttgggtcttgcaaagagagttggggcaaggtttctgctcaccagcacaagtgaagtctatggagatccccttgagcatccacagaaagagacttactggggaaacgtgaatccaatcggtgagaggagttgctatgatgaaggaaagcgtactgcagaaaccctggccatggattatcaccgaggtgcaggtgtggaggttagaattgctcgtattttcaacacatatgggcccagaatgtgccttgatgatgggcgtgttgttagtaactttgttgcccagaccattcgcaaacacccaatgactgtttatggtgatggaaaacagactcgtagctttcaatatgtttctgacttggtggagggacttgtagctttaatggaaaacgatcatgtaggacccttcaaccttggtaaccctggagaattcacaatgcttgaacttgcagaggtggttaaggaggtgatcgacccaagcgcgaccatagagttcaaaccaaacacagcagacgatcctcacaagaggaaaccagacataagcaaagcaaaggaacagttgaactgggaaccaaagatatctctgagggagggactgcctcgcatggttagtgacttccgtaaccgaatcttaaacgaagacgaaggtaaaggtctctaagtcagtcacacagagatatagagtataatccttcttctgctttgatttgatatatgtatagtctctttttcaagagctctgctaagtctttttgttctctctgttttttctttttggttctatctccaagacacagattactacttatattagctaatgtttttgacttgggattttgtcattgggccattcaccactaggctcaatattagtggaaaggtattgatataaaatttcgctcggttcatac

SEQ ID NO: 106250 - protein, 470 aa, Arabidopsis thaliana
  peptide (1)..(470): Ceres Seq. ID no. 13619072
SPSLLRLNLSRSKALLLPGNSEISFSPATSFNRRTMKQLHKQMSSKRDEETIPMSQSSPYSPKTLKHPRSLPRSLHYLFREQRLLFILVGILIGSTFFILQPSLSRLGAAESTSLITRSVSYAVTDSPPSRSTFNSGGGGGRTGRVPVGIGRKRLRIVVTGGAGFVGSHLVDKLIGRGDEVIVIDNFFTGRKENLVHLFSNPRFELIRHDVVEPILLEVDQIYHLACPASPVHYKYNPVKTIITNVMGTLNMLGLAKRVGARFLLTSTSEVYGDPLEHPQKETYWGNVNPIGERSCYDEGKRTAETLAMDYHRGAGVEVRIARIFNTYGPRMCLDDGRVVSNFVAQTIRKHPMTVYGDGKQTRSFQYVSDLVEGLVALMENDHVGPFNLGNPGEFTMLELAEVVKEVIDPSATIEFKPNTADDPHKRKPDISKAKEQLNWEPKISLREGLPRMVSDFRNRILNEDEGKGL

SEQ ID NO: 106251 - protein, 435 aa, Arabidopsis thaliana
  peptide (1)..(435): Ceres Seq. ID no. 13619073
MKQLHKQMSSKRDEETIPMSQSSPYSPKTLKHPRSLPRSLHYLFREQRLLFILVGILIGSTFFILQPSLSRLGAAESTSLITRSVSYAVTDSPPSRSTFNSGGGGGRTGRVPVGIGRKRLRIVVTGGAGFVGSHLVDKLIGRGDEVIVIDNFFTGRKENLVHLFSNPRFELIRHDVVEPILLEVDQIYHLACPASPVHYKYNPVKTIITNVMGTLNMLGLAKRVGARFLLTSTSEVYGDPLEHPQKETYWGNVNPIGERSCYDEGKRTAETLAMDYHRGAGVEVRIARIFNTYGPRMCLDDGRVVSNFVAQTIRKHPMTVYGDGKQTRSFQYVSDLVEGLVALMENDHVGPFNLGNPGEFTMLELAEVVKEVIDPSATIEFKPNTADDPHKRKPDISKAKEQLNWEPKISLREGLPRMVSDFRNRILNEDEGKGL

SEQ ID NO: 106252 - protein, 428 aa, Arabidopsis thaliana
  peptide (1)..(428): Ceres Seq. ID no. 13619074
MSSKRDEETIPMSQSSPYSPKTLKHPRSLPRSLHYLFREQRLLFILVGILIGSTFFILQPSLSRLGAAESTSLITRSVSYAVTDSPPSRSTFNSGGGGGRTGRVPVGIGRKRLRIVVTGGAGFVGSHLVDKLIGRGDEVIVIDNFFTGRKENLVHLFSNPRFELIRHDVVEPILLEVDQIYHLACPASPVHYKYNPVKTIITNVMGTLNMLGLAKRVGARFLLTSTSEVYGDPLEHPQKETYWGNVNPIGERSCYDEGKRTAETLAMDYHRGAGVEVRIARIFNTYGPRMCLDDGRVVSNFVAQTIRKHPMTVYGDGKQTRSFQYVSDLVEGLVALMENDHVGPFNLGNPGEFTMLELAEVVKEVIDPSATIEFKPNTADDPHKRKPDISKAKEQLNWEPKISLREGLPRMVSDFRNRILNEDEGKGL

SEQ ID NO: 106253 - DNA, 877 bp, Arabidopsis thaliana
  misc_feature (1)..(877): Ceres Seq. ID no. 13619083
  misc_feature (1)..(877): Ortholog of  Ceres SEQ ID NO 15168856 as cited in SEQ ID NO 56354
  misc_feature (1)..(877): Ortholog of  Ceres SEQ ID NO 13583591 as cited in SEQ ID NO 63084
aaagcaagaaaaagagaatgtcaaaggagaaacaaggaagaagcttagcttataatcgaatctaagccgtttcgggaaattctgtttgtaggtgacaaaatcctcttatagggttattcttagctatgaatttcctctgcaatttctttttttccccgccaaaatttctcctgaagcaaatgtagctttttacttgctgaactagggttttgttcgattttgttcctctttcctcgctgattttgtcggaatttctgggtttgggaagagaaattggagtcgttattgattgaaatgaagaagcttttaggaggtccgggaactgtgtgtggtctgttactgagaatcggacaatgtgcttcagctgctgcttcaatcggcgttatggtctctgctaaagagttctctgttcacactgctttttgctacttgattgcgtcaatgggtcttcaattgttgtggagctttgggctagcatgtcttgatgtttatgctctcaggggaaagaaagatctccaaaaccctatcttggttagcttattcgtcgttggtgattgggtgacggcaatgttatctcttgcagctgcatgttcatcagcaggagttgtagtcttgtatgaaaaagatatcaagtattgcaatactcaaagccaatatccatgtcttaggtatgaagtagctgtagcgctttctttcgtcacttggatccagattgctgtttcttctcatgtcacattttggatcttagcctcggtttagttagtttcgcaaagaactcccaactttttcttcttcttggaatgttgagacatctttgtagcttttgatgacgttaacaatctgcttctaatcgaatctatcaatgtttcttgcaatc

SEQ ID NO: 106254 - protein, 154 aa, Arabidopsis thaliana; identical to SEQ ID NO: 42421
  peptide (1)..(154): Ceres Seq. ID no. 13619084

SEQ ID NO: 106255 - protein, 124 aa, Arabidopsis thaliana; identical to SEQ ID NO: 42422
  peptide (1)..(124): Ceres Seq. ID no. 13619085

SEQ ID NO: 106256 - protein, 105 aa, Arabidopsis thaliana; identical to SEQ ID NO: 42423
  peptide (1)..(105): Ceres Seq. ID no. 13619086

SEQ ID NO: 106257 - DNA, 747 bp, Arabidopsis thaliana
  misc_feature (1)..(747): Ceres Seq. ID no. 13619087
  misc_feature (1)..(747): Ortholog of  Ceres SEQ ID NO 13595067 as cited in SEQ ID NO 55857
  misc_feature (1)..(747): Ortholog of  Ceres SEQ ID NO 12635516 as cited in SEQ ID NO 0
  misc_feature (1)..(747): Ortholog of  Ceres SEQ ID NO 15179376 as cited in SEQ ID NO 0
tctctctagaaaatatcagaaaaacaaaaccatctcaaagtttcttgagaagaaaaaaagggtcaagaaagatgcctaaagacaggaatatcggaatcgccatggatttctcagagagcagcaagaacgctctgaaatgggcgatcgagaacttagcagacaaaggagacacgatttacatcatccacactctaccactctctggcgatgaatctcgtaactccctctggttcaaatccggttctcctctcataccgttggcagagtttagggaaccggagattatggagaaatacggtgtcaaaaccgacatcgcatgtcttgatatgctcgacactggttcgaggcagaaagaggtgcatgtagtgaccaagttatactggggagatgcaagagagaagcttgttgatgctgttaaagatcttaaactcgattctattgtcatgggaagcagaggactcagtgctcttcaaaggataataatgggaagcgtgagcagctttgtgatccaacacgcgccttgccctgtcaccgttgtcaaggataacgaataaacgattctcactacaaaaaaaaaaaaaaaaaaaaactgtctttatcttataagtcctaccaaataatcatcgcaatttatgctttttagtttttattaataaaagaatctttatgttggttttatttgtaatttgactacaacaaaaaaagaacccagagtgttttcatcttctagttttgagagtttcttgc

SEQ ID NO: 106258 - protein, 183 aa, Arabidopsis thaliana
  peptide (1)..(183): Ceres Seq. ID no. 13619088
SLENIRKTKPSQSFLRRKKGSRKMPKDRNIGIAMDFSESSKNALKWAIENLADKGDTIYIIHTLPLSGDESRNSLWFKSGSPLIPLAEFREPEIMEKYGVKTDIACLDMLDTGSRQKEVHVVTKLYWGDAREKLVDAVKDLKLDSIVMGSRGLSALQRIIMGSVSSFVIQHAPCPVTVVKDNE

SEQ ID NO: 106259 - protein, 160 aa, Arabidopsis thaliana; identical to SEQ ID NO: 35431
  peptide (1)..(160): Ceres Seq. ID no. 13619089

SEQ ID NO: 106260 - protein, 150 aa, Arabidopsis thaliana; identical to SEQ ID NO: 35432
  peptide (1)..(150): Ceres Seq. ID no. 13619090

SEQ ID NO: 106261 - DNA, 1811 bp, Arabidopsis thaliana
  misc_feature (1)..(1811): Ceres Seq. ID no. 13619095
  misc_feature (1)..(1811): Ortholog of  Ceres SEQ ID NO 14313228 as cited in SEQ ID NO 67057
aattctctttgtagagggaagtctgaaaacgccgagaagaagacgaagaagaagaagaagaagaaagcttgagactttctctctgtgtgcaatttcgaaatcgataaagacttcaactttcggttctaacaatgacaatttccgtatagtttgattttgtccacctctttcaccgattacctgatttcatcgctggcgttagtcatcaaatgggagctcgttgctcaaagttctcattctgcttgttcccttctcacttcaaatccgcttcagttctcgagtctcctgatatcgagaatggaggaaaagtgtggccgacttttaaggaattcaaattggagcagctgaaatctgcgaccggaggtttctcttcagacaacattgtatcagaacacggcgagaaagctccaaacgttgtctacagaggaaggcttgatgatggtcgtttgattgctgtcaaacgattcaatcgccttgcttgggctgatcatcgacagttcctggatgaagctaaagctgttgggagcttgaggagtgatagattagcgaatctgattggatgttgctttgaaggagaagagagattactagttgctgagtttatgcctcatgaaacgcttgcaaagcatcttttccactgggagaataatccgatgaaatgggcgatgagattaagagttgcattgtgtttagcacaagcattggaatattgtagtaataaagggagagctttgtatcatgatctcaatgcttacagggttttgtttgacaaggatgggaatcccaggttgtcttgttttggactcatgaaaaatagcagagatgggaagagttatagcacaaacttggcatttactcctccagagtatttgcgaacgggtagagttacaccagagagtgttgtattcagttttggaaccgttttgctcgatctcatgagtggaaaacatattccaccgagtcatgcgcttgacctaatcagaggcaagaactgtgcaatgttaatggattctgctctcgagggtcatttctcaaacgaagacggaactgagctagtacgcttagccacacgttgtctgcagtatgaagctcgagaaagaccaaatgtgaaatctctcgtgacttcacttgtcacactccagaaggaatctgatgtagcttcctacgttcttatgggtataccccatgaaaccgaggctgaagaagagtctccgctttctttgacaccctttggtgatgcatgcttaagagtggatcttacagccatacaggaaatactcagtaagattggatacaaggatgatgaaggaattgccaatgagctctcgtttcaaatgtggaccaatcagatgcaggaatctctcaattcgaagaagcaaggcgacttagctttccgttccaaagattttacaaccgcggtcgattgctacactcagttcatagatgggggaacaatggtgtcaccaacagtacacgcacggcggtgcttgtcatatctgatgaacgacaacgcacaagaggctctgacagatgcattgcaggcacaggttgtgtctccggattggccaaccgccttgtatctgcaagcggcttgcttgttcaagctgggtatggaagccgatgctcagcaagctcttaaggatgggactacattggaagctaagaagagtaacaagcgctgataaaatagcgttttcaaaagcttttgtatatgctttattttgtttcctttctctctatttccatctatatgcgcatacatacacatatgcgggtgtatttattatatatgtgcatatacttttgatgcc

SEQ ID NO: 106262 - protein, 490 aa, Arabidopsis thaliana; identical to SEQ ID NO: 42727
  peptide (1)..(490): Ceres Seq. ID no. 13619096

SEQ ID NO: 106263 - protein, 359 aa, Arabidopsis thaliana; identical to SEQ ID NO: 42728
  peptide (1)..(359): Ceres Seq. ID no. 13619097

SEQ ID NO: 106264 - protein, 342 aa, Arabidopsis thaliana; identical to SEQ ID NO: 42729
  peptide (1)..(342): Ceres Seq. ID no. 13619098

SEQ ID NO: 106265 - DNA, 1169 bp, Arabidopsis thaliana
  misc_feature (1)..(1169): Ceres Seq. ID no. 13619099
  misc_feature (1)..(1169): Ortholog of  Ceres SEQ ID NO 12616162 as cited in SEQ ID NO 63260
aaaccaaggaaagaaaacgagagaggtacgtagaagaaaatggctgccttatcagagaaagaggctgaagcttatctcgacgcaaggcctagatatccgatcgattggtttaagaaaattgccgcacggacacaggaccacaaatttgcttgggatgttggaactggtaatggtcaggctgctattgggcttgtggagcattacgagaatgtagtggctaccgatataaacgaagcacaacttcaacgagcaatcaaacactcaagaatcagttaccatcacactccaacaacgatatcagaagatgagatggtggatctactcgggggagaaaactccgtggatctcatagttgctgctcaagctgtccatttcttcgacctcaacgtattttacaatgttgcaaaacgtgttcttcgtaaagaaggaggcctaatcgccgtttgggtatacaacgatatcattatctcgcatgagatcgatcccataatgaagcgccttgtcgactctactctaccttttagaactcctattatgaatttagcatttgacggttacaagacattgacatttccttttgagaccatagggatgggttccgaaggaaagcctattactctagacattccgcataaactttcgcttaaagggtttatagggttcttgagatcgtggcagcccgcgatgaaggctaaggaaaaaggagtagagcttataaatgaagatctaataaccaaatttgaggaggcttggggtgatgaaacccaagtgaaagatgttttctacaaggctcacatgattgttggaaaaattccggaagaaaaattcgaatctgatcaagtactgtctaacaaaggtcgtctcttgcttgaaacggaggttgggagaaaccagaaaagaccacaaccatccgatgaaggagacagacaaagtaagaaacaaaatacaagtgaagatgacgcatgcaaagataaaccatcgtcagtttttagtactcattacaggttttaaccaaaaatagatattaaaccatttgagaaagcaataactcttatttggatatcagttcattattccgtattaaagccgttggtttttgtacaactgagtaataaagttcatgttgagtatgtcaattattggatttgggagttccaaagaaaattttg

SEQ ID NO: 106266 - protein, 323 aa, Arabidopsis thaliana; identical to SEQ ID NO: 27465
  peptide (1)..(323): Ceres Seq. ID no. 13619100

SEQ ID NO: 106267 - protein, 233 aa, Arabidopsis thaliana; identical to SEQ ID NO: 27466
  peptide (1)..(233): Ceres Seq. ID no. 13619101

SEQ ID NO: 106268 - protein, 173 aa, Arabidopsis thaliana; identical to SEQ ID NO: 27467
  peptide (1)..(173): Ceres Seq. ID no. 13619102

SEQ ID NO: 106269 - DNA, 1204 bp, Arabidopsis thaliana
  misc_feature (1)..(1204): Ceres Seq. ID no. 13619103
  misc_feature (1)..(1204): Ortholog of  Ceres SEQ ID NO 13532807 as cited in SEQ ID NO 53012
  misc_feature (1)..(1204): Ortholog of  Ceres SEQ ID NO 15176375 as cited in SEQ ID NO 53238
  misc_feature (1)..(1204): Ortholog of  Ceres SEQ ID NO 14316507 as cited in SEQ ID NO 57397
  misc_feature (1)..(1204): Ortholog of  Ceres SEQ ID NO 13663060 as cited in SEQ ID NO 60964
  misc_feature (1)..(1204): Ortholog of  Ceres SEQ ID NO 13598532 as cited in SEQ ID NO 65204
  misc_feature (1)..(1204): Ortholog of  Ceres SEQ ID NO 13656849 as cited in SEQ ID NO 65764
  misc_feature (1)..(1204): Ortholog of  Ceres SEQ ID NO 13656501 as cited in SEQ ID NO 69206
catcatcttcattaatctgatcaaataatagggttaatcaaaagtccagaaaccaacacagttcaattttacgaaacctctcagaaatggagaagtacgagaagctagagaaggtcggagaaggaacatacgggaaagtctacaaagcgatggagaaaggaactggtaagcttgttgctctgaagaaaactcgtctcgagatggacgaagaaggtattccaccaactgctcttcgtgagatctcgcttctccagatgttatcaacatcgatctatgttgttcgattactctgcgtcgaacatgttcatcaaccatcaaccaaatctcaatctaccaaatccaatctctatctcgttttcgagtatctcgatactgatcttaagaaattcatcgattcgtataggaaaggacctaatcctaagcctcttgagccttttttgattcagaagttgatgtttcagctttgtaaaggtgttgcgcattgtcatagtcatggtgtgcttcaccgtgatcttaaaccgcagaatcttcttctggtgaaagataaagagcttcttaagattgctgatttgggtcttggtcgtgcttttactgttcctcttaagtcttatacgcatgagattgttactctttggtatagagctcctgaagttcttcttggatctactcattattcaactggtgttgacatgtggtctgttggttgtatctttgctgagatggttcggaggcaagctcttttccctggtgattctgagtttcagcaattgcttcatatcttcaggttgctaggaacaccaactgagcagcaatggccgggtgtttccacactgcgtgactggcatgtttaccctaagtgggagccgcaagacttaactcttgctgttccttctctttcacctcaaggagttgatcttctcacgaaaatgctcaagtacaatccagccgaaagaatttcagcaaaaacagcacttgatcacccatattttgacagccttgacaagtctcagttctgaagttcattgctgtatctgttgtcatcgtcttggtgaatttaaacatttgatctatctttgtttccgacacattagtgtcttatgtttggtttagagatttgtagtctttcagaagaaactggtaaagcttgtattctcaagtgaatgtaaaacacaatggtgtggtagcaatgagatgattttctatc

SEQ ID NO: 106270 - protein, 309 aa, Arabidopsis thaliana
  peptide (1)..(309): Ceres Seq. ID no. 13619104
MEKYEKLEKVGEGTYGKVYKAMEKGTGKLVALKKTRLEMDEEGIPPTALREISLLQMLSTSIYVVRLLCVEHVHQPSTKSQSTKSNLYLVFEYLDTDLKKFIDSYRKGPNPKPLEPFLIQKLMFQLCKGVAHCHSHGVLHRDLKPQNLLLVKDKELLKIADLGLGRAFTVPLKSYTHEIVTLWYRAPEVLLGSTHYSTGVDMWSVGCIFAEMVRRQALFPGDSEFQQLLHIFRLLGTPTEQQWPGVSTLRDWHVYPKWEPQDLTLAVPSLSPQGVDLLTKMLKYNPAERISAKTALDHPYFDSLDKSQF

SEQ ID NO: 106271 - protein, 288 aa, Arabidopsis thaliana
  peptide (1)..(288): Ceres Seq. ID no. 13619105
MEKGTGKLVALKKTRLEMDEEGIPPTALREISLLQMLSTSIYVVRLLCVEHVHQPSTKSQSTKSNLYLVFEYLDTDLKKFIDSYRKGPNPKPLEPFLIQKLMFQLCKGVAHCHSHGVLHRDLKPQNLLLVKDKELLKIADLGLGRAFTVPLKSYTHEIVTLWYRAPEVLLGSTHYSTGVDMWSVGCIFAEMVRRQALFPGDSEFQQLLHIFRLLGTPTEQQWPGVSTLRDWHVYPKWEPQDLTLAVPSLSPQGVDLLTKMLKYNPAERISAKTALDHPYFDSLDKSQF

SEQ ID NO: 106272 - protein, 271 aa, Arabidopsis thaliana
  peptide (1)..(271): Ceres Seq. ID no. 13619106
MDEEGIPPTALREISLLQMLSTSIYVVRLLCVEHVHQPSTKSQSTKSNLYLVFEYLDTDLKKFIDSYRKGPNPKPLEPFLIQKLMFQLCKGVAHCHSHGVLHRDLKPQNLLLVKDKELLKIADLGLGRAFTVPLKSYTHEIVTLWYRAPEVLLGSTHYSTGVDMWSVGCIFAEMVRRQALFPGDSEFQQLLHIFRLLGTPTEQQWPGVSTLRDWHVYPKWEPQDLTLAVPSLSPQGVDLLTKMLKYNPAERISAKTALDHPYFDSLDKSQF

SEQ ID NO: 106273 - DNA, 789 bp, Arabidopsis thaliana
  misc_feature (1)..(789): Ceres Seq. ID no. 13619111
  misc_feature (1)..(789): Ortholog of  Ceres SEQ ID NO 13594241 as cited in SEQ ID NO 57394
ctctttcttcttctctgcgtctttgaggcaagaaaaaaagagaagatgaaagcacccaacatggagacgataacggagtctctagagaaatcgatgatgaattgttctctgaatgatcggagaagaagggtcgtcggagatgggtttgggagatcgtcgagcaacgaacacatgactccgatctcagatagaacattggagctcaattctcacttatctcttccttgtcactgggaacagtgtcttgatcttaagacaggagagatttactacataaactggaaaaacggaatgagagtgaaagaggatccaaggaaagtgatgaatgcagatcctgacagtggagactcatatggaaccgtgtgttcagaagaagatagctcatattacgacagcgaagagtcttcatcagagtcatctccatcatcaagagagaatcataaagaagaagaagaagaagaagaagaggaggaagaagaagaagaagatgtgctagtggttgctggttgcaaagcttgtttcatgtacttcatggttcctaagcttgttgaggactgtcctaaatgtgcagcacagcttcttcactttgatcgacctcattctgcatcttcttgaaacccttgtctttgtttggattttccctttattcagatgagaatttgtttaggtttccactttaatcttatattgttgttataatttagtggtttctcatgtgagtggcattaacacgagtttcaaaggcaatgtatcagacagtaaaatgttaaaatgagtctgaaaatttcc

SEQ ID NO: 106274 - protein, 204 aa, Arabidopsis thaliana
  peptide (1)..(204): Ceres Seq. ID no. 13619112
LFLLLCVFEARKKEKMKAPNMETITESLEKSMMNCSLNDRRRRVVGDGFGRSSSNEHMTPISDRTLELNSHLSLPCHWEQCLDLKTGEIYYINWKNGMRVKEDPRKVMNADPDSGDSYGTVCSEEDSSYYDSEESSSESSPSSRENHKEEEEEEEEEEEEEEDVLVVAGCKACFMYFMVPKLVEDCPKCAAQLLHFDRPHSASS

SEQ ID NO: 106275 - protein, 189 aa, Arabidopsis thaliana
  peptide (1)..(189): Ceres Seq. ID no. 13619113
MKAPNMETITESLEKSMMNCSLNDRRRRVVGDGFGRSSSNEHMTPISDRTLELNSHLSLPCHWEQCLDLKTGEIYYINWKNGMRVKEDPRKVMNADPDSGDSYGTVCSEEDSSYYDSEESSSESSPSSRENHKEEEEEEEEEEEEEEDVLVVAGCKACFMYFMVPKLVEDCPKCAAQLLHFDRPHSASS

SEQ ID NO: 106276 - protein, 184 aa, Arabidopsis thaliana
  peptide (1)..(184): Ceres Seq. ID no. 13619114
METITESLEKSMMNCSLNDRRRRVVGDGFGRSSSNEHMTPISDRTLELNSHLSLPCHWEQCLDLKTGEIYYINWKNGMRVKEDPRKVMNADPDSGDSYGTVCSEEDSSYYDSEESSSESSPSSRENHKEEEEEEEEEEEEEEDVLVVAGCKACFMYFMVPKLVEDCPKCAAQLLHFDRPHSASS

SEQ ID NO: 106277 - DNA, 1179 bp, Arabidopsis thaliana
  misc_feature (1)..(1179): Ceres Seq. ID no. 13619119
  misc_feature (1)..(1179): Ortholog of  Ceres SEQ ID NO 13598741 as cited in SEQ ID NO 62749
  misc_feature (1)..(1179): Ortholog of  Ceres SEQ ID NO 12587535 as cited in SEQ ID NO 64020
  misc_feature (1)..(1179): Ortholog of  Ceres SEQ ID NO 12586366 as cited in SEQ ID NO 68983
agtgtcgcttggcctaaaagctcacaatgtctctcgttctctctctttgcttggtcttcctttgttctcttgttcatggttctcatagcttaccagcacaacggactcctcatcttgatgggcttctcccaaatgggaactttgagcaaattcctaacaaatcaaacatgagaaagaggcaaataattggcaaatactctcttccacattgggaaatctccggccacgtagagctagtctctggcggtccacagcccggtggtttttacttcgcagtgccacgtggagtccacgcagctaggctagggaacttagcatcaatatctcagtatgtgaaagtgaaaagcggcttggtctattctctaacgtttggtgtcacgaggacttgtgctcaagacgagaacatcagaatctctgtgcctggtcagaccaatgagctaccaatccaaacattgttcagtaccaacggtggtgatacgtacgcatgggcttttaaggcaacgtctgacttggttaaggtcactttttataatcctggtgttcaagaagaccctacttgtggcccaatcgttgacgctgttgccattaaggagattcttcctctccggtataccaaagggaaccttgtgaaaaacggcggatttgagaccggtccacacgtattcagcaacttctctaccggaattttaattccggcgaagatacaagacctaatctcaccgcttccgggatggatcgtcgaatctctaaaaccggttaagtacatcgataaccgccacttcaaggttccctcaggtctcgcagcaatcgagcttgttgccggaagagaaagcgcaatcgctcagatcatccgtaccgtctccggtaaaaactacattctctcgtttgttgtgggagacgcacacaatggttgtcacggatcgatgatggtggaggcgtttgcgggaatatcggcgtttaaggttacattcgaatctaatgataaaggagcgttcaaagtggggcgtttcgcgtttcgtgccgattcgaatcgcacaaggataactttctatagtgggttttatcataccaagcttcatgattttggacatctttgtgggcctgtgcttgataatgttagtgtttttttggcccattaaattattacaaaagtaaaataaatattgttcgatttcaatt

SEQ ID NO: 106278 - protein, 370 aa, Arabidopsis thaliana
  peptide (1)..(370): Ceres Seq. ID no. 13619120
MSLVLSLCLVFLCSLVHGSHSLPAQRTPHLDGLLPNGNFEQIPNKSNMRKRQIIGKYSLPHWEISGHVELVSGGPQPGGFYFAVPRGVHAARLGNLASISQYVKVKSGLVYSLTFGVTRTCAQDENIRISVPGQTNELPIQTLFSTNGGDTYAWAFKATSDLVKVTFYNPGVQEDPTCGPIVDAVAIKEILPLRYTKGNLVKNGGFETGPHVFSNFSTGILIPAKIQDLISPLPGWIVESLKPVKYIDNRHFKVPSGLAAIELVAGRESAIAQIIRTVSGKNYILSFVVGDAHNGCHGSMMVEAFAGISAFKVTFESNDKGAFKVGRFAFRADSNRTRITFYSGFYHTKLHDFGHLCGPVLDNVSVFLAH

SEQ ID NO: 106279 - protein, 323 aa, Arabidopsis thaliana
  peptide (1)..(323): Ceres Seq. ID no. 13619121
MRKRQIIGKYSLPHWEISGHVELVSGGPQPGGFYFAVPRGVHAARLGNLASISQYVKVKSGLVYSLTFGVTRTCAQDENIRISVPGQTNELPIQTLFSTNGGDTYAWAFKATSDLVKVTFYNPGVQEDPTCGPIVDAVAIKEILPLRYTKGNLVKNGGFETGPHVFSNFSTGILIPAKIQDLISPLPGWIVESLKPVKYIDNRHFKVPSGLAAIELVAGRESAIAQIIRTVSGKNYILSFVVGDAHNGCHGSMMVEAFAGISAFKVTFESNDKGAFKVGRFAFRADSNRTRITFYSGFYHTKLHDFGHLCGPVLDNVSVFLAH

SEQ ID NO: 106280 - DNA, 1674 bp, Arabidopsis thaliana
  misc_feature (1)..(1674): Ceres Seq. ID no. 13619133
  misc_feature (1)..(1674): Ortholog of  Ceres SEQ ID NO 13654928 as cited in SEQ ID NO 62546
aaagacctctccaatgttcacttgctccagtttctccaagattagaaactgctacgtctctctctatagctccctcgttttgctatgtggtaattaacaacagacaacagtttttgtttgtccgtaccgttttacttactctctcactgtctttgtctattaccactctcgtctctttcttttttccttctgttctgtttctctctctaaacccaaaacagtcaaaatcagggaagccgaaattttctttgctttcttctcctttggtcctttctttaaacccgagacagttaggtttgtgtgagagagagaatgatgagtaaaaccctttctgtctgagtaagaggaaaccaacatggagatgggttccaactcgggtccgggtcatggtccgggtcaggcagagtcgggtggttcctccactgagtcatcctctttcagtggagggctcatgtttggccagaagatctacttcgaggacggtggtggtggatccgggtcttcttcctcaggtggtcgttcaaacagacgtgtccgtggaggcgggtcgggtcagtcgggtcagataccaaggtgccaagtggaaggttgtgggatggatctaaccaatgcaaaaggttattactcgagacaccgagtttgtggagtgcactctaaaacacctaaagtcactgtggctggtatcgaacagaggttttgtcaacagtgcagcaggtttcatcagcttccggaatttgacctagagaaaaggagttgccgcaggagactcgctggtcataatgagcgacgaaggaagccacagcctgcgtctctctctgtgttagcttctcgttacgggaggatcgcaccttcgctttacgaaaatggtgatgctggaatgaatggaagctttcttgggaaccaagagataggatggccaagttcaagaacattggatacaagagtgatgaggcggccagtgtcgtcaccgtcatggcagatcaatccaatgaatgtatttagtcaaggttcagttggtggaggagggacaagcttctcatctccagagattatggacactaaactagagagctacaagggaattggcgactcaaactgtgctctctctcttctgtcaaatccacatcaaccacatgacaacaacaacaacaacaacaacaacaacaacaacaacaacaatacatggcgagcttcttcaggttttggcccgatgacggttacaatggctcaaccaccacctgcacctagccagcatcagtatctgaacccgccttgggtattcaaggacaatgataatgatatgtctcctgttttgaatttaggtcgatacaccgagccagataattgtcagataagtagtggcacggcaatgggtgagttcgagttatctgatcaccatcatcaaagtaggagacagtacatggaagatgagaacacaagggcttatgactcttcttctcaccataccaactggtctctctgacttgtctttgcatcagagaatcttcttacaatgaacgattctgcaatatcttatctttttgcttctttgtttattctgttatctgctatcaataaaccagacaattgttgccagataatggcttttgattttgatttgttgttttatctccatgaaaatccaagttatgagatcagattgatttctttagc

SEQ ID NO: 106281 - protein, 375 aa, Arabidopsis thaliana
  peptide (1)..(375): Ceres Seq. ID no. 13619134
MEMGSNSGPGHGPGQAESGGSSTESSSFSGGLMFGQKIYFEDGGGGSGSSSSGGRSNRRVRGGGSGQSGQIPRCQVEGCGMDLTNAKGYYSRHRVCGVHSKTPKVTVAGIEQRFCQQCSRFHQLPEFDLEKRSCRRRLAGHNERRRKPQPASLSVLASRYGRIAPSLYENGDAGMNGSFLGNQEIGWPSSRTLDTRVMRRPVSSPSWQINPMNVFSQGSVGGGGTSFSSPEIMDTKLESYKGIGDSNCALSLLSNPHQPHDNNNNNNNNNNNNNNTWRASSGFGPMTVTMAQPPPAPSQHQYLNPPWVFKDNDNDMSPVLNLGRYTEPDNCQISSGTAMGEFELSDHHHQSRRQYMEDENTRAYDSSSHHTNWSL

SEQ ID NO: 106282 - protein, 373 aa, Arabidopsis thaliana
  peptide (1)..(373): Ceres Seq. ID no. 13619135
MGSNSGPGHGPGQAESGGSSTESSSFSGGLMFGQKIYFEDGGGGSGSSSSGGRSNRRVRGGGSGQSGQIPRCQVEGCGMDLTNAKGYYSRHRVCGVHSKTPKVTVAGIEQRFCQQCSRFHQLPEFDLEKRSCRRRLAGHNERRRKPQPASLSVLASRYGRIAPSLYENGDAGMNGSFLGNQEIGWPSSRTLDTRVMRRPVSSPSWQINPMNVFSQGSVGGGGTSFSSPEIMDTKLESYKGIGDSNCALSLLSNPHQPHDNNNNNNNNNNNNNNTWRASSGFGPMTVTMAQPPPAPSQHQYLNPPWVFKDNDNDMSPVLNLGRYTEPDNCQISSGTAMGEFELSDHHHQSRRQYMEDENTRAYDSSSHHTNWSL

SEQ ID NO: 106283 - protein, 343 aa, Arabidopsis thaliana
  peptide (1)..(343): Ceres Seq. ID no. 13619136
MFGQKIYFEDGGGGSGSSSSGGRSNRRVRGGGSGQSGQIPRCQVEGCGMDLTNAKGYYSRHRVCGVHSKTPKVTVAGIEQRFCQQCSRFHQLPEFDLEKRSCRRRLAGHNERRRKPQPASLSVLASRYGRIAPSLYENGDAGMNGSFLGNQEIGWPSSRTLDTRVMRRPVSSPSWQINPMNVFSQGSVGGGGTSFSSPEIMDTKLESYKGIGDSNCALSLLSNPHQPHDNNNNNNNNNNNNNNTWRASSGFGPMTVTMAQPPPAPSQHQYLNPPWVFKDNDNDMSPVLNLGRYTEPDNCQISSGTAMGEFELSDHHHQSRRQYMEDENTRAYDSSSHHTNWSL

SEQ ID NO: 106284 - DNA, 944 bp, Arabidopsis thaliana
  misc_feature (1)..(944): Ceres Seq. ID no. 13619141
  misc_feature (1)..(944): Ortholog of  Ceres SEQ ID NO 13595187 as cited in SEQ ID NO 56052
  misc_feature (1)..(944): Ortholog of  Ceres SEQ ID NO 13662053 as cited in SEQ ID NO 61547
  misc_feature (1)..(944): Ortholog of  Ceres SEQ ID NO 13624283 as cited in SEQ ID NO 0
aattcttcagatccataaaacaaattgatcccttaaccttcttcaccaacatctctcttacactcaacaagagatcatatcatgtcctctccaagagaaagaggaaagagtttgatggaatcatcaggatcagagccaccggtgacaccaagccgttacgagtcgcagaagagacgtgactggaacactttcggacagtacttgaagaatcagagaccgcctgtgccgatgtctcactgcagctgtaaccacgtgcttgatttcctcaggtacttagaccagttcggtaagacaaaggtgcacgtgcctggctgtatgttctacggccagcctgagccaccagctccttgcacgtgccctctcagacaagcttggggaagtcttgacgctttgatcggacggctgagagcggcttacgaggagaacggtggacctccggagactaaccctttcgctagcggagcgataagggtttatctgagggaggttagggagtgtcaggctaaggctagagggattccttacaagaagaagaagaagaagaagccaacgccggagatgggaggtgggagagaggactcttcttcctcctcctcttccttcagcttctcttaagagattctccatcgtcgtgaaagactttgtgaacttggcaggatcagtaagtctcaaagagggatcaaatgtaaaagagacctcaaatctatctactggtatcttcaacatatctttcgggaccatttttgcagctcttcgtcccctcctcttcatttccgcagatctccgtcgtcataaatatcttcatctattctcttattaagctctattcatatttattctcttattaagcacttttcttttgaataaagtaagtgtaaagagtttatatattgaattcaggtgtgttttgtacttcttatgtggatcagcgtacttctatgtct

SEQ ID NO: 106285 - protein, 177 aa, Arabidopsis thaliana
  peptide (1)..(177): Ceres Seq. ID no. 13619142
MSSPRERGKSLMESSGSEPPVTPSRYESQKRRDWNTFGQYLKNQRPPVPMSHCSCNHVLDFLRYLDQFGKTKVHVPGCMFYGQPEPPAPCTCPLRQAWGSLDALIGRLRAAYEENGGPPETNPFASGAIRVYLREVRECQAKARGIPYKKKKKKKPTPEMGGGREDSSSSSSSFSFS

SEQ ID NO: 106286 - protein, 166 aa, Arabidopsis thaliana
  peptide (1)..(166): Ceres Seq. ID no. 13619143
MESSGSEPPVTPSRYESQKRRDWNTFGQYLKNQRPPVPMSHCSCNHVLDFLRYLDQFGKTKVHVPGCMFYGQPEPPAPCTCPLRQAWGSLDALIGRLRAAYEENGGPPETNPFASGAIRVYLREVRECQAKARGIPYKKKKKKKPTPEMGGGREDSSSSSSSFSFS

SEQ ID NO: 106287 - protein, 128 aa, Arabidopsis thaliana
  peptide (1)..(128): Ceres Seq. ID no. 13619144
MSHCSCNHVLDFLRYLDQFGKTKVHVPGCMFYGQPEPPAPCTCPLRQAWGSLDALIGRLRAAYEENGGPPETNPFASGAIRVYLREVRECQAKARGIPYKKKKKKKPTPEMGGGREDSSSSSSSFSFS

SEQ ID NO: 106288 - DNA, 966 bp, Arabidopsis thaliana
  misc_feature (1)..(966): Ceres Seq. ID no. 13619156
  misc_feature (1)..(966): Ortholog of  Ceres SEQ ID NO 15176306 as cited in SEQ ID NO 52784
  misc_feature (1)..(966): Ortholog of  Ceres SEQ ID NO 13582624 as cited in SEQ ID NO 56287
  misc_feature (1)..(966): Ortholog of  Ceres SEQ ID NO 13597264 as cited in SEQ ID NO 63897
  misc_feature (1)..(966): Ortholog of  Ceres SEQ ID NO 13598570 as cited in SEQ ID NO 65434
  misc_feature (1)..(966): Ortholog of  Ceres SEQ ID NO 13656452 as cited in SEQ ID NO 65745
  misc_feature (1)..(966): Ortholog of  Ceres SEQ ID NO 13596238 as cited in SEQ ID NO 68834
aacaagaacccaaagatggctctcacaaaaatcttcttaatccttctcctatccctcttaggtttatattctgaaaccgtcaaatctcaaaactgcgattgcgcccctaacctatgttgcagtcagttcggttattgcggtaccactgcagattactgtggttctacgtgccaatcaggtccttgtagagtcggtggaccccctaccggtgccggtttggttggtaatatcgtgacacaaattttctttaacaacattatcaaccaagccggtaatggatgcgcgggaaaaagtttttacacccgggactctttcattaacgccaccaatactttccccagctttgctaataccgttactagacgtgaaattgctaccatgtttgctcatttcacttacgagacaggacacttctgctacatagaagagataaacggggcgtcacgtgtcatgtgcgaccagaacaacaggcaatatccatgtgcaccggccaagagctaccatggccgtggtccgctcctactatcatggaacttcaactatggagcatgcggccagagtctcggcttagacctcctacgccagcccgagctggtgagtagtaacccagtcgtggctttcaggacggctctgtggttttggatgaagagcgtgaggcctgtattgaaccagggatttggagccaccataagagccatcagcggtttcgactgtgacggtaggaacttaggtggggtgaacgcaaggattggctactatagagactattgtgggcagcttggtttggaccctggcgccaacataacttgctaaaacgctcttgggacatacatggcacgaaagtattaaaggtgaaataagaagtgttgttgtaattgtagtacttttttttttttttttttgataaaaagctagagtaatcttgtgaagtgaaatcacattattaaaagattaataaatcgactt

SEQ ID NO: 106289 - protein, 270 aa, Arabidopsis thaliana
  peptide (1)..(270): Ceres Seq. ID no. 13619157
NKNPKMALTKIFLILLLSLLGLYSETVKSQNCDCAPNLCCSQFGYCGTTADYCGSTCQSGPCRVGGPPTGAGLVGNIVTQIFFNNIINQAGNGCAGKSFYTRDSFINATNTFPSFANTVTRREIATMFAHFTYETGHFCYIEEINGASRVMCDQNNRQYPCAPAKSYHGRGPLLLSWNFNYGACGQSLGLDLLRQPELVSSNPVVAFRTALWFWMKSVRPVLNQGFGATIRAISGFDCDGRNLGGVNARIGYYRDYCGQLGLDPGANITC

SEQ ID NO: 106290 - protein, 265 aa, Arabidopsis thaliana
  peptide (1)..(265): Ceres Seq. ID no. 13619158
MALTKIFLILLLSLLGLYSETVKSQNCDCAPNLCCSQFGYCGTTADYCGSTCQSGPCRVGGPPTGAGLVGNIVTQIFFNNIINQAGNGCAGKSFYTRDSFINATNTFPSFANTVTRREIATMFAHFTYETGHFCYIEEINGASRVMCDQNNRQYPCAPAKSYHGRGPLLLSWNFNYGACGQSLGLDLLRQPELVSSNPVVAFRTALWFWMKSVRPVLNQGFGATIRAISGFDCDGRNLGGVNARIGYYRDYCGQLGLDPGANITC

SEQ ID NO: 106291 - protein, 144 aa, Arabidopsis thaliana
  peptide (1)..(144): Ceres Seq. ID no. 13619159
MFAHFTYETGHFCYIEEINGASRVMCDQNNRQYPCAPAKSYHGRGPLLLSWNFNYGACGQSLGLDLLRQPELVSSNPVVAFRTALWFWMKSVRPVLNQGFGATIRAISGFDCDGRNLGGVNARIGYYRDYCGQLGLDPGANITC

SEQ ID NO: 106292 - DNA, 739 bp, Arabidopsis thaliana
  misc_feature (1)..(739): Ceres Seq. ID no. 13619172
  misc_feature (1)..(739): Ortholog of  Ceres SEQ ID NO 14307480 as cited in SEQ ID NO 54235
agagaatctgacgaagctcgaagggatttgagaaaaagaagagatgacgacgatacgtagattcagctgcaatgaccttctccgattcacttccgtgaatctggaccacctcactgaaacattcaatatgtccttctacatgacctatttagcgagatggcctgactattttcatgttgctgaaggtcccggcaatcgtgtcatgggttatattatgggtaaagttgaaggacagggtgaatcttggcatggtcatgtgacagccgtcactgtctctccagaataccgcaggcagcaacttgcaaagaaactgatgaaccttctggaagatataagtgataagattgataaagcctactttgtggatctttttgtaagagcttccaacacaccagccatcaagatgtatgaaaagcttggatacataatttataggcgggttttacgctattattcaggagaggaagatggattagatatgaggaaggcattatcaagagatgtagagaaaaagtctgtgattcctctcaagagacctatcacacctgatgaattagagtatgattaagaccctaacttggttcacaattgttatctgcattaaaaatttctccaagagcctttagatgatgttactattcctgttgtttcgtatttgaactattatgtttcgttttcttccacacaaatttataattagttttgattaaactttaatctatatatacatttttggagg

SEQ ID NO: 106293 - protein, 174 aa, Arabidopsis thaliana
  peptide (1)..(174): Ceres Seq. ID no. 13619173
MTTIRRFSCNDLLRFTSVNLDHLTETFNMSFYMTYLARWPDYFHVAEGPGNRVMGYIMGKVEGQGESWHGHVTAVTVSPEYRRQQLAKKLMNLLEDISDKIDKAYFVDLFVRASNTPAIKMYEKLGYIIYRRVLRYYSGEEDGLDMRKALSRDVEKKSVIPLKRPITPDELEYD

SEQ ID NO: 106294 - protein, 146 aa, Arabidopsis thaliana
  peptide (1)..(146): Ceres Seq. ID no. 13619174
MSFYMTYLARWPDYFHVAEGPGNRVMGYIMGKVEGQGESWHGHVTAVTVSPEYRRQQLAKKLMNLLEDISDKIDKAYFVDLFVRASNTPAIKMYEKLGYIIYRRVLRYYSGEEDGLDMRKALSRDVEKKSVIPLKRPITPDELEYD

SEQ ID NO: 106295 - protein, 142 aa, Arabidopsis thaliana
  peptide (1)..(142): Ceres Seq. ID no. 13619175
MTYLARWPDYFHVAEGPGNRVMGYIMGKVEGQGESWHGHVTAVTVSPEYRRQQLAKKLMNLLEDISDKIDKAYFVDLFVRASNTPAIKMYEKLGYIIYRRVLRYYSGEEDGLDMRKALSRDVEKKSVIPLKRPITPDELEYD

SEQ ID NO: 106296 - DNA, 5073 bp, Arabidopsis thaliana
  misc_feature (1)..(5073): Ceres Seq. ID no. 13619180
  misc_feature (1)..(5073): Ortholog of  Ceres SEQ ID NO 13660487 as cited in SEQ ID NO 60849
aagagaagagagatctctcttctcgattgctctcaagaacccaagtgacgtctggtttcagctgatttgtttcttctcattctctatcttcttctctgggaaatatcgattttgatctattaagagctgctacgagctttgggatgtggtgagatgcttgttctatctcgaacaatccgccggttgttgattttaaacaaactctctatcacaaatctttcccgatcatggattttattgagatctcgttgatctttcgagagcatttgccactactggaactatgttcggtcatcatcaacctcctactctttcttgtctttctatttgctgtctccgcgaggcagattctcgtctgcgtgagaagaggcagagataggctctctaaggacgatacggtttcagcttctaatcttagcttggaaagagaggttaaccatgttagtgttgggtttgggtttaatctgtctttgctctgttgcttatatgtgttaggcgtccaagttttggtgttagtatatgatggggttaaggttagaagagaagtcagtgactggtttgttctttgctttccagcttctcagagtttagcttggtttgtccttagcttcttagttcttcatttgaaatacaagtcttcagagaagctacccttcttggtgaggatatggtggttcctggcgttttcgatttgcctctgtactatgtatgtcgatggaagaaggctagccattgaaggttggagcagatgttcttctcatgttgtcgccaatttagctgttacacctgctcttgggtttctctgctttctggcctggagaggcgtttctggtattcaagttaccagaagctcctctgatcttcaagagcctttgcttgttgaagaagaggcagcttgtcttaaagttactccatatagtactgctgggctagttagccttattacgctttcatggttggatccacttctctcggctggttcaaaaagaccgcttgagcttaaggatataccgcttcttgcaccaagagatagagccaaatcaagttacaaggtcttgaagtcgaattggaagagatgcaagtccgagaatccttcaaagcctccttctttagctcgtgcaattatgaaatcattttggaaagaagctgcttgcaatgccgtatttgctgggttgaatactcttgtgtcctatgtcggtccttacttgatcagctactttgttgattatcttggagggaaggagattttccctcatgaaggatacgtactcgctgggatattctttacgtccaagcttatagagacagtcaccacccgccagtggtatatgggtgttgatatcctagggatgcatgttagatcagctcttacagcaatggtataccgaaaaggtctcaaactttcaagtatagccaagcagaaccacacgagcggtgaaattgtaaactacatggcagtcgatgtccagcgcataggagattactcatggtatcttcatgatatttggatgcttccgatgcaaatagttcttgctcttgcaatcctatataaaagcgtgggcatagctgctgtagctacattggttgctacaataatctcgattcttgtcacgattccactcgctaaggtccaggaagactatcaagataagttgatgactgcgaaagatgaaagaatgaggaaaacctcagagtgtcttaggaacatgagagttctgaaattgcaggcatgggaagatcgttatagagtgagattggaagaaatgagggaagaggagtatggttggcttcgcaaagccttatattctcaggcttttgttacttttatcttttggagttcccccatttttgtcgccgcagttacattcgctacttcgatatttctaggcactcaacttaccgctggaggtgttctttctgctctggcgacattcagaattcttcaggagccacttcggaactttcctgatctggtttcaatgatggctcagacaaaggtttctcttgataggatttctgggttcttgcaggaggaagaacttcaagaagatgcaactgttgttattccacggggactttcgaatatagccatagagattaaagatggtgtgttttgttgggaccctttttcttcaaggccgacattatctgggattcagatgaaagtggagaagggtatgcgtgtggctgtctgtggcacagttggctctggaaaatcaagttttatctcttgcatcctaggggaaatcccaaaaatctctggcgaagttagaatatgtggtactactggttatgtgtctcaatcggcttggattcagtctggtaacattgaagaaaacattctatttggcagtccaatggagaaaacaaagtacaagaatgtgatacaagcatgttccctaaagaaagatatagagcttttctcacatggggaccaaactattatcggggagagaggtataaatctcagcggaggtcagaaacagcgtgtacaacttgcaagggcattatatcaagatgctgacatttatttactagacgacccttttagtgctcttgatgcacacactggctctgatttgtttagggattatattctatctgcattggctgagaaaactgtggtttttgtaacgcatcaagttgagtttctccctgcagctgatctaatattggttctgaaggaaggcaggattattcaatcgggtaaatatgatgatctgctgcaagcaggtactgattttaaggccttagtgtctgcccaccatgaagcaatcgaggcaatggacatcccaagtccctcctcagaagactctgatgaaaatcctattcgcgatagtttggtcttgcataatccaaagtctgatgtttttgaaaatgacatcgagactttggcaaaggaagtacaagagggaggatctgcttcagatctaaaggcaatcaaagagaagaagaagaaagctaagcgttcccgcaaaaagcagcttgttcaagaagaggaacgagtaaagggaaaagtcagcatgaaggtgtacttgtcatacatgggtgctgcatataaaggggctctgattcctcttattatactcgcacaagctgctttccaatttcttcagattgctagtaattggtggatggcttgggcaaatcctcaaactgaaggtgacgaatctaaagtggatcctactctgcttctcatcgtttatacggctttagctttcgggagctctgtgttcatatttgttcgagctgctctggttgcaacttttggtcttgcagctgcacagaaactgttcttaaatatgctcagaagtgtgttccgagcgccaatgtcattctttgattccactcctgcaggaagaattttgaatcgggtttctattgatcaaagtgttgtagatcttgacattccttttagactcggtgggtttgcttcaacaacaatacaactctgtggcattgtcgctgtaatgaccaatgttacctggcaagttttccttcttgttgttccggtagctgttgcttgcttttggatgcagaaatattacatggcttcttcaagagaattggttcggatagttagtatccagaagtctccaataattcatctttttggagaatcaattgctggtgctgccacaataagaggatttggccaggaaaaaagatttatcaaaaggaatctttatcttctagattgttttgttcgacctttcttctgcagtatcgctgctatcgaatggctttgtttacgcatggaattactttccacacttgtatttgctttctgtatggttttactcgtcagttttccacatggaaccattgatccaagcatggcaggtcttgctgtgacatatggacttaacttgaatggacgtctatcacgatggatacttagcttttgtaagcttgaaaacaaaataatctcaatcgaaaggatttatcagtacagtcagattgtaggagaggccccagcaattatagaagatttccgcccgccttcctcgtggcctgcaacgggaacaattgagctagttgatgttaaggttcgttatgctgagaatcttccaacagtactccatggggtgagctgtgtgtttccgggtggaaaaaagattgggattgttgggcgaacgggaagcggaaagtcgactttgattcaagctttgtttcgattgattgagccaactgctggaaaaattactattgacaacattgacatttctcaaattggtcttcatgatcttcgtagtcgccttgggattatacctcaagatcctacattatttgaaggaacaatccgagcaaatcttgacccacttgaagaacattcagatgataaaatctgggaggcgcttgataaatcccagcttggagacgttgttagaggaaaagacctaaaacttgactctccagtactggaaaatggagataactggagtgtagggcagagacagcttgtgtcacttggacgagcattactgaaacaagccaaaatacttgttcttgatgaagcaacagcatcggttgacacagcaacagacaatctgatccagaagataatcagaacagagtttgaagactgcacggtctgcaccattgctcaccggataccaactgttatagacagtgacctagttttggttctcagcgacggtagagtagcagagtttgatactcctgcacggctattagaagacaaatcatcgatgttcttgaaattggtaacagaatactcctcaagatctactggaatccctgaattatgatcctccatgttaaaaattcagtttagggggtttcttttctcaagaggatataaaagaactgatatgtgacaaaagcttaaggtctaaagtaagagagagttttccacagggtttaagaaaagaaaaagcatgaaaggatgccaaaatctccgcgcttaaaaaactttgggtttaaatctcttctgtcgaacattgggagaaactttttttgtatggaacagttagtttctttggttttcatgtttatcaataaactgcaaaaacaaacaaagattagagtagaaactactaatcattcgtc

SEQ ID NO: 106297 - protein, 1514 aa, Arabidopsis thaliana; identical to SEQ ID NO: 39531
  peptide (1)..(1514): Ceres Seq. ID no. 13619181

SEQ ID NO: 106298 - protein, 1355 aa, Arabidopsis thaliana; identical to SEQ ID NO: 39532
  peptide (1)..(1355): Ceres Seq. ID no. 13619182

SEQ ID NO: 106299 - protein, 1215 aa, Arabidopsis thaliana; identical to SEQ ID NO: 39533
  peptide (1)..(1215): Ceres Seq. ID no. 13619183

SEQ ID NO: 106300 - DNA, 1351 bp, Arabidopsis thaliana
  misc_feature (1)..(1351): Ceres Seq. ID no. 13619184
  misc_feature (1)..(1351): Ortholog of  Ceres SEQ ID NO 13590307 as cited in SEQ ID NO 67154
atcttcgataaatacgcaagagtgagcttcacggtcagacaaaagctgactctacgctctctcaaaagtcgaatatcccaaattcgatccgttttccggcgataatctccgatctagatccgatggcgaaagaaccagttcgtgtgctcgttactggagctgcaggacaaatcggatatgctcttgtacctatgattgcaaggggtatcatgcttggtgctgaccaacctgttatcctccacatgttggatattcctccagctgctgaagctttgaacggtgttaagatggagttgatcgatgctgctttccctcttcttaaaggtgttgttgctacaactgatgccgttgagggatgtactggagtcaatgttgctgttatggttggtggtttcccgaggaaagaaggtatggagaggaaggatgtgatgtccaagaatgtttccatctacaagtctcaggctgctgccttggagaagcatgccgctcctaactgcaaggttcttgttgtggccaacccggcaaacaccaacgcattgatcctcaaggaatttgcaccatcaatccctgaaaagaacatctcttgtttgacaaggcttgaccacaacagggctttgggacagatctctgagaggttgagcgtgccagtgtctgatgttaagaacgtgatcatctggggaaaccactcatcctcacagtacccagatgtcaaccatgctaaagtgcagacctcgtctggagagaagcctgtccgtgagctcgtcaaggacgatgcatggttggacggagaatttatctctacagttcaacaacgtggagctgcaatcatcaaggcgaggaagttgtctagtgcgctctctgctgctagctctgcttgtgaccacatccgtgactgggtccttggaactccagagggtacgttcgtttccatgggagtatactccgatggctcttacagcgttccatcaggacttatctactccttccctgtaacttgtcgcaatggagactggagtattgtccaaggccttccgattgatgaagtatcaaggaagaagatggatttgactgcagaggagctcaaggaagagaaggacttggcgtactcatgcctctcttaaacccttctggagcaaaattttcatctataaggtgtgagatcagttaaagcctttcagggctttgtccgaataagaagtgtgtttgaaagatctccaaacactgttttataacctctttggtctctttgatgagtattgtccctggtctgtttctaaaccaggatatcgtttttttcaatgtgtctgatttggtttacccatgaaaagaagaaaattggcagttgcatggt

SEQ ID NO: 106301 - protein, 332 aa, Arabidopsis thaliana; identical to SEQ ID NO: 25356
  peptide (1)..(332): Ceres Seq. ID no. 13619185

SEQ ID NO: 106302 - protein, 309 aa, Arabidopsis thaliana; identical to SEQ ID NO: 25357
  peptide (1)..(309): Ceres Seq. ID no. 13619186

SEQ ID NO: 106303 - protein, 303 aa, Arabidopsis thaliana; identical to SEQ ID NO: 25358
  peptide (1)..(303): Ceres Seq. ID no. 13619187

SEQ ID NO: 106304 - DNA, 717 bp, Arabidopsis thaliana
  misc_feature (1)..(717): Ceres Seq. ID no. 13619188
  misc_feature (1)..(717): Ortholog of  Ceres SEQ ID NO 12634455 as cited in SEQ ID NO 0
gagccatttaaatctgattcatatcaaaaaattttcgatttaaaaaaaaaaccctcaaaaggtgttgatacggaaaaagaaaagggaaagaagaagagaatggatctagaatcggtgaaaaagtatctggaaggagatgaagacgaaaaggccaaggaaccaatggtggcgaaattaccacacagattcctcgaacgattcgtaaccaatggtcttaaagtggatctcatcgaacctggccgtatcgtctgctccatgaaaatccctcctcatctcctgaacgcagggaaattcttacacggaggagcaacggcgacgctggtggatttgataggatcagcagtgatctacacagccggagcttcacattccggagtttcagtggagatcaatgtttcataccttgatgctgcttttctcgatgaagagatagagatagaatcaaaggcattgcgtgttggtaaagctgtagcagtagtgagtgtggagctgaggaagaagacgactggtaagattattgctcaaggtcgtcataccaagtactttgctcctcgttccaacctttgatcgttcaaccaacctttcttcttttttacattcaataaacaacatcaaggtgtttttagtctttgtcccatttgcttcttattattattgatactaataaaactacattactatatgtttttctaataatacaaacaaccttactttttc

SEQ ID NO: 106305 - protein, 188 aa, Arabidopsis thaliana; identical to SEQ ID NO: 28057
  peptide (1)..(188): Ceres Seq. ID no. 13619189

SEQ ID NO: 106306 - protein, 155 aa, Arabidopsis thaliana; identical to SEQ ID NO: 28058
  peptide (1)..(155): Ceres Seq. ID no. 13619190

SEQ ID NO: 106307 - protein, 134 aa, Arabidopsis thaliana; identical to SEQ ID NO: 28059
  peptide (1)..(134): Ceres Seq. ID no. 13619191

SEQ ID NO: 106308 - DNA, 1112 bp, Arabidopsis thaliana
  misc_feature (1)..(1112): Ceres Seq. ID no. 13619200
  misc_feature (1)..(1112): Ortholog of  Ceres SEQ ID NO 15224625 as cited in SEQ ID NO 1390
  misc_feature (1)..(1112): Ortholog of  Ceres SEQ ID NO 13581868 as cited in SEQ ID NO 52227
  misc_feature (1)..(1112): Ortholog of  Ceres SEQ ID NO 14306339 as cited in SEQ ID NO 0
atgaagttcggcaagagcctaagcaaccagatcgaagaaactttacctgaatggcgcgacaaattcctctcatacaaagaactcaagaagaagctcaagcttatggagccacgaagcgtcgagaatcgtccaaataaacgttcgagatccgattccaattctgtcgacacagatccaacggttggtatgaccaaggaagagcttgatttcattagtcttcttgaagatgagcttgagaaattcaattccttcttcgttgagcaagaggaagagtatatcattagattgaaggaattgaaggaccaagtggcgaaagcgaagaattctaatgaagagatgataaatataaagaaagagattgttgattttcatggagaaatggttttgttgatgaattatagtgctcttaactatacaggattggcaaagattctcaaaaagtatgacaaaagaaccggtgctttaatccgtttaccatttatccaaaaggttttgcaagaacctttcttcacaactgacctactcaacacatttgtgaaagagtgcgaggctatgctggaccgcctctttccgtctaacaaaagtcggaatctggatgaagaaggagagccgacaacttctggaatggtcaagacaggaacggacgattctgaacttcttagagtaccaaaagaactgtctgagattgagtacatggagagcttgtatatgaagagcactgtgtcggcattaaaagtattaaaggaaatccgcagtggtagctcaacagttagcgtcttctcgttgccaccgttaccggcaagtggattagaagatgattcatggaagaagaaagttggtgtccttgaacaagtagcgaaatgaattatgagtattattatttttaaatctctctttttttttgtactttctttaaatagtacaagtaattgtatacgcttacagctgtaaaagatgaatcaaataaaacatagaagtgtgatcatctttcaacatttaaacttggttgcgtgtactttttcttttgctgcatatcatgtatgaaaaatcttctgtaagactgtaacaccactttcaagcagagagaacaatgaaatacatacgccatttcc

SEQ ID NO: 106309 - protein, 287 aa, Arabidopsis thaliana
  peptide (1)..(287): Ceres Seq. ID no. 13619201
MKFGKSLSNQIEETLPEWRDKFLSYKELKKKLKLMEPRSVENRPNKRSRSDSNSVDTDPTVGMTKEELDFISLLEDELEKFNSFFVEQEEEYIIRLKELKDQVAKAKNSNEEMINIKKEIVDFHGEMVLLMNYSALNYTGLAKILKKYDKRTGALIRLPFIQKVLQEPFFTTDLLNTFVKECEAMLDRLFPSNKSRNLDEEGEPTTSGMVKTGTDDSELLRVPKELSEIEYMESLYMKSTVSALKVLKEIRSGSSTVSVFSLPPLPASGLEDDSWKKKVGVLEQVAK

SEQ ID NO: 106310 - protein, 253 aa, Arabidopsis thaliana
  peptide (1)..(253): Ceres Seq. ID no. 13619202
MEPRSVENRPNKRSRSDSNSVDTDPTVGMTKEELDFISLLEDELEKFNSFFVEQEEEYIIRLKELKDQVAKAKNSNEEMINIKKEIVDFHGEMVLLMNYSALNYTGLAKILKKYDKRTGALIRLPFIQKVLQEPFFTTDLLNTFVKECEAMLDRLFPSNKSRNLDEEGEPTTSGMVKTGTDDSELLRVPKELSEIEYMESLYMKSTVSALKVLKEIRSGSSTVSVFSLPPLPASGLEDDSWKKKVGVLEQVAK

SEQ ID NO: 106311 - protein, 225 aa, Arabidopsis thaliana
  peptide (1)..(225): Ceres Seq. ID no. 13619203
MTKEELDFISLLEDELEKFNSFFVEQEEEYIIRLKELKDQVAKAKNSNEEMINIKKEIVDFHGEMVLLMNYSALNYTGLAKILKKYDKRTGALIRLPFIQKVLQEPFFTTDLLNTFVKECEAMLDRLFPSNKSRNLDEEGEPTTSGMVKTGTDDSELLRVPKELSEIEYMESLYMKSTVSALKVLKEIRSGSSTVSVFSLPPLPASGLEDDSWKKKVGVLEQVAK

SEQ ID NO: 106312 - DNA, 1561 bp, Arabidopsis thaliana
  misc_feature (1)..(1561): Ceres Seq. ID no. 13619208
  misc_feature (1)..(1561): Ortholog of  Ceres SEQ ID NO 13637685 as cited in SEQ ID NO 53978
  misc_feature (1)..(1561): Ortholog of  Ceres SEQ ID NO 14315989 as cited in SEQ ID NO 57571
cttagcacacacacagagaccttaatccatttctctctctccctctctctcattaagaaaaaaaaagagaatcagagaagaaataaaaagaaagcaactcaaatctttaacctacaaaaacccagatttgttaactctctcattcttcttcttcttctcaacaacatttgatctttttgattctcaaagtattctcaaagtaaaagagaaacacactttgttgtctcaacaagcaagcaaacaaaacccatcttgggaaaatctcatttctttcccaagaaaatctcattttttctgttacaattttttcctaagaaaatgagagatttggtgtcatgtttcagtgagaactcaataaacgtgacacatcccttatcaatatcatcttcatcatcatcatgttcaaaatacagtaccaacaatgtttgtatctcaccatctctcataccatcaatacaaacctccattacaagcatctacagaatcactttatcgaaacatctcatcatcaaagtcacatggtgcaatccacacaacaacaatggcttaagcatctctgttgcatccgcagatcaaaacccttcaacaactctcaaactcaacacttcttctcgtttcttccgtaagaagaaaggtaacaaatcggttgattccgatctcggtaaaatcgaggttttttgggatctttcttcagctaaatatgattctaacttgtgtggtcctgaacctatcaatggcttctacgttatcgtcctcgttgatggtcaaatgggtcttcttcttggagattcatctgaagaaactctccgtaaaaaaggtttctccggcgatatcggtttcgatttctctcttgtttctcgacaagaacatttcacagggaacaatactttttactcgactaaagtaagattcgttgagacaggagattcacatgaaatcgtcatcagatgtaataaagaaacagagggtctaaaacagagcaatcattaccctgttctctctgtttgtattgataagaagacggtgataaaagtgaagaggcttcaatggaatttcagagggaatcaaacgattttcttggatggattgcttgtggatctgatgtgggatgttcatgattggttctttagtaatcaaggagcttgtggaagagctgtgttcatgtttaggacaaggaatggtttagacagcagcaggctttggttagaagagaagattgttaagaaagatcaacaagacaagcttgacttctctctcttcatttacgcctgtaagacttgaaaaacattataaaaaaaaaactcaatttttttttgagatttacaagaaaaaggttattgattgattgattctgtttttaatatttgagatatttttatggggttttttttttttttgaacttacaatttcttcttgggaggagtatagattttattttctttcttacattcttttttttttttggttggagttgtgatttaatattgagagattccaaaagatgtgaatttcttcataggagttgttgttttatttttattttaaatttggttttcttac

SEQ ID NO: 106313 - protein, 320 aa, Arabidopsis thaliana
  peptide (1)..(320): Ceres Seq. ID no. 13619209
MRDLVSCFSENSINVTHPLSISSSSSSCSKYSTNNVCISPSLIPSIQTSITSIYRITLSKHLIIKVTWCNPHNNNGLSISVASADQNPSTTLKLNTSSRFFRKKKGNKSVDSDLGKIEVFWDLSSAKYDSNLCGPEPINGFYVIVLVDGQMGLLLGDSSEETLRKKGFSGDIGFDFSLVSRQEHFTGNNTFYSTKVRFVETGDSHEIVIRCNKETEGLKQSNHYPVLSVCIDKKTVIKVKRLQWNFRGNQTIFLDGLLVDLMWDVHDWFFSNQGACGRAVFMFRTRNGLDSSRLWLEEKIVKKDQQDKLDFSLFIYACKT

SEQ ID NO: 106314 - protein, 170 aa, Arabidopsis thaliana
  peptide (1)..(170): Ceres Seq. ID no. 13619210
MGLLLGDSSEETLRKKGFSGDIGFDFSLVSRQEHFTGNNTFYSTKVRFVETGDSHEIVIRCNKETEGLKQSNHYPVLSVCIDKKTVIKVKRLQWNFRGNQTIFLDGLLVDLMWDVHDWFFSNQGACGRAVFMFRTRNGLDSSRLWLEEKIVKKDQQDKLDFSLFIYACKT

SEQ ID NO: 106315 - DNA, 2655 bp, Arabidopsis thaliana
  misc_feature (1)..(2655): Ceres Seq. ID no. 13619219
  misc_feature (1)..(2655): Ortholog of  Ceres SEQ ID NO 13600595 as cited in SEQ ID NO 629
atgaaaatacattcttctgatcattcatggcttttactagccgttctcgtgattctcctctccttctctggagctctctcaataacttatgatggaacgtctttgatcatcaatggaaatagagaactcctttactctggctccatacattaccctcgtagcactcctgaaatgtggccaaacatcatcaagagagcgaaacaaggcggtttgaacacgattcagacatacgttttttggaacgttcatgagcctgagcagggaaagttcaatttttcgggtagagccgacttggtgaagttcataaaattaattgagaagaatggtttgtatgtaaccttgaggcttggaccttttattcaagctgaatggactcatggaggacttccttactggctgagggaagttcccgggatcttcttccgtaccgataatgaacctttcaaggaacatacagagagatatgttaaggtggtacttgacatgatgaaggaggagaagctttttgcttcacaaggaggccccattatattaggacagattgagaatgagtatagtgcggttcaacgagcatataaagaagatggattaaactacattaagtgggcatctaaactggtacactcgatggatttggggatcccatgggttatgtgtaagcaaaatgatgctcctgatcctatgatcaacgcttgtaacggaagacattgcggtgatacattccctggtccaaacaaagacaacaagccatctttatggacagagaactggactactcagttccgcgtttttggcgatcccccagcacaaagatctgtagaagatatagcatattctgttgcccggtttttctccaagaatggaacccatgttaactactatatgtatcacggaggtactaactttggaagaacctctgcacattatgtgacaactcgttactacgacgatgcacctcttgatgaattcggactggaaagggagcctaagtacggtcatctaaagcatcttcacaacgcccttaacttgtgcaagaaggcacttctctggggccagcctcgagtcgagaagcctagcaatgaaacagagattcgatactacgagcagcctggaactaaagtttgtgcagcatttttggctaacaataacacagaagctgcagaaaaaatcaaattcagaggcaaggaatatcttatcccgcaccgctccatcagtattctccctgactgcaaaaccgttgtttataacaccggggagatcatctctcatcatacttcaagaaacttcatgaaatcgaaaaaagcgaataagaactttgatttcaaagtgttcaccgagtcagtgccaagtaagatcaagggtgactcttttatacccgttgaactctacggcttgaccaaagatgagtctgattacggatggtacacaacaagctttaaaatagatgacaatgacctctctaagaagaaaggaggtaagcctaatctgaggattgctagtcttggccacgcgttgcatgtatggctcaatggagaataccttggaaacggacatggtagccatgaagagaagagtttcgtctttcagaagccagttactctaaaagaaggagagaaccacttaaccatgctaggtgttttgacgggatttccggatagtggatcttatatggagcatagatacacaggtccacgtagtgtttccatcttaggtttgggctctggaacacttgatctcactgaagaaaacaaatggggaaacaaggtgggtatggaaggcgaaaggcttggtatccacgccgaagaaggattgaagaaggttaaatgggagaaagcttcagggaaagaaccgggaatgacatggtaccagacatacttcgatgcaccagagagccaaagtgcagcagcaattaggatgaacggaatggggaaaggtttgatttgggtgaacggagaaggtgttggtcgatattggatgtcgtttctatcgcctttaggacagcctacgcaaatcgagtatcacatccctaggtctttcttgaagcccaagaaaaatcttctggttatatttgaggaagaaccaaatgtgaagccagagcttatcgactttgtcatcgtcaatagagatacggtgtgttcttatattggagaaaactacactcctagtgtccgtcactggaccaggaagaatgaccaagttcaggccatcactgatgacgtgcatctcacggctaatctcaaatgttccggcacaaagaaaatctccgctgtggaattcgcaagctttgggaatcctaatgggacttgtggcaacttcactcttggaagttgtaatgctcctgtttctaagaaagtcgttgaaaagtactgtttgggtaaagcagagtgtgtgattccggtgaacaagagtacgttcgagcaagacaaaaaggattcatgtcccaaagtcgagaagaagcttgcggtacaagtcaagtgtggccgtgacaagaagaactaaggatatatattttatttgcttcgctgaacggttttatacctaatgtttttgtagatactaaaattatgcattgattttttgttccatttttgaatttattaactaaaatgtttatcatacagatatatacgcgtgattgtatatagtgaagtttct

SEQ ID NO: 106316 - protein, 832 aa, Arabidopsis thaliana
  peptide (1)..(832): Ceres Seq. ID no. 13619220
MKIHSSDHSWLLLAVLVILLSFSGALSITYDGTSLIINGNRELLYSGSIHYPRSTPEMWPNIIKRAKQGGLNTIQTYVFWNVHEPEQGKFNFSGRADLVKFIKLIEKNGLYVTLRLGPFIQAEWTHGGLPYWLREVPGIFFRTDNEPFKEHTERYVKVVLDMMKEEKLFASQGGPIILGQIENEYSAVQRAYKEDGLNYIKWASKLVHSMDLGIPWVMCKQNDAPDPMINACNGRHCGDTFPGPNKDNKPSLWTENWTTQFRVFGDPPAQRSVEDIAYSVARFFSKNGTHVNYYMYHGGTNFGRTSAHYVTTRYYDDAPLDEFGLEREPKYGHLKHLHNALNLCKKALLWGQPRVEKPSNETEIRYYEQPGTKVCAAFLANNNTEAAEKIKFRGKEYLIPHRSISILPDCKTVVYNTGEIISHHTSRNFMKSKKANKNFDFKVFTESVPSKIKGDSFIPVELYGLTKDESDYGWYTTSFKIDDNDLSKKKGGKPNLRIASLGHALHVWLNGEYLGNGHGSHEEKSFVFQKPVTLKEGENHLTMLGVLTGFPDSGSYMEHRYTGPRSVSILGLGSGTLDLTEENKWGNKVGMEGERLGIHAEEGLKKVKWEKASGKEPGMTWYQTYFDAPESQSAAAIRMNGMGKGLIWVNGEGVGRYWMSFLSPLGQPTQIEYHIPRSFLKPKKNLLVIFEEEPNVKPELIDFVIVNRDTVCSYIGENYTPSVRHWTRKNDQVQAITDDVHLTANLKCSGTKKISAVEFASFGNPNGTCGNFTLGSCNAPVSKKVVEKYCLGKAECVIPVNKSTFEQDKKDSCPKVEKKLAVQVKCGRDKKN

SEQ ID NO: 106317 - protein, 775 aa, Arabidopsis thaliana; identical to SEQ ID NO: 84187
  peptide (1)..(775): Ceres Seq. ID no. 13619221

SEQ ID NO: 106318 - protein, 671 aa, Arabidopsis thaliana
  peptide (1)..(671): Ceres Seq. ID no. 13619222
MMKEEKLFASQGGPIILGQIENEYSAVQRAYKEDGLNYIKWASKLVHSMDLGIPWVMCKQNDAPDPMINACNGRHCGDTFPGPNKDNKPSLWTENWTTQFRVFGDPPAQRSVEDIAYSVARFFSKNGTHVNYYMYHGGTNFGRTSAHYVTTRYYDDAPLDEFGLEREPKYGHLKHLHNALNLCKKALLWGQPRVEKPSNETEIRYYEQPGTKVCAAFLANNNTEAAEKIKFRGKEYLIPHRSISILPDCKTVVYNTGEIISHHTSRNFMKSKKANKNFDFKVFTESVPSKIKGDSFIPVELYGLTKDESDYGWYTTSFKIDDNDLSKKKGGKPNLRIASLGHALHVWLNGEYLGNGHGSHEEKSFVFQKPVTLKEGENHLTMLGVLTGFPDSGSYMEHRYTGPRSVSILGLGSGTLDLTEENKWGNKVGMEGERLGIHAEEGLKKVKWEKASGKEPGMTWYQTYFDAPESQSAAAIRMNGMGKGLIWVNGEGVGRYWMSFLSPLGQPTQIEYHIPRSFLKPKKNLLVIFEEEPNVKPELIDFVIVNRDTVCSYIGENYTPSVRHWTRKNDQVQAITDDVHLTANLKCSGTKKISAVEFASFGNPNGTCGNFTLGSCNAPVSKKVVEKYCLGKAECVIPVNKSTFEQDKKDSCPKVEKKLAVQVKCGRDKKN

SEQ ID NO: 106319 - DNA, 1785 bp, Arabidopsis thaliana
  misc_feature (1)..(1785): Ceres Seq. ID no. 13619227
  misc_feature (1)..(1785): Ortholog of  Ceres SEQ ID NO 15168908 as cited in SEQ ID NO 20765
atttgctcacctttcgccgattgattttgtacatcacacgcagacgcagcttttagtatttttttcaacaatcgcttttttttttctcgatctccgtgaagctctcgaatctctggttttgagttttggagaatggtgtttttccgcagcgtatcggcctttactaggctgaggtctcgcgtcggccaacaatcttcactcagcaattctgtcagatggattcagatgcagagctctaccgacctggacctgaagtcgcagctgcaagagttaattccggaacagcaggaccgtctgaagaaactgaagtcagaacatgggaaggtccaactgggaaacatcactgttgatatggttattggtggaatgagagggatgactggattgctttgggaaacctcattgcttgacccggaagagggtattcgctttaggggattgtcgattcctgagtgccagaaagtattacctactgcccagtctggagctgaaccattaccggagggtcttttgtggcttctcttaactggaaaggtacctagcaaagagcaagttgaagcactgtcgaaagacttggcgaaccgtgctgctgtgccagattatgtgtacaatgccatcgatgctctgccttccacagctcatccaatgactcaatttgctagcggtgttatggccctccaggtgcaaagtgagtttcaaaaggcatatgagaatggaattcataagtcaaagttctgggagccaacatatgaggattgcctcaacctgattgctcgtgttcctgttgtagctgcatatgtttatcgaaggatgtataagaatggtgattccattccctcagataaatctttggattatggtgcaaatttttcccacatgttgggatttgatgatgaaaaggtgaaagagctcatgaggctttacatcaccatccacagtgatcatgaaggtggaaatgttagtgctcacactggtcacctggttggtagtgcactttcagacccatatctgtcatttgcagctgcattaaatggtttagctgggccactccatggtttggctaatcaggaagttttgctttggatcaaatcagtcgtagaggaatgtggagaagatatatcaaaagaacagttgaaagaatatgtttggaaaacattaaacagtggcaaggttattccgggatatggtcacggtgttctgcgcaatactgatccaagatatgtatgccaaagagaatttgccttgaagcatctacctgacgaccctcttttccagctggtgtcaaagctttatgaagttgtgcctcctgttctcactgagcttggaaaggtgaagaacccgtggccaaatgttgatgctcacagtggggtcttgctgaaccactatggtctaaccgaagcaaggtactacaccgtgctctttggtgtttcaaggagtcttggcatctgctctcagcttatatgggaccgagctcttggacttgcacttgagaggccaaagagtgttaccatggactggcttgaagcccattgtaagaaagcttcatctgcttaagtcaccaccgagtcctgagttgtcgcactctctcgtgtttcaacaaaagtcattctcttccacactggatagctttttttgtttttaccttctattgacagaagaaacatttgttcatgtagaaattgttcctgagaaacacatgcttggtgcaaatttgcatttccgggaaactcgtgataataaataaacagttgtattcagtttgcgtaaaaatcaaacatcaatatc

SEQ ID NO: 106320 - protein, 473 aa, Arabidopsis thaliana; identical to SEQ ID NO: 30072
  peptide (1)..(473): Ceres Seq. ID no. 13619228

SEQ ID NO: 106321 - protein, 442 aa, Arabidopsis thaliana; identical to SEQ ID NO: 30073
  peptide (1)..(442): Ceres Seq. ID no. 13619229

SEQ ID NO: 106322 - protein, 400 aa, Arabidopsis thaliana; identical to SEQ ID NO: 30074
  peptide (1)..(400): Ceres Seq. ID no. 13619230

SEQ ID NO: 106323 - DNA, 2094 bp, Arabidopsis thaliana
  misc_feature (1)..(2094): Ceres Seq. ID no. 13619235
  misc_feature (1)..(2094): Ortholog of  Ceres SEQ ID NO 13590691 as cited in SEQ ID NO 66290
atattgaaaacgcccgctctctgttttttctcgtttctcctcccttcgttctcgggtccatctgcgttcgtatcaagtccttgcactcttcttcttcgtatctggattgtttcgaagttctctaacgaacgacaatggagagtttgatcgtgttgattaatacgatacaaagagcatgcaccgtagtcggcgatcatggcggcgatagcaacgctctatcttctctatgggaagctcttccttccgtcgccgtcgttggtggccagagttctggtaaatcttcggttctagagagtatcgtcgggagagattttcttcccagaggatccggtattgttacgagacggcctttggttttacaacttcataagactgaaaatggaacagaggataacgcagagtttctccaccttaccaataaaaaattcaccaatttctctttggttagaaaggagattgaggatgagactgatagaatcactgggaagaacaaacagatttcttcaattcctattcacctcagtattttctctcccaatgaaggacagccagaaactattgttgaggatatcgaatccatggttcgctcatacgtcgaaaagcctaactgtcttatactggcaatatctcctgctaatcaagacatagctacatccgacgcgatgaagctcgcgaaagaagtggatccaataggtgatagaacgtttggagttttgacaaagttagacttaatggacaagggaactaatgcattggacgttatcaacggaagatcttacaagctgaaatatccttgggttgggatagtgaaccgttcacaagccgacattaataagaatgtcgacatgatggttgcaagaaggaaagagcgagagtactttgaaaccagtcctgactatggtcacttagccacaagaatgggctcagaatatcttgcaaagctcctctctaagctcttagaatctgttataaggtcacgtattccaagtatcctatccttgataaacaacaacatcgaggaactcgaaagagagttagaccaattgggcaggcctatcgctattgatgctggagctcaactatacactatcttgggaatgtgtagagcattcgaaaagatattcaaagagcatttggatggcgggcgtcccggaggtgcacggatctatggaatctttgactacaatcttccaacagccataaaaaaacttccatttgatcgtcatctttcattgcaaagtgttaagagaattgtctcagaatctgatggctatcaacctcacttgatagcaccagaattaggttatcgtcgtcttattgaaggatccctaaatcattttagaggtccagctgaagcttctgtgaatgctattcaccttatcttaaaagagcttgtaaggaaagcaatcgcagaaactgaggagctaaaacgtttcccttcactacaaattgagttagttgctgcagcaaactcatcattagacaagtttcgtgaagaaagcatgaagtcagttcttagattagtcgacatggaatcttcatatctaacggttgacttctttcgcaagcttcatgtagaaagccaaaacatgtctctttcttcaccaacatcagcaatagaccaatacggtgatgggcatttcagaaagatagcttcaaatgtagctgcttatatcaagatggttgcagagacacttgttaacactattcctaaggctgttgttcattgccaagtcagacaagcgaaactctctttgcttaattacttctatgcacagattagtcagagtcagcaggggaaacgattgggacagttgctagatgagaacccggcattgatggaaaggagaatgcaatgtgcaaagaggctcgagctatacaagaaggctagagatgagattgatgcagcggtttgggttcgatgaacgaagccggtttgattttattggttgacatattaaaccttttaagttgataaacagacaactattgtagtacttgtggttatctccggtataatcgttgctatttcttgcacacacaaaattaacttaagttttttacttggtaataaaatttccttttctttgaccc

SEQ ID NO: 106324 - protein, 596 aa, Arabidopsis thaliana
  peptide (1)..(596): Ceres Seq. ID no. 13619236
MESLIVLINTIQRACTVVGDHGGDSNALSSLWEALPSVAVVGGQSSGKSSVLESIVGRDFLPRGSGIVTRRPLVLQLHKTENGTEDNAEFLHLTNKKFTNFSLVRKEIEDETDRITGKNKQISSIPIHLSIFSPNEGQPETIVEDIESMVRSYVEKPNCLILAISPANQDIATSDAMKLAKEVDPIGDRTFGVLTKLDLMDKGTNALDVINGRSYKLKYPWVGIVNRSQADINKNVDMMVARRKEREYFETSPDYGHLATRMGSEYLAKLLSKLLESVIRSRIPSILSLINNNIEELERELDQLGRPIAIDAGAQLYTILGMCRAFEKIFKEHLDGGRPGGARIYGIFDYNLPTAIKKLPFDRHLSLQSVKRIVSESDGYQPHLIAPELGYRRLIEGSLNHFRGPAEASVNAIHLILKELVRKAIAETEELKRFPSLQIELVAAANSSLDKFREESMKSVLRLVDMESSYLTVDFFRKLHVESQNMSLSSPTSAIDQYGDGHFRKIASNVAAYIKMVAETLVNTIPKAVVHCQVRQAKLSLLNYFYAQISQSQQGKRLGQLLDENPALMERRMQCAKRLELYKKARDEIDAAVWVR

SEQ ID NO: 106325 - protein, 448 aa, Arabidopsis thaliana
  peptide (1)..(448): Ceres Seq. ID no. 13619237
MVRSYVEKPNCLILAISPANQDIATSDAMKLAKEVDPIGDRTFGVLTKLDLMDKGTNALDVINGRSYKLKYPWVGIVNRSQADINKNVDMMVARRKEREYFETSPDYGHLATRMGSEYLAKLLSKLLESVIRSRIPSILSLINNNIEELERELDQLGRPIAIDAGAQLYTILGMCRAFEKIFKEHLDGGRPGGARIYGIFDYNLPTAIKKLPFDRHLSLQSVKRIVSESDGYQPHLIAPELGYRRLIEGSLNHFRGPAEASVNAIHLILKELVRKAIAETEELKRFPSLQIELVAAANSSLDKFREESMKSVLRLVDMESSYLTVDFFRKLHVESQNMSLSSPTSAIDQYGDGHFRKIASNVAAYIKMVAETLVNTIPKAVVHCQVRQAKLSLLNYFYAQISQSQQGKRLGQLLDENPALMERRMQCAKRLELYKKARDEIDAAVWVR

SEQ ID NO: 106326 - protein, 420 aa, Arabidopsis thaliana
  peptide (1)..(420): Ceres Seq. ID no. 13619238
MKLAKEVDPIGDRTFGVLTKLDLMDKGTNALDVINGRSYKLKYPWVGIVNRSQADINKNVDMMVARRKEREYFETSPDYGHLATRMGSEYLAKLLSKLLESVIRSRIPSILSLINNNIEELERELDQLGRPIAIDAGAQLYTILGMCRAFEKIFKEHLDGGRPGGARIYGIFDYNLPTAIKKLPFDRHLSLQSVKRIVSESDGYQPHLIAPELGYRRLIEGSLNHFRGPAEASVNAIHLILKELVRKAIAETEELKRFPSLQIELVAAANSSLDKFREESMKSVLRLVDMESSYLTVDFFRKLHVESQNMSLSSPTSAIDQYGDGHFRKIASNVAAYIKMVAETLVNTIPKAVVHCQVRQAKLSLLNYFYAQISQSQQGKRLGQLLDENPALMERRMQCAKRLELYKKARDEIDAAVWVR

SEQ ID NO: 106327 - DNA, 672 bp, Arabidopsis thaliana
  misc_feature (1)..(672): Ceres Seq. ID no. 13619247
  misc_feature (1)..(672): Ortholog of  Ceres SEQ ID NO 13583898 as cited in SEQ ID NO 63147
cttaagacttgttcactaaattatatattaaagtacaatggctctttaaatatcaacttgtaacaaatttgcttggacgtcttcatcctctctgaaaaatctttagcacaaatttgaaatcctcgaatatttggtcggcgatgagaaagcaagtattagcattgagtgacacggcggctgcgaggattcgccaacttctgcagcatcagcaaaaacctttcctccgccttgctgttgaagccaaaggatgcaatggcctatcttacgtcctcaattacgcccaggagaaagggaagtttgatgaggtggtcgaggagaaaggtgtaaagatccttgtggatccaaaggcggtgatgcatgtgattgggacagagatggatttcgtggacgataagcttaggtctgagtttgtgttcgtcaatccaaacgcgacaaagtgtggatgtggtgagtcattcacgacaacatgaaaggcaaaattacacatataacataataagacatatataactctattactctaccacagtagtcgatgaaatttgctttgtaaatacaactatcttaaggctgtcttccgtgtaggttcgcaatttgcgacgtttgcgatgatttaatgtaatgtgaataagtgtgtgtggaaatgggtttcgtttctacgtattactctgt

SEQ ID NO: 106328 - protein, 109 aa, Arabidopsis thaliana
  peptide (1)..(109): Ceres Seq. ID no. 13619248
MRKQVLALSDTAAARIRQLLQHQQKPFLRLAVEAKGCNGLSYVLNYAQEKGKFDEVVEEKGVKILVDPKAVMHVIGTEMDFVDDKLRSEFVFVNPNATKCGCGESFTTT

SEQ ID NO: 106329 - DNA, 1441 bp, Arabidopsis thaliana
  misc_feature (1)..(1441): Ceres Seq. ID no. 13619261
  misc_feature (1)..(1441): Ortholog of  Ceres SEQ ID NO 13594037 as cited in SEQ ID NO 55666
  misc_feature (1)..(1441): Ortholog of  Ceres SEQ ID NO 15171501 as cited in SEQ ID NO 58322
  misc_feature (1)..(1441): Ortholog of  Ceres SEQ ID NO 13657707 as cited in SEQ ID NO 66407
tcatcgctgtctggaacagcgatgacttttaactagttgagacacactaaacccatctactattatcttaaacatgcccatcaaaccggttttaaccaccctaatagctcttttatccatcattcttgctctctacacgatccaattgccatcctctagatctctctcttctatagctacaactatcggagcattagcaaaatattcaacattttttggacacaaacaccaccatcatcaccatcaccaccatcaccatcatcattatcaccaccatgaaccaataaaatgttgtgagaaatggacgtcaaggcttagacaccaatacaagacttctcttgtgttgactgttgatttgcatggttgtggtaacttcagcaatgttcaaagcgccattgatgttgtccctgatttaagctcttccaagactctcatcatcgttaattcgggttcttatagggaaaaggttacggttaatgaaaacaagacaaaccttgttattcaaggaagaggatatcaaaacacatccatcgaatggaacgacacagcaaaatccgccggaaacactgctgatagcttctcctttgtagtgtttgcagctaacttcacagcttacaacattagtttcaagaacaatgcaccagaaccagatcctggtgaagctgatgcacaagcagtagctctaaggattgaaggagaccaagctgccttttatggttgtggattctatggggctcaagatacacttctagatgataaaggaagacatttcttcaaagagtgcttcattcaagggtccatagattttatatttggcaatggaagatcactctaccaggattgtactatcaattcaatagcaaaggggaatacatccggagttaccggatctatcacagctcaaggaagacaatcagaagatgaacagtcaggattctcttttgtgaattgtaagatcgatggcagtggggaaatattgcttggaagagcttggggagcctatgctacagtcgtgttctcaaatacttacatgtctggaatcattactccagaaggatggaataactggggagactcgaccaaagaaaagacggtgacttttggagagcataaatgctatggaccgggagcagattacaaagagagggttttgtttgggaaacaactcacagattcagaagcatcttctttcatagatgtatcttttatagatggtgatgaatggctccgtcacactaacatagtctctgagcatacatctaaagacattggagatgatcttataggattttactaacatatataaggatacacatgaataaaaaacatttagatgtagatacatacatattataagtatatgtagtcacattgagatctgatttgcgatgaagatgaaactcatgtactgtatatcttaatatgagatttcggtatgttt

SEQ ID NO: 106330 - protein, 407 aa, Arabidopsis thaliana
  peptide (1)..(407): Ceres Seq. ID no. 13619262
MPIKPVLTTLIALLSIILALYTIQLPSSRSLSSIATTIGALAKYSTFFGHKHHHHHHHHHHHHHYHHHEPIKCCEKWTSRLRHQYKTSLVLTVDLHGCGNFSNVQSAIDVVPDLSSSKTLIIVNSGSYREKVTVNENKTNLVIQGRGYQNTSIEWNDTAKSAGNTADSFSFVVFAANFTAYNISFKNNAPEPDPGEADAQAVALRIEGDQAAFYGCGFYGAQDTLLDDKGRHFFKECFIQGSIDFIFGNGRSLYQDCTINSIAKGNTSGVTGSITAQGRQSEDEQSGFSFVNCKIDGSGEILLGRAWGAYATVVFSNTYMSGIITPEGWNNWGDSTKEKTVTFGEHKCYGPGADYKERVLFGKQLTDSEASSFIDVSFIDGDEWLRHTNIVSEHTSKDIGDDLIGFY

SEQ ID NO: 106331 - DNA, 1612 bp, Arabidopsis thaliana
  misc_feature (1)..(1612): Ceres Seq. ID no. 13619263
  misc_feature (1)..(1612): Ortholog of  Ceres SEQ ID NO 13594345 as cited in SEQ ID NO 58043
  misc_feature (1)..(1612): Ortholog of  Ceres SEQ ID NO 14314755 as cited in SEQ ID NO 59919
  misc_feature (1)..(1612): Ortholog of  Ceres SEQ ID NO 13597574 as cited in SEQ ID NO 64677
  misc_feature (1)..(1612): Ortholog of  Ceres SEQ ID NO 13597843 as cited in SEQ ID NO 64850
  misc_feature (1)..(1612): Ortholog of  Ceres SEQ ID NO 13597678 as cited in SEQ ID NO 65375
  misc_feature (1)..(1612): Ortholog of  Ceres SEQ ID NO 13662880 as cited in SEQ ID NO 65422
  misc_feature (1)..(1612): Ortholog of  Ceres SEQ ID NO 12779098 as cited in SEQ ID NO 67698
  misc_feature (1)..(1612): Ortholog of  Ceres SEQ ID NO 13596180 as cited in SEQ ID NO 67941
  misc_feature (1)..(1612): Ortholog of  Ceres SEQ ID NO 13591190 as cited in SEQ ID NO 68044
  misc_feature (1)..(1612): Ortholog of  Ceres SEQ ID NO 13595961 as cited in SEQ ID NO 68223
gaaacaaaacttgagaggttcttactaaagttgcatcgtcatggctttcgaaaaaaacaacgaaccttttcctcttcactttgttctcttccctttcatggctcaaggccacatgattcccatggttgatattgcaaggctcttggctcagcgaggtgtgcttataacaattgtcacgacgcctcacaatgcagcaaggttcaagaatgtcctaaaccgtgccattgagtctggtttgcccatcaacctagtgcaagtcaagtttccatatcaagaagctggtctgcaagaaggacaagaaaatatggatttgcttaccacgatggagcagataacatctttctttaaagcggttaacttactcaaagaaccagtccagaaccttattgaagagatgagcccgcgaccaagctgtctaatctctgatatgtgtttgtcgtatacaagcgaaatcgccaagaagttcaaaataccaaagatcctcttccatggcatgggttgcttttgtcttctgtgtgttaacgttctgcgcaagaaccgtgagatcttggacaatttaaagtctgataaggagtacttcattgttccttattttcctgatagagttgaattcacaagacctcaagttccggtggaaacatatgttcctgcaggctggaaagagatcttggaggatatggtagaagcggataagacatcttatggtgttatagtcaactcatttcaagagctcgaacctgcgtatgccaaagacttcaaggaggcaaggtctggtaaagcatggaccattggacctgtttccttgtgcaacaaggtaggagtagacaaagcagagaggggaaacaaatcagatattgatcaagatgagtgccttgaatggctcgattctaaggaaccgggatctgtgctctacgtttgccttggaagtatttgtaatcttcctctgtctcagctccttgagctgggactaggcctagaggaatcccaaagacctttcatctgggtcataagaggttgggagaaatacaaagagttagttgagtggttctcggaaagcggctttgaagatagaatccaagatagaggacttctcatcaaaggatggtcccctcaaatgcttatcctttcacatccttctgttggagggttcttaacgcactgcggatggaactcgactcttgaggggataactgctggtctaccaatgcttacatggccactatttgcagaccaattctgcaacgagaaactggtcgtacaaatactaaaagtcggtgtaagtgccgaggttaaagaggtcatgaaatggggagaagaagagaagataggagtgttggtggataaagaaggagtgaagaaggcagtggaagaactaatgggtgagagtgatgatgcaaaagagagaagaagaagagccaaagagcttggagaatcagctcacaaggctgtggaagaaggaggctcctctcattctaatatcactttcttgctacaagacataatgcaactagcacagtccaataattgagtatatgtcatattttcaaaggaatttaaacattctatagtttttgttttctgtatttgtgaaatttaaaacagagtcttagtt

SEQ ID NO: 106332 - protein, 495 aa, Arabidopsis thaliana
  peptide (1)..(495): Ceres Seq. ID no. 13619264
MAFEKNNEPFPLHFVLFPFMAQGHMIPMVDIARLLAQRGVLITIVTTPHNAARFKNVLNRAIESGLPINLVQVKFPYQEAGLQEGQENMDLLTTMEQITSFFKAVNLLKEPVQNLIEEMSPRPSCLISDMCLSYTSEIAKKFKIPKILFHGMGCFCLLCVNVLRKNREILDNLKSDKEYFIVPYFPDRVEFTRPQVPVETYVPAGWKEILEDMVEADKTSYGVIVNSFQELEPAYAKDFKEARSGKAWTIGPVSLCNKVGVDKAERGNKSDIDQDECLEWLDSKEPGSVLYVCLGSICNLPLSQLLELGLGLEESQRPFIWVIRGWEKYKELVEWFSESGFEDRIQDRGLLIKGWSPQMLILSHPSVGGFLTHCGWNSTLEGITAGLPMLTWPLFADQFCNEKLVVQILKVGVSAEVKEVMKWGEEEKIGVLVDKEGVKKAVEELMGESDDAKERRRRAKELGESAHKAVEEGGSSHSNITFLLQDIMQLAQSNN

SEQ ID NO: 106333 - protein, 476 aa, Arabidopsis thaliana
  peptide (1)..(476): Ceres Seq. ID no. 13619265
MAQGHMIPMVDIARLLAQRGVLITIVTTPHNAARFKNVLNRAIESGLPINLVQVKFPYQEAGLQEGQENMDLLTTMEQITSFFKAVNLLKEPVQNLIEEMSPRPSCLISDMCLSYTSEIAKKFKIPKILFHGMGCFCLLCVNVLRKNREILDNLKSDKEYFIVPYFPDRVEFTRPQVPVETYVPAGWKEILEDMVEADKTSYGVIVNSFQELEPAYAKDFKEARSGKAWTIGPVSLCNKVGVDKAERGNKSDIDQDECLEWLDSKEPGSVLYVCLGSICNLPLSQLLELGLGLEESQRPFIWVIRGWEKYKELVEWFSESGFEDRIQDRGLLIKGWSPQMLILSHPSVGGFLTHCGWNSTLEGITAGLPMLTWPLFADQFCNEKLVVQILKVGVSAEVKEVMKWGEEEKIGVLVDKEGVKKAVEELMGESDDAKERRRRAKELGESAHKAVEEGGSSHSNITFLLQDIMQLAQSNN

SEQ ID NO: 106334 - protein, 471 aa, Arabidopsis thaliana
  peptide (1)..(471): Ceres Seq. ID no. 13619266
MIPMVDIARLLAQRGVLITIVTTPHNAARFKNVLNRAIESGLPINLVQVKFPYQEAGLQEGQENMDLLTTMEQITSFFKAVNLLKEPVQNLIEEMSPRPSCLISDMCLSYTSEIAKKFKIPKILFHGMGCFCLLCVNVLRKNREILDNLKSDKEYFIVPYFPDRVEFTRPQVPVETYVPAGWKEILEDMVEADKTSYGVIVNSFQELEPAYAKDFKEARSGKAWTIGPVSLCNKVGVDKAERGNKSDIDQDECLEWLDSKEPGSVLYVCLGSICNLPLSQLLELGLGLEESQRPFIWVIRGWEKYKELVEWFSESGFEDRIQDRGLLIKGWSPQMLILSHPSVGGFLTHCGWNSTLEGITAGLPMLTWPLFADQFCNEKLVVQILKVGVSAEVKEVMKWGEEEKIGVLVDKEGVKKAVEELMGESDDAKERRRRAKELGESAHKAVEEGGSSHSNITFLLQDIMQLAQSNN

SEQ ID NO: 106335 - DNA, 1165 bp, Arabidopsis thaliana
  misc_feature (1)..(1165): Ceres Seq. ID no. 13619287
  misc_feature (1)..(1165): Ortholog of  Ceres SEQ ID NO 12474685 as cited in SEQ ID NO 88
  misc_feature (1)..(1165): Ortholog of  Ceres SEQ ID NO 13638574 as cited in SEQ ID NO 51223
  misc_feature (1)..(1165): Ortholog of  Ceres SEQ ID NO 14311531 as cited in SEQ ID NO 51466
  misc_feature (1)..(1165): Ortholog of  Ceres SEQ ID NO 15170465 as cited in SEQ ID NO 52798
  misc_feature (1)..(1165): Ortholog of  Ceres SEQ ID NO 15177112 as cited in SEQ ID NO 55956
  misc_feature (1)..(1165): Ortholog of  Ceres SEQ ID NO 12610790 as cited in SEQ ID NO 56123
  misc_feature (1)..(1165): Ortholog of  Ceres SEQ ID NO 14315399 as cited in SEQ ID NO 57112
  misc_feature (1)..(1165): Ortholog of  Ceres SEQ ID NO 13655636 as cited in SEQ ID NO 63519
  misc_feature (1)..(1165): Ortholog of  Ceres SEQ ID NO 13655896 as cited in SEQ ID NO 64970
atggcaaatgcgatcacatttttcaagctcaacaccggcgctaagttcccttcggtgggtcttggaacatggcaagcttctcctggcctcgtcggtgatgcagtcgccgcggctgttaagattggctatcgtcacattgattgtgctcagatctatggcaacgaaaaagagattggggcagttctgaaaaaattgtttgaagacagagtagtgaaacgcgaggatttgttcatcacctccaaactctggtgtactgatcatgaccctcaagatgtcccggaggcattgaacagaactctcaaggatctgcagcttgaatacgtcgatctttatctgatacactggcctgcacggataaagaaaggttctgttggaataaagccagagaaccttttgcctgtagatattcctagtacatggaaagcgatggaagcactatacgattcgggcaaggcacgagccataggtgtaagcaatttctctaccaagaaactagctgatctcttggagttagctcgtgttcctcctgctgttaatcaggtcgaatgtcatccttcttggcgacaaactaagctacaagaattctgcaaatccaaaggggttcacctaagtgcatactcgccattaggttctccagggacaacatggctgaagagcgatgttttgaagaacccgatactgaatatggttgcggaaaaactcggaaagagtcctgcgcaagtcgcccttcgttggggactccaaatgggtcacagtgtgcttcccaagagtacaaatgaaggaaggatcaaagagaactttaatgttttcgactggtcaatacccgattacatgttcgctaagtttgctgagattgaacaggctaggttagtcactggttccttccttgttcatgagacactaagcccttacaagtctattgaagaattatgggatggcgagatatgatttttagctgatctaaataatgggagctaggtttctctctctgatgaactagtcagtatcttttttttttaatgaatgttaaatttattcaaccagaaaaaaccttctttacattatatgcaactttgagtagaacatgaaactgtattgtgcttgtcagtttcttatggatgttatttatttacaaagtttttttttatagaaaaaggatctattt

SEQ ID NO: 106336 - protein, 315 aa, Arabidopsis thaliana; identical to SEQ ID NO: 70899
  peptide (1)..(315): Ceres Seq. ID no. 13619288

SEQ ID NO: 106337 - protein, 173 aa, Arabidopsis thaliana; identical to SEQ ID NO: 70900
  peptide (1)..(173): Ceres Seq. ID no. 13619289

SEQ ID NO: 106338 - DNA, 1360 bp, Arabidopsis thaliana
  misc_feature (1)..(1360): Ceres Seq. ID no. 13619301
  misc_feature (1)..(1360): Ortholog of  Ceres SEQ ID NO 13595351 as cited in SEQ ID NO 55934
  misc_feature (1)..(1360): Ortholog of  Ceres SEQ ID NO 13639645 as cited in SEQ ID NO 57488
aaatcaaaggatctcaatttctttagtcaacaggtgttccttctcttcttcctcgattcggaggtagagaagaaaaatggcagctccggcgatcctaaacggcggcgatgcgacggagagagaaacacgaatggctcactctgcaatgacattggttcaggtcataaatggaggataccatgtggttacgaaagtagctcttaacgttggtgtaaatcagctcgttttttgtgtctttcgcgatcttcttgctctctccattctcgcacctctcgcttttttccgtgaaagaacgatcagacctcctatgaatagaagcatcttcttttcactcttctttcttggtttagcagggatatttgggaaccagttactatttcttatgggtttatcttacacgaatccaacttatgctgctgctatacaaccatcaatccctgtctttacatttctcttggctgtcttgatgggtacagaaaaagtgaacttgttgaaagtcgagggccaaacgaaagttggaggtactcttgtttgtgtttcgggtgctatagcgatggctttgtttcgtggtccagccttgtttggaggtaaagatgcagcagattcagtgaaaagtgtaattattgatagaagtcaaccagagcttaatgggtggttagtctctagttttcttggtcttgggtttgatcaatggcacattggagttttatgtttgattggaaactgtatgtgtatggctgcttttctcgctgtccaagcaccggttttgaagaagtatcctgcctacctttcggttgctgcgtattcatacttcttcggtgcatcaataatgatcacaacagctatcttgtttgttagagagcctaaagattggagcttaacacaatctgaggttcttgctgttatattcgcaggagtgtttgcctcagctctaaactatggactcttgacttggtccaataaaattcttggagctgctttggtttccctatacaatcctcttcagcctgcaacatcggcctttttatcgacaattttcctcggcagcccgatctatcttggaagcgttttgggtggaatcctcatcatttgcgggctttatatggttacttgggcatcttacagagagcaacaaacaacatcagctgggaatgagattgcttcttctagtgatgtaagaatctcggaacctttcatttacagagatgagactggtaaataaataagaaaaggtaaagaaaggatacttgtaccgttgtacgtagttaatatcagacaaaaacttgacaaatcatacaattttttcgagttcaaacattgattctttaaacggtaaataattcaaaataattacttcgcc

SEQ ID NO: 106339 - protein, 381 aa, Arabidopsis thaliana
  peptide (1)..(381): Ceres Seq. ID no. 13619302
MAAPAILNGGDATERETRMAHSAMTLVQVINGGYHVVTKVALNVGVNQLVFCVFRDLLALSILAPLAFFRERTIRPPMNRSIFFSLFFLGLAGIFGNQLLFLMGLSYTNPTYAAAIQPSIPVFTFLLAVLMGTEKVNLLKVEGQTKVGGTLVCVSGAIAMALFRGPALFGGKDAADSVKSVIIDRSQPELNGWLVSSFLGLGFDQWHIGVLCLIGNCMCMAAFLAVQAPVLKKYPAYLSVAAYSYFFGASIMITTAILFVREPKDWSLTQSEVLAVIFAGVFASALNYGLLTWSNKILGAALVSLYNPLQPATSAFLSTIFLGSPIYLGSVLGGILIICGLYMVTWASYREQQTTSAGNEIASSSDVRISEPFIYRDETGK

SEQ ID NO: 106340 - protein, 363 aa, Arabidopsis thaliana
  peptide (1)..(363): Ceres Seq. ID no. 13619303
MAHSAMTLVQVINGGYHVVTKVALNVGVNQLVFCVFRDLLALSILAPLAFFRERTIRPPMNRSIFFSLFFLGLAGIFGNQLLFLMGLSYTNPTYAAAIQPSIPVFTFLLAVLMGTEKVNLLKVEGQTKVGGTLVCVSGAIAMALFRGPALFGGKDAADSVKSVIIDRSQPELNGWLVSSFLGLGFDQWHIGVLCLIGNCMCMAAFLAVQAPVLKKYPAYLSVAAYSYFFGASIMITTAILFVREPKDWSLTQSEVLAVIFAGVFASALNYGLLTWSNKILGAALVSLYNPLQPATSAFLSTIFLGSPIYLGSVLGGILIICGLYMVTWASYREQQTTSAGNEIASSSDVRISEPFIYRDETGK

SEQ ID NO: 106341 - protein, 358 aa, Arabidopsis thaliana
  peptide (1)..(358): Ceres Seq. ID no. 13619304
MTLVQVINGGYHVVTKVALNVGVNQLVFCVFRDLLALSILAPLAFFRERTIRPPMNRSIFFSLFFLGLAGIFGNQLLFLMGLSYTNPTYAAAIQPSIPVFTFLLAVLMGTEKVNLLKVEGQTKVGGTLVCVSGAIAMALFRGPALFGGKDAADSVKSVIIDRSQPELNGWLVSSFLGLGFDQWHIGVLCLIGNCMCMAAFLAVQAPVLKKYPAYLSVAAYSYFFGASIMITTAILFVREPKDWSLTQSEVLAVIFAGVFASALNYGLLTWSNKILGAALVSLYNPLQPATSAFLSTIFLGSPIYLGSVLGGILIICGLYMVTWASYREQQTTSAGNEIASSSDVRISEPFIYRDETGK

SEQ ID NO: 106342 - DNA, 1580 bp, Arabidopsis thaliana
  misc_feature (1)..(1580): Ceres Seq. ID no. 13619309
  misc_feature (1)..(1580): Ortholog of  Ceres SEQ ID NO 14312212 as cited in SEQ ID NO 54399
  misc_feature (1)..(1580): Ortholog of  Ceres SEQ ID NO 15225341 as cited in SEQ ID NO 55222
  misc_feature (1)..(1580): Ortholog of  Ceres SEQ ID NO 13653980 as cited in SEQ ID NO 69253
ccctctttgctctcactatcaaaactctgaatttcgatttcaatggagtcacgcgtgctgttacgcgccaccgcgaatgtcgttggaattccgaaattgagacgaccaatcggagcgatccaccgtcaattcagcactgcatcgtcttcctcgttctcggttaaaccaatcggaggaatcggagagggagcgaatctgatctccggtcgtcagcttcgtccaattcttcttctcgattcgtcggcgatcaacggaggagagaaaagagaaattctcaaaccggttaaagccgccgctgctgaaggtggagataccgctggggatgctaaagttggattcctcgccaagtatccatggctagtcactggattcttcttcttcatgtggtacttcttgaatgtgattttcaacatccttaacaagaagatctataattacttcccttatccctattttgtatcggtgatacacttgttcgtgggagttgtttactgcttgatcagctggtccgtgggtcttcctaaacgtgccccgattgactcgaacctcctcaaggtattgataccagtcgcagtctgtcacgccttaggccatgtcactagcaatgtctctttcgctgcggttgctgtctccttcactcacaccatcaaagcacttgagccattcttcaatgcggctgcttctcaattcattatgggacaatccatccccataacactatggttgtctctagctcctgttgttcttggtgttgcaatggcttcactaactgagctatcattcaactggctcggtttcatcagtgctatgatatcaaacatttctttcacttaccgaagcatcttctccaagaaagccatgactgatatggacagtacaaatgtctacgcttacatctccatcatcgcactcttcgtctgcattcctcctgccatcatcgttgaaggtcctaaactacttaaccatggtttcgccgacgcgattgctaaagttggaatgactaaattcatctctgatctcttctgggttggaatgttttaccatctctacaatcagctggctaccaataccttggagagggttgcaccgctgactcacgcggttggaaacgttctgaaacgtgtgttcgtgatcggtttctccatcgttatcttcggaaacaagatatcgacacagacaggtataggaacaggaatagccattgctggagttgcaatgtactctatcattaaggccaagatcgaagaagagaaacggcaaggaaagaaagcatagaaagcagctgaagacggcggtcgacagttgcataaacaagttctccgatggatatatatatatctatataataaataaccaaatgcaatagtatgttgtattgtaccatcaaccattgttttcgagtttttcctttctttgttttttttttgctttctgaaaagttatatataaattttttattctgcttcttctctttttaatggagaacattttcatttccatttcttctgatatgcaattatcttaacggataaaaggcataataatgtatttatttgctctttctcttggagcatataccc

SEQ ID NO: 106343 - protein, 410 aa, Arabidopsis thaliana
  peptide (1)..(410): Ceres Seq. ID no. 13619310
MESRVLLRATANVVGIPKLRRPIGAIHRQFSTASSSSFSVKPIGGIGEGANLISGRQLRPILLLDSSAINGGEKREILKPVKAAAAEGGDTAGDAKVGFLAKYPWLVTGFFFFMWYFLNVIFNILNKKIYNYFPYPYFVSVIHLFVGVVYCLISWSVGLPKRAPIDSNLLKVLIPVAVCHALGHVTSNVSFAAVAVSFTHTIKALEPFFNAAASQFIMGQSIPITLWLSLAPVVLGVAMASLTELSFNWLGFISAMISNISFTYRSIFSKKAMTDMDSTNVYAYISIIALFVCIPPAIIVEGPKLLNHGFADAIAKVGMTKFISDLFWVGMFYHLYNQLATNTLERVAPLTHAVGNVLKRVFVIGFSIVIFGNKISTQTGIGTGIAIAGVAMYSIIKAKIEEEKRQGKKA

SEQ ID NO: 106344 - protein, 297 aa, Arabidopsis thaliana; identical to SEQ ID NO: 23306
  peptide (1)..(297): Ceres Seq. ID no. 13619311

SEQ ID NO: 106345 - DNA, 1115 bp, Arabidopsis thaliana
  misc_feature (1)..(1115): Ceres Seq. ID no. 13619316
  misc_feature (1)..(1115): Ortholog of  Ceres SEQ ID NO 13599585 as cited in SEQ ID NO 988
  misc_feature (1)..(1115): Ortholog of  Ceres SEQ ID NO 13594624 as cited in SEQ ID NO 55765
  misc_feature (1)..(1115): Ortholog of  Ceres SEQ ID NO 15177682 as cited in SEQ ID NO 0
ttcaaaccacacattcaaactaactctgcaaaaaaaaaaaaaactcagagcagaggagatcgagagagacaaagagagagagagagagagagagagatcttaacaaaaaaatgtctatatccatggcgttattctctccgccgatctcttcctcacttcagaaccctaatctcatccccaagatctcaacctctcttctctccaccaagcgtttctctctaatctccgtccctagagcttcctccgacaatggtacgacttcccccgtcgtggagattccgaagcctgcttctgtggctgtagaggaagttccagttaaatctccagccgaaagctcctccgcttctgaaaacggcgccgttggaggtgaagcgactgattcgagtactgagacggtaatcaaatatcagaatgcgaagtgggttaatggaacttgggatctgaaacagttcgagaaagatggcaaaactgattgggattctgttatcgtttctgaggcaaagaggagaaaatggcttgaagataacccggaaacaacgagtaacgacgagcttgttgtcttcgatacttcgattattccatggtgggcatggatgaagagataccatctacctgaagctgaacttctcaatggtcgtgctgcgatgatagggttcttcatggcttactttgttgatagtcttaccggagtaggacttgttgatcaaatgggaaatttcttctgcaaaacactcttgtttgtggctgtagctggagttctcttcatccgtaagaatgaagatttagacaaacttaaggatctgttcgatgagactacgttatatgacaaacaatggcaagctgcatggaaagagccagattcatcaacagtttcttcaaagaagtgaacaagttcttacaatctttcattttcctttttttgttatgcaataatctgtgaatcagtgaaagtttatctctactgaactactgatcttcagattttgtaatctttctgctttaaaaatctctatgaagtagtctcaaagataatgtatcgaaggtctttgacttgtaaagcagacctatttcgttttgacgcttgataatttaatcaataagagattttatttttt

SEQ ID NO: 106346 - protein, 258 aa, Arabidopsis thaliana; identical to SEQ ID NO: 71157
  peptide (1)..(258): Ceres Seq. ID no. 13619317

SEQ ID NO: 106347 - protein, 254 aa, Arabidopsis thaliana; identical to SEQ ID NO: 71158
  peptide (1)..(254): Ceres Seq. ID no. 13619318

SEQ ID NO: 106348 - DNA, 864 bp, Arabidopsis thaliana
  misc_feature (1)..(864): Ceres Seq. ID no. 13619319
  misc_feature (1)..(864): Ortholog of  Ceres SEQ ID NO 13594809 as cited in SEQ ID NO 51847
  misc_feature (1)..(864): Ortholog of  Ceres SEQ ID NO 14309033 as cited in SEQ ID NO 0
caggcatctagtatggctttctgcactaaacttggcggtcactggaaacaaggggtaaatgttccagtgtcatcaatgctcggttctcttcgctacatgtccacaaaactttatattggtggcctgtcccctggaactgacgagcactccttgaaggacgctttctctagcttcaatggagtgacagaggcaagagtcatgacaaacaaagtgaccgggaggtctagaggttatggatttgttaacttcataagcgaggattctgccaactctgctatttcagcaatgaatggacaggagctgaatgggtttaacataagtgtgaacgttgcaaaagattggccaagtttgccattgtctttggatgagagtatagaagaagctgagaagaaagaaaataagatgatgagccgatctgtatggaaagatccattcgttgatgcgttcctgatgaagaagaagaatgcagctctgaacaggaaaatatggtcaaggagatcgacgattcttcccgagtatgttgattcggcggtgagaatctacaacggcaaaactcatgtgcgttgtaagatcacagaggggaaagttgggcataaattcggagagtttgcgtttacaagaaaagtgaagaagcatgctaaagcaaagtagcatctttgagaatgaattggtcagctgcttgaaaggattgtgttgaaaagccaaaaacgaatcaaatcaataaattctcaataggtaaaactcattagctcacatgatcatgtagacgaatattgagctttagaaagtctttagttttcttgtcgatttcgtatttttggaccacaaaagtgccaatgttattttggaattcgattaacaaat

SEQ ID NO: 106349 - protein, 216 aa, Arabidopsis thaliana
  peptide (1)..(216): Ceres Seq. ID no. 13619320
QASSMAFCTKLGGHWKQGVNVPVSSMLGSLRYMSTKLYIGGLSPGTDEHSLKDAFSSFNGVTEARVMTNKVTGRSRGYGFVNFISEDSANSAISAMNGQELNGFNISVNVAKDWPSLPLSLDESIEEAEKKENKMMSRSVWKDPFVDAFLMKKKNAALNRKIWSRRSTILPEYVDSAVRIYNGKTHVRCKITEGKVGHKFGEFAFTRKVKKHAKAK

SEQ ID NO: 106350 - protein, 212 aa, Arabidopsis thaliana; identical to SEQ ID NO: 25892
  peptide (1)..(212): Ceres Seq. ID no. 13619321

SEQ ID NO: 106351 - protein, 191 aa, Arabidopsis thaliana; identical to SEQ ID NO: 25893
  peptide (1)..(191): Ceres Seq. ID no. 13619322

SEQ ID NO: 106352 - DNA, 893 bp, Arabidopsis thaliana
  misc_feature (1)..(893): Ceres Seq. ID no. 13619331
  misc_feature (1)..(893): Ortholog of  Ceres SEQ ID NO 15178884 as cited in SEQ ID NO 0
agtcacacacacaaagaaaaacaaaagaacaaagatgggaatcattggtaagagtgtttctctaactctctttgcacttttgtgcttcacttcctctgttttcaccttaggagtgaatcaacctggttcatcagatcccttccatagccttccccaacaccttcccctacctccaatcaaactaccaactcttccaccggccaaagctcccatcaaactaccagcctacccaccagccaaagctccgatcaagctaccaactctcccaccagccaaagctccgattaagttaccaactctcccaccgatcaaacctcctgttctcccaccagtttaccctcctaagtacaacaagaccctagtggcagttagaggtgtggtctactgcaaagcttgcaagtacgcgggcgtcaacaacgtccaaggcgctaaacccgttaaagatgcggtggtgagacttgtgtgcaagaacaagaagaactcaatatcggagacaaagacggacaagaacggatacttcatgctcctggcccctaagacggtgaccaactacgatatcaaaggttgtcgagctttcctcgtgaagtctccagacaccaagtgcagcaaagtgtcgtcactccacgatggaggcaagggctccgttctaaagccggtcttgaaaccaggattttcctcgaccatcatgagatggttcaagtacagtgtgtacaacgttggtccattcgcattcgaacctacctgccccaaatgagatggtgttataagagctacttaaacttttattaatcaatgattgtgttgaatatgtatcagcttggtttctttgtatgggcttttctggtagtgttaatctttctaatttgcttcttaaataaaaagtggtgacgttt

SEQ ID NO: 106353 - protein, 250 aa, Arabidopsis thaliana
  peptide (1)..(250): Ceres Seq. ID no. 13619332
VTHTKKNKRTKMGIIGKSVSLTLFALLCFTSSVFTLGVNQPGSSDPFHSLPQHLPLPPIKLPTLPPAKAPIKLPAYPPAKAPIKLPTLPPAKAPIKLPTLPPIKPPVLPPVYPPKYNKTLVAVRGVVYCKACKYAGVNNVQGAKPVKDAVVRLVCKNKKNSISETKTDKNGYFMLLAPKTVTNYDIKGCRAFLVKSPDTKCSKVSSLHDGGKGSVLKPVLKPGFSSTIMRWFKYSVYNVGPFAFEPTCPK

SEQ ID NO: 106354 - protein, 239 aa, Arabidopsis thaliana
  peptide (1)..(239): Ceres Seq. ID no. 13619333
MGIIGKSVSLTLFALLCFTSSVFTLGVNQPGSSDPFHSLPQHLPLPPIKLPTLPPAKAPIKLPAYPPAKAPIKLPTLPPAKAPIKLPTLPPIKPPVLPPVYPPKYNKTLVAVRGVVYCKACKYAGVNNVQGAKPVKDAVVRLVCKNKKNSISETKTDKNGYFMLLAPKTVTNYDIKGCRAFLVKSPDTKCSKVSSLHDGGKGSVLKPVLKPGFSSTIMRWFKYSVYNVGPFAFEPTCPK

SEQ ID NO: 106355 - DNA, 997 bp, Arabidopsis thaliana
  misc_feature (1)..(997): Ceres Seq. ID no. 13619357
  misc_feature (1)..(997): Ortholog of  Ceres SEQ ID NO 15176294 as cited in SEQ ID NO 60388
atgtctgcagcattgagctcgtctctctacatttccccaaagaaaccttcatgtccacaacaatctcaatccacattcttatccacgaaaccaaccaccatcaaaaccaatctccatagccatcctctcttcactgtagctgatcagacagtaaccctccagatgaaagagaagatcctctgtctcgagctaatgggaattgactcaggaaaagccctttctctcaacccatgtctctgctcagccccccttgactccatccaatccgtcctccatttccttcaatcaaaaggaatctacccaaatgacctcccaagaatcttggggatgtgtcctaagatcctcacttccgacgtcagaacagaactgtaccctgttttcatgttcctgtcgaatgatctccatgtccctgagaatgcgttcagaagagtgatcaagaaatgtccaaggctccttattagcagtgtagaagaccagctcaaacctgctctcttctacttgcagagacttggtctcaaggatcttgaagctcttgcttaccaagatcctatcttgttggtgtctagtgttgaacacactctcatcccaaagcttagattcttggagagtatagggttctcaagaccagaagcgattggaatgatcctaagatgtccagcattattcacattcagcatagagaacaacttcaaaccaaaactggattacttcatgagtgagatcaaaggaaaactagagaatctaaaggagtttccacagtattttgccttcagtctagagaaaaggataaagccaagacacttagaatcaatggagagaggattagagttgccactgtcattgatgcttaagagcactgatgaagagttcgagcagttgctcacaaacccctcttcagtggcaaacgtgtaacatttattgtatagtggtgaatgttattgattgtgttcatagctttgttgtgtacttgtgtaaaaaataaaaaatcaatttggcg

SEQ ID NO: 106356 - protein, 303 aa, Arabidopsis thaliana
  peptide (1)..(303): Ceres Seq. ID no. 13619358
MSAALSSSLYISPKKPSCPQQSQSTFLSTKPTTIKTNLHSHPLFTVADQTVTLQMKEKILCLELMGIDSGKALSLNPCLCSAPLDSIQSVLHFLQSKGIYPNDLPRILGMCPKILTSDVRTELYPVFMFLSNDLHVPENAFRRVIKKCPRLLISSVEDQLKPALFYLQRLGLKDLEALAYQDPILLVSSVEHTLIPKLRFLESIGFSRPEAIGMILRCPALFTFSIENNFKPKLDYFMSEIKGKLENLKEFPQYFAFSLEKRIKPRHLESMERGLELPLSLMLKSTDEEFEQLLTNPSSVANV

SEQ ID NO: 106357 - protein, 249 aa, Arabidopsis thaliana
  peptide (1)..(249): Ceres Seq. ID no. 13619359
MKEKILCLELMGIDSGKALSLNPCLCSAPLDSIQSVLHFLQSKGIYPNDLPRILGMCPKILTSDVRTELYPVFMFLSNDLHVPENAFRRVIKKCPRLLISSVEDQLKPALFYLQRLGLKDLEALAYQDPILLVSSVEHTLIPKLRFLESIGFSRPEAIGMILRCPALFTFSIENNFKPKLDYFMSEIKGKLENLKEFPQYFAFSLEKRIKPRHLESMERGLELPLSLMLKSTDEEFEQLLTNPSSVANV

SEQ ID NO: 106358 - protein, 239 aa, Arabidopsis thaliana
  peptide (1)..(239): Ceres Seq. ID no. 13619360
MGIDSGKALSLNPCLCSAPLDSIQSVLHFLQSKGIYPNDLPRILGMCPKILTSDVRTELYPVFMFLSNDLHVPENAFRRVIKKCPRLLISSVEDQLKPALFYLQRLGLKDLEALAYQDPILLVSSVEHTLIPKLRFLESIGFSRPEAIGMILRCPALFTFSIENNFKPKLDYFMSEIKGKLENLKEFPQYFAFSLEKRIKPRHLESMERGLELPLSLMLKSTDEEFEQLLTNPSSVANV

SEQ ID NO: 106359 - DNA, 1125 bp, Arabidopsis thaliana
  misc_feature (1)..(1125): Ceres Seq. ID no. 13619361
  misc_feature (1)..(1125): Ortholog of  Ceres SEQ ID NO 13597376 as cited in SEQ ID NO 64002
  misc_feature (1)..(1125): Ortholog of  Ceres SEQ ID NO 13503573 as cited in SEQ ID NO 65402
  misc_feature (1)..(1125): Ortholog of  Ceres SEQ ID NO 13659615 as cited in SEQ ID NO 67248
tcgattggccaaatcggccctcgagggaacctcggtgcagtcaagatcttgcaacaactgtttccggaacctggaaagcttcaattcatttatgctgatcttggagatgcaaatgctgttaacaaaatattttctgaaaacgcatttgacgctgtgatgcattttgctgctgttgcttatgttggagaaagcacacagtttcctctcaatattatcacaatatcacatcgaacacattggtagttttagagacaatggctgctcatggtgtgaagactttgatatattcaagcacatgtgctacttatggagagcctgagaaaatgccaataacagaggaaactccacaggttccaatcaatccatatggaaaggctaaaaagatggcagaagatatcatcttggatttctccaagaattctattatggcagttatgatcctaagatatttcaatgtgattgggtctgatcctgagggtagactaggtgaagctccaagacctgaactcagtgagcatggacggatctctggtgcttgctttgatgctgcacgaggcatcattcccgggctgcagattaaaggaacagactacaagactgttgatgggacttgtgtacgtgattacattgatgtcaccgacttggttgatgctcatgttaaagctcttgaaaaggcgaaaccccgcaaagttggtatcttcaatgttggtaccgggaaaggtagctcggtgaaggagtttgtggaagcgtgcaaaaaggcgaccggcgttgatataaaagtcgattacttggaaagacgggcaggagattacgcagaggtttacagcgatccaagaaaaatcaaagaagagctgaattggacagctaagcacaccaatcttcaagaaagtttaaagatggcatggagatggcaaaagcttcatcgcagtggctatggatcttcttccttggtttctgcatactgaccattatgcattaggtatgtgagcattgcccttcaaggactccttcattagagtcttgattctagatggtagtgaaggtagtagaagaagatggatttattcttagtagaatagtattcatcttatccatatatagagattatatatgagattattgatt

SEQ ID NO: 106360 - protein, 236 aa, Arabidopsis thaliana
  peptide (1)..(236): Ceres Seq. ID no. 13619362
MAAHGVKTLIYSSTCATYGEPEKMPITEETPQVPINPYGKAKKMAEDIILDFSKNSIMAVMILRYFNVIGSDPEGRLGEAPRPELSEHGRISGACFDAARGIIPGLQIKGTDYKTVDGTCVRDYIDVTDLVDAHVKALEKAKPRKVGIFNVGTGKGSSVKEFVEACKKATGVDIKVDYLERRAGDYAEVYSDPRKIKEELNWTAKHTNLQESLKMAWRWQKLHRSGYGSSSLVSAY

SEQ ID NO: 106361 - protein, 213 aa, Arabidopsis thaliana
  peptide (1)..(213): Ceres Seq. ID no. 13619363
MPITEETPQVPINPYGKAKKMAEDIILDFSKNSIMAVMILRYFNVIGSDPEGRLGEAPRPELSEHGRISGACFDAARGIIPGLQIKGTDYKTVDGTCVRDYIDVTDLVDAHVKALEKAKPRKVGIFNVGTGKGSSVKEFVEACKKATGVDIKVDYLERRAGDYAEVYSDPRKIKEELNWTAKHTNLQESLKMAWRWQKLHRSGYGSSSLVSAY

SEQ ID NO: 106362 - protein, 193 aa, Arabidopsis thaliana
  peptide (1)..(193): Ceres Seq. ID no. 13619364
MAEDIILDFSKNSIMAVMILRYFNVIGSDPEGRLGEAPRPELSEHGRISGACFDAARGIIPGLQIKGTDYKTVDGTCVRDYIDVTDLVDAHVKALEKAKPRKVGIFNVGTGKGSSVKEFVEACKKATGVDIKVDYLERRAGDYAEVYSDPRKIKEELNWTAKHTNLQESLKMAWRWQKLHRSGYGSSSLVSAY

SEQ ID NO: 106363 - DNA, 1080 bp, Arabidopsis thaliana
  misc_feature (1)..(1080): Ceres Seq. ID no. 13619374
  misc_feature (1)..(1080): Ortholog of  Ceres SEQ ID NO 13596474 as cited in SEQ ID NO 62169
  misc_feature (1)..(1080): Ortholog of  Ceres SEQ ID NO 13598714 as cited in SEQ ID NO 62656
  misc_feature (1)..(1080): Ortholog of  Ceres SEQ ID NO 13596969 as cited in SEQ ID NO 63375
  misc_feature (1)..(1080): Ortholog of  Ceres SEQ ID NO 13597519 as cited in SEQ ID NO 64759
  misc_feature (1)..(1080): Ortholog of  Ceres SEQ ID NO 13597870 as cited in SEQ ID NO 64982
  misc_feature (1)..(1080): Ortholog of  Ceres SEQ ID NO 13587054 as cited in SEQ ID NO 0
gagatgaacagaaacacatgacataactttccaaatggagatcaagcagaagaaagtatggctttctttaattgtgctttatgcaattacgacatcagttttgggggactttggagaaccattactgaagggtttctacaaagagagttgcccattggcagaggaaatcgtgaagcataacatcgaagttgctgttctcaaagatcctcgtatggcggcttctcttcttcgtcttcagttccacgattgcttcgtcttgggttgtgatgcgtctgtgctcttggacacacatggagatatgttgagtgagaaacaagcaactccaaatctgaactctttacgtggatttgaagtaatcgattacattaagtacctcctcgaagaagcttgtcctctaactgtctcatgttccgatatccttgccttggccgctcgtgactcagtcttcctgagaggtggcccatggtgggaagttttgctagggagaagagactcattaaaggcaagtttcgccggagcaaaccaattcattccagcaccaaactcctctctcgacagcctcatcatcaatttcaagcaacaagggctcaacattcaagatctcatcgctctttcgggtgctcatacaataggtaaagcgagatgcgtgagcttcaagcaacgcattgttcaaccaaacatggaacaaacgttctacgtcgatgagttcagaagacacagcacgttccgtcgagtcctagggtcacaatgcaaagattcaagccgagacaacgaactgtctccactggatattaagacaccagcttacttcgataaccattatttcatcaatctgttagaagggagagggttgttgatttcggataacgttctggtctcagaagatcatgaaggagagatctttcagaaagtttgggaatatgcagttaatcaagatcttttcttcatagattttgtggaatctatgttaaaaatgggtaatattaatgttcttacaggtattgaaggtgaaattagggagaattgtagatttgtcaatatctgaaatcaaacatcaatcaatacaaattgtttgcactt

SEQ ID NO: 106364 - protein, 336 aa, Arabidopsis thaliana
  peptide (1)..(336): Ceres Seq. ID no. 13619375
MEIKQKKVWLSLIVLYAITTSVLGDFGEPLLKGFYKESCPLAEEIVKHNIEVAVLKDPRMAASLLRLQFHDCFVLGCDASVLLDTHGDMLSEKQATPNLNSLRGFEVIDYIKYLLEEACPLTVSCSDILALAARDSVFLRGGPWWEVLLGRRDSLKASFAGANQFIPAPNSSLDSLIINFKQQGLNIQDLIALSGAHTIGKARCVSFKQRIVQPNMEQTFYVDEFRRHSTFRRVLGSQCKDSSRDNELSPLDIKTPAYFDNHYFINLLEGRGLLISDNVLVSEDHEGEIFQKVWEYAVNQDLFFIDFVESMLKMGNINVLTGIEGEIRENCRFVNI

SEQ ID NO: 106365 - protein, 277 aa, Arabidopsis thaliana
  peptide (1)..(277): Ceres Seq. ID no. 13619376
MAASLLRLQFHDCFVLGCDASVLLDTHGDMLSEKQATPNLNSLRGFEVIDYIKYLLEEACPLTVSCSDILALAARDSVFLRGGPWWEVLLGRRDSLKASFAGANQFIPAPNSSLDSLIINFKQQGLNIQDLIALSGAHTIGKARCVSFKQRIVQPNMEQTFYVDEFRRHSTFRRVLGSQCKDSSRDNELSPLDIKTPAYFDNHYFINLLEGRGLLISDNVLVSEDHEGEIFQKVWEYAVNQDLFFIDFVESMLKMGNINVLTGIEGEIRENCRFVNI

SEQ ID NO: 106366 - protein, 248 aa, Arabidopsis thaliana
  peptide (1)..(248): Ceres Seq. ID no. 13619377
MLSEKQATPNLNSLRGFEVIDYIKYLLEEACPLTVSCSDILALAARDSVFLRGGPWWEVLLGRRDSLKASFAGANQFIPAPNSSLDSLIINFKQQGLNIQDLIALSGAHTIGKARCVSFKQRIVQPNMEQTFYVDEFRRHSTFRRVLGSQCKDSSRDNELSPLDIKTPAYFDNHYFINLLEGRGLLISDNVLVSEDHEGEIFQKVWEYAVNQDLFFIDFVESMLKMGNINVLTGIEGEIRENCRFVNI

SEQ ID NO: 106367 - DNA, 2322 bp, Arabidopsis thaliana
  misc_feature (1)..(2322): Ceres Seq. ID no. 13619382
  misc_feature (1)..(2322): Ortholog of  Ceres SEQ ID NO 14307682 as cited in SEQ ID NO 54529
aataaataaagagtttagtcattttatcgtaaaaccaaaagaaagagaaaaagattaatcatcatcaatctaaagatttaggaatctacaatttcccagtagacagatttcacttttgcgtcttcttcttattccatttgatctaagtttctcgaaataggtacaaagttcgagtctttttcttgtaaccgcgtgaaaccaccaagaaacctatagtaagagtttccgcaaatgtgaattaaagacagctcatcactctgtcaaacttctacagtattaagttaacgaagcaggtacagccaaactaaaataacgcggagttatgggaatcatcgacggttctttgcttcggcggttgatttgtctctgtctctggtgtcttctcggtggaggagtgacggtggttacggcggaggatgagaagaaagtggtacataaacagcttaatcaaactccgacttgggctgttgctgctgtttgtactttcttcatcgttgtttctgttcttcttgaaaaacttcttcacaaagttggaaaggttctatgggatcggcacaagacagctcttcttgacgctttggagaagatcaaagcagagctgatggttcttggattcatctctttgcttctgacatttggacaaacctacattttggatatttgtatcccttcacatgttgctcgtacgatgctcccgtgtcctgctcctaacttgaaaaaggaggatgatgacaatggtgaaagtcacaggagactcttgtcgtttgagcacagatttttatctggaggtgaagcatctcccactaaatgcacgaaggagggttatgtagagcttatctctgccgaggcactccatcagttgcacatccttatattcttcttagccattttccacgttctttacagcttcttaactatgatgcttggaaggttgaagattcgcggatggaagcattgggagaatgagacatcatcccataattacgagttttcaacagacacttccagattcaggctaactcatgaaacatcttttgtgagagcgcacaccagtttctggacccggattccattctttttctatgttggatgctttttcagacagtttttcagatccgttgggagaactgactatttgacattgagaaatggtttcatcgctgttcatttagctccaggaagtcaatttaacttccaaaaatacattaaaagatcgttggaggatgatttcaaggtagtcgttggagtcagccctgtcttgtggggatcttttgtgctattcctcctcctaaatattgacggcttcaagatgatgttcatcggcactgcaataccggttattatcattttagctgtagggacaaagcttcaagcgattatgacaaggatggctcttggtatcacagatagacatgcggtagttcaaggaatgccgcttgtacaaggcaacgatgagtatttctggttcggtcgtccccatttgattctccatctcatgcatttcgccttgtttcagaacgcatttcagatcacttatttcttctggatatggtattcctttggatcagattcttgctaccatcctaatttcaagattgcacttgtaaaagtagcgattgctttaggagtattgtgtctttgcagctacatcacacttcctctttacgcactcgtaactcagatgggttctcggatgaaaaaatcggtattcgatgaacaaacgtcaaaagcactcaagaaatggagaatggcagtgaagaagaagaaaggtgtgaaagccactactaagagactaggtggagatggaagtgcgagccctacggcatcgacagttaggtctacttcgtctgtacgttcattgcagcgttacaaaaccacaccacattcgatgagatacgaaggacttgaccctgaaacatcggatctcgacacagataatgaagctttgactcctcccaaatctcctccaagcttcgagcttgttgtgaaagttgaaccaaataagaccaataccggtgagactagccgtgacactgaaactgattctaaagagttctctttcgtcaagcctgctccgagtaatgaatcatctcaagaccggtgagactagtcaggattgtgaaggtgtagcctgcgccaagtaaagacttcttttcgagttaagcctgcgccaagtaaagaaccatcgtagtaaagatgtgtcactccagagtttttttttttttggtttcatttatctaatgctattgtaaatcaatgccgtggcgataaagtaatgtattgatgaccatattaattaaaataggctgaagaaaatgaggg

SEQ ID NO: 106368 - protein, 593 aa, Arabidopsis thaliana
  peptide (1)..(593): Ceres Seq. ID no. 13619383
MGIIDGSLLRRLICLCLWCLLGGGVTVVTAEDEKKVVHKQLNQTPTWAVAAVCTFFIVVSVLLEKLLHKVGKVLWDRHKTALLDALEKIKAELMVLGFISLLLTFGQTYILDICIPSHVARTMLPCPAPNLKKEDDDNGESHRRLLSFEHRFLSGGEASPTKCTKEGYVELISAEALHQLHILIFFLAIFHVLYSFLTMMLGRLKIRGWKHWENETSSHNYEFSTDTSRFRLTHETSFVRAHTSFWTRIPFFFYVGCFFRQFFRSVGRTDYLTLRNGFIAVHLAPGSQFNFQKYIKRSLEDDFKVVVGVSPVLWGSFVLFLLLNIDGFKMMFIGTAIPVIIILAVGTKLQAIMTRMALGITDRHAVVQGMPLVQGNDEYFWFGRPHLILHLMHFALFQNAFQITYFFWIWYSFGSDSCYHPNFKIALVKVAIALGVLCLCSYITLPLYALVTQMGSRMKKSVFDEQTSKALKKWRMAVKKKKGVKATTKRLGGDGSASPTASTVRSTSSVRSLQRYKTTPHSMRYEGLDPETSDLDTDNEALTPPKSPPSFELVVKVEPNKTNTGETSRDTETDSKEFSFVKPAPSNESSQDR

SEQ ID NO: 106369 - protein, 500 aa, Arabidopsis thaliana
  peptide (1)..(500): Ceres Seq. ID no. 13619384
MVLGFISLLLTFGQTYILDICIPSHVARTMLPCPAPNLKKEDDDNGESHRRLLSFEHRFLSGGEASPTKCTKEGYVELISAEALHQLHILIFFLAIFHVLYSFLTMMLGRLKIRGWKHWENETSSHNYEFSTDTSRFRLTHETSFVRAHTSFWTRIPFFFYVGCFFRQFFRSVGRTDYLTLRNGFIAVHLAPGSQFNFQKYIKRSLEDDFKVVVGVSPVLWGSFVLFLLLNIDGFKMMFIGTAIPVIIILAVGTKLQAIMTRMALGITDRHAVVQGMPLVQGNDEYFWFGRPHLILHLMHFALFQNAFQITYFFWIWYSFGSDSCYHPNFKIALVKVAIALGVLCLCSYITLPLYALVTQMGSRMKKSVFDEQTSKALKKWRMAVKKKKGVKATTKRLGGDGSASPTASTVRSTSSVRSLQRYKTTPHSMRYEGLDPETSDLDTDNEALTPPKSPPSFELVVKVEPNKTNTGETSRDTETDSKEFSFVKPAPSNESSQDR

SEQ ID NO: 106370 - protein, 471 aa, Arabidopsis thaliana
  peptide (1)..(471): Ceres Seq. ID no. 13619385
MLPCPAPNLKKEDDDNGESHRRLLSFEHRFLSGGEASPTKCTKEGYVELISAEALHQLHILIFFLAIFHVLYSFLTMMLGRLKIRGWKHWENETSSHNYEFSTDTSRFRLTHETSFVRAHTSFWTRIPFFFYVGCFFRQFFRSVGRTDYLTLRNGFIAVHLAPGSQFNFQKYIKRSLEDDFKVVVGVSPVLWGSFVLFLLLNIDGFKMMFIGTAIPVIIILAVGTKLQAIMTRMALGITDRHAVVQGMPLVQGNDEYFWFGRPHLILHLMHFALFQNAFQITYFFWIWYSFGSDSCYHPNFKIALVKVAIALGVLCLCSYITLPLYALVTQMGSRMKKSVFDEQTSKALKKWRMAVKKKKGVKATTKRLGGDGSASPTASTVRSTSSVRSLQRYKTTPHSMRYEGLDPETSDLDTDNEALTPPKSPPSFELVVKVEPNKTNTGETSRDTETDSKEFSFVKPAPSNESSQDR

SEQ ID NO: 106371 - DNA, 997 bp, Arabidopsis thaliana
  misc_feature (1)..(997): Ceres Seq. ID no. 13619398
  misc_feature (1)..(997): Ortholog of  Ceres SEQ ID NO 15172948 as cited in SEQ ID NO 51777
  misc_feature (1)..(997): Ortholog of  Ceres SEQ ID NO 12784416 as cited in SEQ ID NO 61324
aaaactctactgtaactgcaaaatcttgttgttttcttaaacgaagagagaagaaagaaagaaaaaaacgttacggattctctgcttcggtttcgcgattgaagcttgagatttcatcttgaacatccgatatggctgaaatcaaggatgaaggaagcgccaagggctatgctttccctctcaggaaccctaatgttacgctgaatgagagaaactttgcagccttcactcacagatcagctgctgctcatccttggcatgacttggagattggtccagaagctcctactgttttcaactgtgttgttgaaattagcaaaggtggaaaggttaagtacgagctagacaagaacagtggccttattaaggttgatcgcgttctctactcatccattgtgtacccccacaactacggtttcatccctcgaactatctgtgaagacagtgatccaatggatgtcctggtactgatgcaggagcctgtgctaaccggatcattcctccgtgcccgtgctattggtctaatgcccatgattgatcagggtgagaaagacgacaagatcattgcagtatgtgctgatgatcccgagttccgtcactacagagacatcaaagagcttccccctcaccgtctagctgaaatccgtcgcttctttgaggactacaagaagaacgagaacaagaaagtcgacgttgaagctttccttcccgctcaagctgccatagacgctatcaaggactccatggatctttacgcagcttacatcaaagctggcctgcaacgctaatgaagaaaccagtccttttccgttcctcccggtttgcttagacatcactgaagccgccttctatactacatgcatgttagataaaatttcaattggtgcatttaatttcgtaatgctcatcagaaaacattgttgaacttaaagctttctgatgatgatgaaaaatttccagtacaatcataaaatttgaaatattagcttttcttttc

SEQ ID NO: 106372 - protein, 218 aa, Arabidopsis thaliana; identical to SEQ ID NO: 27971
  peptide (1)..(218): Ceres Seq. ID no. 13619399

SEQ ID NO: 106373 - protein, 111 aa, Arabidopsis thaliana; identical to SEQ ID NO: 27972
  peptide (1)..(111): Ceres Seq. ID no. 13619400

SEQ ID NO: 106374 - DNA, 1673 bp, Arabidopsis thaliana
  misc_feature (1)..(1673): Ceres Seq. ID no. 13619401
  misc_feature (1)..(1673): Ortholog of  Ceres SEQ ID NO 15169199 as cited in SEQ ID NO 55297
  misc_feature (1)..(1673): Ortholog of  Ceres SEQ ID NO 15175690 as cited in SEQ ID NO 55466
  misc_feature (1)..(1673): Ortholog of  Ceres SEQ ID NO 15171197 as cited in SEQ ID NO 56892
aaatttgtaacaagagagagaggttcaggttcgttttggtggtgaccactcctttattcacctacggtgagatcggcggcggagtctagacgacggcgataacgccggtgaccgacggaatcatgttaagatagtcactggcgaattcgttcttcttccccggagacgacaagcatcgaagaatctgtttagagacagctatgcttgtctctgtttctgcgttttctctttccgatcttgtctctcggatccggtgaagaagctgccgccgatcacatcttccagtttccagagattctaaagcttttgtcttttgatccttcatcgaattcattgagctatcggggagttttgtggtatgctgaaaagagatgtctttgaaaagcatccttcgtgatctgaaggaagtgagggatggacttggaggcatctccaagagaagctggtcaaagtcgtctcacattgctcctgatcaaacaactccaccactggataacataccacagagcccatgggcttctttgccgcctgagttgcttcatgacattatctggagggttgaagagagtgagacagcttggcccgctcgagctgccgttgtctcttgtgcttcagtatgtaaatcatggagaggaatcactatggagattgtgaggatccctgagcagtgtgggaagctcacttttccaatctcattgaaacagccggggcctcgagactctccaattcaatgttttattaagaggaacagagcaacagctacatacattctctattatggtttgatgccttcggagactgagaacgacaaactgttgttagcagcaagaaggattagaagagcgacatgcacagactttataatctccctatctgcaaagaacttctcacggagcagcagtacttatgttggcaaattaaggtctggttttctgggaaccaagttcacaatatatgacaaccaaacagcatcatccacagcacaagcccaacctaaccgaagactccacccgaaacaagcggctcctaaactacctacgaatagctctaccgtaggaaacataacctacgagctcaatgttcttcgcacaaggggacctagaagaatgcactgcgctatggattctatacccctctcttctgttattgctgaaccgtcagtagttcaaggcatagaagaggaagtctcttcctctccttcaccaaaaggagaaaccatcacaacagacaaagagattcctgataattctccaagcttaagggaccaaccgctagttctcaaaaacaaatccccaagatggcatgagcagttgcagtgctggtgcctcaacttcaagggaagagtgactgtggcttcagttaagaatttccagcttgttgcagagattgacgcttctttggatgcgccgcctgaagaacatgagagggtgatcttacagtttggcaaaatcggtaaggatattttcaccatggattatcgctaccctctatctgcttttcaagcctttgctatatgcattagcagctttgacaccaaaccggcatgtgaagggtaaactttaacccaccgagttaaatccatctctgcaaatcatcatagaaggcttttcttatctttaggtttcaatgtatcaatccacgaaaagctctttgtatgtagattgttgtagccc

SEQ ID NO: 106375 - protein, 394 aa, Arabidopsis thaliana
  peptide (1)..(394): Ceres Seq. ID no. 13619402
MSLKSILRDLKEVRDGLGGISKRSWSKSSHIAPDQTTPPLDNIPQSPWASLPPELLHDIIWRVEESETAWPARAAVVSCASVCKSWRGITMEIVRIPEQCGKLTFPISLKQPGPRDSPIQCFIKRNRATATYILYYGLMPSETENDKLLLAARRIRRATCTDFIISLSAKNFSRSSSTYVGKLRSGFLGTKFTIYDNQTASSTAQAQPNRRLHPKQAAPKLPTNSSTVGNITYELNVLRTRGPRRMHCAMDSIPLSSVIAEPSVVQGIEEEVSSSPSPKGETITTDKEIPDNSPSLRDQPLVLKNKSPRWHEQLQCWCLNFKGRVTVASVKNFQLVAEIDASLDAPPEEHERVILQFGKIGKDIFTMDYRYPLSAFQAFAICISSFDTKPACEG

SEQ ID NO: 106376 - protein, 304 aa, Arabidopsis thaliana
  peptide (1)..(304): Ceres Seq. ID no. 13619403
MEIVRIPEQCGKLTFPISLKQPGPRDSPIQCFIKRNRATATYILYYGLMPSETENDKLLLAARRIRRATCTDFIISLSAKNFSRSSSTYVGKLRSGFLGTKFTIYDNQTASSTAQAQPNRRLHPKQAAPKLPTNSSTVGNITYELNVLRTRGPRRMHCAMDSIPLSSVIAEPSVVQGIEEEVSSSPSPKGETITTDKEIPDNSPSLRDQPLVLKNKSPRWHEQLQCWCLNFKGRVTVASVKNFQLVAEIDASLDAPPEEHERVILQFGKIGKDIFTMDYRYPLSAFQAFAICISSFDTKPACEG

SEQ ID NO: 106377 - protein, 256 aa, Arabidopsis thaliana
  peptide (1)..(256): Ceres Seq. ID no. 13619404
MPSETENDKLLLAARRIRRATCTDFIISLSAKNFSRSSSTYVGKLRSGFLGTKFTIYDNQTASSTAQAQPNRRLHPKQAAPKLPTNSSTVGNITYELNVLRTRGPRRMHCAMDSIPLSSVIAEPSVVQGIEEEVSSSPSPKGETITTDKEIPDNSPSLRDQPLVLKNKSPRWHEQLQCWCLNFKGRVTVASVKNFQLVAEIDASLDAPPEEHERVILQFGKIGKDIFTMDYRYPLSAFQAFAICISSFDTKPACEG

SEQ ID NO: 106378 - DNA, 2020 bp, Arabidopsis thaliana
  misc_feature (1)..(2020): Ceres Seq. ID no. 13619405
  misc_feature (1)..(2020): Ortholog of  Ceres SEQ ID NO 14302243 as cited in SEQ ID NO 64663
gagatgtggcggtgccttcgagttgcgtcgtcgtcgaggagatcggaatctaatggcgctttcatcacttctcaactctccagattcttctcagctcctccttcggcaggggataaatcatcgtatacgatcgtagatcatacatatgatgcggttgttgtaggagctggtggtgctgggctaagagcagcaataggattatcagagcatggttttaacacggcttgtatcactaagctttttccaactcgttcccatactgttgcagctcagggaggtataaatgctgcgttgggtaatatgagtgtagatgactggagatggcatatgtatgatactgtcaaaggaagtgattggttaggtgatcaagatgcaattcagtatatgtgcagggaagcaccaaaagctgtgatagagcttgagaattacggattgccattttctagaacagaagatggaaaaatatatcaacgagctttcggtggccagagtctcgagtttggaataggtggtcaagcatatcgttgcgcatgtgctgctgaccgcactgggcatgctctgttacatactctgtatggccaagcaatgaaacacaacactcaattctttgttgaatactttgccttggatttgataatgaacagtgatggaacctgtcaaggagtcattgcactgaacatggaagatggaactttacatcgtttccatgcgggttccacgatattggctaccgggggctatggaagagcttatttctctgcaacttcagcacatacatgcacaggagatggaaatgctatggttgcacgagccgggctaccgcttcaagatttggagtttgttcagtttcatcctactggtatatatggagctggatgtctcatcactgaaggagctagaggtgaaggaggaattctcagaaacagtgaaggtgagaaattcatggatcgatatgctcccacggctagagatctggcttcaagagatgttgtttcaagatcaatgactatggaaatccgacaaggacgtggtgcaggaccaatgaaggattatctatacctttacttaaaccatctaccaccagaagtgcttaaagagaggctacccggtatatctgagaccgcagctatattcgctggtgtcgatgttacaagagagccaattcctgtattgcctactgtgcattataatatgggtggtattcccacaaactaccatggagaggtgattactcttagaggtgatgatccagatgctgtagttcctggactaatggctgcaggagaagcagcttgcgcatcggttcatggcgctaatagacttggtgcaaattcacttcttgacattgttgtttttggaagagcttgtgcaaacagagttgcagagattcaaaaacctggtgagaaactgaaacctctagagaaggatgcgggtgagaagagtatcgaatggttggaccgaataagaaactcaaacgggtcacttccaacttctaaaatccgcttaaacatgcaaagagtaatgcaaaacaatgctgctgttttccgtacacaagaaacactagaggaaggttgtgatttgattgataagacgtgggacagttttggtgatgtcaaagtgactgatcggagtatgatatggaactcggatttgatagaaactatggagctagagaatcttttggttaatgcatgcataacaatgcattctgctgaggctaggaaggagagtcgaggagcacatgctcgtgaggatttcacgaaacgggacgatgcaaattggatgaagcacacattggggtattgggaagaagggaatgtgaaattggagtatagaccagtccacatgaagaccttggatgatgaggttgacacttttcctcctaaacctcgtgtttattgacatttcttcaactttttagttcaagaaggccacaatgttacccagcccaataaacatctgtatcccacaaagcccaagaagcaacctgcaaaacaattacgcaggaaaattatgtggc

SEQ ID NO: 106379 - protein, 633 aa, Arabidopsis thaliana
  peptide (1)..(633): Ceres Seq. ID no. 13619406
EMWRCLRVASSSRRSESNGAFITSQLSRFFSAPPSAGDKSSYTIVDHTYDAVVVGAGGAGLRAAIGLSEHGFNTACITKLFPTRSHTVAAQGGINAALGNMSVDDWRWHMYDTVKGSDWLGDQDAIQYMCREAPKAVIELENYGLPFSRTEDGKIYQRAFGGQSLEFGIGGQAYRCACAADRTGHALLHTLYGQAMKHNTQFFVEYFALDLIMNSDGTCQGVIALNMEDGTLHRFHAGSTILATGGYGRAYFSATSAHTCTGDGNAMVARAGLPLQDLEFVQFHPTGIYGAGCLITEGARGEGGILRNSEGEKFMDRYAPTARDLASRDVVSRSMTMEIRQGRGAGPMKDYLYLYLNHLPPEVLKERLPGISETAAIFAGVDVTREPIPVLPTVHYNMGGIPTNYHGEVITLRGDDPDAVVPGLMAAGEAACASVHGANRLGANSLLDIVVFGRACANRVAEIQKPGEKLKPLEKDAGEKSIEWLDRIRNSNGSLPTSKIRLNMQRVMQNNAAVFRTQETLEEGCDLIDKTWDSFGDVKVTDRSMIWNSDLIETMELENLLVNACITMHSAEARKESRGAHAREDFTKRDDANWMKHTLGYWEEGNVKLEYRPVHMKTLDDEVDTFPPKPRVY

SEQ ID NO: 106380 - protein, 632 aa, Arabidopsis thaliana
  peptide (1)..(632): Ceres Seq. ID no. 13619407
MWRCLRVASSSRRSESNGAFITSQLSRFFSAPPSAGDKSSYTIVDHTYDAVVVGAGGAGLRAAIGLSEHGFNTACITKLFPTRSHTVAAQGGINAALGNMSVDDWRWHMYDTVKGSDWLGDQDAIQYMCREAPKAVIELENYGLPFSRTEDGKIYQRAFGGQSLEFGIGGQAYRCACAADRTGHALLHTLYGQAMKHNTQFFVEYFALDLIMNSDGTCQGVIALNMEDGTLHRFHAGSTILATGGYGRAYFSATSAHTCTGDGNAMVARAGLPLQDLEFVQFHPTGIYGAGCLITEGARGEGGILRNSEGEKFMDRYAPTARDLASRDVVSRSMTMEIRQGRGAGPMKDYLYLYLNHLPPEVLKERLPGISETAAIFAGVDVTREPIPVLPTVHYNMGGIPTNYHGEVITLRGDDPDAVVPGLMAAGEAACASVHGANRLGANSLLDIVVFGRACANRVAEIQKPGEKLKPLEKDAGEKSIEWLDRIRNSNGSLPTSKIRLNMQRVMQNNAAVFRTQETLEEGCDLIDKTWDSFGDVKVTDRSMIWNSDLIETMELENLLVNACITMHSAEARKESRGAHAREDFTKRDDANWMKHTLGYWEEGNVKLEYRPVHMKTLDDEVDTFPPKPRVY

SEQ ID NO: 106381 - protein, 533 aa, Arabidopsis thaliana
  peptide (1)..(533): Ceres Seq. ID no. 13619408
MSVDDWRWHMYDTVKGSDWLGDQDAIQYMCREAPKAVIELENYGLPFSRTEDGKIYQRAFGGQSLEFGIGGQAYRCACAADRTGHALLHTLYGQAMKHNTQFFVEYFALDLIMNSDGTCQGVIALNMEDGTLHRFHAGSTILATGGYGRAYFSATSAHTCTGDGNAMVARAGLPLQDLEFVQFHPTGIYGAGCLITEGARGEGGILRNSEGEKFMDRYAPTARDLASRDVVSRSMTMEIRQGRGAGPMKDYLYLYLNHLPPEVLKERLPGISETAAIFAGVDVTREPIPVLPTVHYNMGGIPTNYHGEVITLRGDDPDAVVPGLMAAGEAACASVHGANRLGANSLLDIVVFGRACANRVAEIQKPGEKLKPLEKDAGEKSIEWLDRIRNSNGSLPTSKIRLNMQRVMQNNAAVFRTQETLEEGCDLIDKTWDSFGDVKVTDRSMIWNSDLIETMELENLLVNACITMHSAEARKESRGAHAREDFTKRDDANWMKHTLGYWEEGNVKLEYRPVHMKTLDDEVDTFPPKPRVY

SEQ ID NO: 106382 - DNA, 1769 bp, Arabidopsis thaliana
  misc_feature (1)..(1769): Ceres Seq. ID no. 13619413
  misc_feature (1)..(1769): Ortholog of  Ceres SEQ ID NO 15169627 as cited in SEQ ID NO 64517
  misc_feature (1)..(1769): Ortholog of  Ceres SEQ ID NO 14307952 as cited in SEQ ID NO 66029
gctacaccacacgtctagaaatgtacgaatagagagtgaagtgaacgacacataataaaaccaaagaatggagatatggttactcatattggcctctctctccggatctctccttctccatctcctcctccgccgccgtaactcctcctcccctccgttacctcctgaccctaacttcttacctttcctcggaaccctccagtggctccgggaaggcttaggtggcctcgaatcctatctccgctctgtccaccaccgtctaggccccatcgtcaccctccgcatcacttcccgccccgccatattcgttgccgatcgttccctaactcacgaggctctcgtcctgaacggcgccgtctatgcggaccgtccaccacctgctgtaattagcaagatagttgacgaacacaacatcagctccgggtcatacggagccacgtggcggcttctccgtcgaaacatcacctctgagattcttcacccctcgcgcgtgagatcttactcccacgctcgtcactgggttcttgagatcctctttgaacggttccgtaaccatggaggcgaagaaccgatcgtcctcatccaccatctccactatgcaatgtttgcgcttcttgtccttatgtgttttggagataagcttgatgagaagcaaatcaaagaagtggagttcattcaaagactacagctccttagcttgaccaaatttaacatcttcaacatctggcctaagttcaccaaactgattctgcgtaagagatggcaagaatttctccagatacggagacagcagcgggatgttttgcttcccctgattcgtgcccggaggaagatcgttgaagagagaaagagatcggagcaagaagacaagaaagactatgtgcaatcatatgttgatactctactcgatctagagcttccagaggaaaataggaagttgaacgaggaagatattatgaacttgtgctcggagtttctcacggccgggactgacacgacggccacggcgctgcaatggatcatggccaacctagtgaaatatccagaaatccaggagagattacacgaggagatcaagagcgtggttggggaagaagcaaaggaggtggaggaagaagatgtggagaagatgccgtatctaaaggcagtggtgttagagggactccggagacaccctccaggacactttttactcccacacagtgtcacggaggacactgtgttaggaggatacaaagtaccgaagaacgggacgatcaacttcatggtggcggagatagggagggatccagtggagtgggaagaaccaatggcgtttaagccagagaggtttatgggagaagaagaagcggtggacctcaccggaagtagagggataaagatgatgccgttcggagcaggaagaaggatatgtccgggcataggtctagcaatgttgcatctggagtactacgtcgccaacatggtcagagagttccaatggaaagaggtccaaggtcatgaagtggacttgacggagaagctcgaattcactgtcgtcatgaagcatccgcttaaggctcttgctgttcctaggagatgtcactagtctgcttcttcctcttttcttgggtttaatattcaaaatgagtgaacttagtttggtggaattctcaataaactatgggataagtcataaaaaagagttattatgctgaccgtttgtactttatattcaagtgtatgttggacaccttaaaataaaacagatatttatatagttcagattt

SEQ ID NO: 106383 - protein, 506 aa, Arabidopsis thaliana
  peptide (1)..(506): Ceres Seq. ID no. 13619414
MEIWLLILASLSGSLLLHLLLRRRNSSSPPLPPDPNFLPFLGTLQWLREGLGGLESYLRSVHHRLGPIVTLRITSRPAIFVADRSLTHEALVLNGAVYADRPPPAVISKIVDEHNISSGSYGATWRLLRRNITSEILHPSRVRSYSHARHWVLEILFERFRNHGGEEPIVLIHHLHYAMFALLVLMCFGDKLDEKQIKEVEFIQRLQLLSLTKFNIFNIWPKFTKLILRKRWQEFLQIRRQQRDVLLPLIRARRKIVEERKRSEQEDKKDYVQSYVDTLLDLELPEENRKLNEEDIMNLCSEFLTAGTDTTATALQWIMANLVKYPEIQERLHEEIKSVVGEEAKEVEEEDVEKMPYLKAVVLEGLRRHPPGHFLLPHSVTEDTVLGGYKVPKNGTINFMVAEIGRDPVEWEEPMAFKPERFMGEEEAVDLTGSRGIKMMPFGAGRRICPGIGLAMLHLEYYVANMVREFQWKEVQGHEVDLTEKLEFTVVMKHPLKALAVPRRCH

SEQ ID NO: 106384 - protein, 328 aa, Arabidopsis thaliana
  peptide (1)..(328): Ceres Seq. ID no. 13619415
MFALLVLMCFGDKLDEKQIKEVEFIQRLQLLSLTKFNIFNIWPKFTKLILRKRWQEFLQIRRQQRDVLLPLIRARRKIVEERKRSEQEDKKDYVQSYVDTLLDLELPEENRKLNEEDIMNLCSEFLTAGTDTTATALQWIMANLVKYPEIQERLHEEIKSVVGEEAKEVEEEDVEKMPYLKAVVLEGLRRHPPGHFLLPHSVTEDTVLGGYKVPKNGTINFMVAEIGRDPVEWEEPMAFKPERFMGEEEAVDLTGSRGIKMMPFGAGRRICPGIGLAMLHLEYYVANMVREFQWKEVQGHEVDLTEKLEFTVVMKHPLKALAVPRRCH

SEQ ID NO: 106385 - protein, 321 aa, Arabidopsis thaliana
  peptide (1)..(321): Ceres Seq. ID no. 13619416
MCFGDKLDEKQIKEVEFIQRLQLLSLTKFNIFNIWPKFTKLILRKRWQEFLQIRRQQRDVLLPLIRARRKIVEERKRSEQEDKKDYVQSYVDTLLDLELPEENRKLNEEDIMNLCSEFLTAGTDTTATALQWIMANLVKYPEIQERLHEEIKSVVGEEAKEVEEEDVEKMPYLKAVVLEGLRRHPPGHFLLPHSVTEDTVLGGYKVPKNGTINFMVAEIGRDPVEWEEPMAFKPERFMGEEEAVDLTGSRGIKMMPFGAGRRICPGIGLAMLHLEYYVANMVREFQWKEVQGHEVDLTEKLEFTVVMKHPLKALAVPRRCH

SEQ ID NO: 106386 - DNA, 1896 bp, Arabidopsis thaliana
  misc_feature (1)..(1896): Ceres Seq. ID no. 13619417
  misc_feature (1)..(1896): Ortholog of  Ceres SEQ ID NO 15169627 as cited in SEQ ID NO 64517
  misc_feature (1)..(1896): Ortholog of  Ceres SEQ ID NO 14307952 as cited in SEQ ID NO 66029
gcaaagaacaaaccagtgaaggaaaaatggagatatggttacttatcttgggctctctcttcctctctctccttctcaatctcctcttctttcgcctccgtgactcctcctctcttccgttaccacctgaccctaactatttccctttcattggaaccatccaatggctccggcaaggcttaggtggactcaacaactatctccgctccgtccaccaccgtctcggtcccatcatcacccttcgcatcacttcccgcccctctatattcgtcgccgatcgttctcttgctcaccaggctctcgttttgaacggtgccgttttcgccgatcgtccaccggcagctccgatcagtaagattatttcgagtaaccaacataacatcagctcttgtttatatggagccacgtggcgtcttcttcgccggaatctcacttctgagattcttcacccctcgcgcgtgagatcttactctcacgcgcggcgttgggttcttgagattctttttgatcgatttggtaaaaacagaggagaagaaccgattgttgttgttgatcatcttcactatgcgatgtttgcgcttcttgttctcatgtgttttggagataagcttgatgagaagcaaatcaaacaagtggaatatgttcagagacgacagcttcttggcttctcgagattcaatattctcaatctctggcctaagtttactaaattgattttgcgaaagagatgggaagagtttttccagatgcggagagagcagcatgacgttttgcttccgttgattcgtgctcggagaaagattgttgaagagagaaagaatagatcatcagaggaagaagaagacaacaaagagtatgtacaatcatacgttgatactctgcttgagctggagcttccagatgagaagaggaagctgaacgaggatgagattgtgagtttgtgttcggagtttctcaacggtgggactgatacaacggccaccgcgttgcaatggatcatggcgaacttggtgaaaaacccggatattcagaagaggttatacgaggagatcaaaagcgtagttggggaagaagcaaatgaagtggaggaagaagacgcgcaaaagatgccgtatctagaggcagtggtgatggagggtctccggagacatcctccgggacattttgtgctcccccacagtgtcactgaggacactgtgttaggaggatacaaagtgccgaagaatgggacaattaatttcatggtggcagagatagggagggatccaaaagtgtgggaggaaccaatggcgtttaagccagagaggtttatggaagaagcggtggacataaccggaagcagagggataaagatgatgccgttcggagcgggtagaaggatttgtccagggattgggctagcgatgctgcatctggagtactatgtggcgaatatggtgagggagtttgactggaaggaggtccaaggtcatgaagtggacttgacggagaagctcgagtttaccgtagtcatgaagcatccgcttaaggcccttgctgttcctaggagaagtcactagttgtctacttcttaaacttcagtttagtattcaccaaagactaggtgatgtatgaagaattgaagttatgggcattttgttagctgaagtcaactatggaactatcttttttattaaagtacattttgtaccttggaataaatgatagaaacaacaatccttttattttgtattaaaaggaatcttttatgacgagtgtttttacaagaaaggtacataggtctagaaaagtgtgggatttctagtgtttagtgactagatgatttagaaaagtgtgggattttgatggttgttgatacttttgttgggagaaatcgaaagagtaaaagcatttgtg

SEQ ID NO: 106387 - protein, 518 aa, Arabidopsis thaliana
  peptide (1)..(518): Ceres Seq. ID no. 13619418
KEQTSEGKMEIWLLILGSLFLSLLLNLLFFRLRDSSSLPLPPDPNYFPFIGTIQWLRQGLGGLNNYLRSVHHRLGPIITLRITSRPSIFVADRSLAHQALVLNGAVFADRPPAAPISKIISSNQHNISSCLYGATWRLLRRNLTSEILHPSRVRSYSHARRWVLEILFDRFGKNRGEEPIVVVDHLHYAMFALLVLMCFGDKLDEKQIKQVEYVQRRQLLGFSRFNILNLWPKFTKLILRKRWEEFFQMRREQHDVLLPLIRARRKIVEERKNRSSEEEEDNKEYVQSYVDTLLELELPDEKRKLNEDEIVSLCSEFLNGGTDTTATALQWIMANLVKNPDIQKRLYEEIKSVVGEEANEVEEEDAQKMPYLEAVVMEGLRRHPPGHFVLPHSVTEDTVLGGYKVPKNGTINFMVAEIGRDPKVWEEPMAFKPERFMEEAVDITGSRGIKMMPFGAGRRICPGIGLAMLHLEYYVANMVREFDWKEVQGHEVDLTEKLEFTVVMKHPLKALAVPRRSH

SEQ ID NO: 106388 - protein, 510 aa, Arabidopsis thaliana
  peptide (1)..(510): Ceres Seq. ID no. 13619419
MEIWLLILGSLFLSLLLNLLFFRLRDSSSLPLPPDPNYFPFIGTIQWLRQGLGGLNNYLRSVHHRLGPIITLRITSRPSIFVADRSLAHQALVLNGAVFADRPPAAPISKIISSNQHNISSCLYGATWRLLRRNLTSEILHPSRVRSYSHARRWVLEILFDRFGKNRGEEPIVVVDHLHYAMFALLVLMCFGDKLDEKQIKQVEYVQRRQLLGFSRFNILNLWPKFTKLILRKRWEEFFQMRREQHDVLLPLIRARRKIVEERKNRSSEEEEDNKEYVQSYVDTLLELELPDEKRKLNEDEIVSLCSEFLNGGTDTTATALQWIMANLVKNPDIQKRLYEEIKSVVGEEANEVEEEDAQKMPYLEAVVMEGLRRHPPGHFVLPHSVTEDTVLGGYKVPKNGTINFMVAEIGRDPKVWEEPMAFKPERFMEEAVDITGSRGIKMMPFGAGRRICPGIGLAMLHLEYYVANMVREFDWKEVQGHEVDLTEKLEFTVVMKHPLKALAVPRRSH

SEQ ID NO: 106389 - protein, 329 aa, Arabidopsis thaliana
  peptide (1)..(329): Ceres Seq. ID no. 13619420
MFALLVLMCFGDKLDEKQIKQVEYVQRRQLLGFSRFNILNLWPKFTKLILRKRWEEFFQMRREQHDVLLPLIRARRKIVEERKNRSSEEEEDNKEYVQSYVDTLLELELPDEKRKLNEDEIVSLCSEFLNGGTDTTATALQWIMANLVKNPDIQKRLYEEIKSVVGEEANEVEEEDAQKMPYLEAVVMEGLRRHPPGHFVLPHSVTEDTVLGGYKVPKNGTINFMVAEIGRDPKVWEEPMAFKPERFMEEAVDITGSRGIKMMPFGAGRRICPGIGLAMLHLEYYVANMVREFDWKEVQGHEVDLTEKLEFTVVMKHPLKALAVPRRSH

SEQ ID NO: 106390 - DNA, 3404 bp, Arabidopsis thaliana
  misc_feature (1)..(3404): Ceres Seq. ID no. 13619460
  misc_feature (1)..(3404): Ortholog of  Ceres SEQ ID NO 12589728 as cited in SEQ ID NO 0
  misc_feature (1)..(3404): Ortholog of  Ceres SEQ ID NO 14302164 as cited in SEQ ID NO 0
atggttactaatagctacatggatacgcgatcaaatttgacaagtgtgaatcgaggatccaatgtggatctcgaagatcgattccagagggagctcgaatctttgctccaacaacatcgtaatcagcaatcatttggccgagaacgagaacgagacattgatgttcacagaagcggaagcgcgcctcctaccgtggaaggattgttgagagctatggataatcagtacttgaacaataacaactctgatcatagagatgttgggaatattagcagtataaccactagcaatggcgttgagcttttatctgatgatgagttacgttggcaccctgagtatctctcttattactattcgaatgagcattcgaatccgaggttgcctcctccgttgttgtctagagaggattggagggttgctcagaggtttcacaacagtgagtctgtgtttgatcctgttggggaatggaggaagaaaacggttgaagtcgacaactcctcatcgctcttctcggttcagccaggggttccagttgagcaggcagagaatgatttgatggaactgaggaatgctgtagctcagggccgctctcagaaggtgcagcggctagatcaaggcagagaagacttgattggattatctggatattctgggcttggaccgagaaggaagagttttgctgatatacttcaggaaggacttgaacgggatgcagccttaggcagccaactctctcggcctgcaagctgcaacacttttcgggatatgaaagatgctgctgttttatcaaatttcagtgccggtggatttgacagcccattagcattccatgattcattacattctactgccaaaaacagtccaaatactatgcttggatccaccatgagttctccggtgccaagaaatagaactcctgactcacatctagtaggacgatctacggcctctggccttccccctattggtaccagggttggtcctgtcgagaagaagaatacttttggcacagccatccaaaactgtgaatcttacactgctgccgatgttgccgacacattgtccaggttgaacatgtcagagatgagtcaagtaaaagaaaaccatatgcagtcacagcttcaagtggaactggagaatcaatctgatgtcatgcgttacatacccaatggtcataagaaggctttgcggcaacaaaatacggcagaaactaaagatcacttgttttctgcaaattatggtggaatgagtgggtatggagcaagtcttggtgcttctacagtgggttcccatggacaggtcaacatccctaaacgaacctcctcttcagcgagtctctactcaacttcagaccattctagattaggaagcgtgggcttatctgatgtcaatattaggaatggaaatattaatggaacagacttctccacagctggtggttatatggcaaagaacaagttgaattcattagctgagcactattccgctgaaggctcacatttgactggggatggggatagacaaagcttgaacagattgataaatcaagttgcttctgagcttcactctccagttatggacccacattacagccagtatctgcatacggcatcttctactgctgccccaatcgatcattctcttattagaaacaatttcgggacttcaaacggagatacggctaacgaatacctcgcgatgttacttgctcaaaacaggcaacagctgggtaacctcaatgctgcaaattctagattttttgagagtccttcatatgatcttggcaacatgtatctaggaaaccatttgccttctccttccaagaattcaagaaatttccagaacatgcgtatgtcacaatctgcctcaatgatgaaagttcctttcggaggcttacagggatcatcccatgtagatattggcagtacggcagaagcatccttactagaggggtttaagaacaacaagacaaggtctttggagctttcagaaatagttggtcatgtgattgagttcagcatggatcagtacggaagtcgtttcattcaacagaaacttgagactgcaacggatgaggaaaagaatgcaatattccctgagatacttccttacggccgtactttaatgacagatgtctttggaaattatgtcattcaaaagttttttgaacatggtacaaccaagcagagaaaagaactcgctgaacaagtaacaggccacgttttggctctttctctacaaatgtacggctgcagggttatccaaaaggcgttagaggtggttgaattggagcagcaagctcgaatggtgaaagagcttgatgggtctgtcatgaaatgcgttcatgaccagaacggtaatcatgtgatccagaagtgtatagagcgtcttcctcaggattggatacagttcatcatttcctcattctacggaaaagttttagctctttcaacacacccttatggatgccgtgtaatccagagggtactggagcatattgatgatatagaaacccaacggatcattatggaggaaatcatggattcagtctgtactctagcacaagatcaatacggaaattatgttatccagcatatcatacaacatggtaaacctcatgaacggtcagaaattatcaataagcttgctggacagattgtgaagatgagtcagcaaaagtttgcttctaatgttgttgaaaagtgcctaacatttggcggtccagaggaacgtcaggttctagtgaatgagatgcttggttatactgatgaaaacgagcctcttcaggcgatgatgaaggacccatttgggaactatgtagtgcagaaggttcttgaaacatgtgatgatcaaagtcttgcactcattctttctcgcatcaaagtacacttgaatgccttgaagagatacacatatgggaaacacatcgttgcccgggttgagaagcttatcactactggagagagaagaatcggactctcgtcatctcttgccgcgaacaccactccataaccatctctgagtaagtaaaacctcaagcttcttaacttataacacaacctgagaagaggtacaagttgatgaccgagagctatttgtacagcctaactaagcaaagcatctcaagatggttcctgttatatatattttgcaaataatttgtaaataaaatagagggttttagatttaagtcagtaaataaatgtattttggatcccaactggcttaaatcaaaaatctcctcttggttgtgtaaaaggtgaagccttgctgttttatttatgtaaagcaatggcttacttttaggtcttattcttcacattacgatgtaaatatcttgcggctttgctccccaagaattgctatattttttattttaaaagctctaaagttttacactgaac

SEQ ID NO: 106391 - protein, 1003 aa, Arabidopsis thaliana
  peptide (1)..(1003): Ceres Seq. ID no. 13619461
MVTNSYMDTRSNLTSVNRGSNVDLEDRFQRELESLLQQHRNQQSFGRERERDIDVHRSGSAPPTVEGLLRAMDNQYLNNNNSDHRDVGNISSITTSNGVELLSDDELRWHPEYLSYYYSNEHSNPRLPPPLLSREDWRVAQRFHNSESVFDPVGEWRKKTVEVDNSSSLFSVQPGVPVEQAENDLMELRNAVAQGRSQKVQRLDQGREDLIGLSGYSGLGPRRKSFADILQEGLERDAALGSQLSRPASCNTFRDMKDAAVLSNFSAGGFDSPLAFHDSLHSTAKNSPNTMLGSTMSSPVPRNRTPDSHLVGRSTASGLPPIGTRVGPVEKKNTFGTAIQNCESYTAADVADTLSRLNMSEMSQVKENHMQSQLQVELENQSDVMRYIPNGHKKALRQQNTAETKDHLFSANYGGMSGYGASLGASTVGSHGQVNIPKRTSSSASLYSTSDHSRLGSVGLSDVNIRNGNINGTDFSTAGGYMAKNKLNSLAEHYSAEGSHLTGDGDRQSLNRLINQVASELHSPVMDPHYSQYLHTASSTAAPIDHSLIRNNFGTSNGDTANEYLAMLLAQNRQQLGNLNAANSRFFESPSYDLGNMYLGNHLPSPSKNSRNFQNMRMSQSASMMKVPFGGLQGSSHVDIGSTAEASLLEGFKNNKTRSLELSEIVGHVIEFSMDQYGSRFIQQKLETATDEEKNAIFPEILPYGRTLMTDVFGNYVIQKFFEHGTTKQRKELAEQVTGHVLALSLQMYGCRVIQKALEVVELEQQARMVKELDGSVMKCVHDQNGNHVIQKCIERLPQDWIQFIISSFYGKVLALSTHPYGCRVIQRVLEHIDDIETQRIIMEEIMDSVCTLAQDQYGNYVIQHIIQHGKPHERSEIINKLAGQIVKMSQQKFASNVVEKCLTFGGPEERQVLVNEMLGYTDENEPLQAMMKDPFGNYVVQKVLETCDDQSLALILSRIKVHLNALKRYTYGKHIVARVEKLITTGERRIGLSSSLAANTTP

SEQ ID NO: 106392 - protein, 997 aa, Arabidopsis thaliana
  peptide (1)..(997): Ceres Seq. ID no. 13619462
MDTRSNLTSVNRGSNVDLEDRFQRELESLLQQHRNQQSFGRERERDIDVHRSGSAPPTVEGLLRAMDNQYLNNNNSDHRDVGNISSITTSNGVELLSDDELRWHPEYLSYYYSNEHSNPRLPPPLLSREDWRVAQRFHNSESVFDPVGEWRKKTVEVDNSSSLFSVQPGVPVEQAENDLMELRNAVAQGRSQKVQRLDQGREDLIGLSGYSGLGPRRKSFADILQEGLERDAALGSQLSRPASCNTFRDMKDAAVLSNFSAGGFDSPLAFHDSLHSTAKNSPNTMLGSTMSSPVPRNRTPDSHLVGRSTASGLPPIGTRVGPVEKKNTFGTAIQNCESYTAADVADTLSRLNMSEMSQVKENHMQSQLQVELENQSDVMRYIPNGHKKALRQQNTAETKDHLFSANYGGMSGYGASLGASTVGSHGQVNIPKRTSSSASLYSTSDHSRLGSVGLSDVNIRNGNINGTDFSTAGGYMAKNKLNSLAEHYSAEGSHLTGDGDRQSLNRLINQVASELHSPVMDPHYSQYLHTASSTAAPIDHSLIRNNFGTSNGDTANEYLAMLLAQNRQQLGNLNAANSRFFESPSYDLGNMYLGNHLPSPSKNSRNFQNMRMSQSASMMKVPFGGLQGSSHVDIGSTAEASLLEGFKNNKTRSLELSEIVGHVIEFSMDQYGSRFIQQKLETATDEEKNAIFPEILPYGRTLMTDVFGNYVIQKFFEHGTTKQRKELAEQVTGHVLALSLQMYGCRVIQKALEVVELEQQARMVKELDGSVMKCVHDQNGNHVIQKCIERLPQDWIQFIISSFYGKVLALSTHPYGCRVIQRVLEHIDDIETQRIIMEEIMDSVCTLAQDQYGNYVIQHIIQHGKPHERSEIINKLAGQIVKMSQQKFASNVVEKCLTFGGPEERQVLVNEMLGYTDENEPLQAMMKDPFGNYVVQKVLETCDDQSLALILSRIKVHLNALKRYTYGKHIVARVEKLITTGERRIGLSSSLAANTTP

SEQ ID NO: 106393 - protein, 932 aa, Arabidopsis thaliana
  peptide (1)..(932): Ceres Seq. ID no. 13619463
MDNQYLNNNNSDHRDVGNISSITTSNGVELLSDDELRWHPEYLSYYYSNEHSNPRLPPPLLSREDWRVAQRFHNSESVFDPVGEWRKKTVEVDNSSSLFSVQPGVPVEQAENDLMELRNAVAQGRSQKVQRLDQGREDLIGLSGYSGLGPRRKSFADILQEGLERDAALGSQLSRPASCNTFRDMKDAAVLSNFSAGGFDSPLAFHDSLHSTAKNSPNTMLGSTMSSPVPRNRTPDSHLVGRSTASGLPPIGTRVGPVEKKNTFGTAIQNCESYTAADVADTLSRLNMSEMSQVKENHMQSQLQVELENQSDVMRYIPNGHKKALRQQNTAETKDHLFSANYGGMSGYGASLGASTVGSHGQVNIPKRTSSSASLYSTSDHSRLGSVGLSDVNIRNGNINGTDFSTAGGYMAKNKLNSLAEHYSAEGSHLTGDGDRQSLNRLINQVASELHSPVMDPHYSQYLHTASSTAAPIDHSLIRNNFGTSNGDTANEYLAMLLAQNRQQLGNLNAANSRFFESPSYDLGNMYLGNHLPSPSKNSRNFQNMRMSQSASMMKVPFGGLQGSSHVDIGSTAEASLLEGFKNNKTRSLELSEIVGHVIEFSMDQYGSRFIQQKLETATDEEKNAIFPEILPYGRTLMTDVFGNYVIQKFFEHGTTKQRKELAEQVTGHVLALSLQMYGCRVIQKALEVVELEQQARMVKELDGSVMKCVHDQNGNHVIQKCIERLPQDWIQFIISSFYGKVLALSTHPYGCRVIQRVLEHIDDIETQRIIMEEIMDSVCTLAQDQYGNYVIQHIIQHGKPHERSEIINKLAGQIVKMSQQKFASNVVEKCLTFGGPEERQVLVNEMLGYTDENEPLQAMMKDPFGNYVVQKVLETCDDQSLALILSRIKVHLNALKRYTYGKHIVARVEKLITTGERRIGLSSSLAANTTP

SEQ ID NO: 106394 - DNA, 1434 bp, Arabidopsis thaliana
  misc_feature (1)..(1434): Ceres Seq. ID no. 13619472
  misc_feature (1)..(1434): Ortholog of  Ceres SEQ ID NO 15175597 as cited in SEQ ID NO 58317
gatttctgtaaaaagtttgttgtctttacaaaaagaaaagaaaaaagagacgctagaaagaacgcgaaagcttgcgaagaagatttgcttttgatcgacttaacacgaacaacaaacaacatctgcgtgataaagaagagatttttgcctaaataaagaagagattcgactctaatcctggagttatcattcacgatagattcttagattgcgactataaagaagaagatggctgtatatgaacaaaccggaaccgagcagccgaagaaaaggaaatctagggctcgagcaggtggtttaacggtggctgataggctaaagaagtggaaagagtacaacgagattgttgaagcttcggctgttaaagaaggagagaaaccgaaacgcaaagttcctgcgaaagggtcgaagaaaggttgtatgaagggtaaaggaggaccagataattctcactgtagttttagaggagttagacaaaggatttggggtaaatgggttgcagagattcgagaaccgaaaataggaactagactttggcttggtacttttcctaccgcggaaaaagctgcttccgcttatgatgaagcggctaccgctatgtacggttcattggctcgtcttaacttccctcagtctgttgggtctgagtttactagtacgtctagtcaatctgaggtgtgtacggttgaaaataaggcggttgtttgtggtgatgtttgtgtgaagcatgaagatactgattgtgaatctaatccatttagtcagattttagatgttagagaagagtcttgtggaaccaggccggacagttgcacggttggacatcaagatatgaattcttcgctgaattacgatttgctgttagagtttgagcagcagtattggggccaagttttgcaggagaaagagaaaccgaagcaggaagaagaggagatacagcaacagcaacaggaacagcaacagcaacagctgcaaccggatttgcttactgttgcagattacggttggccttggtctaatgatattgtaaatgatcagacttcttgggatcctaatgagtgctttgatattaatgaactccttggagatttgaatgaacctggtccccatcagagccaagaccaaaaccacgtaaattctggtagttatgatttgcatccgcttcatctcgagccacacgatggtcacgagttcaatggtttgagttctctggatatttgagagttctgaggcaatggtcctacaagactacaacataatctttggattgatcataggagaaacaagaaataggtgttaatgatctgattcacaatgaaaaaatatttaataactctatagtttttgttctttccttggatcatgaactgttgcttctcatctattgagttaatatagcgaatagcagagtttctctctttcttctctttgtag

SEQ ID NO: 106395 - protein, 330 aa, Arabidopsis thaliana
  peptide (1)..(330): Ceres Seq. ID no. 13619473
MAVYEQTGTEQPKKRKSRARAGGLTVADRLKKWKEYNEIVEASAVKEGEKPKRKVPAKGSKKGCMKGKGGPDNSHCSFRGVRQRIWGKWVAEIREPKIGTRLWLGTFPTAEKAASAYDEAATAMYGSLARLNFPQSVGSEFTSTSSQSEVCTVENKAVVCGDVCVKHEDTDCESNPFSQILDVREESCGTRPDSCTVGHQDMNSSLNYDLLLEFEQQYWGQVLQEKEKPKQEEEEIQQQQQEQQQQQLQPDLLTVADYGWPWSNDIVNDQTSWDPNECFDINELLGDLNEPGPHQSQDQNHVNSGSYDLHPLHLEPHDGHEFNGLSSLDI

SEQ ID NO: 106396 - protein, 266 aa, Arabidopsis thaliana
  peptide (1)..(266): Ceres Seq. ID no. 13619474
MKGKGGPDNSHCSFRGVRQRIWGKWVAEIREPKIGTRLWLGTFPTAEKAASAYDEAATAMYGSLARLNFPQSVGSEFTSTSSQSEVCTVENKAVVCGDVCVKHEDTDCESNPFSQILDVREESCGTRPDSCTVGHQDMNSSLNYDLLLEFEQQYWGQVLQEKEKPKQEEEEIQQQQQEQQQQQLQPDLLTVADYGWPWSNDIVNDQTSWDPNECFDINELLGDLNEPGPHQSQDQNHVNSGSYDLHPLHLEPHDGHEFNGLSSLDI

SEQ ID NO: 106397 - protein, 207 aa, Arabidopsis thaliana
  peptide (1)..(207): Ceres Seq. ID no. 13619475
MYGSLARLNFPQSVGSEFTSTSSQSEVCTVENKAVVCGDVCVKHEDTDCESNPFSQILDVREESCGTRPDSCTVGHQDMNSSLNYDLLLEFEQQYWGQVLQEKEKPKQEEEEIQQQQQEQQQQQLQPDLLTVADYGWPWSNDIVNDQTSWDPNECFDINELLGDLNEPGPHQSQDQNHVNSGSYDLHPLHLEPHDGHEFNGLSSLDI

SEQ ID NO: 106398 - DNA, 1509 bp, Arabidopsis thaliana
  misc_feature (1)..(1509): Ceres Seq. ID no. 13619476
  misc_feature (1)..(1509): Ortholog of  Ceres SEQ ID NO 13659033 as cited in SEQ ID NO 66372
  misc_feature (1)..(1509): Ortholog of  Ceres SEQ ID NO 13655724 as cited in SEQ ID NO 68973
  misc_feature (1)..(1509): Ortholog of  Ceres SEQ ID NO 12625899 as cited in SEQ ID NO 69079
actacaccataaaaagagaaaggcgtaaaaaggaaaaagaaaaaaaaaggtaaacgttataataaaagaaaaaaaaaaatatgacaacggcgttgttttcaccgtctaaccgtagaaaacgccgtctcacacacttcttcttcaccgtactcgctttcatcttactcgccgccttcatctacggccacgatttcatctctttctctcgtcgatctcttcactctccgacgatcgtccaccaatccgcaatcgtcgttgtagttgacgaacctcctccgcctccaccaacatctcctcctccgccttctcctccaccaccgtctcctccaccaccatctcctccaccgccatctcctccgccacctgcttttgcagtaggtaaaacgccggaaggatgcgatgtcttcaaagggaattgggtcaaagactggtcaacgcgtccactttacagagaatccgagtgtccgtacattcagccgcagctcacttgccgcacgcatggccgtcccgatagtgattatcagtcatggagatggcgacctgattcctgctcacttccttcgtttaatgcgacggtgatgttggagagcttaagagggaagaagatgatgttcgttggagattcgttgaacagaggaatgtatgtttctctcatctgtcttcttcattcacaaatcccagagaactccaaatccatggatactttcggatcactcaccgtcttctctctcaaggattacaatgcaacgattgagttctattgggcaccgtttcttctagaatcgaattcagataacgcaacagttcatagagtatcagatcgaattgtgaggaaaggatcgatcaacaaacacggtaggcattggcgaggggctgatatagttgtgttcaacacatacttgtggtggaggactggcttcaaaatgaagatcttggaaggttctttcaaggatgagaagaagagaatcgttgagatggagagtgaagatgcttatagaatggcgttgaagactatggttaaatgggtgaagaagaatatggatccattgaagacgagggttttctttgctaccatgtctcctactcattacaagggcgaggattggggaggcgaacaaggaaaaaattgttacaatcaaacgacaccgatccaagacatgaaccattggccatcagactgcagcaaaaccttaatgaaagtgataggagaggaattagaccaaagagcagagtttccggtgacggtacttaacattacacaactctctggctatcggaaagacgcgcacacgtcaatctacaagaagcaatggagcccattgacgaaggagcagctagcaaatccggctagctactcagactgtatacattggtgcttgcctggtcttcaagatacttggaacgagcttttctttgccaagttattttatccatgattcttttctctaaattcaagatttttttagaactgtaattgtaaattatggttataatttttgttaattacgt

SEQ ID NO: 106399 - protein, 451 aa, Arabidopsis thaliana
  peptide (1)..(451): Ceres Seq. ID no. 13619477
MTTALFSPSNRRKRRLTHFFFTVLAFILLAAFIYGHDFISFSRRSLHSPTIVHQSAIVVVVDEPPPPPPTSPPPPSPPPPSPPPPSPPPPSPPPPAFAVGKTPEGCDVFKGNWVKDWSTRPLYRESECPYIQPQLTCRTHGRPDSDYQSWRWRPDSCSLPSFNATVMLESLRGKKMMFVGDSLNRGMYVSLICLLHSQIPENSKSMDTFGSLTVFSLKDYNATIEFYWAPFLLESNSDNATVHRVSDRIVRKGSINKHGRHWRGADIVVFNTYLWWRTGFKMKILEGSFKDEKKRIVEMESEDAYRMALKTMVKWVKKNMDPLKTRVFFATMSPTHYKGEDWGGEQGKNCYNQTTPIQDMNHWPSDCSKTLMKVIGEELDQRAEFPVTVLNITQLSGYRKDAHTSIYKKQWSPLTKEQLANPASYSDCIHWCLPGLQDTWNELFFAKLFYP

SEQ ID NO: 106400 - protein, 285 aa, Arabidopsis thaliana
  peptide (1)..(285): Ceres Seq. ID no. 13619478
MLESLRGKKMMFVGDSLNRGMYVSLICLLHSQIPENSKSMDTFGSLTVFSLKDYNATIEFYWAPFLLESNSDNATVHRVSDRIVRKGSINKHGRHWRGADIVVFNTYLWWRTGFKMKILEGSFKDEKKRIVEMESEDAYRMALKTMVKWVKKNMDPLKTRVFFATMSPTHYKGEDWGGEQGKNCYNQTTPIQDMNHWPSDCSKTLMKVIGEELDQRAEFPVTVLNITQLSGYRKDAHTSIYKKQWSPLTKEQLANPASYSDCIHWCLPGLQDTWNELFFAKLFYP

SEQ ID NO: 106401 - protein, 276 aa, Arabidopsis thaliana
  peptide (1)..(276): Ceres Seq. ID no. 13619479
MMFVGDSLNRGMYVSLICLLHSQIPENSKSMDTFGSLTVFSLKDYNATIEFYWAPFLLESNSDNATVHRVSDRIVRKGSINKHGRHWRGADIVVFNTYLWWRTGFKMKILEGSFKDEKKRIVEMESEDAYRMALKTMVKWVKKNMDPLKTRVFFATMSPTHYKGEDWGGEQGKNCYNQTTPIQDMNHWPSDCSKTLMKVIGEELDQRAEFPVTVLNITQLSGYRKDAHTSIYKKQWSPLTKEQLANPASYSDCIHWCLPGLQDTWNELFFAKLFYP

SEQ ID NO: 106402 - DNA, 1715 bp, Arabidopsis thaliana
  misc_feature (1)..(1715): Ceres Seq. ID no. 13619484
  misc_feature (1)..(1715): Ortholog of  Ceres SEQ ID NO 15224709 as cited in SEQ ID NO 68627
aatcgagtcaaaataatattcgagcaaaaaacaaaagaaatggttatggagcaagctggaacgacatcgtattcggtcgtgtcagagtttgaaggaacaatactgaagaacgcagattcattctcttacttcatgctcgtagccttcgaagcagctggtctaattcgtttcgctatcttgttgtttctatggcccgtaatcacactccttgacgttttcagctacaaaaacgcagctctcaagctcaagatttttgtagccactgttggtctacgtgaaccggagatcgaatcagtggctagagccgttctgccaaaattctacatggacgacgtaagcatggacacgtggagggttttcagctcgtgtaagaagagggtcgtggtcacgagaatgcctcgagttatggtggagaggtttgctaaggagcatcttagagcagatgaggtcatcggtacggaactgattgtaaaccggttcggttttgtcaccggtttgattcgcgaaacggatgttgatcagtctgctttgaaccgtgtcgctaatttgtttgttggtcggaggcctcaactaggtcttggaaaaccggctttgaccgcctctacaaatttcttatcgttatgtgaggagcatattcatgcaccaatcccggagaactacaaccacggtgaccaacaacttcagctacgtccacttccggtgatatttcacgacggaagactagtgaagcggccaacgccggccaccgctctcatcatcctcctttggatcccatttggaatcattctcgccgtgatccggatctttcttggagccgtcctcccattgtgggccacaccttacgtctctcagatattcggtggccatatcatcgtcaaaggaaagcctcctcagccaccggcggctggaaaatccggcgtgctctttgtgtgtactcacagaaccctaatggaccctgtggtattatcttatgtcctcggacgtagcatcccagccgttacttactcaatctcgcgcttatcagagatcttatctcccattccaaccgtccgattgacaagaatccgagatgtggatgcggctaagatcaaacaacaactgtcaaaaggagatctagtggtttgtcctgagggaaccacttgtcgtgaaccgtttttgttaagattcagcgcgcttttcgctgagttaacggataggattgttccggttgcgatgaactacagagtcggattcttccacgcgactacagcgagaggctggaagggtttggacccaattttcttcttcatgaacccaagaccggtttacgagattacgttcttgaaccagcttcctatggaggcaacatgttcgtccgggaagagcccgcatgacgtggcgaactatgttcagagaatcttggcggctacgttagggtttgagtgcaccaacttcacaagaaaagataagtatagggttctcgctggaaacgatggaacggtgtcgtacttgtcgttgctagaccaattgaagaaggtggttagcactttcgagccttgtctccattgaaaatactagaagtatagatcatccgatgattttctctctgttttaatatattagatcagtagtttcaaattaaacctgtttgcagtttctttctttcgattttagttttgtttgtgataaaagtttgagatgatttttttatatggtcaagtgttgaattcttgttt

SEQ ID NO: 106403 - protein, 515 aa, Arabidopsis thaliana
  peptide (1)..(515): Ceres Seq. ID no. 13619485
NRVKIIFEQKTKEMVMEQAGTTSYSVVSEFEGTILKNADSFSYFMLVAFEAAGLIRFAILLFLWPVITLLDVFSYKNAALKLKIFVATVGLREPEIESVARAVLPKFYMDDVSMDTWRVFSSCKKRVVVTRMPRVMVERFAKEHLRADEVIGTELIVNRFGFVTGLIRETDVDQSALNRVANLFVGRRPQLGLGKPALTASTNFLSLCEEHIHAPIPENYNHGDQQLQLRPLPVIFHDGRLVKRPTPATALIILLWIPFGIILAVIRIFLGAVLPLWATPYVSQIFGGHIIVKGKPPQPPAAGKSGVLFVCTHRTLMDPVVLSYVLGRSIPAVTYSISRLSEILSPIPTVRLTRIRDVDAAKIKQQLSKGDLVVCPEGTTCREPFLLRFSALFAELTDRIVPVAMNYRVGFFHATTARGWKGLDPIFFFMNPRPVYEITFLNQLPMEATCSSGKSPHDVANYVQRILAATLGFECTNFTRKDKYRVLAGNDGTVSYLSLLDQLKKVVSTFEPCLH

SEQ ID NO: 106404 - protein, 502 aa, Arabidopsis thaliana
  peptide (1)..(502): Ceres Seq. ID no. 13619486
MVMEQAGTTSYSVVSEFEGTILKNADSFSYFMLVAFEAAGLIRFAILLFLWPVITLLDVFSYKNAALKLKIFVATVGLREPEIESVARAVLPKFYMDDVSMDTWRVFSSCKKRVVVTRMPRVMVERFAKEHLRADEVIGTELIVNRFGFVTGLIRETDVDQSALNRVANLFVGRRPQLGLGKPALTASTNFLSLCEEHIHAPIPENYNHGDQQLQLRPLPVIFHDGRLVKRPTPATALIILLWIPFGIILAVIRIFLGAVLPLWATPYVSQIFGGHIIVKGKPPQPPAAGKSGVLFVCTHRTLMDPVVLSYVLGRSIPAVTYSISRLSEILSPIPTVRLTRIRDVDAAKIKQQLSKGDLVVCPEGTTCREPFLLRFSALFAELTDRIVPVAMNYRVGFFHATTARGWKGLDPIFFFMNPRPVYEITFLNQLPMEATCSSGKSPHDVANYVQRILAATLGFECTNFTRKDKYRVLAGNDGTVSYLSLLDQLKKVVSTFEPCLH

SEQ ID NO: 106405 - protein, 500 aa, Arabidopsis thaliana
  peptide (1)..(500): Ceres Seq. ID no. 13619487
MEQAGTTSYSVVSEFEGTILKNADSFSYFMLVAFEAAGLIRFAILLFLWPVITLLDVFSYKNAALKLKIFVATVGLREPEIESVARAVLPKFYMDDVSMDTWRVFSSCKKRVVVTRMPRVMVERFAKEHLRADEVIGTELIVNRFGFVTGLIRETDVDQSALNRVANLFVGRRPQLGLGKPALTASTNFLSLCEEHIHAPIPENYNHGDQQLQLRPLPVIFHDGRLVKRPTPATALIILLWIPFGIILAVIRIFLGAVLPLWATPYVSQIFGGHIIVKGKPPQPPAAGKSGVLFVCTHRTLMDPVVLSYVLGRSIPAVTYSISRLSEILSPIPTVRLTRIRDVDAAKIKQQLSKGDLVVCPEGTTCREPFLLRFSALFAELTDRIVPVAMNYRVGFFHATTARGWKGLDPIFFFMNPRPVYEITFLNQLPMEATCSSGKSPHDVANYVQRILAATLGFECTNFTRKDKYRVLAGNDGTVSYLSLLDQLKKVVSTFEPCLH

SEQ ID NO: 106406 - DNA, 1517 bp, Arabidopsis thaliana
  misc_feature (1)..(1517): Ceres Seq. ID no. 13619514
  misc_feature (1)..(1517): Ortholog of  Ceres SEQ ID NO 12625948 as cited in SEQ ID NO 64717
atcagaaaccttcttaagtttggtctgaaaatcagatcgagatgcgttcgttaaagttactcctttgttggatctcgtttcttacgttatcaatctcaatctctgcatcgtcagatgatcaattcaccctcgacggaacagttttagaactcaccgattcgaatttcgactcggcgatttcaactttcgattgcatctttgttgatttctatgctccttggtgtggtcactgcaagcgtctcaatcccgagttagacgcagctgctccaattcttgctaaattgaagcagcctattgtgattgcaaagctgaatgctgataagtattctcgtctcgctcggaagattgagattgatgcatttccgactctcatgctttataaccatggagttccaatggagtactatggaccaaggaaagcagatttgcttgtgcgttacttgaagaagtttgttgctccagatgttgcggttcttgagtcagactcaactgtcaaggagtttgttgaagatgctgggacattcttccctgtgtttatcgggtttggtttgaacgaatcgataatatcaggattaggtcggaagtataagaagaaggcatggtttgctgtttcaaaggaagtttcagaggatactatggtttcttatgattttgataaggctcctgcattagttgccaatcatccaacttacaatgagcatagcgtgttttacgggccattcgaagatggattcttggaggaatttgtgaaacagagttttcttcctttgattctacctattaaccatgacacattgaagttgttgaaggacgatgagagaaagattgtcttgacgatcgtggaagatgaaacacacgaaagcttggagaaactatacaaagcattgagagcagctgctcatgcgaaccgcgacctcgtttttggctacgtcggtgtgaagcagtttgaagagtttgttgactcgtttcatgtagacaagaagacaaatctgcctaagattgttgtgtgggatggagatgaagagtatgatcaggtgacgggtatagagaccataacccaagaggaagatcatttgacccaagtgtctcggtttctagagggctatagagaaggaagaacagagaagaagaaaatcaacggaccatcgttcatgggatttatcaactcaatgattgggattaggtcagtgtacatccttgtgttcttggttgcggtcattatgatgctacggagcctcggtcaagttgaggagcctactggagtccggaccgccacagcagtccgtgaaagagttgatcaggccactactgtccctgaagatgaaagcagtgagcataagcctagtgacaaaaaagaggactagttttgttacacttgaatgtggtatgttttttttcttcttttatacttgaagctaacttatatagttcatgcttatttatcttctttatggttagtctttttgggttttaaacggatggttgttccattttatttatgaatcattttggctctc

SEQ ID NO: 106407 - protein, 440 aa, Arabidopsis thaliana; identical to SEQ ID NO: 29024
  peptide (1)..(440): Ceres Seq. ID no. 13619515

SEQ ID NO: 106408 - protein, 330 aa, Arabidopsis thaliana; identical to SEQ ID NO: 29025
  peptide (1)..(330): Ceres Seq. ID no. 13619516

SEQ ID NO: 106409 - protein, 322 aa, Arabidopsis thaliana
  peptide (1)..(322): Ceres Seq. ID no. 13619517
MEYYGPRKADLLVRYLKKFVAPDVAVLESDSTVKEFVEDAGTFFPVFIGFGLNESIISGLGRKYKKKAWFAVSKEVSEDTMVSYDFDKAPALVANHPTYNEHSVFYGPFEDGFLEEFVKQSFLPLILPINHDTLKLLKDDERKIVLTIVEDETHESLEKLYKALRAAAHANRDLVFGYVGVKQFEEFVDSFHVDKKTNLPKIVVWDGDEEYDQVTGIETITQEEDHLTQVSRFLEGYREGRTEKKKINGPSFMGFINSMIGIRSVYILVFLVAVIMMLRSLGQVEEPTGVRTATAVRERVDQATTVPEDESSEHKPSDKKED

SEQ ID NO: 106410 - DNA, 851 bp, Arabidopsis thaliana
  misc_feature (1)..(851): Ceres Seq. ID no. 13619518
  misc_feature (1)..(851): Ortholog of  Ceres SEQ ID NO 15173803 as cited in SEQ ID NO 61759
tccaaagtctcgagcttagagctctctctcagtcgaaaacaatggcgtcttcttcagcgacgctctctctctgctctactttctctgctcattgcaatgtcaattctcgccgttctagcactatcctctgttctctctctaaaccttcgcttaatttggctaaacctctgactggatttctttctccttccactgcgtcgacgtctcgaaccgcattcaccgtcgctccgaaattcgcggaatcagtcgtcgaagctgaaccggagactaccgatatcgaagctgtggtggtttccgatgtttcggaggttactgaggaaaaagctaaacgagaagagattttcgctgttattatggttggtggacgccaatacatagtgtttccagggagatatctctacactcagaggctaaaagatgcaaatgttgatgaccagattgttctcaacaaagtgttgcttgttggaacaaagacacacacttacattggcaagccggttgtgaccaatgccactgtacatgctgttgtggaaagtcaaggtttgaatgataaagtggtagtcttcaagtacaagcctaagaagaagtaccgtagaaatatcggtcacagacagccgaatacgaggattaggattaccggaatcacagggtatgaagagtatccagcctcgcccaatgttgcagttggagaagtaaatctttgacacaaaatgtttcttgaatgttaaaatttttctgatcttctctatgtaattttgtaaggaccctggtcatttcatttctgctgagattccttttattaatatgtaccttttgccattctttgatcacaaattctaagttagtgtatg

SEQ ID NO: 106411 - protein, 233 aa, Arabidopsis thaliana; identical to SEQ ID NO: 26778
  peptide (1)..(233): Ceres Seq. ID no. 13619519

SEQ ID NO: 106412 - protein, 220 aa, Arabidopsis thaliana; identical to SEQ ID NO: 26779
  peptide (1)..(220): Ceres Seq. ID no. 13619520

SEQ ID NO: 106413 - protein, 116 aa, Arabidopsis thaliana; identical to SEQ ID NO: 26780
  peptide (1)..(116): Ceres Seq. ID no. 13619521

SEQ ID NO: 106414 - DNA, 1396 bp, Arabidopsis thaliana
  misc_feature (1)..(1396): Ceres Seq. ID no. 13619522
  misc_feature (1)..(1396): Ortholog of  Ceres SEQ ID NO 13647016 as cited in SEQ ID NO 20325
  misc_feature (1)..(1396): Ortholog of  Ceres SEQ ID NO 15179824 as cited in SEQ ID NO 66250
  misc_feature (1)..(1396): Ortholog of  Ceres SEQ ID NO 13657872 as cited in SEQ ID NO 66357
atgtattaagacttgacaacttgtctttctcacaccaaacccctctcctctgtttcataacatctgctctttcttttttttcctaagcccctaatgacaaaccataatgccttaatctctgatgctaaaggcagcatcggagttgcggttagagttccaaaccaatctctgttttctcccggaggtggccgatacatcagcattccccggaagaaactcgtgcagaagctagaggccgacccgagtcaaacccgtatccacacttggatcgaagccatgagggcttcttccccaacccgtacccgaccggggaacatatctcccctcccggagtccgatgaggaggatgaatactcttcttggatggctcaacacccgtcagctttaaccatgtttgaagagatagctgaagcttcaaaagggaaacaaatcgtgatgtttctcgactatgacggtacattatcccccattgttgaaaaccctgatcgagcttacatgtctgaagagatgagagaggcagtgaaaggcgtggctagatatttcccgaccgcgattgtcactggaagatgccgtgataaggttcgtagatttgtgaaacttcccggactttactatgcaggtagccatggaatggacatcaaaggaccttccaaaagaaacaaacataacaagaacaataaaggagttcttttccaagcggcgaatgagtttttgcctatgattgacaaggtctctaagtgtctagtagagaaaatgagagacatagaaggagcaaacgtcgagaacaacaagttttgtgtctccgtacattaccgttgtgttgatcaaaaggactggggattggtagcggaacacgtgacatcgatattgagtgagtatccgaaactgaggttgacacaaggaagaaaagtcttagagattcgaccaaccatcaaatgggataaaggcaaagctctcgagttcttgctcgaatccttaggattcgctaactctaacgatgttttgcccatctatataggagatgatcgtacggacgaggatgctttcaaggttttgagaaacaaaggacaaggctttggtatacttgtgtccaaaattccaaaggaaacgagtgctacatattctctacaagaaccttccgaggtaggagagtttttgcagcgactcgtggaatggaaacaaatgtcactaagaggaagatagccaatttcctgacataaatttattttcaattaataaatgaattagttttcactatgcaacaaaaattgttgtatatatgatcaatgtttttttaattattttactcttcatgaacaaatgtaagtttataggaactttcttaaccaagaaaaaagtaagtttgctagtataatattttcatcattctcttttt

SEQ ID NO: 106415 - protein, 369 aa, Arabidopsis thaliana
  peptide (1)..(369): Ceres Seq. ID no. 13619523
MTNHNALISDAKGSIGVAVRVPNQSLFSPGGGRYISIPRKKLVQKLEADPSQTRIHTWIEAMRASSPTRTRPGNISPLPESDEEDEYSSWMAQHPSALTMFEEIAEASKGKQIVMFLDYDGTLSPIVENPDRAYMSEEMREAVKGVARYFPTAIVTGRCRDKVRRFVKLPGLYYAGSHGMDIKGPSKRNKHNKNNKGVLFQAANEFLPMIDKVSKCLVEKMRDIEGANVENNKFCVSVHYRCVDQKDWGLVAEHVTSILSEYPKLRLTQGRKVLEIRPTIKWDKGKALEFLLESLGFANSNDVLPIYIGDDRTDEDAFKVLRNKGQGFGILVSKIPKETSATYSLQEPSEVGEFLQRLVEWKQMSLRGR

SEQ ID NO: 106416 - protein, 308 aa, Arabidopsis thaliana
  peptide (1)..(308): Ceres Seq. ID no. 13619524
MRASSPTRTRPGNISPLPESDEEDEYSSWMAQHPSALTMFEEIAEASKGKQIVMFLDYDGTLSPIVENPDRAYMSEEMREAVKGVARYFPTAIVTGRCRDKVRRFVKLPGLYYAGSHGMDIKGPSKRNKHNKNNKGVLFQAANEFLPMIDKVSKCLVEKMRDIEGANVENNKFCVSVHYRCVDQKDWGLVAEHVTSILSEYPKLRLTQGRKVLEIRPTIKWDKGKALEFLLESLGFANSNDVLPIYIGDDRTDEDAFKVLRNKGQGFGILVSKIPKETSATYSLQEPSEVGEFLQRLVEWKQMSLRGR

SEQ ID NO: 106417 - protein, 279 aa, Arabidopsis thaliana
  peptide (1)..(279): Ceres Seq. ID no. 13619525
MAQHPSALTMFEEIAEASKGKQIVMFLDYDGTLSPIVENPDRAYMSEEMREAVKGVARYFPTAIVTGRCRDKVRRFVKLPGLYYAGSHGMDIKGPSKRNKHNKNNKGVLFQAANEFLPMIDKVSKCLVEKMRDIEGANVENNKFCVSVHYRCVDQKDWGLVAEHVTSILSEYPKLRLTQGRKVLEIRPTIKWDKGKALEFLLESLGFANSNDVLPIYIGDDRTDEDAFKVLRNKGQGFGILVSKIPKETSATYSLQEPSEVGEFLQRLVEWKQMSLRGR

SEQ ID NO: 106418 - DNA, 1602 bp, Arabidopsis thaliana
  misc_feature (1)..(1602): Ceres Seq. ID no. 13619526
  misc_feature (1)..(1602): Ortholog of  Ceres SEQ ID NO 13587235 as cited in SEQ ID NO 0
gacaacgatcatccaggtcccactctgcttcttaaccattctttaccaaaaatcaattgttctctccctctcagcttccgaagtcttcatctttctcgacaatatctaaaccttgtctgagaatcatttgaagaagatctttcatcatcaccgatccactttctgatttaggtcaatggaacagacaaaggatgattctgattttgaggatgattgtgaaacgaagaagatggagactgatacatcagctcaagaggcaaggaatggtaaagacatacaagggattcagtgggaagggtttaagtataatagagacgagtttcgtgagactaggttgaaacaatatgataactttgttaatatcttaaggcctagctctcgagaaaagcttgataaggaacatgggcaagtagttgagaaaggaaagaacttttatgacttccaattcaatacaaggcttgtcacttccactattgtgcattttcagcttcggaatttggtatgggcgacatctaagcatgatgtatatctaatgcaaaattattcactcatgcactggtcatctctactccagagagggaaagaagtacttaatgtcgccagatcagttacccccactcagaaactacctggattgttttctgagccactctctagggtgcaagttagcagcatggcagtcaaagaaaatctgatccttttaggagggttcgacggggagcttctctgcaagtgtgtaaatcagcctggggttgctttttgcacaagattatcaacggaagataatgccatcacaaacacagttgatatataccgagacccaagtggctcccttaggcttataaccgcaaataacgactgtaaaattcgtgtattcgatgctcagagctttacacgtgtcagtgaatttgctttagattggtctgtcaataatacctcagttagcccggatgggaagctactcgctgtagtcggggacagtacagaatgcttgatctctgattcccattctggaaaagttatttcaagcctcagaggccacaaagactactcatttgcatctgcttggcacccgaatggtctaatcttagcaacgggaaaccaagacacggcatgccgtctctgggacattcgtaacccgtcagaatcattcgctgtcctgaaaggaaacatgggagccatcagaggactgaagttcacaccagaagggcggtttcttgcaatggctgagcctgcagactttgttcacatcttcgacacgcagtccgggtttctacagtcccaagagattgatctgtttggagaaatagccgggatctcgttcagccccgatacagaggcactatatgtaggggtcgcagaccgcacttatggaagtttgctggagtataagaggagaaaggataatcactatatggactccttttactgagaaaaggtaaatgaaaagtaaaaagcatctaatatgttgtcacaagatgggtttaaccctattagtgtgtatatgtagacagaattggtagtttctttggtaatatctgttatgtacccataatatatcttaccaaactttaagtatgttttgttaattgtgattgtttt

SEQ ID NO: 106419 - protein, 418 aa, Arabidopsis thaliana
  peptide (1)..(418): Ceres Seq. ID no. 13619527
MEQTKDDSDFEDDCETKKMETDTSAQEARNGKDIQGIQWEGFKYNRDEFRETRLKQYDNFVNILRPSSREKLDKEHGQVVEKGKNFYDFQFNTRLVTSTIVHFQLRNLVWATSKHDVYLMQNYSLMHWSSLLQRGKEVLNVARSVTPTQKLPGLFSEPLSRVQVSSMAVKENLILLGGFDGELLCKCVNQPGVAFCTRLSTEDNAITNTVDIYRDPSGSLRLITANNDCKIRVFDAQSFTRVSEFALDWSVNNTSVSPDGKLLAVVGDSTECLISDSHSGKVISSLRGHKDYSFASAWHPNGLILATGNQDTACRLWDIRNPSESFAVLKGNMGAIRGLKFTPEGRFLAMAEPADFVHIFDTQSGFLQSQEIDLFGEIAGISFSPDTEALYVGVADRTYGSLLEYKRRKDNHYMDSFY

SEQ ID NO: 106420 - protein, 400 aa, Arabidopsis thaliana
  peptide (1)..(400): Ceres Seq. ID no. 13619528
METDTSAQEARNGKDIQGIQWEGFKYNRDEFRETRLKQYDNFVNILRPSSREKLDKEHGQVVEKGKNFYDFQFNTRLVTSTIVHFQLRNLVWATSKHDVYLMQNYSLMHWSSLLQRGKEVLNVARSVTPTQKLPGLFSEPLSRVQVSSMAVKENLILLGGFDGELLCKCVNQPGVAFCTRLSTEDNAITNTVDIYRDPSGSLRLITANNDCKIRVFDAQSFTRVSEFALDWSVNNTSVSPDGKLLAVVGDSTECLISDSHSGKVISSLRGHKDYSFASAWHPNGLILATGNQDTACRLWDIRNPSESFAVLKGNMGAIRGLKFTPEGRFLAMAEPADFVHIFDTQSGFLQSQEIDLFGEIAGISFSPDTEALYVGVADRTYGSLLEYKRRKDNHYMDSFY

SEQ ID NO: 106421 - protein, 299 aa, Arabidopsis thaliana; identical to SEQ ID NO: 74702
  peptide (1)..(299): Ceres Seq. ID no. 13619529

SEQ ID NO: 106422 - DNA, 2002 bp, Arabidopsis thaliana
  misc_feature (1)..(2002): Ceres Seq. ID no. 13619537
  misc_feature (1)..(2002): Ortholog of  Ceres SEQ ID NO 13597732 as cited in SEQ ID NO 64810
aacgtttatggatttgagtcgttctcaaacaaattttcaattagggtttggttgttcacacgcatcaatgactccaacaccaacaccaagagctccaatcgcagacgattcgattaatctacaagtcgatcaaagtttccgatcattaccaacaactttctctccgattccgttacaattactcgaacaaaaagccgagaagaccaccaccgttgatgagccaaagaaagatggaggaggaggaggagatcaaaaggaagacgagcatttcagaatcttaggtcaccatatgtgtctcaaaaggcaaagagattgtccacttttgttaacgcaatcaaagcatccgaagagaagttccatcggtgattcagatctggaatcgcgacgtgctgctgtacgagcttggggtgatcaaccgattcatttggcggatcctgatattcatgagcttatggagaaagagaagcaacgacaagtaagaggaattgaattgattgcttctgagaatttcgtgtgtagagctgtaatggaagctttaggtagtcatttaacgaataaatactctgaaggtatgcctggagctagatactatactgggaatcaatatattgatcagattgagaatctctgtattgagcgtgctcttactgcgtttggtcttgaatctgataaatggggtgttaatgttcagccttattcttgtacttctgctaacttcgcggtgtataccggacttttattgcccggtgaacggattatggggcttgattcgccttctggtggtcatatgagtcatggttattgtactcctggtgggaagaagatttcggctgcttccatcttctttgagagttttccttataaagtgaatcctcaaactgggtatattgattatgataagcttgaagataaggcgcttgattaccgtcctaagattcttatttgtggtgggagttcttatcctagggattgggattttgcaagggttagacagattgcagataagtgtggagctgttttgatgtgtgatatggctcatattagcggtcttgttgcaactaaggaatgttcaaatccatttgatcactgtgacatagtaacctccactactcacaaaggtctacgtggtcctagaggaggtatcatcttctacaggagaggcccaaagataagaaagcagggccatcactctagccattgtgacacttccacgcattacgatctagaggaaaagatcaactttgctgtttttccatctctacaaggaggtccacacaacaaccatatcgctgctcttgccattgcattgaaacaagtggccactccagagtacaaagcttacatacaacagatgaagaaaaacgcccaagctttagcagcagctcttcttagaagaaaatgcagactggttactggtggtacagacaaccatttgttgctgtgggatctcactcctatgggcttaacagggaaagtctacgagaaagtgtgtgagatgtgccatatcactttaaacaagacggctatattcggggacaatggtacaatatctcctggaggtgtaagaatagggacacccgcaatgacaacccgaggctgtatagagtctgatttcgagacaatggcggattttctgataaaggcggctcagataacaagtgcgttgcagagagagcatggaaagtcacacaaggagtttgtgaaaagtttatgcaccaacaaagacatagctgagcttagaaaccgagtcgaagcatttgctttgcagtatgagatgcctgcttctcttattcgaattgaatgaaagaaaactccacacaacagctttatttacagttgaattttatcttatctctgggtcaatttttttttttttttttggagttctatcttgtaaattagagtaaatatatatttatattgggattgatttgcattatttttttccattgtaattctgtacacattttgataaatgggaatgattactacaaatttactt

SEQ ID NO: 106423 - protein, 600 aa, Arabidopsis thaliana; identical to SEQ ID NO: 41619
  peptide (1)..(600): Ceres Seq. ID no. 13619538

SEQ ID NO: 106424 - protein, 598 aa, Arabidopsis thaliana; identical to SEQ ID NO: 41620
  peptide (1)..(598): Ceres Seq. ID no. 13619539

SEQ ID NO: 106425 - protein, 578 aa, Arabidopsis thaliana; identical to SEQ ID NO: 41621
  peptide (1)..(578): Ceres Seq. ID no. 13619540

SEQ ID NO: 106426 - DNA, 1027 bp, Arabidopsis thaliana
  misc_feature (1)..(1027): Ceres Seq. ID no. 13619541
  misc_feature (1)..(1027): Ortholog of  Ceres SEQ ID NO 13638097 as cited in SEQ ID NO 57043
  misc_feature (1)..(1027): Ortholog of  Ceres SEQ ID NO 13596416 as cited in SEQ ID NO 62177
  misc_feature (1)..(1027): Ortholog of  Ceres SEQ ID NO 13659338 as cited in SEQ ID NO 66875
attttttcctttgggactcactgagattactactaccaaatccaacaatggcgatttctttcgcaatcgatccttccatatctccttgcttctccttctcctctccatcttcttcatcaaaaaccttacctttacgaaacaacctccatttccatggcagaccttcaccaatatctccactcatttcaaaacccagtcgaaaattcccaatcttctctgctcaccaaactaataacagtgaagaagcgaattcaaagcagcaagcagatgtaaaaaccctaattaggtcatataaacaagctcttctcaacggagacgaaacctcagttacagaaatcgaaacgatgttttgcaaaatcgagaaggagaagaataaaatggatcaaaaggttttatctttatcaatgaagatagcttcagagaaagagatgaaaattcgattacaagctgattttgataatacaaggaagaagcttgataaagataggcttagtacagagtctaatgcaaaagttcagattcttaagtctcttttacctattattgatagttttgagaaagctaagttacaggttagagttgatactgataaggagaagaagattgatacgagttatcaagggatttataggcaatttgttgaggttttgagatatcttcgtgtttcggttattgcaactgttggcaagccttttgatcctttgttgcacgaggctatttcacgggaagaatctgaggcggttaaagcagggataataaccgaggagctgaacaagggatttgttctaggagatcgtgttctgagaccagcaaaggttaaagtttctttaggacccgtcaacaagaagactccttcagctgctgaggaaataacaccttctgcttgagttcgatgtcgggtaaaagtttcaatgtcttgtgctaatgtccattttttattcacctatcaaagggataccaaaattgcaacaatgtctaatgagaaagttctttggcttcagagtttatgattcatgttttacgattt

SEQ ID NO: 106427 - protein, 294 aa, Arabidopsis thaliana
  peptide (1)..(294): Ceres Seq. ID no. 13619542
FFLWDSLRLLLPNPTMAISFAIDPSISPCFSFSSPSSSSKTLPLRNNLHFHGRPSPISPLISKPSRKFPIFSAHQTNNSEEANSKQQADVKTLIRSYKQALLNGDETSVTEIETMFCKIEKEKNKMDQKVLSLSMKIASEKEMKIRLQADFDNTRKKLDKDRLSTESNAKVQILKSLLPIIDSFEKAKLQVRVDTDKEKKIDTSYQGIYRQFVEVLRYLRVSVIATVGKPFDPLLHEAISREESEAVKAGIITEELNKGFVLGDRVLRPAKVKVSLGPVNKKTPSAAEEITPSA

SEQ ID NO: 106428 - protein, 279 aa, Arabidopsis thaliana; identical to SEQ ID NO: 25466
  peptide (1)..(279): Ceres Seq. ID no. 13619543

SEQ ID NO: 106429 - protein, 180 aa, Arabidopsis thaliana; identical to SEQ ID NO: 25467
  peptide (1)..(180): Ceres Seq. ID no. 13619544

SEQ ID NO: 106430 - DNA, 3590 bp, Arabidopsis thaliana
  misc_feature (1)..(3590): Ceres Seq. ID no. 13619549
  misc_feature (1)..(3590): Ortholog of  Ceres SEQ ID NO 13584744 as cited in SEQ ID NO 69137
gaattcgtcgaggaacatcgcagaggacagtaaagaagcaaaccaagaagaccaagtggaggaggacgatgactatggtgacgcgtgtgatcatgacggatgatgattctcagtcactttgctttctttgtttcttactcttctttttcatcactgctatagcagtggctggagattctctggacagtgatagagaagtcttgttaagcctaaaatcgtaccttgaatcacggaacccacagaaccgaggactatacacggaatggaaaatggagaaccaagatgttgtgtgtcaatggcctggaatcatatgtacacctcagagaagtagagttacagggatcaatctaactgattccaccatttcaggtcctctattcaagaacttctccgctttaacggagctcacatatctcgatttatcaaggaatacgatcgaaggggagattccagatgacttgagccgttgtcacaacttaaagcatctgaatctttctcataatatccttgaaggagagctaagtttacccgggttgtcaaatcttgaggttcttgatctttcgttgaataggattacgggtgatattcagtctagcttcccattgttctgcaacagtttggttgttgcaaatctgtcgaccaacaactttactggaagaatcgatgacatcttcaacgggtgtaggaatctcaagtatgttgacttcagttccaatagattcagtggagaagtgtggactggttttgggaggctggtcgagttttcagttgctgataatcatctctccgggaatatctctgcttcaatgttcagggggaactgtactttgcaaatgttggatttgtctgggaacgcttttggtggggaatttccaggccaagtttcgaattgccagaatctaaatgtactgaatctttggggaaacaagttcacagggaacattccagctgagattggttccatatcctctctcaaaggtttgtacttggggaataatacattttctcgagacataccggaaactctcctgaacttgaccaacttggtgtttctggatttgagcagaaacaaatttggaggagacattcaagaaatctttgggagattcacgcaagtaaagtatctagtcttgcatgcaaactcatacgtaggaggcatcaattcttccaacatcctcaagttacccaatctttcaaggctagatttgggctacaacaatttctcgggacagttacctactgaaatttctcagatacagagtttgaagttcttgattcttgcttataataacttcagtggcgatataccacaggagtatgggaacatgccggggcttcaagcacttgatctctcctttaacaagctgaccggttcgataccagcttcatttgggaaattgacctctcttttgtggctaatgcttgcaaacaactctctatcaggagaaatccctcgagagattggcaactgcacaagccttttgtggtttaacgtggcaaacaaccagctctctggtagattccatcctgaattgactagaatggggagtaatccttctccaacatttgaagtgaataggcaaaacaaagacaagataattgctggttctggtgaatgcttggcgatgaagagatggattccagcggagttccctccgttcaactttgtatacgcaattctaaccaaaaagagttgcagaagcctatgggaccatgttctcaaagggtacggtctctttcctgtctgttctgctggttccacggtacgcacgcttaaaatttcagcctatcttcagctcagtggaaataagttttcaggtgagattcctgcaagcatctctcagatggacaggctgagcacactacatttgggtttcaatgagtttgaggggaaactgcctccagagataggacaattgcctcttgcattcctcaaccttactcgaaacaatttctcgggcgagattcctcaagaaatcggaaatctgaagtgcctgcagaatcttgatctgtctttcaacaatttctctggaaactttccaacgagtttgaatgacttgaatgagctgagtaagttcaacatctcatataaccctttcatttctggcgcgataccaacaacaggacaagtagcaacctttgacaaagactcctttcttggaaatccgctgctgcggtttcctagtttcttcaaccaatcagggaacaacacgaggaagatttccaaccaagtcctaggaaacaggccaagaactcttcttttgatttggatttccttggctcttgcattggcgtttattgcatgtttagtggtatcaggtattgtacttatggttgttaaggcttcaagggaagcagaaatcgatctcttagatgggtcgaaaaccagacatgacatgacttccagttcaggtggatcatcgccatggctatcaggaaaaatcaaggtcattcgcttagacaaatcaactttcacatacgctgacattctgaaagcaaccagtaacttctctgaggagagagtggtaggtaggggaggctatggaactgtttacagaggcgtattgcctgatggaagagaagttgcagtcaagaagcttcagagggaaggcacagaagcagagaaagagttcagagctgaaatggaagttctaagtgccaacgcatttggagattgggcacatccgaacctcgtgaggctatatggatggtgcctagatgggtcagagaaaatcttggtgcacgaatacatgggaggcgggagcttagaggagctcatcacagacaaaacaaaacttcaatggaagaaacgtattgatatagccacagatgtagcaaggggattagtgtttttacaccacgaatgctacccttccatcgttcacagagacgtcaaagccagtaacgttcttttggataaacacgggaatgcgagagtgacggattttggactagcaagactcttaaatgtaggagatagccatgtgagcacagtgattgcaggcacaatcgggtatgtagctcccgagtatggacaaacttggcaagccaccacaagaggagatgtttacagctacggagtattgaccatggaactcgcgacgggtagaagagctgttgatggaggagaagagtgtttggtcgaatgggcaagacgtgtaatgacaggtaacatgacagccaaaggttcaccaataaccctgtcagggaccaaaccagggaacggagctgagcaaatgactgagctactaaagattggtgtgaagtgtacagctgatcatcctcaggcaagaccaaacatgaaagaagttctagctatgttggttaagatatccggtaaagcagagctcttcaatggcttatcttcacaaggttacatagaaatgtaaaaatctttctttcttttcttctttcagatttattatacagaacaacagagttttcttcttcaccatttttcgtttcattgtttctgattcttcttgtacacagaacctcattgttatcagacagatagggatagagaaaggtagttttgttcgcaatgtacagagacacaatctgaaaataaagatcttctcttcttcttg

SEQ ID NO: 106431 - protein, 1128 aa, Arabidopsis thaliana
  peptide (1)..(1128): Ceres Seq. ID no. 13619550
IRRGTSQRTVKKQTKKTKWRRTMTMVTRVIMTDDDSQSLCFLCFLLFFFITAIAVAGDSLDSDREVLLSLKSYLESRNPQNRGLYTEWKMENQDVVCQWPGIICTPQRSRVTGINLTDSTISGPLFKNFSALTELTYLDLSRNTIEGEIPDDLSRCHNLKHLNLSHNILEGELSLPGLSNLEVLDLSLNRITGDIQSSFPLFCNSLVVANLSTNNFTGRIDDIFNGCRNLKYVDFSSNRFSGEVWTGFGRLVEFSVADNHLSGNISASMFRGNCTLQMLDLSGNAFGGEFPGQVSNCQNLNVLNLWGNKFTGNIPAEIGSISSLKGLYLGNNTFSRDIPETLLNLTNLVFLDLSRNKFGGDIQEIFGRFTQVKYLVLHANSYVGGINSSNILKLPNLSRLDLGYNNFSGQLPTEISQIQSLKFLILAYNNFSGDIPQEYGNMPGLQALDLSFNKLTGSIPASFGKLTSLLWLMLANNSLSGEIPREIGNCTSLLWFNVANNQLSGRFHPELTRMGSNPSPTFEVNRQNKDKIIAGSGECLAMKRWIPAEFPPFNFVYAILTKKSCRSLWDHVLKGYGLFPVCSAGSTVRTLKISAYLQLSGNKFSGEIPASISQMDRLSTLHLGFNEFEGKLPPEIGQLPLAFLNLTRNNFSGEIPQEIGNLKCLQNLDLSFNNFSGNFPTSLNDLNELSKFNISYNPFISGAIPTTGQVATFDKDSFLGNPLLRFPSFFNQSGNNTRKISNQVLGNRPRTLLLIWISLALALAFIACLVVSGIVLMVVKASREAEIDLLDGSKTRHDMTSSSGGSSPWLSGKIKVIRLDKSTFTYADILKATSNFSEERVVGRGGYGTVYRGVLPDGREVAVKKLQREGTEAEKEFRAEMEVLSANAFGDWAHPNLVRLYGWCLDGSEKILVHEYMGGGSLEELITDKTKLQWKKRIDIATDVARGLVFLHHECYPSIVHRDVKASNVLLDKHGNARVTDFGLARLLNVGDSHVSTVIAGTIGYVAPEYGQTWQATTRGDVYSYGVLTMELATGRRAVDGGEECLVEWARRVMTGNMTAKGSPITLSGTKPGNGAEQMTELLKIGVKCTADHPQARPNMKEVLAMLVKISGKAELFNGLSSQGYIEM

SEQ ID NO: 106432 - protein, 1106 aa, Arabidopsis thaliana
  peptide (1)..(1106): Ceres Seq. ID no. 13619551
MTMVTRVIMTDDDSQSLCFLCFLLFFFITAIAVAGDSLDSDREVLLSLKSYLESRNPQNRGLYTEWKMENQDVVCQWPGIICTPQRSRVTGINLTDSTISGPLFKNFSALTELTYLDLSRNTIEGEIPDDLSRCHNLKHLNLSHNILEGELSLPGLSNLEVLDLSLNRITGDIQSSFPLFCNSLVVANLSTNNFTGRIDDIFNGCRNLKYVDFSSNRFSGEVWTGFGRLVEFSVADNHLSGNISASMFRGNCTLQMLDLSGNAFGGEFPGQVSNCQNLNVLNLWGNKFTGNIPAEIGSISSLKGLYLGNNTFSRDIPETLLNLTNLVFLDLSRNKFGGDIQEIFGRFTQVKYLVLHANSYVGGINSSNILKLPNLSRLDLGYNNFSGQLPTEISQIQSLKFLILAYNNFSGDIPQEYGNMPGLQALDLSFNKLTGSIPASFGKLTSLLWLMLANNSLSGEIPREIGNCTSLLWFNVANNQLSGRFHPELTRMGSNPSPTFEVNRQNKDKIIAGSGECLAMKRWIPAEFPPFNFVYAILTKKSCRSLWDHVLKGYGLFPVCSAGSTVRTLKISAYLQLSGNKFSGEIPASISQMDRLSTLHLGFNEFEGKLPPEIGQLPLAFLNLTRNNFSGEIPQEIGNLKCLQNLDLSFNNFSGNFPTSLNDLNELSKFNISYNPFISGAIPTTGQVATFDKDSFLGNPLLRFPSFFNQSGNNTRKISNQVLGNRPRTLLLIWISLALALAFIACLVVSGIVLMVVKASREAEIDLLDGSKTRHDMTSSSGGSSPWLSGKIKVIRLDKSTFTYADILKATSNFSEERVVGRGGYGTVYRGVLPDGREVAVKKLQREGTEAEKEFRAEMEVLSANAFGDWAHPNLVRLYGWCLDGSEKILVHEYMGGGSLEELITDKTKLQWKKRIDIATDVARGLVFLHHECYPSIVHRDVKASNVLLDKHGNARVTDFGLARLLNVGDSHVSTVIAGTIGYVAPEYGQTWQATTRGDVYSYGVLTMELATGRRAVDGGEECLVEWARRVMTGNMTAKGSPITLSGTKPGNGAEQMTELLKIGVKCTADHPQARPNMKEVLAMLVKISGKAELFNGLSSQGYIEM

SEQ ID NO: 106433 - protein, 1104 aa, Arabidopsis thaliana
  peptide (1)..(1104): Ceres Seq. ID no. 13619552
MVTRVIMTDDDSQSLCFLCFLLFFFITAIAVAGDSLDSDREVLLSLKSYLESRNPQNRGLYTEWKMENQDVVCQWPGIICTPQRSRVTGINLTDSTISGPLFKNFSALTELTYLDLSRNTIEGEIPDDLSRCHNLKHLNLSHNILEGELSLPGLSNLEVLDLSLNRITGDIQSSFPLFCNSLVVANLSTNNFTGRIDDIFNGCRNLKYVDFSSNRFSGEVWTGFGRLVEFSVADNHLSGNISASMFRGNCTLQMLDLSGNAFGGEFPGQVSNCQNLNVLNLWGNKFTGNIPAEIGSISSLKGLYLGNNTFSRDIPETLLNLTNLVFLDLSRNKFGGDIQEIFGRFTQVKYLVLHANSYVGGINSSNILKLPNLSRLDLGYNNFSGQLPTEISQIQSLKFLILAYNNFSGDIPQEYGNMPGLQALDLSFNKLTGSIPASFGKLTSLLWLMLANNSLSGEIPREIGNCTSLLWFNVANNQLSGRFHPELTRMGSNPSPTFEVNRQNKDKIIAGSGECLAMKRWIPAEFPPFNFVYAILTKKSCRSLWDHVLKGYGLFPVCSAGSTVRTLKISAYLQLSGNKFSGEIPASISQMDRLSTLHLGFNEFEGKLPPEIGQLPLAFLNLTRNNFSGEIPQEIGNLKCLQNLDLSFNNFSGNFPTSLNDLNELSKFNISYNPFISGAIPTTGQVATFDKDSFLGNPLLRFPSFFNQSGNNTRKISNQVLGNRPRTLLLIWISLALALAFIACLVVSGIVLMVVKASREAEIDLLDGSKTRHDMTSSSGGSSPWLSGKIKVIRLDKSTFTYADILKATSNFSEERVVGRGGYGTVYRGVLPDGREVAVKKLQREGTEAEKEFRAEMEVLSANAFGDWAHPNLVRLYGWCLDGSEKILVHEYMGGGSLEELITDKTKLQWKKRIDIATDVARGLVFLHHECYPSIVHRDVKASNVLLDKHGNARVTDFGLARLLNVGDSHVSTVIAGTIGYVAPEYGQTWQATTRGDVYSYGVLTMELATGRRAVDGGEECLVEWARRVMTGNMTAKGSPITLSGTKPGNGAEQMTELLKIGVKCTADHPQARPNMKEVLAMLVKISGKAELFNGLSSQGYIEM

SEQ ID NO: 106434 - DNA, 1956 bp, Arabidopsis thaliana
  misc_feature (1)..(1956): Ceres Seq. ID no. 13619557
  misc_feature (1)..(1956): Ortholog of  Ceres SEQ ID NO 13597411 as cited in SEQ ID NO 64125
gtgtcgcttcgtcgtccttgagcaggggaaaaagctctggctttctctttttttccggcgaggaaggtggtggtaattggcggcgatggagatactaagaacgaaatgggtggctatgacagctagtatatggatacaatgcgcaagcggcgcttcctacaccttcggaatctattccgctgtcctaaaatcgactcaatcgtacgatcaatccaccctcgataccgtctcagtcttcaaggacatcggagcaaacgccggagttttctctgggcttttatacacatacgctacgtccaatcgtctccgtggacggggaggaggaattggaggcgctggaggaccttgggtggtgcttgctgttggggcaattcagtgcttcgccggttactttctcatttgggcttctgttaccggacttattagaaagcctccggtgccgctgatgtgcctgtttatgttcttagcagctcagtcgcaaacgttcttcaatacggctaatgttgttagtgccgttgagaatttcgctgactatggtggtacagccgttggcattatgaagggttttcttggtctaagtggagcgatactgattcaactgtacgagacattgtgcgctggagatccggccagcttcattctcttactggcagtaacaccaacagtgctctcactcttggtcatgcctctggtcaggatctatgagacaagcgtagccgatgataaaaagcatttaaatggtctttcagctgtatctctaatcatcgcagcttatcttatgatcattatcatattgaagaacacttttgggttgtcatcgtgggccaacattgtcacacttgtatgtctactcgtcatgcttgccttgcctctacttattgcgagaagagcacaacgagacggcatggaaaaaacagtaccacatgattattcccctctcataagcagtccaaaggcaacaacctccggtaaccaaagttctgaaggtgacagtaaagtggaagctggactgagtgagaacctgaatcttctgcaagctatgaaaaaactaagcttctggttgttatttcttgccatgatttgcggaatgggctctggactttcaacgataaacaacatccgacaaataggtgagtctcttcgatactcatcagttgagataaattcattggtctccttgtggagtatatggaactttctcggtagatttggagctggttatgcctcagatgcattgctacacaaaaagggatggccacgtccattgctaatggctgcaacacttggaacgatgagcataggccacctaatcatagcctctggttttcaaggaaatctctatgttggttctgttatagttggcgtttgttatggttcacagtggtctctgatgcctacaatcacctctgagctgttcgggattcggcacatgggaaccatcttcaataccatatccgtggctagtcccattggttcctatatcttctctgtaagattgatcggttatatctacgataagactgcttccggggaagggaacacatgttatggctctcattgcttcaggctgtcatttattataatggcatctgttgcgttctttgggtttcttgtcgccattgtactattctttcggacaaagacgctatatcgacagatccttgtaaagaggttgcatcatcgatagagttcttgtgaatactatacttttggagaaaaacgaatactgcttctcttgctacatccatggtagcttatgcttccaaaggtacacatcaatttctttacctataagtttgattgtaagttatgtttgtatcaaatgtctgtgtttagagatgggaagaaagaaagctgagatctttgtctctctttctttttgtagtttcttccaaaaatgtgagttttgtgaattgtatagacatctcaaagttcccaataatgttgaaatttttt

SEQ ID NO: 106435 - protein, 533 aa, Arabidopsis thaliana
  peptide (1)..(533): Ceres Seq. ID no. 13619558
MEILRTKWVAMTASIWIQCASGASYTFGIYSAVLKSTQSYDQSTLDTVSVFKDIGANAGVFSGLLYTYATSNRLRGRGGGIGGAGGPWVVLAVGAIQCFAGYFLIWASVTGLIRKPPVPLMCLFMFLAAQSQTFFNTANVVSAVENFADYGGTAVGIMKGFLGLSGAILIQLYETLCAGDPASFILLLAVTPTVLSLLVMPLVRIYETSVADDKKHLNGLSAVSLIIAAYLMIIIILKNTFGLSSWANIVTLVCLLVMLALPLLIARRAQRDGMEKTVPHDYSPLISSPKATTSGNQSSEGDSKVEAGLSENLNLLQAMKKLSFWLLFLAMICGMGSGLSTINNIRQIGESLRYSSVEINSLVSLWSIWNFLGRFGAGYASDALLHKKGWPRPLLMAATLGTMSIGHLIIASGFQGNLYVGSVIVGVCYGSQWSLMPTITSELFGIRHMGTIFNTISVASPIGSYIFSVRLIGYIYDKTASGEGNTCYGSHCFRLSFIIMASVAFFGFLVAIVLFFRTKTLYRQILVKRLHHR

SEQ ID NO: 106436 - protein, 523 aa, Arabidopsis thaliana
  peptide (1)..(523): Ceres Seq. ID no. 13619559
MTASIWIQCASGASYTFGIYSAVLKSTQSYDQSTLDTVSVFKDIGANAGVFSGLLYTYATSNRLRGRGGGIGGAGGPWVVLAVGAIQCFAGYFLIWASVTGLIRKPPVPLMCLFMFLAAQSQTFFNTANVVSAVENFADYGGTAVGIMKGFLGLSGAILIQLYETLCAGDPASFILLLAVTPTVLSLLVMPLVRIYETSVADDKKHLNGLSAVSLIIAAYLMIIIILKNTFGLSSWANIVTLVCLLVMLALPLLIARRAQRDGMEKTVPHDYSPLISSPKATTSGNQSSEGDSKVEAGLSENLNLLQAMKKLSFWLLFLAMICGMGSGLSTINNIRQIGESLRYSSVEINSLVSLWSIWNFLGRFGAGYASDALLHKKGWPRPLLMAATLGTMSIGHLIIASGFQGNLYVGSVIVGVCYGSQWSLMPTITSELFGIRHMGTIFNTISVASPIGSYIFSVRLIGYIYDKTASGEGNTCYGSHCFRLSFIIMASVAFFGFLVAIVLFFRTKTLYRQILVKRLHHR

SEQ ID NO: 106437 - protein, 413 aa, Arabidopsis thaliana
  peptide (1)..(413): Ceres Seq. ID no. 13619560
MCLFMFLAAQSQTFFNTANVVSAVENFADYGGTAVGIMKGFLGLSGAILIQLYETLCAGDPASFILLLAVTPTVLSLLVMPLVRIYETSVADDKKHLNGLSAVSLIIAAYLMIIIILKNTFGLSSWANIVTLVCLLVMLALPLLIARRAQRDGMEKTVPHDYSPLISSPKATTSGNQSSEGDSKVEAGLSENLNLLQAMKKLSFWLLFLAMICGMGSGLSTINNIRQIGESLRYSSVEINSLVSLWSIWNFLGRFGAGYASDALLHKKGWPRPLLMAATLGTMSIGHLIIASGFQGNLYVGSVIVGVCYGSQWSLMPTITSELFGIRHMGTIFNTISVASPIGSYIFSVRLIGYIYDKTASGEGNTCYGSHCFRLSFIIMASVAFFGFLVAIVLFFRTKTLYRQILVKRLHHR

SEQ ID NO: 106438 - DNA, 1139 bp, Arabidopsis thaliana
  misc_feature (1)..(1139): Ceres Seq. ID no. 13619580
  misc_feature (1)..(1139): Ortholog of  Ceres SEQ ID NO 14316324 as cited in SEQ ID NO 55612
  misc_feature (1)..(1139): Ortholog of  Ceres SEQ ID NO 14316378 as cited in SEQ ID NO 57746
  misc_feature (1)..(1139): Ortholog of  Ceres SEQ ID NO 13596097 as cited in SEQ ID NO 68421
  misc_feature (1)..(1139): Ortholog of  Ceres SEQ ID NO 13598439 as cited in SEQ ID NO 69016
  misc_feature (1)..(1139): Ortholog of  Ceres SEQ ID NO 13599524 as cited in SEQ ID NO 0
acagcattattgaatttagtagtacacacaatcattagtcattaccacgtttgaaacatgacgacggagaaaagcaagattctggtgatcggagggactggttacatgggagaattcatcgttgaagggagcgcgaaagccggtaacccaacattcgctcttgtccgagaagcatctctctctgatcctgtcaagagcaaaaccatccagagcttcaaagatctcggtgtcacaatactacacggagatttgaatgatcatgagagcttagttaaggccattaaacaggttgatgtggtgatatcaaccatcgggcacaagcaaatctttgatcaaaccaagatcatttccgccattaaagaagctggtaacgtcaagagattcttgccggctgagtttgggatagacgttgagaggaccagtgcggttgagccggcaaaatcattatttgcagggaaggtacagatcaggagagccattgaagctgaaggaataccatacacttacgttgttagcaattgctctgccggtttttacttgcgtacgttacttcagttcgagtctggtctcatttctcatactagagacaaggccatcatctttggcgacaaaaatgttcctcctagagacaaagtcaccatattaggcgatggaaatgccaaagttgtgatcaacaaagaggaagatgttgcagcttacatgatcaaggcggtggatgatctaaggactctgaacaaaaccctctacattagtcctcctaacaacattttatcgatgaacgaaatggtcaccttgtgggagaaaaagatcggcaagtctcttgagaagactcacatatcagaagagcaaatccttaaaagcatccaagttcccatcgatgttttcaagtctataaaccacgcggtgtttgtgaagggagatcagaccagtttcacaatagagccttggttcggtgaagaagcctctgtgctttaccctgatgtcaagtacacgagtattgatgagtatctcagtcaattcacttgagaacaattcacaaaaacaaatcacaaaacaataaaaactgattcttgtacgtgtgaaattgattaatcaagcaaaatgtaaagttttgtgaactcaagctaatatattacact

SEQ ID NO: 106439 - protein, 322 aa, Arabidopsis thaliana
  peptide (1)..(322): Ceres Seq. ID no. 13619581
MTTEKSKILVIGGTGYMGEFIVEGSAKAGNPTFALVREASLSDPVKSKTIQSFKDLGVTILHGDLNDHESLVKAIKQVDVVISTIGHKQIFDQTKIISAIKEAGNVKRFLPAEFGIDVERTSAVEPAKSLFAGKVQIRRAIEAEGIPYTYVVSNCSAGFYLRTLLQFESGLISHTRDKAIIFGDKNVPPRDKVTILGDGNAKVVINKEEDVAAYMIKAVDDLRTLNKTLYISPPNNILSMNEMVTLWEKKIGKSLEKTHISEEQILKSIQVPIDVFKSINHAVFVKGDQTSFTIEPWFGEEASVLYPDVKYTSIDEYLSQFT

SEQ ID NO: 106440 - protein, 306 aa, Arabidopsis thaliana
  peptide (1)..(306): Ceres Seq. ID no. 13619582
MGEFIVEGSAKAGNPTFALVREASLSDPVKSKTIQSFKDLGVTILHGDLNDHESLVKAIKQVDVVISTIGHKQIFDQTKIISAIKEAGNVKRFLPAEFGIDVERTSAVEPAKSLFAGKVQIRRAIEAEGIPYTYVVSNCSAGFYLRTLLQFESGLISHTRDKAIIFGDKNVPPRDKVTILGDGNAKVVINKEEDVAAYMIKAVDDLRTLNKTLYISPPNNILSMNEMVTLWEKKIGKSLEKTHISEEQILKSIQVPIDVFKSINHAVFVKGDQTSFTIEPWFGEEASVLYPDVKYTSIDEYLSQFT

SEQ ID NO: 106441 - DNA, 1358 bp, Arabidopsis thaliana
  misc_feature (1)..(1358): Ceres Seq. ID no. 13619586
  misc_feature (1)..(1358): Ortholog of  Ceres SEQ ID NO 14304944 as cited in SEQ ID NO 53041
  misc_feature (1)..(1358): Ortholog of  Ceres SEQ ID NO 13654989 as cited in SEQ ID NO 63117
  misc_feature (1)..(1358): Ortholog of  Ceres SEQ ID NO 13584744 as cited in SEQ ID NO 69137
atgaggtgtttctcttgtctcaacacgcaaactaatgacatgagaatcaacattgataccctctccgacctaaccgattatgcctcagttgccacaaaaatcgatccaagaggaacaggctcaaaatctggcattttagttaatgggaaagtgaatagccctaaaccgggtggtggcgcacggagtttcacgttcaaggagttagcagccgccacgaagaatttccgggaggggaatattataggaaaaggaggctttgggagtgtctacaagggacgtttagattcaggacaagtggtggcgatcaagcaattaaatccagatggacatcaaggaaatcaagaattcatagttgaagtctgtatgcttagcgtcttccatcatccaaatctagtaactttaatcggttactgtacttctggtgctcagagacttcttgtttatgaatacatgccaatgggtagcttagaagatcatctttttgatcttgagcctgatcagactccactaagctggtatactcggatgaaaatcgcggttggtgcagctcgtgggatagagtatctccactgtaaaataagcccgtctgtgatttaccgtgatttgaaatccgcaaacattttgttagataaagaatttagcgtcaagctctctgattttggactcgctaaggttggtcctgtggggaaccggacacatgtgtcgactcgagtcatgggtacttacggatactgtgctccagaatacgcaatgagcggaagattgactataaaatcggatatctatagctttggtgtagtgttgcttgagcttatttctggcaggaaggccattgatttgagtaaaccaaacggagagcagtaccttgttgcttgggctagaccgtatctcaaagatcctaagaaatttggacttctagttgacccgttgctacggggaaagttctcgaagaggtgtcttaactacgcgatttctataaccgagatgtgcctaaacgacgaagcgaatcaccggccaaaaataggagatgtggtggtggcatttgagtacatagcctctcagagcaaatcttatgaagatcgaagaacggctcgcaagtctacggactctaaccggttaagacgggaaacaaaacagagttattaattaaattgtatgagtcctaagtgaaacctctgctagaatcagaaggttcctgataaggccgcataattaatgtttgtactttttttccgggtgtttttgtttagtcagatttaagaatgggatttggtcggataaagaggttttttttttttggcttgaggtaaatggtgctttgtaaaaaaacttaaaaataaaaatgaactcttacgttt

SEQ ID NO: 106442 - protein, 381 aa, Arabidopsis thaliana
  peptide (1)..(381): Ceres Seq. ID no. 13619587
MRCFSCLNTQTNDMRINIDTLSDLTDYASVATKIDPRGTGSKSGILVNGKVNSPKPGGGARSFTFKELAAATKNFREGNIIGKGGFGSVYKGRLDSGQVVAIKQLNPDGHQGNQEFIVEVCMLSVFHHPNLVTLIGYCTSGAQRLLVYEYMPMGSLEDHLFDLEPDQTPLSWYTRMKIAVGAARGIEYLHCKISPSVIYRDLKSANILLDKEFSVKLSDFGLAKVGPVGNRTHVSTRVMGTYGYCAPEYAMSGRLTIKSDIYSFGVVLLELISGRKAIDLSKPNGEQYLVAWARPYLKDPKKFGLLVDPLLRGKFSKRCLNYAISITEMCLNDEANHRPKIGDVVVAFEYIASQSKSYEDRRTARKSTDSNRLRRETKQSY

SEQ ID NO: 106443 - protein, 368 aa, Arabidopsis thaliana
  peptide (1)..(368): Ceres Seq. ID no. 13619588
MRINIDTLSDLTDYASVATKIDPRGTGSKSGILVNGKVNSPKPGGGARSFTFKELAAATKNFREGNIIGKGGFGSVYKGRLDSGQVVAIKQLNPDGHQGNQEFIVEVCMLSVFHHPNLVTLIGYCTSGAQRLLVYEYMPMGSLEDHLFDLEPDQTPLSWYTRMKIAVGAARGIEYLHCKISPSVIYRDLKSANILLDKEFSVKLSDFGLAKVGPVGNRTHVSTRVMGTYGYCAPEYAMSGRLTIKSDIYSFGVVLLELISGRKAIDLSKPNGEQYLVAWARPYLKDPKKFGLLVDPLLRGKFSKRCLNYAISITEMCLNDEANHRPKIGDVVVAFEYIASQSKSYEDRRTARKSTDSNRLRRETKQSY

SEQ ID NO: 106444 - protein, 260 aa, Arabidopsis thaliana
  peptide (1)..(260): Ceres Seq. ID no. 13619589
MLSVFHHPNLVTLIGYCTSGAQRLLVYEYMPMGSLEDHLFDLEPDQTPLSWYTRMKIAVGAARGIEYLHCKISPSVIYRDLKSANILLDKEFSVKLSDFGLAKVGPVGNRTHVSTRVMGTYGYCAPEYAMSGRLTIKSDIYSFGVVLLELISGRKAIDLSKPNGEQYLVAWARPYLKDPKKFGLLVDPLLRGKFSKRCLNYAISITEMCLNDEANHRPKIGDVVVAFEYIASQSKSYEDRRTARKSTDSNRLRRETKQSY

SEQ ID NO: 106445 - DNA, 1329 bp, Arabidopsis thaliana
  misc_feature (1)..(1329): Ceres Seq. ID no. 13619590
  misc_feature (1)..(1329): Ortholog of  Ceres SEQ ID NO 15172476 as cited in SEQ ID NO 54945
  misc_feature (1)..(1329): Ortholog of  Ceres SEQ ID NO 13654989 as cited in SEQ ID NO 63117
  misc_feature (1)..(1329): Ortholog of  Ceres SEQ ID NO 13584744 as cited in SEQ ID NO 69137
atgccggcgttacatcccacgtttccactgccggaaacaggacataaactgagacccgccgctaccccgcctcgtgaaaaaccgcaacataggacgacgagatccgtcgagaacccacctcgtgaaaaaccgcaggagaagacaagatccgtcgagaacccgcctcgtgaaaaaccgcaggagaaaacaagatccgttgaaaccccacctcaggagaagacgagacccgtcgataatccgccgtcaaagccggtagaaaaattgggtttaggaaggaaagcagtgccaccgagtgggaagatagtgacacctaatctaaagatgtttacattagtggagcttaagacggctacaaagaactttcgaccagaatctgtgatcggagaaggtggattcggacaggtttttaaaggatgggtggatgagaaaacattagctccgtcgagagctggcgtcggaataccagtcgccgtcaagaaatcaaaccctgatagtgagcaaggcttacatgaatggcagtgtgaagtgagattcttagggaagtttcatcatccaaatttggtgaagctcttgggttattgctgggaagagaaccagttccttttggtctatgagtatttgcctaaaggaagccttgaaaatcacctcttctcaaaaggagcagaggcattaccttgggatacacgtttgaagatagccattgaagcagctcaaggacttacctttttgcataactccgagaagagtgttatctatagagacttcaaagcttccaatattcttctcgattccaacttccacgccaagctttcagacttcggactagctaaaaatgggcccattaatggattctcacacgtgaccacacgtgtcatgggcacacaaggctatgcagctcccgagtacatggctacaggtcatctatatgtgaggagtgatgtttacgggtttggagtggtactcttagagctcttaaccggtttaagagcattagacccaaaccgaccatctgcgcaacaaaatcttgtggaatgggctaaaccggggttgaaccagaagaagaaggttcagaaaatgatggatccacggctcgagcagaagtatccacttttggcggtgaccaaaaccgcggagctcattcttcggtgtctggaggctgacccgaaaaaccgaccgccaatggatgatgtgcttagagaattagaagtcgtaaggactatcagagaccaaccccaagaagagaggcgtaaaaggagcagtggtccagatactaaccgggttcgtggaaatgattcaccatatggccgtagaaccggtcgaaccggatag

SEQ ID NO: 106446 - protein, 442 aa, Arabidopsis thaliana; identical to SEQ ID NO: 106020
  peptide (1)..(442): Ceres Seq. ID no. 13619591

SEQ ID NO: 106447 - protein, 335 aa, Arabidopsis thaliana; identical to SEQ ID NO: 106021
  peptide (1)..(335): Ceres Seq. ID no. 13619592

SEQ ID NO: 106448 - DNA, 1488 bp, Arabidopsis thaliana
  misc_feature (1)..(1488): Ceres Seq. ID no. 13619593
  misc_feature (1)..(1488): Ortholog of  Ceres SEQ ID NO 14309384 as cited in SEQ ID NO 52806
  misc_feature (1)..(1488): Ortholog of  Ceres SEQ ID NO 14304136 as cited in SEQ ID NO 59024
  misc_feature (1)..(1488): Ortholog of  Ceres SEQ ID NO 14301836 as cited in SEQ ID NO 67386
atggcgtatcagcctgttccgggttctgggtttcactacttgaactctcctttcggtgatacaactttcacaaaggtgttcgtcggtggtcttgcttgggaaactcaaagtgaaactcttcgccagcatttcgaacagtacggtgaaatccttgaagctgttgtcattgctgataagaacactggtcgatccaaaggatatggctttgtgacattccgagatccagaagctgctaggagagcttgtgctgaccctactccgattatagacggtagacgtgcaaactgtaatcttgcttcccttgggagacctcggcctccattgccctatgcagtgatacctaacatgcctggacgcttaagacctgcttccccgtacattggaaatgtgcagggtcctcgaggttcacttattggaaattatccgtatcagcaaccacttccatataactaccagcaaggagttgtctatccttatggagtaaccgcttatggacccgagtacatgtactcgcaatcacagggtttatatagtccatacatgggtcagcaataccttcaggtctatggagtacctggagcagtgaattcacccgtttatcaatacgggcaactaagtcagactattcctaatggccatggttatacagcagttcaaggctattcggttccaggaagccatattctgcagcttggtggacccactgtcagtacgatgaccacttcatctatgcctgctcttcaagctccttacccttcaggtataccaggccctgctcccgtacagtcgcatatcattgtccactcccctcaatttatgcagagtaccgcttctgaccaaacaacaagttattcttgaagactgaagagaaaaggaagttaagttagtgaaactgctactggaggtgttgcagaagaggcttcctgttttattaagtcttgcacgttatttatcttgcatccttaaggttatgtaaaatagtcttgctcactgggaaggcgcagcgcagaaggaaaaaaaaaaagcaaaggaaattggagtgtcagggtttatgcttccgttttcttacccatccatcaatgtgtataaaacacagccacaaaaaagctgctggctcgagcttgggttgagtttgaaggcaccatagctggtttcccttggaggggaagaccagtagtaataagttggtgtacaatatgcatatatttatacacacatacacaagcatatacatatggtagaatcaaaatctgattcttttcaagtctgaagtcgtaataccactacacttccttcaggtgcaggagtgtagtgagtaacattgataggtatatagcctttgtctttaagtcctgcattgtaagtaaaacatgttcatcatgtccttttctgtgattgtgcatatttagggttctctcttcttccatctgaacacactgggattgtttactgaagcttacttcaaagtatggagtaggctcttttctc

SEQ ID NO: 106449 - protein, 285 aa, Arabidopsis thaliana
  peptide (1)..(285): Ceres Seq. ID no. 13619594
MAYQPVPGSGFHYLNSPFGDTTFTKVFVGGLAWETQSETLRQHFEQYGEILEAVVIADKNTGRSKGYGFVTFRDPEAARRACADPTPIIDGRRANCNLASLGRPRPPLPYAVIPNMPGRLRPASPYIGNVQGPRGSLIGNYPYQQPLPYNYQQGVVYPYGVTAYGPEYMYSQSQGLYSPYMGQQYLQVYGVPGAVNSPVYQYGQLSQTIPNGHGYTAVQGYSVPGSHILQLGGPTVSTMTTSSMPALQAPYPSGIPGPAPVQSHIIVHSPQFMQSTASDQTTSYS

SEQ ID NO: 106450 - protein, 170 aa, Arabidopsis thaliana
  peptide (1)..(170): Ceres Seq. ID no. 13619595
MPGRLRPASPYIGNVQGPRGSLIGNYPYQQPLPYNYQQGVVYPYGVTAYGPEYMYSQSQGLYSPYMGQQYLQVYGVPGAVNSPVYQYGQLSQTIPNGHGYTAVQGYSVPGSHILQLGGPTVSTMTTSSMPALQAPYPSGIPGPAPVQSHIIVHSPQFMQSTASDQTTSYS

SEQ ID NO: 106451 - DNA, 3160 bp, Arabidopsis thaliana
  misc_feature (1)..(3160): Ceres Seq. ID no. 13619604
  misc_feature (1)..(3160): Ortholog of  Ceres SEQ ID NO 13654989 as cited in SEQ ID NO 63117
  misc_feature (1)..(3160): Ortholog of  Ceres SEQ ID NO 13584744 as cited in SEQ ID NO 69137
ggcccatcttcccatttcctaaaagcttcaaactttcttcacatttctctctttatctctctgtttcttcttcaatcctctgtttcttcaagctatgaagaaaagaagaacctttcttctattttcatttacctttcttcttcttctatctctttctaaagctgattctgatggagatctctcagcgatgttatcactcaagaaaagcttaaacccacccagttctttcggttggtctgaccctgacccatgtaaatggactcacatcgtttgtacaggaacaaaacgtgtgacccggatccaaatcgggcattcgggtcttcaaggtacactttctcctgatctacgtaacttatcagagcttgaaagacttgagcttcaatggaacaacatctctggtcctgttccttctttaagtggtttagcttcattacaagtcttgatgttaagtaacaacaactttgattctatccctagtgatgtctttcaaggtttaacttcgttacaatctgtagaaattgataacaatccttttaagagttgggagattccagagagtttgagaaatgcttctgctcttcagaatttctctgctaattcggctaatgtttccggttctttacccggttttctcggaccggatgagtttcccggtttgtcgattttgcatttggctttcaacaacttagaaggagagttgcctatgagtttagctggctctcaggttcagtcattgtggctcaatggtcagaaactaaccggtgatattactgttcttcagaacatgactggtttaaaagaggtttggcttcactccaacaagttttcgggtcctttaccggacttttcgggtcttaaggagcttgagagcttgagtttgagagataactcctttacaggtccagttcctgcgtctttgttaagtcttgagtcacttaaagttgtgaacttgacgaataatcatctacaaggaccagtgcctgtgtttaagagctctgtttcagttgatttggataaagattctaacagcttttgcttgtctagtcctggtgagtgtgatcctagagtgaagtctttgcttttgatagctagttcattcgattatccgccccggctcgctgagagttggaaaggaaacgatccttgtactaactggattgggatagcttgtagcaatgggaacattactgttatcagtcttgagaaaatggaactaaccgggacgatttctcccgagtttggagcgatcaagtcgcttcaaagaatcattcttggtatcaacaatcttactggtatgattcctcaagagcttacaacgttacctaatctcaaaacactcgatgtttcgagtaacaagcttttcgggaaggtcccgggttttagaagcaatgttgttgtgaatactaatggtaatcctgacattggaaaggataaaagctctttgtcttctcctggttcttcttcgccttcaggtggttcgggttcaggtatcaacggtgataaagaccggagaggaatgaagtcttcgacttttataggaatcattgttggttcagttcttggaggtttgttatcaatcttcttgattggtttgttagttttctgttggtacaaaaagaggcagaagagattctcaggaagtgagagctcaaatgcagtagtggtgcatccgcgacattcggggtctgacaatgagagtgttaagattacagttgcgggttcaagcgtaagcgttggagggataagtgatacttatacgcttcctggtacaagtgaggttggagataatattcaaatggtggaagcaggaaacatgctgatatcaatccaagtgcttcgttctgtgactaacaacttcagttcagataacattcttggatcaggaggtttcggggttgtgtataaaggcgagttgcacgatggaacgaagattgcggttaagagaatggagaatggagttattgctggtaaaggctttgcggagtttaaatcagagattgcggttttaacaaaggttaggcatcgtcatttggttacgcttcttggttattgtttggatgggaatgagaagttacttgtgtatgagtatatgcctcaagggacattgagtaggcatttgtttgagtggtcagaggaaggacttaagcctctgttgtggaaacagagattgactttagctttggatgttgctagaggtgtggagtatctccatggattagctcaccagagctttatacacagggatcttaagccttctaacattcttcttggggatgatatgagggcgaaagttgcagactttggactcgttcgtctcgctcctgaaggaaaaggatcgattgagactagaatcgctggaacatttggttacttggcacccgaatacgcagtaacgggtcgagtgacaacgaaggtcgatgtatacagcttcggggtaatcctaatggaactcataacgggaagaaaatctctagacgaatcgcaaccagaagaaagcattcacttggtctcttggttcaaacggatgtacatcaacaaagaagcatcattcaagaaagcgatcgacacgacaatagacctagacgaagaaaccttagccagcgttcacactgttgctgaactagcaggccattgctgtgcccgtgagccttaccagagaccagacatgggacacgcagtcaacattctgtcatcactcgttgagctatggaaaccgtcggatcagaatccagaagacatatatggtatcgatctcgacatgtctttacctcaagcacttaagaaatggcaagcttatgaaggaagaagtgatctcgaatcttcaacttcatcacttttacctagcttggacaacacgcagatgagtattcccactagaccttacggattcgcagagtcattcacttcagtagatggacgatgaatgagagattccttgaaacccagatttgatttttctccttttgtatatttgtgtttcctctcctcttcttcccctcacaattctttcatgtttcttgtgatgcaagtaacatttagggcttaatttgggtgtcttaatattattttgatgttgagtgttttatttgttggtttgttgatttagaaaagttgacgtgtgtacttcaagtttgtgggaaatggtaaatgacagtgaggt

SEQ ID NO: 106452 - protein, 942 aa, Arabidopsis thaliana
  peptide (1)..(942): Ceres Seq. ID no. 13619605
MKKRRTFLLFSFTFLLLLSLSKADSDGDLSAMLSLKKSLNPPSSFGWSDPDPCKWTHIVCTGTKRVTRIQIGHSGLQGTLSPDLRNLSELERLELQWNNISGPVPSLSGLASLQVLMLSNNNFDSIPSDVFQGLTSLQSVEIDNNPFKSWEIPESLRNASALQNFSANSANVSGSLPGFLGPDEFPGLSILHLAFNNLEGELPMSLAGSQVQSLWLNGQKLTGDITVLQNMTGLKEVWLHSNKFSGPLPDFSGLKELESLSLRDNSFTGPVPASLLSLESLKVVNLTNNHLQGPVPVFKSSVSVDLDKDSNSFCLSSPGECDPRVKSLLLIASSFDYPPRLAESWKGNDPCTNWIGIACSNGNITVISLEKMELTGTISPEFGAIKSLQRIILGINNLTGMIPQELTTLPNLKTLDVSSNKLFGKVPGFRSNVVVNTNGNPDIGKDKSSLSSPGSSSPSGGSGSGINGDKDRRGMKSSTFIGIIVGSVLGGLLSIFLIGLLVFCWYKKRQKRFSGSESSNAVVVHPRHSGSDNESVKITVAGSSVSVGGISDTYTLPGTSEVGDNIQMVEAGNMLISIQVLRSVTNNFSSDNILGSGGFGVVYKGELHDGTKIAVKRMENGVIAGKGFAEFKSEIAVLTKVRHRHLVTLLGYCLDGNEKLLVYEYMPQGTLSRHLFEWSEEGLKPLLWKQRLTLALDVARGVEYLHGLAHQSFIHRDLKPSNILLGDDMRAKVADFGLVRLAPEGKGSIETRIAGTFGYLAPEYAVTGRVTTKVDVYSFGVILMELITGRKSLDESQPEESIHLVSWFKRMYINKEASFKKAIDTTIDLDEETLASVHTVAELAGHCCAREPYQRPDMGHAVNILSSLVELWKPSDQNPEDIYGIDLDMSLPQALKKWQAYEGRSDLESSTSSLLPSLDNTQMSIPTRPYGFAESFTSVDGR

SEQ ID NO: 106453 - protein, 911 aa, Arabidopsis thaliana
  peptide (1)..(911): Ceres Seq. ID no. 13619606
MLSLKKSLNPPSSFGWSDPDPCKWTHIVCTGTKRVTRIQIGHSGLQGTLSPDLRNLSELERLELQWNNISGPVPSLSGLASLQVLMLSNNNFDSIPSDVFQGLTSLQSVEIDNNPFKSWEIPESLRNASALQNFSANSANVSGSLPGFLGPDEFPGLSILHLAFNNLEGELPMSLAGSQVQSLWLNGQKLTGDITVLQNMTGLKEVWLHSNKFSGPLPDFSGLKELESLSLRDNSFTGPVPASLLSLESLKVVNLTNNHLQGPVPVFKSSVSVDLDKDSNSFCLSSPGECDPRVKSLLLIASSFDYPPRLAESWKGNDPCTNWIGIACSNGNITVISLEKMELTGTISPEFGAIKSLQRIILGINNLTGMIPQELTTLPNLKTLDVSSNKLFGKVPGFRSNVVVNTNGNPDIGKDKSSLSSPGSSSPSGGSGSGINGDKDRRGMKSSTFIGIIVGSVLGGLLSIFLIGLLVFCWYKKRQKRFSGSESSNAVVVHPRHSGSDNESVKITVAGSSVSVGGISDTYTLPGTSEVGDNIQMVEAGNMLISIQVLRSVTNNFSSDNILGSGGFGVVYKGELHDGTKIAVKRMENGVIAGKGFAEFKSEIAVLTKVRHRHLVTLLGYCLDGNEKLLVYEYMPQGTLSRHLFEWSEEGLKPLLWKQRLTLALDVARGVEYLHGLAHQSFIHRDLKPSNILLGDDMRAKVADFGLVRLAPEGKGSIETRIAGTFGYLAPEYAVTGRVTTKVDVYSFGVILMELITGRKSLDESQPEESIHLVSWFKRMYINKEASFKKAIDTTIDLDEETLASVHTVAELAGHCCAREPYQRPDMGHAVNILSSLVELWKPSDQNPEDIYGIDLDMSLPQALKKWQAYEGRSDLESSTSSLLPSLDNTQMSIPTRPYGFAESFTSVDGR

SEQ ID NO: 106454 - protein, 826 aa, Arabidopsis thaliana
  peptide (1)..(826): Ceres Seq. ID no. 13619607
MLSNNNFDSIPSDVFQGLTSLQSVEIDNNPFKSWEIPESLRNASALQNFSANSANVSGSLPGFLGPDEFPGLSILHLAFNNLEGELPMSLAGSQVQSLWLNGQKLTGDITVLQNMTGLKEVWLHSNKFSGPLPDFSGLKELESLSLRDNSFTGPVPASLLSLESLKVVNLTNNHLQGPVPVFKSSVSVDLDKDSNSFCLSSPGECDPRVKSLLLIASSFDYPPRLAESWKGNDPCTNWIGIACSNGNITVISLEKMELTGTISPEFGAIKSLQRIILGINNLTGMIPQELTTLPNLKTLDVSSNKLFGKVPGFRSNVVVNTNGNPDIGKDKSSLSSPGSSSPSGGSGSGINGDKDRRGMKSSTFIGIIVGSVLGGLLSIFLIGLLVFCWYKKRQKRFSGSESSNAVVVHPRHSGSDNESVKITVAGSSVSVGGISDTYTLPGTSEVGDNIQMVEAGNMLISIQVLRSVTNNFSSDNILGSGGFGVVYKGELHDGTKIAVKRMENGVIAGKGFAEFKSEIAVLTKVRHRHLVTLLGYCLDGNEKLLVYEYMPQGTLSRHLFEWSEEGLKPLLWKQRLTLALDVARGVEYLHGLAHQSFIHRDLKPSNILLGDDMRAKVADFGLVRLAPEGKGSIETRIAGTFGYLAPEYAVTGRVTTKVDVYSFGVILMELITGRKSLDESQPEESIHLVSWFKRMYINKEASFKKAIDTTIDLDEETLASVHTVAELAGHCCAREPYQRPDMGHAVNILSSLVELWKPSDQNPEDIYGIDLDMSLPQALKKWQAYEGRSDLESSTSSLLPSLDNTQMSIPTRPYGFAESFTSVDGR

SEQ ID NO: 106455 - DNA, 1000 bp, Arabidopsis thaliana
  misc_feature (1)..(1000): Ceres Seq. ID no. 13619612
  misc_feature (1)..(1000): Ortholog of  Ceres SEQ ID NO 13595569 as cited in SEQ ID NO 56778
  misc_feature (1)..(1000): Ortholog of  Ceres SEQ ID NO 12611159 as cited in SEQ ID NO 59821
gtcgacccacgcgtccgtgggaagccacaataaccccctattcctcggccttttttaaaaaagttttagaataatccgataaaatacttttatattaatttttctttggtccatggagggttcgtccaaagggttgaggaaaggtgcatggactgctgaagaagatagtctcttgaggctatgtattgataagtatggagaaggcaaatggcatcaagttcctttgagagctgggctaaatcgatgcagaaagagttgtagactaagatggttgaactatttgaagccaagtatcaagagaggaagacttagcaatgatgaagttgatcttcttcttcgccttcataagcttctaggaaataggtggtccttgattgctggtcgattgcctggtcggaccgctaatgatgtcaaaaattactggaacacccatctgagtaaaaaacatgagtcttcgtgttgtaagtctaaaatgaaaaagaaaaacattatttcccctcctacaacaccggtccaaaaaatcggtgtttttaagcctcgacctcgatccttctctgttaacaatggttgcagccatctcaatggtctgccagaagttgatttaattccttcatgccttggactcaagaaaaataatgtttgtgaaaatagtatcacatgtaacaaagatgatgagaaagatgattttgtgaataatctaatgaatggagataatatgtggttggagaatttactgggggaaaaccaagaagctgatgcgattgttcctgaagcgacgacagctgaacatggggccactttggcgtttgacgttgagcaactttggagtctgtttgatggagagactgttgaacttgattagtgtttctcaccgtttgtttaagattgtgggtggcttttctttcgtattttagtaatgtatttttctgtatgaagtaaagaatttcagcattttaagaaaaatggttatgtttctacgtaataaaaaaaaacgttattt

SEQ ID NO: 106456 - protein, 249 aa, Arabidopsis thaliana
  peptide (1)..(249): Ceres Seq. ID no. 13619613
MEGSSKGLRKGAWTAEEDSLLRLCIDKYGEGKWHQVPLRAGLNRCRKSCRLRWLNYLKPSIKRGRLSNDEVDLLLRLHKLLGNRWSLIAGRLPGRTANDVKNYWNTHLSKKHESSCCKSKMKKKNIISPPTTPVQKIGVFKPRPRSFSVNNGCSHLNGLPEVDLIPSCLGLKKNNVCENSITCNKDDEKDDFVNNLMNGDNMWLENLLGENQEADAIVPEATTAEHGATLAFDVEQLWSLFDGETVELD

SEQ ID NO: 106457 - protein, 129 aa, Arabidopsis thaliana
  peptide (1)..(129): Ceres Seq. ID no. 13619614
MKKKNIISPPTTPVQKIGVFKPRPRSFSVNNGCSHLNGLPEVDLIPSCLGLKKNNVCENSITCNKDDEKDDFVNNLMNGDNMWLENLLGENQEADAIVPEATTAEHGATLAFDVEQLWSLFDGETVELD

SEQ ID NO: 106458 - DNA, 1322 bp, Arabidopsis thaliana
  misc_feature (1)..(1322): Ceres Seq. ID no. 13619615
  misc_feature (1)..(1322): Ortholog of  Ceres SEQ ID NO 13596281 as cited in SEQ ID NO 68146
gcctctgttccaaaatccaaaggaagcttcgaaaccattgaagcagcagcaatgatactacgtcgtttcatctgctacaacgcttcttcaactgtttcatctatagctccatcaccgaagaagaagcctctcatcttcttaggctctcctcaggtctccgtgagtgtgcttgaagctcttttcaatgcatctaatgctccaaactcttccttcgaggttgcaggtattgttacacagcctccatcaaggagagataggggtaaaaaagtgttgccttcaccagtagcgcaatacgctcttgataaaggcttaccttctgatctcattttctcccctgagaaggcaggagatgaagcatttttatcggctttaagagagttgcaacctgagctttgtattacagcagcttatgggaatattttgcctactaagttccttaagattccggtacatgggacagtgaacatacacccaagtttgctgccgctgtaccgtggtgcagctccagttcaaagagcattacaggatggtgtcccggaaacaggagtatcattagcatttactgtgcgtaagttagatgcagggccagtgattgcctctaagaggttccaagtggatgatctaataaaggcaccagaactactctcgttcctattttctgaaggttctaatcttcttatccgtgaacttccctcgatatttgatgggtccgcaaaatcaaaagcagctccccaagatgattctaaagctaccttagctccaaagatagctccagatgaggcttggctctcttttgaccaggaagcttttgttctacataacaaggttcgtgcatttgcaggatggccgggaacacgagcaaaagttgtagtccttgatgagaaaagcggtcagcaaaatgtgctagagcttaaaattatgtccactcgagtatgcaaagatctggaaattcaggatagtgaacaagattatgtaactttcaagaaaggttcactaatatttccctgcagaggaggtacagctttagaggtactggaagtccagcttcctggtaagaaagccatcaacgcagctgctttttggaatggcttgagaggtcaaaagctgaagaagctatgaagacaaagactgaaacaggattaagctttggtcaggaagttagaatcagcaaattagtcaaatcaggtctagccattttcaaattgtttctgaatgaaaggtgcctaataagttttggtctcatttttttttgttcttcaaaatttgattttgtatgactaaaatatattccacattctttggtataatatgattcttctcta

SEQ ID NO: 106459 - protein, 372 aa, Arabidopsis thaliana
  peptide (1)..(372): Ceres Seq. ID no. 13619616
ASVPKSKGSFETIEAAAMILRRFICYNASSTVSSIAPSPKKKPLIFLGSPQVSVSVLEALFNASNAPNSSFEVAGIVTQPPSRRDRGKKVLPSPVAQYALDKGLPSDLIFSPEKAGDEAFLSALRELQPELCITAAYGNILPTKFLKIPVHGTVNIHPSLLPLYRGAAPVQRALQDGVPETGVSLAFTVRKLDAGPVIASKRFQVDDLIKAPELLSFLFSEGSNLLIRELPSIFDGSAKSKAAPQDDSKATLAPKIAPDEAWLSFDQEAFVLHNKVRAFAGWPGTRAKVVVLDEKSGQQNVLELKIMSTRVCKDLEIQDSEQDYVTFKKGSLIFPCRGGTALEVLEVQLPGKKAINAAAFWNGLRGQKLKKL

SEQ ID NO: 106460 - protein, 355 aa, Arabidopsis thaliana
  peptide (1)..(355): Ceres Seq. ID no. 13619617
MILRRFICYNASSTVSSIAPSPKKKPLIFLGSPQVSVSVLEALFNASNAPNSSFEVAGIVTQPPSRRDRGKKVLPSPVAQYALDKGLPSDLIFSPEKAGDEAFLSALRELQPELCITAAYGNILPTKFLKIPVHGTVNIHPSLLPLYRGAAPVQRALQDGVPETGVSLAFTVRKLDAGPVIASKRFQVDDLIKAPELLSFLFSEGSNLLIRELPSIFDGSAKSKAAPQDDSKATLAPKIAPDEAWLSFDQEAFVLHNKVRAFAGWPGTRAKVVVLDEKSGQQNVLELKIMSTRVCKDLEIQDSEQDYVTFKKGSLIFPCRGGTALEVLEVQLPGKKAINAAAFWNGLRGQKLKKL

SEQ ID NO: 106461 - DNA, 2070 bp, Arabidopsis thaliana
  misc_feature (1)..(2070): Ceres Seq. ID no. 13619622
  misc_feature (1)..(2070): Ortholog of  Ceres SEQ ID NO 15174947 as cited in SEQ ID NO 236
atctaccagtttaaccgtagacatcattccttattgtcccatccaaatagtaaaaaaaaaaagaaaaaaaaaataaaatgaaaaagtcaacaagactcttatggctattatccatcattgttttggtggcagccgtttctaaggcagtcgcagaggtagacaacgatgatgatgacgataatacttcattggaaggcatgacgacggctaaacgtgaaaccctcgaagttgaggatcatacttcattggaaggcatggttaaacgtgaagccctcgaagtaaaaccaccaaaagctggcaaaggcaaaggcaaaggtaaaggtcgtggcaccgttgccgcaggacctgagatgaattggcctggacaatgggagttattcatgaagaattctggtgtttcagccatgcacgcaattttgatgcctttgatcaataaagttcagttttacgacgcaaccatttggagaatttcacaaatcaaattgcctccaggcgtaccttgccatgtttttgacgccaaaaaaaataaagttgattgttgggctcactctgtcctcgtcgatattaacaccggagacatcaagcctcttgcgcttacaacagacacatggtgttcttctggaggtttaaccgtaaacggtactttggtaagtactggaggattccaaggaggagcaaacacggcaaggtacctatccacatgcgaaaactgtgtatggattgaatatccaaaggcactcgctgcaaggagatggtactcaacacaagccactcttcctgatggaactttcatcgttgttggaggccgtgacgctctcaactacgagtatatccttccggaaggacaaaacaacaagaaactctatgactcacaacttcttagacaaacagatgatccagaagaaaacaatctttacccttttgtttggcttaacactgatggtaacctcttcattttcgccaacaaccgatccattcttcttagcccgaaaacaaacaaagtgctcaaagagttccctcaacttcccggtggtgcccgtaactaccctggttccgcctcctcggctcttctccccatccgcctctacgtccaaaaccccgctatcatccccgctgatgtcctagtttgcggtggtgcaaaacaagacgcttacttccgtgcagagaggttaaagatttacgattgggccttgaaagattgtgcaaggttaaacatcaatagtgctaagcctgtatggaaaacagagaccatgccaacgtcacgtgtgatgagtgatactgtgatccttcctaatggagaaattcttatcattaatggtgcaaaacgtggctcctctggttggcacttagccaaagaaccaaattttgctccactcttgtacaaacctaacaaacctttaggccaacgtttcaaagaactcgctccttccactatccctcgtgtgtaccattccatcgcaatcgctcttcctgatggtaaagttctcgtcggtggaagcaacaccaacaacggataccaattcaacgttgagtacccaaccgaactccgcatcgagaaattctcaccaccttaccttgatccagctctagccaatatgagaccaagaatcgtaaacaccgcaacaccaaaacagattaagtatggacaaatgtttgacgtaaagatcgagcttaaacaacaaaacgtagcaaaggagaatgtaatggtgacaatgttggcaccatcatttactacacatagtgtatcaatgaacatgaggttgcttatgttgggtattaacaatgtgaagaatgttggtggcgataatcatcaaatccaagccgttgctcctcctagtggaaaacttgctcctcctggttattatcttctctttgccgtctacaatggtgtccctagcgttggagaatggattcagattgtctaattttgatatgcatatattatcaatttattttttgaaacgaaacctatataacatgtttgtaaggttaattttttttctttatacttacatgtatatattctttgattcttgtaattattatattttttgaataaatgtttttttg

SEQ ID NO: 106462 - protein, 615 aa, Arabidopsis thaliana
  peptide (1)..(615): Ceres Seq. ID no. 13619623
MKKSTRLLWLLSIIVLVAAVSKAVAEVDNDDDDDNTSLEGMTTAKRETLEVEDHTSLEGMVKREALEVKPPKAGKGKGKGKGRGTVAAGPEMNWPGQWELFMKNSGVSAMHAILMPLINKVQFYDATIWRISQIKLPPGVPCHVFDAKKNKVDCWAHSVLVDINTGDIKPLALTTDTWCSSGGLTVNGTLVSTGGFQGGANTARYLSTCENCVWIEYPKALAARRWYSTQATLPDGTFIVVGGRDALNYEYILPEGQNNKKLYDSQLLRQTDDPEENNLYPFVWLNTDGNLFIFANNRSILLSPKTNKVLKEFPQLPGGARNYPGSASSALLPIRLYVQNPAIIPADVLVCGGAKQDAYFRAERLKIYDWALKDCARLNINSAKPVWKTETMPTSRVMSDTVILPNGEILIINGAKRGSSGWHLAKEPNFAPLLYKPNKPLGQRFKELAPSTIPRVYHSIAIALPDGKVLVGGSNTNNGYQFNVEYPTELRIEKFSPPYLDPALANMRPRIVNTATPKQIKYGQMFDVKIELKQQNVAKENVMVTMLAPSFTTHSVSMNMRLLMLGINNVKNVGGDNHQIQAVAPPSGKLAPPGYYLLFAVYNGVPSVGEWIQIV

SEQ ID NO: 106463 - protein, 575 aa, Arabidopsis thaliana
  peptide (1)..(575): Ceres Seq. ID no. 13619624
MTTAKRETLEVEDHTSLEGMVKREALEVKPPKAGKGKGKGKGRGTVAAGPEMNWPGQWELFMKNSGVSAMHAILMPLINKVQFYDATIWRISQIKLPPGVPCHVFDAKKNKVDCWAHSVLVDINTGDIKPLALTTDTWCSSGGLTVNGTLVSTGGFQGGANTARYLSTCENCVWIEYPKALAARRWYSTQATLPDGTFIVVGGRDALNYEYILPEGQNNKKLYDSQLLRQTDDPEENNLYPFVWLNTDGNLFIFANNRSILLSPKTNKVLKEFPQLPGGARNYPGSASSALLPIRLYVQNPAIIPADVLVCGGAKQDAYFRAERLKIYDWALKDCARLNINSAKPVWKTETMPTSRVMSDTVILPNGEILIINGAKRGSSGWHLAKEPNFAPLLYKPNKPLGQRFKELAPSTIPRVYHSIAIALPDGKVLVGGSNTNNGYQFNVEYPTELRIEKFSPPYLDPALANMRPRIVNTATPKQIKYGQMFDVKIELKQQNVAKENVMVTMLAPSFTTHSVSMNMRLLMLGINNVKNVGGDNHQIQAVAPPSGKLAPPGYYLLFAVYNGVPSVGEWIQIV

SEQ ID NO: 106464 - protein, 556 aa, Arabidopsis thaliana
  peptide (1)..(556): Ceres Seq. ID no. 13619625
MVKREALEVKPPKAGKGKGKGKGRGTVAAGPEMNWPGQWELFMKNSGVSAMHAILMPLINKVQFYDATIWRISQIKLPPGVPCHVFDAKKNKVDCWAHSVLVDINTGDIKPLALTTDTWCSSGGLTVNGTLVSTGGFQGGANTARYLSTCENCVWIEYPKALAARRWYSTQATLPDGTFIVVGGRDALNYEYILPEGQNNKKLYDSQLLRQTDDPEENNLYPFVWLNTDGNLFIFANNRSILLSPKTNKVLKEFPQLPGGARNYPGSASSALLPIRLYVQNPAIIPADVLVCGGAKQDAYFRAERLKIYDWALKDCARLNINSAKPVWKTETMPTSRVMSDTVILPNGEILIINGAKRGSSGWHLAKEPNFAPLLYKPNKPLGQRFKELAPSTIPRVYHSIAIALPDGKVLVGGSNTNNGYQFNVEYPTELRIEKFSPPYLDPALANMRPRIVNTATPKQIKYGQMFDVKIELKQQNVAKENVMVTMLAPSFTTHSVSMNMRLLMLGINNVKNVGGDNHQIQAVAPPSGKLAPPGYYLLFAVYNGVPSVGEWIQIV

SEQ ID NO: 106465 - DNA, 709 bp, Arabidopsis thaliana
  misc_feature (1)..(709): Ceres Seq. ID no. 13619630
  misc_feature (1)..(709): Ortholog of  Ceres SEQ ID NO 13598935 as cited in SEQ ID NO 1239
  misc_feature (1)..(709): Ortholog of  Ceres SEQ ID NO 14316515 as cited in SEQ ID NO 57228
  misc_feature (1)..(709): Ortholog of  Ceres SEQ ID NO 13598171 as cited in SEQ ID NO 61357
  misc_feature (1)..(709): Ortholog of  Ceres SEQ ID NO 13664149 as cited in SEQ ID NO 61490
ataaaatgcaaaaattgtacccacaaaacctaagaaagtcatctctctccagtctccactatgggcagttttctctccttctttcttatttcttctcgaacactagccctcgtcctaatttccgtcacaggagaaacccttgaatctaatttcttgcatcacaagaaagagaaactaactcatttcagagtatactggcacgatattgtaaccggccaagattcgtcttcggtgtcaatcatgaatcctccgaaaaaatacacgggggcaacgggctttggtctcatgcgtatgattgataaccctttaacgctcacaccaaaattaagctccaaaatggtgggaagggcacaagggttttatgcaggcacatctaaagaagaaataggattattgatggctatgaattttgcgattcttgatgggaaatacaatggaagcacgatcacagtgttaggaagaaattcagtgtttgataaggtgagggagatgccagtgattggaggaagtggacttttccgatttgctaggggttatgttcaagctagcacacatgagtttaatctcaagacagggaacgccatcgttgagtataattgttatcttttgcactactaatttgtcatttctagtttattattatttattgtaaggtttttcttcttcacatagtggtggtggtggcctggtgggggacagtgtttcagcc

SEQ ID NO: 106466 - protein, 185 aa, Arabidopsis thaliana
  peptide (1)..(185): Ceres Seq. ID no. 13619631
MGSFLSFFLISSRTLALVLISVTGETLESNFLHHKKEKLTHFRVYWHDIVTGQDSSSVSIMNPPKKYTGATGFGLMRMIDNPLTLTPKLSSKMVGRAQGFYAGTSKEEIGLLMAMNFAILDGKYNGSTITVLGRNSVFDKVREMPVIGGSGLFRFARGYVQASTHEFNLKTGNAIVEYNCYLLHY

SEQ ID NO: 106467 - protein, 125 aa, Arabidopsis thaliana
  peptide (1)..(125): Ceres Seq. ID no. 13619632
MNPPKKYTGATGFGLMRMIDNPLTLTPKLSSKMVGRAQGFYAGTSKEEIGLLMAMNFAILDGKYNGSTITVLGRNSVFDKVREMPVIGGSGLFRFARGYVQASTHEFNLKTGNAIVEYNCYLLHY

SEQ ID NO: 106468 - protein, 110 aa, Arabidopsis thaliana
  peptide (1)..(110): Ceres Seq. ID no. 13619633
MRMIDNPLTLTPKLSSKMVGRAQGFYAGTSKEEIGLLMAMNFAILDGKYNGSTITVLGRNSVFDKVREMPVIGGSGLFRFARGYVQASTHEFNLKTGNAIVEYNCYLLHY

SEQ ID NO: 106469 - DNA, 1075 bp, Arabidopsis thaliana
  misc_feature (1)..(1075): Ceres Seq. ID no. 13619634
  misc_feature (1)..(1075): Ortholog of  Ceres SEQ ID NO 15179676 as cited in SEQ ID NO 52442
  misc_feature (1)..(1075): Ortholog of  Ceres SEQ ID NO 13582807 as cited in SEQ ID NO 67806
gggtttttctctgaggaagaagcgtttcatttctctgaatttcatcgaaaatggcggaaagaggaggagaaggcggcgcagagcgtggcggtgaccgtggtgacttcggacgtggattcggcggtggacgtggaggtggccgtggccgtgatcgtggtccaagaggccgtggaagacgtggaggccgtgcctcggaagaaacgaaatgggttccagtgaccaaactaggtcgtctagtggctgacaataaaataacgaagctagagcagatctatctccattctctcccagtaaaggagtaccaaatcatagatcatcttgttggtcctacgttgaaagacgaggttatgaagatcatgcctgttcagaaacaaaccagagctggtcaaaggactagattcaaggcctttgttgttgttggtgatggtaatggtcatgttggtttgggtgtcaagtgttctaaggaagttgctactgccattagaggagctattattcttgctaagctctctgttgttccggtgaggagaggttactgggggaataagattgggaagccacacactgtgccttgtaaggttactgggaagtgtggctctgttactgtgagaatggttcctgctccgagaggttctggtattgttgctgctagggttcctaagaaggttcttcagttcgctggtattgatgatgtctttacttcttccagaggatctactaaaactcttggaaactttgtcaaggcgacgtttgactgcttacagaagacatatgggttccttacaccagagttctggaaagagactagattctccagatcgccctaccaagagcacactgatttcttgtcgactaaggctgtttctgcaaccaaggttatcacggagggtgaagaccaagcttaagaccttcatgagataagttttggttgttcttaatactaattcctactttgaaaaagagtatttttttttcttgattatctatgagttttgttattggtggtttcgttactgttttggattttgttagatgtttgccttaatgcaaatttcaatgaaatagcttttgcaat

SEQ ID NO: 106470 - protein, 284 aa, Arabidopsis thaliana; identical to SEQ ID NO: 38082
  peptide (1)..(284): Ceres Seq. ID no. 13619635

SEQ ID NO: 106471 - protein, 185 aa, Arabidopsis thaliana; identical to SEQ ID NO: 38083
  peptide (1)..(185): Ceres Seq. ID no. 13619636

SEQ ID NO: 106472 - protein, 182 aa, Arabidopsis thaliana; identical to SEQ ID NO: 38084
  peptide (1)..(182): Ceres Seq. ID no. 13619637

SEQ ID NO: 106473 - DNA, 1996 bp, Arabidopsis thaliana
  misc_feature (1)..(1996): Ceres Seq. ID no. 13619646
  misc_feature (1)..(1996): Ortholog of  Ceres SEQ ID NO 14313739 as cited in SEQ ID NO 54143
  misc_feature (1)..(1996): Ortholog of  Ceres SEQ ID NO 14308217 as cited in SEQ ID NO 58569
ggaggaacgaagattatcgagagcaaaaatcagagtagtacgatgttcgtgaaacggaatccgattagagaaaccaccgccgggaaaatctcttcgccgtcgtcaccgactttgaatgttgcagtcgcgcatataagagctggatcttattacgaaatcgatgcttcgattcttcctcagagatcgccggaaaatcttaaatcgattagagtcgtcatggtgagcaaaatcacggcgagtgacgtgtctctccggtacccaagcatgttttcactccgatcgcatttcgattacagtaggatgaaccggaataaaccgatgaagaagaggagtggtggtggtcttcttcctgttttcgacgagagtcatgtgatggcttcggagctagctggagacttgctttacagaagaatcgcacctcatgaactttctatgaatagaaattcctggggtttctgggtttctagttcttctcgcaggaacaaatttccaagaagggaggtggtttctcaaccggcgtacaatactcgtctctgtcgcgctgcttcaccggagggaaagtgctcgtctgagctgaaatcgggagggatgatcaagtggggaaggagattgcgtgtgcagtatcagagtcggcatattgatactaggaagaataaggaaggtgaggagagttctagagtgaaggatgaagtttacaaagaagaagagatggagaaagaagaggatgatgatgatgggaatgaaataggaggcactaaacaagaggcaaaggagataactaatggaaatcgtaagagaaagctgattgaatcaagtactgagagactcgctcagaaagctaaggtttatgatcagaagaaggaaactcaaattgtggtttataagaggaaatcagagaggaagttcattgatagatggtctgttgagaggtacaaactagctgagaggaacatgttaaaagtgatgaaggagaagaatgcagtgtttggcaactccatactcaggccagagttgaggtcagaagcaaggaagctgattggtgacacaggtctattggatcatctgcttaagcacatggctggtaaggtggctcctggaggtcaagataggtttatgagaaagcacaatgcagatggggcaatggagtattggttggagagttctgatttgattcacataaggaaagaagcaggagttaaagatccttactggactcctccacctggttggaagcttggtgacaacccttctcaagatcctgtctgcgctggagaaatccgtgacatcagagaagaattagctagcctgaaaagagaattgaagaaacttgcgtcaaagaaggaagaggaggagcttgttatcatgactacgcctaattcttgtgttactagtcagaatgataatctgatgactccagcaaaggaaatctacgctgatctgctgaaaaagaaatacaaaattgaggaccagctagtgattattggagaaaccttgcgtaaaatggaggaagacatgggatggcttaagaaaacagtggacgagaactatcctaaaaagccagactcaacagagacacctttgctactagaggattcaccaccaatacagacactagaaggagaagtgaaggtggtgaacaagggtaaccaaatcacagagtcacctcaaaacagagaaaaaggaaggaagcatgatcaacaagaaagatcaccactttcactaataagcaacactggtttcagaatctgcaggcctgtggggatgttcgcatggccccaattgcctgctcttgctgctgctactgatactaatgcttcttcgccaagtcacagacaagcctacccatccccttttccagtcaagccacttgcagctaagcgtcctcttggcttgacgtttcccttcaccatcatacccgaagaagctcccaagaatctcttcaacgtttgaagttgtcactggaaactgatgcatcagatcttactttccctacaag

SEQ ID NO: 106474 - protein, 649 aa, Arabidopsis thaliana
  peptide (1)..(649): Ceres Seq. ID no. 13619647
GGTKIIESKNQSSTMFVKRNPIRETTAGKISSPSSPTLNVAVAHIRAGSYYEIDASILPQRSPENLKSIRVVMVSKITASDVSLRYPSMFSLRSHFDYSRMNRNKPMKKRSGGGLLPVFDESHVMASELAGDLLYRRIAPHELSMNRNSWGFWVSSSSRRNKFPRREVVSQPAYNTRLCRAASPEGKCSSELKSGGMIKWGRRLRVQYQSRHIDTRKNKEGEESSRVKDEVYKEEEMEKEEDDDDGNEIGGTKQEAKEITNGNRKRKLIESSTERLAQKAKVYDQKKETQIVVYKRKSERKFIDRWSVERYKLAERNMLKVMKEKNAVFGNSILRPELRSEARKLIGDTGLLDHLLKHMAGKVAPGGQDRFMRKHNADGAMEYWLESSDLIHIRKEAGVKDPYWTPPPGWKLGDNPSQDPVCAGEIRDIREELASLKRELKKLASKKEEEELVIMTTPNSCVTSQNDNLMTPAKEIYADLLKKKYKIEDQLVIIGETLRKMEEDMGWLKKTVDENYPKKPDSTETPLLLEDSPPIQTLEGEVKVVNKGNQITESPQNREKGRKHDQQERSPLSLISNTGFRICRPVGMFAWPQLPALAAATDTNASSPSHRQAYPSPFPVKPLAAKRPLGLTFPFTIIPEEAPKNLFNV

SEQ ID NO: 106475 - protein, 635 aa, Arabidopsis thaliana; identical to SEQ ID NO: 99465
  peptide (1)..(635): Ceres Seq. ID no. 13619648

SEQ ID NO: 106476 - protein, 577 aa, Arabidopsis thaliana
  peptide (1)..(577): Ceres Seq. ID no. 13619649
MVSKITASDVSLRYPSMFSLRSHFDYSRMNRNKPMKKRSGGGLLPVFDESHVMASELAGDLLYRRIAPHELSMNRNSWGFWVSSSSRRNKFPRREVVSQPAYNTRLCRAASPEGKCSSELKSGGMIKWGRRLRVQYQSRHIDTRKNKEGEESSRVKDEVYKEEEMEKEEDDDDGNEIGGTKQEAKEITNGNRKRKLIESSTERLAQKAKVYDQKKETQIVVYKRKSERKFIDRWSVERYKLAERNMLKVMKEKNAVFGNSILRPELRSEARKLIGDTGLLDHLLKHMAGKVAPGGQDRFMRKHNADGAMEYWLESSDLIHIRKEAGVKDPYWTPPPGWKLGDNPSQDPVCAGEIRDIREELASLKRELKKLASKKEEEELVIMTTPNSCVTSQNDNLMTPAKEIYADLLKKKYKIEDQLVIIGETLRKMEEDMGWLKKTVDENYPKKPDSTETPLLLEDSPPIQTLEGEVKVVNKGNQITESPQNREKGRKHDQQERSPLSLISNTGFRICRPVGMFAWPQLPALAAATDTNASSPSHRQAYPSPFPVKPLAAKRPLGLTFPFTIIPEEAPKNLFNV

SEQ ID NO: 106477 - DNA, 1782 bp, Arabidopsis thaliana
  misc_feature (1)..(1782): Ceres Seq. ID no. 13619660
  misc_feature (1)..(1782): Ortholog of  Ceres SEQ ID NO 13660287 as cited in SEQ ID NO 67316
accgacaaatcttcttcttctctctctctccctcttcctctgtcacacagatattgacaaaaacaaaaagaatgagtcaatcaaatcgtgtcagagacgaagttacattacctttactccaaaaaacctctcatctgaaaaatcactcctctgttctctctgttttcctaaatgaagcaatctcaatctgcaaaatctcttacccattggtcctcactggtctcttcctctacgttcgctccttcgtctctctgtctttcctcggtggtctcggtgacgccactctcgccggtggctccctcgccgccgcatttgcaaacatcaccggatactctcttttctccggtttaaccatgggcgttgagtctatctgttcacaagcctttggagccagacgctataactacgtctgcgcgagtgtcaagagaggaatcatcctccttctcgtcacttctctccctgttacacttctttggatgaatatggagaagattcttctaatcttgaaacaggacaagaagctcgcgtccgaagcgcacatctttttgctttactctgttccagatcttgtcgctcaatctttcttacacccattaagagtttatcttcggactcagtcaaagactcttcctttatcaatctgtacagtgatcgcgagttttcttcacttgccaatcacgttcttccttgtaagttacctcggtttggggattaaaggaatcgctttgagtggtgttgtgtctaatttcaaccttgtcgctttcctctttctctacatctgtttcttcgaagacaagctaagtgttaatgaggacgagaagataacagaggagacatgtgaagatagtgtgagagaatggaagaaactactctgtcttgcgataccaagttgtatatcggtttgtcttgagtggtggtgctatgagattatgattttgctttgtgggtttctcttagaccctaaagcaagtgttgcttcaatgggaattctcatccaaatcacttctcttgtgtacattttccctcattccttgagtttaggagtctccacccgggtcggaaacgagcttggttctaaccagccaaaaagagcgagaagagcagccattgttggacttggtctcagcatcgccctagggtttacggctttcgcgtttactgtctcggttagaaacacatgggcgatgtttttcactgatgacaaagaaatcatgaagttgactgccatggctctgccaatcgttggtctatgtgagctcgggaactgcccgcaaactacgggatgcggtgttctcagaggctccgcgaggccgaagatcggagctaatattaatggagtggcgttttacgcggttggcattccggttggagcagttttggcgttttggtttgggtttggatttaagggactttggcttgggatgcttgcggcgcagatcacgtgtgtgattggtatgatggcggcgacgtgtaggaccgattgggaacttgaggcggaaagggctaaggtgctcacaacggcggtggattgtggcagtagtgacgacgacgccaaggaggatatggaggctgggatggttgataagtagggaggaatgagtcatgaggaggtctttaacaaaaacaaattgactttgttttgaattagttgataacttttttcttttattgagaagagattcgttggaggattaatgtaaattttgtagtgtaatgataacacaatctagagattcgtcgttgtattcaaggtttttaaattcataaggtcaaattttgccc

SEQ ID NO: 106478 - protein, 528 aa, Arabidopsis thaliana
  peptide (1)..(528): Ceres Seq. ID no. 13619661
RQIFFFSLSPSSSVTQILTKTKRMSQSNRVRDEVTLPLLQKTSHLKNHSSVLSVFLNEAISICKISYPLVLTGLFLYVRSFVSLSFLGGLGDATLAGGSLAAAFANITGYSLFSGLTMGVESICSQAFGARRYNYVCASVKRGIILLLVTSLPVTLLWMNMEKILLILKQDKKLASEAHIFLLYSVPDLVAQSFLHPLRVYLRTQSKTLPLSICTVIASFLHLPITFFLVSYLGLGIKGIALSGVVSNFNLVAFLFLYICFFEDKLSVNEDEKITEETCEDSVREWKKLLCLAIPSCISVCLEWWCYEIMILLCGFLLDPKASVASMGILIQITSLVYIFPHSLSLGVSTRVGNELGSNQPKRARRAAIVGLGLSIALGFTAFAFTVSVRNTWAMFFTDDKEIMKLTAMALPIVGLCELGNCPQTTGCGVLRGSARPKIGANINGVAFYAVGIPVGAVLAFWFGFGFKGLWLGMLAAQITCVIGMMAATCRTDWELEAERAKVLTTAVDCGSSDDDAKEDMEAGMVDK

SEQ ID NO: 106479 - protein, 505 aa, Arabidopsis thaliana [sequence omitted]

SEQ ID NO: 106480 - protein, 411 aa, Arabidopsis thaliana
  peptide (1)..(411): Ceres Seq. ID no. 13619663
MGVESICSQAFGARRYNYVCASVKRGIILLLVTSLPVTLLWMNMEKILLILKQDKKLASEAHIFLLYSVPDLVAQSFLHPLRVYLRTQSKTLPLSICTVIASFLHLPITFFLVSYLGLGIKGIALSGVVSNFNLVAFLFLYICFFEDKLSVNEDEKITEETCEDSVREWKKLLCLAIPSCISVCLEWWCYEIMILLCGFLLDPKASVASMGILIQITSLVYIFPHSLSLGVSTRVGNELGSNQPKRARRAAIVGLGLSIALGFTAFAFTVSVRNTWAMFFTDDKEIMKLTAMALPIVGLCELGNCPQTTGCGVLRGSARPKIGANINGVAFYAVGIPVGAVLAFWFGFGFKGLWLGMLAAQITCVIGMMAATCRTDWELEAERAKVLTTAVDCGSSDDDAKEDMEAGMVDK

SEQ ID NO: 106481 - DNA, 1303 bp, Arabidopsis thaliana
  misc_feature (1)..(1303): Ceres Seq. ID no. 13619672
  misc_feature (1)..(1303): Ortholog of  Ceres SEQ ID NO 15177037 as cited in SEQ ID NO 60242
atttgtgctctttatacattttcaaaatgtaaagatccacaacaagaggaatgggtttgttcttagtcctattccccgaccacaacaacaacgactcttcttcttattattctccggcaaaaactaccttccgctccaaattatcctctcgtcttctcctctccaaggctgaatccacaatctcaagctgcatcatcctcctcttcctcactctcttcctcttcactctctctacattcgaagaaccttcctctcgttttcccgccatttcttctcctcactggcgatttctcctcaaccgcaacatcatctctcgtcgtttcgctctacaaggaatgggtactctgtttctaagaggaaccaagagcatgcacgatttaatcattgctcatatcgcttccgttacaacggagaacgatctccgtctctttatacggttgcttcaccgctccggagttacttcaaaatccgacgtcgttttactcttcaattcaccttcatccactacaagattcaccgagttgatcgaacaagagaacaactcgttcttaaagctcgttcatgttcatcggaatgattcgatgacatcatcatcatcatcatctgagcatgttatttgggggaagaagagtcgtcatcgagctaattataactcgaacgagctgactcatggctcgatagttggtttcgacgtaactgagttggatcctgaaaactctttatccgggtttatggatcaagttccgttaagcttgaggagatgggcttgttacccaatgcttcttggtcgagtacgacgcagtttcaaacacgttatgcttgttgacgctaaaacttcatttttcatcggtgacccgtttacccggattcgtaaccggagccccgactcagtcctcttcttcttctcaaaacacaagaacgcctccgaggttaatccggagattttgatcggtggagctaaaggaatcaggagattgtcgagctccatgcatactgagattgtgagagcgacgatgatgaagaagaactcggttacggaagtaacggaatcggttgtgttgagtcaactcgtcgggaatgttcatatgacgaagaactttcaagtggttttaagtgagtcagtggtgccggaagcgaattagttattatgaaacgtatttgttcatgtttatactgttattatggcgataattatgaaacgtatttgttcatgtgaattggattcttctgtctacgataattaatgttggcaatatttttttaaaaaattacaaaaaatatataaaatttttgtattcatttg

SEQ ID NO: 106482 - protein, 363 aa, Arabidopsis thaliana
  peptide (1)..(363): Ceres Seq. ID no. 13619673
MGLFLVLFPDHNNNDSSSYYSPAKTTFRSKLSSRLLLSKAESTISSCIILLFLTLFLFTLSTFEEPSSRFPAISSPHWRFLLNRNIISRRFALQGMGTLFLRGTKSMHDLIIAHIASVTTENDLRLFIRLLHRSGVTSKSDVVLLFNSPSSTTRFTELIEQENNSFLKLVHVHRNDSMTSSSSSSEHVIWGKKSRHRANYNSNELTHGSIVGFDVTELDPENSLSGFMDQVPLSLRRWACYPMLLGRVRRSFKHVMLVDAKTSFFIGDPFTRIRNRSPDSVLFFFSKHKNASEVNPEILIGGAKGIRRLSSSMHTEIVRATMMKKNSVTEVTESVVLSQLVGNVHMTKNFQVVLSESVVPEAN

SEQ ID NO: 106483 - protein, 268 aa, Arabidopsis thaliana
  peptide (1)..(268): Ceres Seq. ID no. 13619674
MGTLFLRGTKSMHDLIIAHIASVTTENDLRLFIRLLHRSGVTSKSDVVLLFNSPSSTTRFTELIEQENNSFLKLVHVHRNDSMTSSSSSSEHVIWGKKSRHRANYNSNELTHGSIVGFDVTELDPENSLSGFMDQVPLSLRRWACYPMLLGRVRRSFKHVMLVDAKTSFFIGDPFTRIRNRSPDSVLFFFSKHKNASEVNPEILIGGAKGIRRLSSSMHTEIVRATMMKKNSVTEVTESVVLSQLVGNVHMTKNFQVVLSESVVPEAN

SEQ ID NO: 106484 - protein, 257 aa, Arabidopsis thaliana
  peptide (1)..(257): Ceres Seq. ID no. 13619675
MHDLIIAHIASVTTENDLRLFIRLLHRSGVTSKSDVVLLFNSPSSTTRFTELIEQENNSFLKLVHVHRNDSMTSSSSSSEHVIWGKKSRHRANYNSNELTHGSIVGFDVTELDPENSLSGFMDQVPLSLRRWACYPMLLGRVRRSFKHVMLVDAKTSFFIGDPFTRIRNRSPDSVLFFFSKHKNASEVNPEILIGGAKGIRRLSSSMHTEIVRATMMKKNSVTEVTESVVLSQLVGNVHMTKNFQVVLSESVVPEAN

SEQ ID NO: 106485 - DNA, 913 bp, Arabidopsis thaliana
  misc_feature (1)..(913): Ceres Seq. ID no. 13619688
  misc_feature (1)..(913): Ortholog of  Ceres SEQ ID NO 13597679 as cited in SEQ ID NO 65073
gtcacacacacaacacaacaatggatattaacaggtggagtcttcaaggtatgactgctcttgtaaccggtggatcaaagggaattgggtatgcaatagtggaggaacttgtaggctttggtgcaagagttcacatctgtgacatagacgaaactctgctaaacgaatgcttaagtggatggcatgcaaaagggtttgaagtgagtggttcaatctgtgatgtttcctctcgacctcagagagtgcaattgatgcagactgtttcttctctatttggtgccaaactcaacatccttataaacaatgttggcaagtacatattaaagccaactttagaaagtacagctgaagatttctcaagtttaatggctaccaatttggaatctgcttactacatctcccaattggcacatcctttacttaaagcctcgggaaatgggaatatcgtgtttatttcctcggtaacgggggttgtctctggcacatctaccatatatggtgtaacaaaaggagccttgaatcaactggcaagagatttggcgtgtgaatgggccagtgacaacataagggctaactctgtagctccttgggtcactgcaacttctcttgtccaaaaatatcttgaagacgagatatttgcggaagctatgttctcaagaaccccattaggacgtgcatgtgagccacgtgaggttgcgtcgctggtgacatttctctgtctccctgcagcttcttatataacaggacaaaccatttgtattgatggtggtttcactgttaatggattctcctataagccatagggtcaaaccctagaaaacacttctacaattaacaatttctatgatgtatgaacatttggtcaagttttactacattatgtcaaaaataaatgaggtcaagcttatatatg

SEQ ID NO: 106486 - protein, 266 aa, Arabidopsis thaliana
  peptide (1)..(266): Ceres Seq. ID no. 13619689
HTHNTTMDINRWSLQGMTALVTGGSKGIGYAIVEELVGFGARVHICDIDETLLNECLSGWHAKGFEVSGSICDVSSRPQRVQLMQTVSSLFGAKLNILINNVGKYILKPTLESTAEDFSSLMATNLESAYYISQLAHPLLKASGNGNIVFISSVTGVVSGTSTIYGVTKGALNQLARDLACEWASDNIRANSVAPWVTATSLVQKYLEDEIFAEAMFSRTPLGRACEPREVASLVTFLCLPAASYITGQTICIDGGFTVNGFSYKP

SEQ ID NO: 106487 - protein, 260 aa, Arabidopsis thaliana; identical to SEQ ID NO: 21801
  peptide (1)..(260): Ceres Seq. ID no. 13619690

SEQ ID NO: 106488 - protein, 250 aa, Arabidopsis thaliana; identical to SEQ ID NO: 21802
  peptide (1)..(250): Ceres Seq. ID no. 13619691

SEQ ID NO: 106489 - DNA, 1254 bp, Arabidopsis thaliana
  misc_feature (1)..(1254): Ceres Seq. ID no. 13619700
  misc_feature (1)..(1254): Ortholog of  Ceres SEQ ID NO 14311922 as cited in SEQ ID NO 51539
agtagagagaggctttcgattaattttactttgtggccgccgtgacctttttcttagcgtcgctctctgtcaccttcaagttcactatctccgacttatcttctgtcaagtactgaacaagaatcatggaggagatcaccaaaccggtccttgttggaatagttaagaaagaagctccacagctagcatccgtgttgagagaaatgaagaatgttctagatgtggttaggagcaaagtggaagctctgactgcattggtaaaagcaaacagttttccgacagcgggtgggataagttatcttgaggccaagcatctgttacttctaagttattgccaggatcttgtatattatattctaaggaaagcaaaaggactctctattgatggtcatcctcttgtaaggagccttgtagagatacgtatgtttctggaaaagattcgtcccatagacaaaaaacttcagtaccagattcagaagctcaccacagccggtgggcctgtgacagagctagctcattccgagggaaaggggtcgtgtgaagcccaaaaatctgaagatctttcaaattataagcctaaacctgacttacttgctgacaaagaggatgaccaagaggatgatggtgtttatcgacccccgaaatttgcccctatgtctatggaagataagacttcaaaacaagaaagagatgctgccagaaaagagaaacacttttttagacaagccactgaaaatacatacatgaaagatgtgttggacgatctggaggacaggcctgaagagattagagactattatggggttgagagcaatgagcagaagaggtttatggcacagtatgaaaggcaacaaaaggcagaagaagagctctttacccgggcacctcgcactaaagaggataagaagagagagaagcgcttgaaatcaagcagcgggttgcatgaactaaccgagaacttttacgatgatatcaagttcttggataaggatggtgaaaagccaagaagcttcggccgtaataaaaggggagggccattcaagaaaagaaagacaaggcactgatatggatacaccagtggttcctttagctgcttcagtgcaccaattttgttgccatgaaaaagatacaaattttcgatttgcttttatgattaaatgttgaaagtggtgaatgtgagaacttgttatcagttttagtattggttcatggtcatgctcttgcagtaaaattaggaagagaccttttctcttt

SEQ ID NO: 106490 - protein, 312 aa, Arabidopsis thaliana; identical to SEQ ID NO: 26572
  peptide (1)..(312): Ceres Seq. ID no. 13619701

SEQ ID NO: 106491 - protein, 286 aa, Arabidopsis thaliana; identical to SEQ ID NO: 26573
  peptide (1)..(286): Ceres Seq. ID no. 13619702

SEQ ID NO: 106492 - protein, 213 aa, Arabidopsis thaliana; identical to SEQ ID NO: 26574
  peptide (1)..(213): Ceres Seq. ID no. 13619703

SEQ ID NO: 106493 - DNA, 672 bp, Arabidopsis thaliana
  misc_feature (1)..(672): Ceres Seq. ID no. 13619704
  misc_feature (1)..(672): Ortholog of  Ceres SEQ ID NO 13655287 as cited in SEQ ID NO 63004
  misc_feature (1)..(672): Ortholog of  Ceres SEQ ID NO 15173178 as cited in SEQ ID NO 64574
accttctcttcttcctctaattgcttttctccgtcactgagtaccttgcctctcgagctcccaatcttaagtagaggattgagcttaaggcaagatggtaagaatcagtgttcttaacgatgctctcaagagcatgtacaatgctgagaaacgaggcaagaggcaggtcatgatcaggccttcctccaaagtgattatcaagtttctgattgtcatgcagaagcacggttacattggtgagtttgagtatgtcgatgaccacagatctggcaagatcgtcgttgaattgaacggaaggttgaacaagtgtggtgttatcagcccacgttttgatgttggtgtcaaggaaattgaaggttggactgcccgtttgctcccttctagacagtttggttacatcgtgctgactacatctgctggcattatggaccatgaagaagctagaaggaagaatgttggaggcaaggttctcggcttcttctattgaagttttattttatggggaaacagattttcattgagttatttttaacttttgtcctccattttctctgaaactacctttctctttctttcgaattttgtgataactttgatggatagtgttctgaaatcactctttttggtttggagcccttttttagacttcggatgcactcgtaaaattattct

SEQ ID NO: 106494 - protein, 130 aa, Arabidopsis thaliana; identical to SEQ ID NO: 23618
  peptide (1)..(130): Ceres Seq. ID no. 13619705

SEQ ID NO: 106495 - protein, 117 aa, Arabidopsis thaliana; identical to SEQ ID NO: 23619
  peptide (1)..(117): Ceres Seq. ID no. 13619706

SEQ ID NO: 106496 - protein, 105 aa, Arabidopsis thaliana; identical to SEQ ID NO: 23620
  peptide (1)..(105): Ceres Seq. ID no. 13619707

SEQ ID NO: 106497 - DNA, 2719 bp, Arabidopsis thaliana
  misc_feature (1)..(2719): Ceres Seq. ID no. 13619708
  misc_feature (1)..(2719): Ortholog of  Ceres SEQ ID NO 13623497 as cited in SEQ ID NO 0
gtcgagaaccgaatttggcccaacataaaggagagagtggcgggtgagaaattctgccgccaatatattatcacctttcttcaaggttgcaaacttgcaacacctgtcctttctaaaaccctaatttcaaaatcgactgatgttagcgattcgatcgtcgaattacctccgatgcataccttctctctgtactaaaacccaaatctctcaattctcctccgtgttaatctcttttagccgccaaatttcccacttgcgtcttagctcgtgccatagagccatgtcttcttcccgcccttctgcatttgatgctctcatgtccaatgctcgtgcagccgccaagaagaagactccccagacaactaatttgtctcgctcgccgaacaaaaggaaaattggagaaacccaagatgctaatttgggcaaaactattgtttccgaaggtacacttccaaaaacggaggatctgctggagcctgtttctgattctgcaaatcccagatcggatacatcgtcaattgcggaggattcaaagacgggagcgaaaaaggctaagactttgagcaagacagacgaaatgaagagcaaaattggattgctgaagaagaagccgaatgatttcgatcctgaaaaaatgtcttgctgggagaaaggggagagagttccgtttctgtttgtcgcattggcttttgatctgatctcaaatgaaagtggccggattgtgattactgatattctgtgtaacatgttgagaactgttattgccactactcctgaggatttggtcgctactgtttatctttcggcgaatgagattgccccggctcatgaaggtgtagaattgggaattggtgagagtacaattatcaaggctatctctgaggcttttggtagaactgaggatcatgttaagaagcagaatacggaactgggagacttgggacttgtagcaaaaggaagccgttcgactcagactatgatgttcaagcccgaaccattgactgttgtcaaggttttcgatacgtttcgacaaattgctaaggaaagtggaaaagatagtaatgaaaagaagaagaatcgaatgaaggcacttcttgtggcgacaacagactgtgaacctctttacttaacacgattacttcaggcaaaattgcggttagggttctcaggtcagactgtcttagccgcattgggacaagccgctgtatataatgaagagcactcaaagccacccccaaataccaagtctcctttagaagaggctgcaaagattgttaaacaagtattcactgtacttcctgtctatgacattattgttcctgctcttctaagtggcggtgtgtggaatcttccaaaaacttgtaactttacattgggtgttccaattggacccatgcttgcaaaaccaaccaaaggtgtagctgagatactgaataaattccaggacatcgttttcacatgtgaatacaaatatgatggggaacgtgcacagatacattttatggaggatggtacatttgagatatacagtcgaaatgctgaaagaaacactgggaagtacccggatgttgctcttgcgttatcaagattaaagaagccttctgtgaaatcttttattctggattgtgaagttgttgctttcgacagggagaaaaagaaaattcttccgttccagattttgagcactcgagcccgtaaaaatgtgaatgtcaatgatatcaaggttggcgtatgcatctttgcttttgacatgttatatctaaatggccaacaacttatccaggagaatcttaaaattcgccgagagaagctatacgaatcatttgaggaagatcctgggtatttccagtttgcaactgctgtaacatctaacgatatcgatgaaatacaaaagtttcttgacgcttctgttgatgttggctgcgaaggtttaatcattaaaacattggactcagatgctacctatgagcctgcaaagcgatcaaataattggctaaaactgaagaaagactatatggacagcattggggactctgtggatcttgtaccaattgctgctttccatggacgtggaaaacgcacaggtgtctatggtgcatttttactcgcttgctatgatgttgataaggaagagttccagagcatttgtaaaattggtactggattttctgatgccatgcttgacgagcggtcgtccagtcttcgctctcaagtgattgctactccaaaacaatactaccgagttggagacagcctcaatccagatgtttggtttgagcccactgaggtctgggaagtgaaagcagctgacttaacaattagccctgtgcaccgtgcagctactggcatagtggatcctgataaggggatttctcttcgttttcctcgtctacttcgtgtacgggaagacaagaagcccgaggaagcaacatcatctgagcagattgctgatttgtaccaagctcagaaacacaatcatccaagtaatgaagtcaaaggtgacgatgattgaacaacagtaatctggcctcagagcacatttcctcgtatgtacgacattgctcgtaacttgctaatgatgcacattgcgtgtttgagttttcaactgtaactgcttatgtaaaactgcttttaggaaaagtgaatgaaaggttctggaaaaaaattggtacactcatcaactgactctggaatgaataaaaacactgccctgattgac

SEQ ID NO: 106498 - protein, 790 aa, Arabidopsis thaliana
  peptide (1)..(790): Ceres Seq. ID no. 13619709
MLAIRSSNYLRCIPSLCTKTQISQFSSVLISFSRQISHLRLSSCHRAMSSSRPSAFDALMSNARAAAKKKTPQTTNLSRSPNKRKIGETQDANLGKTIVSEGTLPKTEDLLEPVSDSANPRSDTSSIAEDSKTGAKKAKTLSKTDEMKSKIGLLKKKPNDFDPEKMSCWEKGERVPFLFVALAFDLISNESGRIVITDILCNMLRTVIATTPEDLVATVYLSANEIAPAHEGVELGIGESTIIKAISEAFGRTEDHVKKQNTELGDLGLVAKGSRSTQTMMFKPEPLTVVKVFDTFRQIAKESGKDSNEKKKNRMKALLVATTDCEPLYLTRLLQAKLRLGFSGQTVLAALGQAAVYNEEHSKPPPNTKSPLEEAAKIVKQVFTVLPVYDIIVPALLSGGVWNLPKTCNFTLGVPIGPMLAKPTKGVAEILNKFQDIVFTCEYKYDGERAQIHFMEDGTFEIYSRNAERNTGKYPDVALALSRLKKPSVKSFILDCEVVAFDREKKKILPFQILSTRARKNVNVNDIKVGVCIFAFDMLYLNGQQLIQENLKIRREKLYESFEEDPGYFQFATAVTSNDIDEIQKFLDASVDVGCEGLIIKTLDSDATYEPAKRSNNWLKLKKDYMDSIGDSVDLVPIAAFHGRGKRTGVYGAFLLACYDVDKEEFQSICKIGTGFSDAMLDERSSSLRSQVIATPKQYYRVGDSLNPDVWFEPTEVWEVKAADLTISPVHRAATGIVDPDKGISLRFPRLLRVREDKKPEEATSSEQIADLYQAQKHNHPSNEVKGDDD

SEQ ID NO: 106499 - protein, 743 aa, Arabidopsis thaliana
  peptide (1)..(743): Ceres Seq. ID no. 13619710
MSSSRPSAFDALMSNARAAAKKKTPQTTNLSRSPNKRKIGETQDANLGKTIVSEGTLPKTEDLLEPVSDSANPRSDTSSIAEDSKTGAKKAKTLSKTDEMKSKIGLLKKKPNDFDPEKMSCWEKGERVPFLFVALAFDLISNESGRIVITDILCNMLRTVIATTPEDLVATVYLSANEIAPAHEGVELGIGESTIIKAISEAFGRTEDHVKKQNTELGDLGLVAKGSRSTQTMMFKPEPLTVVKVFDTFRQIAKESGKDSNEKKKNRMKALLVATTDCEPLYLTRLLQAKLRLGFSGQTVLAALGQAAVYNEEHSKPPPNTKSPLEEAAKIVKQVFTVLPVYDIIVPALLSGGVWNLPKTCNFTLGVPIGPMLAKPTKGVAEILNKFQDIVFTCEYKYDGERAQIHFMEDGTFEIYSRNAERNTGKYPDVALALSRLKKPSVKSFILDCEVVAFDREKKKILPFQILSTRARKNVNVNDIKVGVCIFAFDMLYLNGQQLIQENLKIRREKLYESFEEDPGYFQFATAVTSNDIDEIQKFLDASVDVGCEGLIIKTLDSDATYEPAKRSNNWLKLKKDYMDSIGDSVDLVPIAAFHGRGKRTGVYGAFLLACYDVDKEEFQSICKIGTGFSDAMLDERSSSLRSQVIATPKQYYRVGDSLNPDVWFEPTEVWEVKAADLTISPVHRAATGIVDPDKGISLRFPRLLRVREDKKPEEATSSEQIADLYQAQKHNHPSNEVKGDDD

SEQ ID NO: 106500 - protein, 731 aa, Arabidopsis thaliana
  peptide (1)..(731): Ceres Seq. ID no. 13619711
MSNARAAAKKKTPQTTNLSRSPNKRKIGETQDANLGKTIVSEGTLPKTEDLLEPVSDSANPRSDTSSIAEDSKTGAKKAKTLSKTDEMKSKIGLLKKKPNDFDPEKMSCWEKGERVPFLFVALAFDLISNESGRIVITDILCNMLRTVIATTPEDLVATVYLSANEIAPAHEGVELGIGESTIIKAISEAFGRTEDHVKKQNTELGDLGLVAKGSRSTQTMMFKPEPLTVVKVFDTFRQIAKESGKDSNEKKKNRMKALLVATTDCEPLYLTRLLQAKLRLGFSGQTVLAALGQAAVYNEEHSKPPPNTKSPLEEAAKIVKQVFTVLPVYDIIVPALLSGGVWNLPKTCNFTLGVPIGPMLAKPTKGVAEILNKFQDIVFTCEYKYDGERAQIHFMEDGTFEIYSRNAERNTGKYPDVALALSRLKKPSVKSFILDCEVVAFDREKKKILPFQILSTRARKNVNVNDIKVGVCIFAFDMLYLNGQQLIQENLKIRREKLYESFEEDPGYFQFATAVTSNDIDEIQKFLDASVDVGCEGLIIKTLDSDATYEPAKRSNNWLKLKKDYMDSIGDSVDLVPIAAFHGRGKRTGVYGAFLLACYDVDKEEFQSICKIGTGFSDAMLDERSSSLRSQVIATPKQYYRVGDSLNPDVWFEPTEVWEVKAADLTISPVHRAATGIVDPDKGISLRFPRLLRVREDKKPEEATSSEQIADLYQAQKHNHPSNEVKGDDD

SEQ ID NO: 106501 - DNA, 1313 bp, Arabidopsis thaliana
  misc_feature (1)..(1313): Ceres Seq. ID no. 13619728
  misc_feature (1)..(1313): Ortholog of  Ceres SEQ ID NO 15177854 as cited in SEQ ID NO 51851
  misc_feature (1)..(1313): Ortholog of  Ceres SEQ ID NO 15177087 as cited in SEQ ID NO 51932
  misc_feature (1)..(1313): Ortholog of  Ceres SEQ ID NO 13662937 as cited in SEQ ID NO 64415
  misc_feature (1)..(1313): Ortholog of  Ceres SEQ ID NO 13595984 as cited in SEQ ID NO 68340
  misc_feature (1)..(1313): Ortholog of  Ceres SEQ ID NO 12635014 as cited in SEQ ID NO 0
aatcttgaaaagtgtttttgagagaaatataggttttacaaaatccaccgttgtgaattcatggaaatggtaaacgcagaagcaaaacagagtgtccctcttctcaccccttataagatgggaagattcaatctttctcatagggttgttctagcaccattgacgagacagaaatcgtacggaagcgttcctcagcctcacgctatcttgtattactctcagagaacgtcaccgggaggttttctcatcgctgaagccaccggggtttcagatacagctcaagggtatccagatacacctgggatatggactaaagagcatgtggaggcatggaagccaatcgttgatgctgtacatgccaaaggtggtatcttcttctgtcagatctggcatgttggccgcgtttctaatcgcggttttcagccaaggaggcaagctcctatctcttgtacggggaagccaattatgcctcaaatgcgtgctaatggcattgatgaagctcgctttacccctccaagacgtctaagtatcgaagaaatccccggcattgtcaatgattttaggcttgctgcaagaaatgctatggaagctggttttgatggagttgagattcatggagctcatggctatctgattgatcagttcatgaaggacaaagtgaatgacagaactgatgaatatggtggatcattgcaaaaccgttgcaaatttgctctggaagtagtcgatgcagtggctaaggagatcgggccagaccgtgttggaatcaggctctctccgtttgcagactatatggaatccggagacactaatccagaagcattagggctgtacatggtggaatctctgaacaaatatggaatcctctactgtcatatgattgaacccagaatgaaaacagtgggagaaatagcagcgtgttctcacacactaatgccaatgagggaagcctttaaggggactttcatctctgcaggaggtttcacgagggaagatgggaatgaggccgtggcaaagggacgaactgatcttgtggcttatggtcgatggtttctagccaacccagacctgccaaagcggttccaactggatgcaccgctgaataaatacaataggtcaacgttttacacttctgatcctgtcgtgggttacaccgattacccttcccttgaatcaacagcttaaaatcgtgttatcagtaatgtaatgtgtttccctaatgatgtaataagtttctggcttttgtttatactctaagtcattataccttcataataatttacatggatacattatcacaaaagagcttttat

SEQ ID NO: 106502 - protein, 374 aa, Arabidopsis thaliana
  peptide (1)..(374): Ceres Seq. ID no. 13619729
MEMVNAEAKQSVPLLTPYKMGRFNLSHRVVLAPLTRQKSYGSVPQPHAILYYSQRTSPGGFLIAEATGVSDTAQGYPDTPGIWTKEHVEAWKPIVDAVHAKGGIFFCQIWHVGRVSNRGFQPRRQAPISCTGKPIMPQMRANGIDEARFTPPRRLSIEEIPGIVNDFRLAARNAMEAGFDGVEIHGAHGYLIDQFMKDKVNDRTDEYGGSLQNRCKFALEVVDAVAKEIGPDRVGIRLSPFADYMESGDTNPEALGLYMVESLNKYGILYCHMIEPRMKTVGEIAACSHTLMPMREAFKGTFISAGGFTREDGNEAVAKGRTDLVAYGRWFLANPDLPKRFQLDAPLNKYNRSTFYTSDPVVGYTDYPSLESTA

SEQ ID NO: 106503 - protein, 372 aa, Arabidopsis thaliana
  peptide (1)..(372): Ceres Seq. ID no. 13619730
MVNAEAKQSVPLLTPYKMGRFNLSHRVVLAPLTRQKSYGSVPQPHAILYYSQRTSPGGFLIAEATGVSDTAQGYPDTPGIWTKEHVEAWKPIVDAVHAKGGIFFCQIWHVGRVSNRGFQPRRQAPISCTGKPIMPQMRANGIDEARFTPPRRLSIEEIPGIVNDFRLAARNAMEAGFDGVEIHGAHGYLIDQFMKDKVNDRTDEYGGSLQNRCKFALEVVDAVAKEIGPDRVGIRLSPFADYMESGDTNPEALGLYMVESLNKYGILYCHMIEPRMKTVGEIAACSHTLMPMREAFKGTFISAGGFTREDGNEAVAKGRTDLVAYGRWFLANPDLPKRFQLDAPLNKYNRSTFYTSDPVVGYTDYPSLESTA

SEQ ID NO: 106504 - protein, 355 aa, Arabidopsis thaliana
  peptide (1)..(355): Ceres Seq. ID no. 13619731
MGRFNLSHRVVLAPLTRQKSYGSVPQPHAILYYSQRTSPGGFLIAEATGVSDTAQGYPDTPGIWTKEHVEAWKPIVDAVHAKGGIFFCQIWHVGRVSNRGFQPRRQAPISCTGKPIMPQMRANGIDEARFTPPRRLSIEEIPGIVNDFRLAARNAMEAGFDGVEIHGAHGYLIDQFMKDKVNDRTDEYGGSLQNRCKFALEVVDAVAKEIGPDRVGIRLSPFADYMESGDTNPEALGLYMVESLNKYGILYCHMIEPRMKTVGEIAACSHTLMPMREAFKGTFISAGGFTREDGNEAVAKGRTDLVAYGRWFLANPDLPKRFQLDAPLNKYNRSTFYTSDPVVGYTDYPSLESTA

SEQ ID NO: 106505 - DNA, 1611 bp, Arabidopsis thaliana
  misc_feature (1)..(1611): Ceres Seq. ID no. 13619788
  misc_feature (1)..(1611): Ortholog of  Ceres SEQ ID NO 15170151 as cited in SEQ ID NO 53069
  misc_feature (1)..(1611): Ortholog of  Ceres SEQ ID NO 13594209 as cited in SEQ ID NO 59089
  misc_feature (1)..(1611): Ortholog of  Ceres SEQ ID NO 14308041 as cited in SEQ ID NO 62601
  misc_feature (1)..(1611): Ortholog of  Ceres SEQ ID NO 14303546 as cited in SEQ ID NO 64893
  misc_feature (1)..(1611): Ortholog of  Ceres SEQ ID NO 15176783 as cited in SEQ ID NO 65590
  misc_feature (1)..(1611): Ortholog of  Ceres SEQ ID NO 14308007 as cited in SEQ ID NO 65760
  misc_feature (1)..(1611): Ortholog of  Ceres SEQ ID NO 14308019 as cited in SEQ ID NO 65849
  misc_feature (1)..(1611): Ortholog of  Ceres SEQ ID NO 15170163 as cited in SEQ ID NO 66262
  misc_feature (1)..(1611): Ortholog of  Ceres SEQ ID NO 13502874 as cited in SEQ ID NO 66298
  misc_feature (1)..(1611): Ortholog of  Ceres SEQ ID NO 14307944 as cited in SEQ ID NO 66503
  misc_feature (1)..(1611): Ortholog of  Ceres SEQ ID NO 12614124 as cited in SEQ ID NO 68392
atgtcacacacaaagtcgcaaccacaaacgtgaaacgtgtaaaatatgactgtgctttggtttgtatcacttatcttactcatctctatccttctcgttgccgtcaaacactctaagcggcgatgggtccggcaaccaccgtctcctccaggcttaccaatcattggaaacttgcaccagcttggagaattaccacatcaatctctatgtaagctctcaaagaagtatggtcctgtaatgttactgaaacttggaagagttccaacagttatagtttctactcctgaaacagcaaaacaagttcttaaagactatgacctccactgttgtagccgtccaagcttggaaggtacaagaaagctttcttacaactatctagacattgctttctctagatttgatgattattggaaagaattaaggaagctttgtgttgaagaactcttttgtaataaacgaattaactcgattcaaccaatcaaggaggcggagatggagaaactgattgactcaattgctgaatctgcttctcagaaaactctggttaacttgagtgatacgtttctttctttaaacgttaacgtaatttgcaaggcagtatttggtgtgaatttccaaggaactgtgcttaacaatgataagttccaagatttagtccacgaggcacttgagatgttggggagcttctctgcttcggatttcttcccgtatgtcggttggattgtcgattggttcacgggtttacacgctcggagggagagaagcgtacgagatcttgatgctttctatgaacaaatgattgatttacatctacagaaaaacagagaagaaagtgaagatgattttgtggacttgctcttgaggttggaaaaggaagaagctgttcttggatatggcaaactcacaagaaaccacatcaaagcaatcttgatgaacattcttttggggggaatcaatacttctgcaataaccatgacatgggcaatggcggaactcataagaaacccacgagtgatgaagaaagttcaatccgaaatcagagcccaaatagggaaaaacaacaaaacaagaatcataagtttagatgagataaatcatctcagttacctaaatatggttatcaaagaaacatgccggttacatccagtagcacctcttctagtcccaagagaagtgatatctgaattcaagatcaacggctacacgattcaaccgaagacaaggcttcatgtcaacgtatgggctatcggacgtgatcccgagatatggaaagatccagaagagtttctcccagagaggtttatggactgtgacattgatgttaaaggacaagactatgagttgttaccatttggaagtggtcgaagaatttgtccagcagtgtacatggggataacaacagttgagtttggtcttgctaatctcttgtatcactttgattggaagttaccagaaggtgttgccgttgaagatatttacatggatgaagcttctggactcacttctcataagaaacatgaccttttacttgttcctgtgaaatctttagtgtaacacttgtgtaagtaaacatgaccttttacttctcataagtaatgtaatggttaaacc

SEQ ID NO: 106506 - protein, 502 aa, Arabidopsis thaliana
  peptide (1)..(502): Ceres Seq. ID no. 13619789
MTVLWFVSLILLISILLVAVKHSKRRWVRQPPSPPGLPIIGNLHQLGELPHQSLCKLSKKYGPVMLLKLGRVPTVIVSTPETAKQVLKDYDLHCCSRPSLEGTRKLSYNYLDIAFSRFDDYWKELRKLCVEELFCNKRINSIQPIKEAEMEKLIDSIAESASQKTLVNLSDTFLSLNVNVICKAVFGVNFQGTVLNNDKFQDLVHEALEMLGSFSASDFFPYVGWIVDWFTGLHARRERSVRDLDAFYEQMIDLHLQKNREESEDDFVDLLLRLEKEEAVLGYGKLTRNHIKAILMNILLGGINTSAITMTWAMAELIRNPRVMKKVQSEIRAQIGKNNKTRIISLDEINHLSYLNMVIKETCRLHPVAPLLVPREVISEFKINGYTIQPKTRLHVNVWAIGRDPEIWKDPEEFLPERFMDCDIDVKGQDYELLPFGSGRRICPAVYMGITTVEFGLANLLYHFDWKLPEGVAVEDIYMDEASGLTSHKKHDLLLVPVKSLV

SEQ ID NO: 106507 - protein, 438 aa, Arabidopsis thaliana
  peptide (1)..(438): Ceres Seq. ID no. 13619790
MLLKLGRVPTVIVSTPETAKQVLKDYDLHCCSRPSLEGTRKLSYNYLDIAFSRFDDYWKELRKLCVEELFCNKRINSIQPIKEAEMEKLIDSIAESASQKTLVNLSDTFLSLNVNVICKAVFGVNFQGTVLNNDKFQDLVHEALEMLGSFSASDFFPYVGWIVDWFTGLHARRERSVRDLDAFYEQMIDLHLQKNREESEDDFVDLLLRLEKEEAVLGYGKLTRNHIKAILMNILLGGINTSAITMTWAMAELIRNPRVMKKVQSEIRAQIGKNNKTRIISLDEINHLSYLNMVIKETCRLHPVAPLLVPREVISEFKINGYTIQPKTRLHVNVWAIGRDPEIWKDPEEFLPERFMDCDIDVKGQDYELLPFGSGRRICPAVYMGITTVEFGLANLLYHFDWKLPEGVAVEDIYMDEASGLTSHKKHDLLLVPVKSLV

SEQ ID NO: 106508 - protein, 353 aa, Arabidopsis thaliana
  peptide (1)..(353): Ceres Seq. ID no. 13619791
MEKLIDSIAESASQKTLVNLSDTFLSLNVNVICKAVFGVNFQGTVLNNDKFQDLVHEALEMLGSFSASDFFPYVGWIVDWFTGLHARRERSVRDLDAFYEQMIDLHLQKNREESEDDFVDLLLRLEKEEAVLGYGKLTRNHIKAILMNILLGGINTSAITMTWAMAELIRNPRVMKKVQSEIRAQIGKNNKTRIISLDEINHLSYLNMVIKETCRLHPVAPLLVPREVISEFKINGYTIQPKTRLHVNVWAIGRDPEIWKDPEEFLPERFMDCDIDVKGQDYELLPFGSGRRICPAVYMGITTVEFGLANLLYHFDWKLPEGVAVEDIYMDEASGLTSHKKHDLLLVPVKSLV

SEQ ID NO: 106509 - DNA, 865 bp, Arabidopsis thaliana
  misc_feature (1)..(865): Ceres Seq. ID no. 13619795
  misc_feature (1)..(865): Ortholog of  Ceres SEQ ID NO 14306299 as cited in SEQ ID NO 56895
  misc_feature (1)..(865): Ortholog of  Ceres SEQ ID NO 13663631 as cited in SEQ ID NO 67073
accacccacaaagccatggcgaccacttcatcgacaaaacaagtcattgtcttcacaatttcccttctcttggttgctttccaagcagtccatgcagactattaccgtcagaggccaccggttacccctaccccttacgttcctaagccacggtacccacttccgagcccgagccccaagcctgtttatcgaccacctactacccctagtctacccgctggctcaatcgctagactattccttgatccacataacgctcttcggtccggactaggtttgcctccattgatttgggacggtaaactagcgagctacgcaacatggtgggctaaccagaggcgttacgactgctccttaacccattccaccggcccatacggtgagaacttgttctggggaagcggctcgagctgggcaccaggtttcgcggtgcagtcatggatcgttgaaggaaggtcatacaaccacaacaccaactcgtgtgacggaagtggaatgtgtggtcactacactcagatggtgtggcgggacaccaaaaggctcggatgcgcacgtgtggtgtgtgagaacggtgccggagttttcatcacttgtaactacgacccaccgggtaactacgttggcgagaagccatactaaaaaaacaaaacacattaaacggggtttttgtttggtatttgatttcatttaatatcttttgtatctgttttcgttatatcttcgtgaaattaaaatttccgacaaatctaatttgtatgtatcattgtatgttgttgtttccaatgtcctctcggtcatgtcctcaaaattttgttgagtggcctacttatttaaacatcgtaaaacaaacagtcagaaaaattac

SEQ ID NO: 106510 - protein, 212 aa, Arabidopsis thaliana
  peptide (1)..(212): Ceres Seq. ID no. 13619796
TTHKAMATTSSTKQVIVFTISLLLVAFQAVHADYYRQRPPVTPTPYVPKPRYPLPSPSPKPVYRPPTTPSLPAGSIARLFLDPHNALRSGLGLPPLIWDGKLASYATWWANQRRYDCSLTHSTGPYGENLFWGSGSSWAPGFAVQSWIVEGRSYNHNTNSCDGSGMCGHYTQMVWRDTKRLGCARVVCENGAGVFITCNYDPPGNYVGEKPY

SEQ ID NO: 106511 - protein, 207 aa, Arabidopsis thaliana
  peptide (1)..(207): Ceres Seq. ID no. 13619797
MATTSSTKQVIVFTISLLLVAFQAVHADYYRQRPPVTPTPYVPKPRYPLPSPSPKPVYRPPTTPSLPAGSIARLFLDPHNALRSGLGLPPLIWDGKLASYATWWANQRRYDCSLTHSTGPYGENLFWGSGSSWAPGFAVQSWIVEGRSYNHNTNSCDGSGMCGHYTQMVWRDTKRLGCARVVCENGAGVFITCNYDPPGNYVGEKPY

SEQ ID NO: 106512 - DNA, 1021 bp, Arabidopsis thaliana
  misc_feature (1)..(1021): Ceres Seq. ID no. 13619802
  misc_feature (1)..(1021): Ortholog of  Ceres SEQ ID NO 14308727 as cited in SEQ ID NO 58726
  misc_feature (1)..(1021): Ortholog of  Ceres SEQ ID NO 13663517 as cited in SEQ ID NO 66850
aaattcctcctcattgttaaagtcgaaaaaagggtaaagcagcaaaaccctaataaaatcacaacaaattaacacaaaaaaaccagatcttaaaactctctctacccaccaagaggatcaaccagtctcttccccttcagattctcctttccacagtgaatggatcaacaagaccatggacagtctggagctatgaactatggcacaaacccataccaaaccaacccgatgagcaccactgctgctactgtagcaggaggtgcggcacaaccaggccagctggcgttccaccagatccatcagcagcagcagcagcaacagctggcacagcagcttcaagcattttgggagaaccaattcaaagagattgagaagactaccgatttcaagaaccacagccttccccttgcgagaatcaagaaaatcatgaaagcggatgaagatgtccgtatgatctcggctgaggcgcctgtcgtgtttgcaagggcctgtgagatgttcatcctggagctgacactcaggtcgtggaaccacactgaggagaataagaggcggacgttgcagaagaacgatattgctgctgctgtgactagaaccgatatttttgatttccttgtggatattgttccccgggaggatctccgagatgaagtcttgggaagtattccgaggggcactgtcccggaagctgctgctgctggttacccgtatggatacttgcctgcaggaactgctccaataggaaatccgggaatggttatgggtaatcccggtggtgcgtatccacctaatccttatatgggtcaaccaatgtggcaacaacaggcacctgaccaacctgaccaggaaaattagcaagaaactgtgagtcttccagcttcttttaggcctaccttgtagtcttggggttttgtttctgttttcgaataatggtaacctttgtataacttatttcagtatcgtctcagtttggtactatgtcagttttggtattcttatcttattgaagtaaaaatgtgat

SEQ ID NO: 106513 - protein, 231 aa, Arabidopsis thaliana; identical to SEQ ID NO: 26129
  peptide (1)..(231): Ceres Seq. ID no. 13619803

SEQ ID NO: 106514 - protein, 220 aa, Arabidopsis thaliana; identical to SEQ ID NO: 26130
  peptide (1)..(220): Ceres Seq. ID no. 13619804

SEQ ID NO: 106515 - protein, 208 aa, Arabidopsis thaliana; identical to SEQ ID NO: 26131
  peptide (1)..(208): Ceres Seq. ID no. 13619805

SEQ ID NO: 106516 - DNA, 723 bp, Arabidopsis thaliana
  misc_feature (1)..(723): Ceres Seq. ID no. 13619806
  misc_feature (1)..(723): Ortholog of  Ceres SEQ ID NO 12608953 as cited in SEQ ID NO 51227
cccactcatcttctcaattcccagatcatctacaatagtcatttctcttcgatttcttcaaactctcatcaaatcgtttatctgttctaaatttcgaagaagacgatgagtacaggcgcaggaagcggaacaaccaaaggtggcagaggaaagccaaaggccaccaaatccgtctctcgatcatctaaagccggtcttcaattccccgtcggaagaatcgctagattcctcaaatccggtaaatacgccgagcgtgtcggtgccggagctccggtctatctctccgctgttctcgagtacctcgccgccgaggtgttggagctggcgggaaacgcagcaagggataacaagaagacacgtatagtaccaagacacattcagcttgcagtgaggaacgatgaagagttaagcaaacttctgggaagtgtgacgattgcgaatggaggagttttgccaaatattcatcagactcttttgccatccaaggttggcaagaacaaaggagatattggatctgcttctcaggagttctgaggttcttagacttcttagttcagttctcttgtttggattcggaacttgtaaaatagaccctgatggtgttttttggggatcaaattaggttttaaagctaagtatatttggcttttgcctaagtatgtttaattagtgaatgatatgatatttcggaacgaatcatgtatcaatggaactgaattaatc

SEQ ID NO: 106517 - protein, 142 aa, Arabidopsis thaliana; identical to SEQ ID NO: 25026
  peptide (1)..(142): Ceres Seq. ID no. 13619807

SEQ ID NO: 106518 - DNA, 2270 bp, Arabidopsis thaliana
  misc_feature (1)..(2270): Ceres Seq. ID no. 13619808
  misc_feature (1)..(2270): Ortholog of  Ceres SEQ ID NO 13596198 as cited in SEQ ID NO 68488
gttaacacttttgtgccgaccgatgaatcaaaattagagtaacagtgaaacgcattcttccctcaatcgttcaaatgcaagatttcttcggctccgttcgtcgatcgcttgttttccgtccttcttccgacgacgataaccaggagaaccagcctccgtttcccggtgttctcgccgataagatcacctcttgcatccgcaaatcgaagatttttatcaaaccctccttctcgcctcctcctcctgctaacactgtagacatggcacctccgatttcgtggaggaaaggtcagttaattggtcgcggcgcgtttggtacggtgtacatgggtatgaatcttgactccggggagcttctcgccgtcaaacaggttctgattgcagccaattttgcttccaaggaaaagactcaggctcatattcaggagcttgaagaagaagttaagcttcttaaaaatctctcccatcctaatatagttagatatttgggtacagtgagggaagatgataccctgaatatccttctcgagtttgttcccggtggatcgatatcatcgctcttggagaaatttggaccttttcctgaatcagttgtccggacatacacaaggcaactgcttttagggttggagtacctgcacaatcatgcaattatgcacagagacattaagggggctaatatccttgtggataataaaggatgcattaagcttgctgattttggtgcatccaaacaagtagctgagttggctacgatgactggtgcaaaatctatgaaagggacaccatattggatggctccggaagttattcttcaaactggacatagcttctctgctgacatatggagcgtcggctgtacagttattgaaatggtgactgggaaggctccttggagtcagcagtataaagaggttgctgctatcttcttcataggaacaacaaaatcacatcctccaatacctgatactctctcctctgatgcaaaagattttctgctcaagtgtctgcaggaggtaccaaatctgcggccaaccgcatctgagctactaaagcatccttttgttatggggaaacacaaggagtctgcttctactgatcttggttctgtcctgaacaatcttagcactccactaccgttacagataaataacaccaagagcactccagattctacttgcgacgatgtaggtgacatgtgtaactttggcagtttgaattattcacttgtagatcctgtgaaatcaatccaaaacaaaaatttatggcaacaaaatgataatggaggtgatgaagacgatatgtgtttgatagatgatgagaatttcttgacatttgacggagaaatgagttctacccttgaaaaagattgtcatctgaagaagagctgtgatgacataagtgatatgtccattgctttgaagtccaaatttgacgaaagtcctggtaatggagagaaagagtctacaatgagcatggaatgtgaccaaccttcatactcagaggatgatgatgagctgaccgagtcaaaaattaaagctttcttagatgagaaggctgcagatctaaagaagttacagactcctctctatgaagaattctacaatagtttgatcacattctctcccagttgtatggagagtaatttaagtaacagtaaaagagaggacactgctcgtggtttcctgaaactgcctccaaaaagcaggtcaccgagtcggggccctcttggtggttcaccttcaagagcaacagacgcaactagttgttccaagagcccaggaagtggaggtagtcgtgaattgaatattaacaatggaggtgatgaagcttcacaggatggtgtatcagcacgggtcacagactggaggggtctcgttgttgacactaagcaggaattaagccagtgtgttgctttgtcagagatagagaagaagtggaaggaagagcttgatcaagaactggaaagaaagcgacaagaaatcatgcgccaagcagggttgggatcatccccaagagacagaggcatgagccgacagagagagaagtcgaggtttgcatcaccaggaaaatgacttgcacaaaaagtctccggctttttgatttttgattgctcaactagtatatatatctgtaactcttatcttgctgtgatgaaaagtagacacgaggtttggtctgaatatatgattctgaactggttgttgaaggtattagatgtgtgtaatgtgagtgtcgggtgcatatttaagtgcgctacaaattgctag

SEQ ID NO: 106519 - protein, 666 aa, Arabidopsis thaliana
  peptide (1)..(666): Ceres Seq. ID no. 13619809
MQDFFGSVRRSLVFRPSSDDDNQENQPPFPGVLADKITSCIRKSKIFIKPSFSPPPPANTVDMAPPISWRKGQLIGRGAFGTVYMGMNLDSGELLAVKQVLIAANFASKEKTQAHIQELEEEVKLLKNLSHPNIVRYLGTVREDDTLNILLEFVPGGSISSLLEKFGPFPESVVRTYTRQLLLGLEYLHNHAIMHRDIKGANILVDNKGCIKLADFGASKQVAELATMTGAKSMKGTPYWMAPEVILQTGHSFSADIWSVGCTVIEMVTGKAPWSQQYKEVAAIFFIGTTKSHPPIPDTLSSDAKDFLLKCLQEVPNLRPTASELLKHPFVMGKHKESASTDLGSVLNNLSTPLPLQINNTKSTPDSTCDDVGDMCNFGSLNYSLVDPVKSIQNKNLWQQNDNGGDEDDMCLIDDENFLTFDGEMSSTLEKDCHLKKSCDDISDMSIALKSKFDESPGNGEKESTMSMECDQPSYSEDDDELTESKIKAFLDEKAADLKKLQTPLYEEFYNSLITFSPSCMESNLSNSKREDTARGFLKLPPKSRSPSRGPLGGSPSRATDATSCSKSPGSGGSRELNINNGGDEASQDGVSARVTDWRGLVVDTKQELSQCVALSEIEKKWKEELDQELERKRQEIMRQAGLGSSPRDRGMSRQREKSRFASPGK

SEQ ID NO: 106520 - protein, 604 aa, Arabidopsis thaliana
  peptide (1)..(604): Ceres Seq. ID no. 13619810
MAPPISWRKGQLIGRGAFGTVYMGMNLDSGELLAVKQVLIAANFASKEKTQAHIQELEEEVKLLKNLSHPNIVRYLGTVREDDTLNILLEFVPGGSISSLLEKFGPFPESVVRTYTRQLLLGLEYLHNHAIMHRDIKGANILVDNKGCIKLADFGASKQVAELATMTGAKSMKGTPYWMAPEVILQTGHSFSADIWSVGCTVIEMVTGKAPWSQQYKEVAAIFFIGTTKSHPPIPDTLSSDAKDFLLKCLQEVPNLRPTASELLKHPFVMGKHKESASTDLGSVLNNLSTPLPLQINNTKSTPDSTCDDVGDMCNFGSLNYSLVDPVKSIQNKNLWQQNDNGGDEDDMCLIDDENFLTFDGEMSSTLEKDCHLKKSCDDISDMSIALKSKFDESPGNGEKESTMSMECDQPSYSEDDDELTESKIKAFLDEKAADLKKLQTPLYEEFYNSLITFSPSCMESNLSNSKREDTARGFLKLPPKSRSPSRGPLGGSPSRATDATSCSKSPGSGGSRELNINNGGDEASQDGVSARVTDWRGLVVDTKQELSQCVALSEIEKKWKEELDQELERKRQEIMRQAGLGSSPRDRGMSRQREKSRFASPGK

SEQ ID NO: 106521 - protein, 582 aa, Arabidopsis thaliana
  peptide (1)..(582): Ceres Seq. ID no. 13619811
MGMNLDSGELLAVKQVLIAANFASKEKTQAHIQELEEEVKLLKNLSHPNIVRYLGTVREDDTLNILLEFVPGGSISSLLEKFGPFPESVVRTYTRQLLLGLEYLHNHAIMHRDIKGANILVDNKGCIKLADFGASKQVAELATMTGAKSMKGTPYWMAPEVILQTGHSFSADIWSVGCTVIEMVTGKAPWSQQYKEVAAIFFIGTTKSHPPIPDTLSSDAKDFLLKCLQEVPNLRPTASELLKHPFVMGKHKESASTDLGSVLNNLSTPLPLQINNTKSTPDSTCDDVGDMCNFGSLNYSLVDPVKSIQNKNLWQQNDNGGDEDDMCLIDDENFLTFDGEMSSTLEKDCHLKKSCDDISDMSIALKSKFDESPGNGEKESTMSMECDQPSYSEDDDELTESKIKAFLDEKAADLKKLQTPLYEEFYNSLITFSPSCMESNLSNSKREDTARGFLKLPPKSRSPSRGPLGGSPSRATDATSCSKSPGSGGSRELNINNGGDEASQDGVSARVTDWRGLVVDTKQELSQCVALSEIEKKWKEELDQELERKRQEIMRQAGLGSSPRDRGMSRQREKSRFASPGK

SEQ ID NO: 106522 - DNA, 1547 bp, Arabidopsis thaliana
  misc_feature (1)..(1547): Ceres Seq. ID no. 13619816
  misc_feature (1)..(1547): Ortholog of  Ceres SEQ ID NO 14314404 as cited in SEQ ID NO 57421
  misc_feature (1)..(1547): Ortholog of  Ceres SEQ ID NO 13493536 as cited in SEQ ID NO 58515
  misc_feature (1)..(1547): Ortholog of  Ceres SEQ ID NO 15225741 as cited in SEQ ID NO 59606
  misc_feature (1)..(1547): Ortholog of  Ceres SEQ ID NO 12618461 as cited in SEQ ID NO 64349
atatataagctccaggtcttgtacatcttcatcatctgatctcggggaagctccgatctgagttttttttagcaatggcgaaaatgattcctagcctcgtctctctaattcttatcggtcttgttgcgatcgcctccgccgcagttattttcgaggagcgctttgatgatggctgggagaacagatgggttaaatctgagtggaagaaggatgataacactgctggggagtggaagcacactgcgggaaattggtctggtgacgctaacgataaaggtatccagaccagtgaagactacagattctacgccatttcagctgagttccctgaattcagtaacaaggacaagaccttagtcttccaattctcagtcaagcacgagcaaaagcttgactgcggtggtggctacatgaagctactaagtggtgatgttgaccaaaagaaatttggtggagacacaccatacagtatcatgtttggtcctgatatctgtggctacagcacaaagaaagtgcatgctatccttacctataatgaagccaaccacctgatcaagaaagatgttccatgtgaaactgaccagctcacccatgtgtacacatttatcctccgcccagatgctacttacagcattctcatcgacaatgttgagaaacaaactggtagcctttactctgactgggatcttctcccacccaagaagatcaaggaccccagcgccaagaagcctgaggactgggacgaacaagaatacatttctgaccctgaagacaagaaacctgacggttacgatgatatccctaaggagatcccagacaccgactcaaagaagcctgaggactgggatgatgaagaagatggtgagtggactgccccaacaatccccaaccctgagtacatgggtgaatggaagcctaagcaaatcaagaaccccaactacaagggcaagtgggaggctccattgattgacaaccctgacttcaaggatgacccagagctctacgtcttccccaagctgaaatatgttggactcgaattgtggcaggtgaaatcaggatcattgttcgacaatgtcttgatctgcgatgacccagactatgccaagaagttggcagatgaaacatggggaaagctcaaggatgcggagaaagcagctttcgatgaggctgagaagaagaatgaggaagaggaatccaaggacgcacctgcggaatctgatgctgaagacgaaccagaggatgatgaaggaggagatgattccgattctgaatctaaggccgaggagaccaaatcagtagatagcgaggaaacctctgagaaagacgccaccgctcatgatgagctataggtgaaaggttgaagatttgaagaccaaagttttcagtctctttattgttttatcgttttcttttgaagtattttagcatctagtttgtcggagatagaaacaagttttagcaaaactaaaagggggatacaatgtctgtcagatgctcattttagactttaaaaaaccatgaagaagttttgcagttgcttctctttc

SEQ ID NO: 106523 - protein, 424 aa, Arabidopsis thaliana; identical to SEQ ID NO: 36315
  peptide (1)..(424): Ceres Seq. ID no. 13619817

SEQ ID NO: 106524 - protein, 421 aa, Arabidopsis thaliana; identical to SEQ ID NO: 36316
  peptide (1)..(421): Ceres Seq. ID no. 13619818

SEQ ID NO: 106525 - protein, 312 aa, Arabidopsis thaliana; identical to SEQ ID NO: 36317
  peptide (1)..(312): Ceres Seq. ID no. 13619819

SEQ ID NO: 106526 - DNA, 688 bp, Arabidopsis thaliana
  misc_feature (1)..(688): Ceres Seq. ID no. 13619820
  misc_feature (1)..(688): Ortholog of  Ceres SEQ ID NO 13575779 as cited in SEQ ID NO 20515
atatataaaccctaatcacatttcgcaaccaccaaagcggaggaaaaatgccggctggacatggagttcgagcgagaacgagggatctgttcgcgaggcctttcaggaagaagggttacattcctctatcgacttacctgaggaccttcaaggtcggcgattacgtcgatgtgaaggtgaatggtgcgatccacaagggtatgcctcacaagttctaccatggtcgtactggtcgtatctggaacgtcaccaagcgcgccgtcggtgttgaagtcaacaaacagattgggaacaggatcataaggaagaggattcatgttcgtgtggagcatgtgcagcagtcaagatgtgccgaggagttcaagctgaggaagaagaaaaacgatgagctcaaggctgcagccaaagccaatggtgagaccatcagcaccaagagacagcctaaaggacccaaaccaggattcatggtcgaaggaatgaccttggagactgtcactccaatcccctacgatgtcgtcaacgatctcaaaggaggctattagttctatcttcttgtgctttagaactctttttcatttgttttgtagcagacttaaaactaagaattatgatttactatataacaggagtttgcaatccagattttgtaaggatggtttatttttattattggtatttttgatcttcc

SEQ ID NO: 106527 - protein, 164 aa, Arabidopsis thaliana; identical to SEQ ID NO: 36570
  peptide (1)..(164): Ceres Seq. ID no. 13619821

SEQ ID NO: 106528 - protein, 113 aa, Arabidopsis thaliana; identical to SEQ ID NO: 36571
  peptide (1)..(113): Ceres Seq. ID no. 13619822

SEQ ID NO: 106529 - protein, 89 aa, Arabidopsis thaliana; identical to SEQ ID NO: 36572
  peptide (1)..(89): Ceres Seq. ID no. 13619823

SEQ ID NO: 106530 - DNA, 1048 bp, Arabidopsis thaliana
  misc_feature (1)..(1048): Ceres Seq. ID no. 13619830
  misc_feature (1)..(1048): Ortholog of  Ceres SEQ ID NO 15179139 as cited in SEQ ID NO 1093
  misc_feature (1)..(1048): Ortholog of  Ceres SEQ ID NO 15226793 as cited in SEQ ID NO 58689
acatggctcctcatcattcatcatcacgataaaaatgcatagtacataaagtatccattaaaacgtagatctagtctcttcacaacacttcaacagttcaactaataacgcaaaaatcagtttctctttgagtaagtgtttattacaattaaactaactcaggcaagtctatgatcatggcttcttctgctgctgcatcgatctctatgataactctaaggaacctctctcgcaatcatcaatctcaccaaagcacttttctcggtttctctagatccttccataaccaaaggatctcatctaacagtccaggtctctccacacgagcaagatccaccacttcctccactggaggtttcttcagaaccatttgcagcagcagtagcaatgactactccagaccaactaagatccaagagcttaacgtctacgagttcaacgaaggtgatcgaaacagtccagcggttttaaaactagggaaaaaaccagatcagctttgtctcggagatcttgtccccttcacaaacaaactctacacaggagatctcacaaaacgcataggaatcaccgcaggtctctgcgttttgatccaacatgttccagagaagaaaggtgatcgctttgaagcttcttacagtttctacttcggagattatggtcacatatcagttcaaggaccttatctcacttacgaggacacgtttcttgctatcaccggtggctccggcgtgtttgaaggagcttatggacaggtcaagcttcgtcagcttgtgtatcctacgaagctgttttacactttctacttgaaaggtgttgctgctgatttacctgtggagcttaccggaaaacatgttgagccgtcgaaggaagtgaaaccggcggctgaagctcaggcgactcagcccggcgctacgatcgctaactttactaattgaaatctaaatctttgtgggtgtctttgtcatggatcttattgggctgttgttcattgtgtttacattttaataatgggcctaaataatgagcctttgtattgggccgttctcgt

SEQ ID NO: 106531 - protein, 254 aa, Arabidopsis thaliana; identical to SEQ ID NO: 35412
  peptide (1)..(254): Ceres Seq. ID no. 13619831

SEQ ID NO: 106532 - protein, 252 aa, Arabidopsis thaliana; identical to SEQ ID NO: 35413
  peptide (1)..(252): Ceres Seq. ID no. 13619832

SEQ ID NO: 106533 - protein, 242 aa, Arabidopsis thaliana; identical to SEQ ID NO: 35414
  peptide (1)..(242): Ceres Seq. ID no. 13619833

SEQ ID NO: 106534 - DNA, 1147 bp, Arabidopsis thaliana
  misc_feature (1)..(1147): Ceres Seq. ID no. 13619838
  misc_feature (1)..(1147): Ortholog of  Ceres SEQ ID NO 15180785 as cited in SEQ ID NO 0
aaaagtttcagaatcgaactcgtctattctccgccggtgtgccgtcgccgatatgcttcgtcgtgtcttttacaagcgtgcacgtgatgatttatcttactgtcatcgtctgttgcacattccgtataacgaaccagagcctgactcaaaggcaatttctgaaatcgttggtatagtttcaaagaaagaagaagctgtagtagttacggaaccaactcatcattggcgtaagaattgggaagatttgagaaagaataggttaacagctagtaatttcgcgcgtgctatcggattttcgcctgacggtagacgaaatctttggttagagaaaatcggggcagcgaaaccgtttgctggaaaccgagctacgttttgggacattgagaatgaggtcgaagcactcgagaggtacaacgagttaacgggaaatgaaatcctcatacctgagtttgttgtttataagaatggtgaaagccctgaagaaaactggttaggagcttctcctgatggagtgatcaatgtagttaaggacggtgttacttcgtgtggtgtgttagaagtgaaatgcccgtttgataaccgggataactcgaaagtttatccgtggaagaaggttccttataattgtgttccacaacttcagggtttaatggagattgtggatacagattggttggatttgtattgttggactcgcaatggaagcagtctctttagagtttggcgtgataccgcgttttgggaggatatgaaaccggcactgtttgatttttggcagaatcatgttttacctgcaagagagatatacaataactttgatataaaggatcctcaagtgaagctgagagagtttaaaccgaagcattggcatgaagattgcaagaagattatgcgtggagctgagagaatcagcgcaaacgcaaaccgtttgttctatgagatcgatgggaatcttgtagactgaggtttttgtaactgattatgtgaaatttgcaagcaagcaagccaggttcccttatttcatttgaatgttatttgcttagtgtggaatgtagaaaacactaaatgaagctcttgtgttgagctaaagtacatatttcatattgtatactctgtttcttattgtctcatcagcttttgttacatc

SEQ ID NO: 106535 - protein, 320 aa, Arabidopsis thaliana
  peptide (1)..(320): Ceres Seq. ID no. 13619839
KVSESNSSILRRCAVADMLRRVFYKRARDDLSYCHRLLHIPYNEPEPDSKAISEIVGIVSKKEEAVVVTEPTHHWRKNWEDLRKNRLTASNFARAIGFSPDGRRNLWLEKIGAAKPFAGNRATFWDIENEVEALERYNELTGNEILIPEFVVYKNGESPEENWLGASPDGVINVVKDGVTSCGVLEVKCPFDNRDNSKVYPWKKVPYNCVPQLQGLMEIVDTDWLDLYCWTRNGSSLFRVWRDTAFWEDMKPALFDFWQNHVLPAREIYNNFDIKDPQVKLREFKPKHWHEDCKKIMRGAERISANANRLFYEIDGNLVD

SEQ ID NO: 106536 - protein, 303 aa, Arabidopsis thaliana
  peptide (1)..(303): Ceres Seq. ID no. 13619840
MLRRVFYKRARDDLSYCHRLLHIPYNEPEPDSKAISEIVGIVSKKEEAVVVTEPTHHWRKNWEDLRKNRLTASNFARAIGFSPDGRRNLWLEKIGAAKPFAGNRATFWDIENEVEALERYNELTGNEILIPEFVVYKNGESPEENWLGASPDGVINVVKDGVTSCGVLEVKCPFDNRDNSKVYPWKKVPYNCVPQLQGLMEIVDTDWLDLYCWTRNGSSLFRVWRDTAFWEDMKPALFDFWQNHVLPAREIYNNFDIKDPQVKLREFKPKHWHEDCKKIMRGAERISANANRLFYEIDGNLVD

SEQ ID NO: 106537 - DNA, 984 bp, Arabidopsis thaliana
  misc_feature (1)..(984): Ceres Seq. ID no. 13619841
  misc_feature (1)..(984): Ortholog of  Ceres SEQ ID NO 13663517 as cited in SEQ ID NO 66850
gtcacgacctttttgatccaaaaatcaaaatccaaaaccgaccaatggataccaacaaccagcaaccacctccctccgccgccggaatccctcctccaccacctggaaccaccatctccgccgcaggaggaggagcttcttaccaccaccttctccaacaacaacaacaacagctccaactattctggacctaccaacgccaagagatcgaacaagttaacgatttcaaaaaccatcagcttccactagctaggataaaaaagatcatgaaagccgatgaagatgttcgtatgatctccgcagaagcaccgattctcttcgcgaaagcttgtgagcttttcattctcgagctcacgatcagatcttggcttcacgctgaggagaataaacgtcgtacgcttcagaaaaacgatatcgctgctgcgattactaggactgatatcttcgatttccttgttgatattgttcctagagatgagattaaggacgaagccgcagtcctcggtggtggaatggtggtggctcctaccgcgagcggcgtgccttactattatccgccgatgggacaaccagctggtcctggagggatgatgattgggagaccagctatggatccgaatggtgtttatgtccagcctccgtctcaggcgtggcagagtgtttggcagacttcgacggggacgggagatgatgtctcttatggtagtggtggaagttccggtcaagggaatctcgacggccaaggttaagctcagagtattccagatgatgcttgacctgcttgaagatagcagatattagtcgacctcgccttgaattttggatgtgtttgatagattatgcctaaattcaatgaaaaggcttcgttaaagaagagtaaaaaaaactcttgtttctctctgttaacgtatatgttattgtagcaaaaccatcattgctgcgacttagcctaactatatataatctaatgtgcagtttctattg

SEQ ID NO: 106538 - protein, 248 aa, Arabidopsis thaliana; identical to SEQ ID NO: 35056
  peptide (1)..(248): Ceres Seq. ID no. 13619842

SEQ ID NO: 106539 - protein, 234 aa, Arabidopsis thaliana; identical to SEQ ID NO: 35057
  peptide (1)..(234): Ceres Seq. ID no. 13619843

SEQ ID NO: 106540 - protein, 160 aa, Arabidopsis thaliana; identical to SEQ ID NO: 35058
  peptide (1)..(160): Ceres Seq. ID no. 13619844

SEQ ID NO: 106541 - DNA, 1227 bp, Arabidopsis thaliana
  misc_feature (1)..(1227): Ceres Seq. ID no. 13619845
  misc_feature (1)..(1227): Ortholog of  Ceres SEQ ID NO 14305750 as cited in SEQ ID NO 52458
  misc_feature (1)..(1227): Ortholog of  Ceres SEQ ID NO 12608276 as cited in SEQ ID NO 57871
  misc_feature (1)..(1227): Ortholog of  Ceres SEQ ID NO 13598492 as cited in SEQ ID NO 63882
  misc_feature (1)..(1227): Ortholog of  Ceres SEQ ID NO 13657914 as cited in SEQ ID NO 66230
  misc_feature (1)..(1227): Ortholog of  Ceres SEQ ID NO 13595877 as cited in SEQ ID NO 67702
  misc_feature (1)..(1227): Ortholog of  Ceres SEQ ID NO 13622667 as cited in SEQ ID NO 0
attctcaatactataatatatctctcccacacacaatcatactctctcaatctcaaccaacgatggattccgagatcgccgccgactactctccaatgctcataatctacaagagtggccgcattgagcgactcgtgggtgaaaccaccgtgccaccttcttccaacccacaaaacggagtcgtttccaaggacgtcgtttattctcctgacaacaacctctccctccgcatttacctcccggagaaagccgccaccgccgagaccgaagcctctgtaaaactccctctcctcgtctacttccacggcggaggattcctcgttgaaaccgctttctccccgacttaccacactttcctcacggcggctgtctcagcgtcagactgtgtagcggtctccgtggattaccgacgtgcaccggagcatccgattcctacttcttacgatgattcttggacagctctcaaatgggttttctcccacatcgccggatctggctcagaagattggttgaacaaacacgccgacttcagcaaagtgttcctcgccggagatagcgccggagcgaacataacgcatcacatgacgatgaaagctgcgaaagataaactcagtcccgagtctttgaacgagtcaggaatctctggaatcatcttagttcatccttatttctggtcaaaaaccccagtcgacgacaaggagacgacggatgtagcaataaggacgtggatcgagtcggtctggacgttggctagtcccaatagcaaagatggatcagatgatccattcatcaacgtggtgcaatcagagtcggtggatttgtccgggttgggttgtggtaaggttttggtaatggtggctgagaaagacgcgttggtgaggcaaggttggggttactgggagaagcttggtaagagccgttggaacggagaagtactggacgtggtggagactaagggagaaggtcatgtttttcatttgagggatcctaattctgaaaaggctcatgaactcgtgcacagattcgcagggtttatcaagggagacaagtaacattgtgctttttagtttggtgtttgagatgtgtcactgtctcactttctctaatgtttcagtaatttgcatgttgcttacaacatcattatattcaattgtattgctaataagagatgtttaattctgcccactaaatatttttattgtaatcttgatttttgtttttccactt

SEQ ID NO: 106542 - protein, 349 aa, Arabidopsis thaliana
  peptide (1)..(349): Ceres Seq. ID no. 13619846
SQYYNISLPHTIILSQSQPTMDSEIAADYSPMLIIYKSGRIERLVGETTVPPSSNPQNGVVSKDVVYSPDNNLSLRIYLPEKAATAETEASVKLPLLVYFHGGGFLVETAFSPTYHTFLTAAVSASDCVAVSVDYRRAPEHPIPTSYDDSWTALKWVFSHIAGSGSEDWLNKHADFSKVFLAGDSAGANITHHMTMKAAKDKLSPESLNESGISGIILVHPYFWSKTPVDDKETTDVAIRTWIESVWTLASPNSKDGSDDPFINVVQSESVDLSGLGCGKVLVMVAEKDALVRQGWGYWEKLGKSRWNGEVLDVVETKGEGHVFHLRDPNSEKAHELVHRFAGFIKGDK

SEQ ID NO: 106543 - protein, 329 aa, Arabidopsis thaliana
  peptide (1)..(329): Ceres Seq. ID no. 13619847
MDSEIAADYSPMLIIYKSGRIERLVGETTVPPSSNPQNGVVSKDVVYSPDNNLSLRIYLPEKAATAETEASVKLPLLVYFHGGGFLVETAFSPTYHTFLTAAVSASDCVAVSVDYRRAPEHPIPTSYDDSWTALKWVFSHIAGSGSEDWLNKHADFSKVFLAGDSAGANITHHMTMKAAKDKLSPESLNESGISGIILVHPYFWSKTPVDDKETTDVAIRTWIESVWTLASPNSKDGSDDPFINVVQSESVDLSGLGCGKVLVMVAEKDALVRQGWGYWEKLGKSRWNGEVLDVVETKGEGHVFHLRDPNSEKAHELVHRFAGFIKGDK

SEQ ID NO: 106544 - protein, 318 aa, Arabidopsis thaliana
  peptide (1)..(318): Ceres Seq. ID no. 13619848
MLIIYKSGRIERLVGETTVPPSSNPQNGVVSKDVVYSPDNNLSLRIYLPEKAATAETEASVKLPLLVYFHGGGFLVETAFSPTYHTFLTAAVSASDCVAVSVDYRRAPEHPIPTSYDDSWTALKWVFSHIAGSGSEDWLNKHADFSKVFLAGDSAGANITHHMTMKAAKDKLSPESLNESGISGIILVHPYFWSKTPVDDKETTDVAIRTWIESVWTLASPNSKDGSDDPFINVVQSESVDLSGLGCGKVLVMVAEKDALVRQGWGYWEKLGKSRWNGEVLDVVETKGEGHVFHLRDPNSEKAHELVHRFAGFIKGDK

SEQ ID NO: 106545 - DNA, 3377 bp, Arabidopsis thaliana
  misc_feature (1)..(3377): Ceres Seq. ID no. 13619869
  misc_feature (1)..(3377): Ortholog of  Ceres SEQ ID NO 13600310 as cited in SEQ ID NO 5086
cgtcgaccttcttcttcactttttcttctcccgaggaacaagacgaaattgagactctgattcaacttttcttctcatactcgtcgaagaaaaggagattcctcgatggaatcacattcttccttatcgtcctcttcttcttcttctcctccgtcgtcgttgtcgtcggagagttgttgtgttaaagtagcggttaacgttcgtcctttgatcggagatgaagtaactcaaggttgtagggaatgcgtttctgtttctccggtaactcctcaggtgcaaatgggaacacatccatttacatttgatcatgtatatggaagtaatggttctccatcttctttgatgtttgaagaatgtgttgctcctcttgttgatggtttgtttcatggatacaatgctactgtcttggcttatggtcagacaggatctggaaagacatacactatggggactggtattaaagatggtacaaaaaatgggctgattcctcaagttatgagtgctttgttcaacaaaattgattcagtaaagcaccaaatggggttccagttacatgtctctttcatcgagattttaaaagaagaagttctggatttgctggatagtagtgtgccgtttaacagactagccaatggaacccctgggaaggttgttcttagtaagtcaccggtgcagattcgtgaatcaccaaacggggttataacactatccggtgcaactgaagttcccatagctactaaagaagaaatggcttcctgcctagagcaaggatctctaaccagggcaactgggagcaccaatatgaataatgagtcgagtcggtcacatgccatcttcacgattaccttagaacaaatgcgcaagatatcttcaatctcagtggttaaagacaccgtagatgaagatatgggtgaggaatattgttgtgccaagcttcacttggtagatcttgctggatctgaaagagctaaacgaacaggttcaggcggtgttcgattaaaagaaggaattcacatcaataggggacttcttgcacttggtaatgttatcagtgcgcttggggatgagaaaaggcgaaaagaaggtgcacatgttccataccgtgatagtaaacttactcggttattgcaggattctcttggtggaaatagtaaaacagtcatgatagcttgcatcagtcctgctgacatcaatgctgaggaaactcttaacacgctcaagtatgcaaatcgtgctcggaatatccagaacaaacctgttgccaataaagacttaatatgttctgagatgcaaaagatgcgtcaagagctacaatatctacaagctacactttgtgctcgtggggcaacctcatcagaggaagtgcaggtaatgcgagagaaaatcatgaaactagagtctgccaatgaagagctttctcgagaacttcacatctatcgcagcaagagagtgactcttgattattgcaatattgatgcacaggaagatggtgtaattttttcaaaagatgatggccttaaaaggggtttcgaaagcatggattcagattatgaaatgagtgaagcaacatcaggtggaatttctgaagatattggtgcagcagaagagtgggaacatgcacttaggcagaatagcatgggcaaggaactaaatgaactaagtaaacgtcttgaggagaaagagtccgagatgagagtatgtgggattggaactgaaactatcagacaacatttcgaaaaaaaaatgatggaacttgagaaagagaaaagaactgtacaggatgagagagatatgttgttggctgaagttgaggaacttgcagctagctctgatagacaagcacaagttgcaagagataaccatgcacacaaattaaaagcacttgagacacagattttaaatcttaagaagaaacaagaaaatcaagttgaggtcttaaaacaaaagcaaaaaagtgaagatgcagcaaagcgtttgaaaactgaaatacaatgcatcaaggctcaaaaggttcaactacaacagaagatgaaacaagaagctgaacaattccggcagtggaaagcttctcaagagaaggagttgttgcagcttaagaaagaaggaagaaaaactgagcatgaaagactcaaactcgaagctctcaatcgacgtcagaaaatggttcttcagagaaaaacagaagaagcagcaatggctaccaaaagacttaaagagctgctagaagcccgcaagtcttcacctcatgatatatcagtgattgccaatggccaaccaccaagtcgacagacgaatgaaaaatctcttcggaaatggctggataacgagctagaggttatggcaaaagtacatcaagttcgttttcaatatgaaaagcaaattcaagtacgagctgcactggctgtagagttaacatcgttgagacaagagatggagtttccttcaaattcccatcaagagaaaaatggacagttcagatttttatcaccaaacacaagattggagagaatagcttctcttgagagtatgttggatgtttcctcaaatgctctcacagccatgggctctcagctctcagaagcagaggaaagagagcatagcctacatgctaagcctcggtggaaccacattcagtccatgactgatgccaagtatttgcttcaatatgtgtttgattccactgctgaagcaaggtccaaaatctgggagaaagacagagacatcaaagagaagaaggaacagctcaatgacctcctctgcttattacaactaaccgaagtccagaaccgagaaatccttaaagagaaaaagacaagggagcaaacagtgtccattgcgctggcttcaacatcatcatcatactcgggaagttcaagaagctcatcaaagcactatggagataataacgctagtgacgacccatcatctccatcttctacttatcatcgagcaacaaagcatctcaaatacactgggccgggtatagtcaatatctcggtgagagaatcagaagctttattagaagagacgaggaagatgaaagcaatgaagaaaatgggacagagtggcaagctatggaagtggaaaagaagtcaccatcaatggctgcttcagtttaaatggaaatggcagaaaccatggaaactctctgagtggataaagcagaacgatgagaccactatgcacgtcatgtctaagagtcatcatgatgatgaggatgatcactcgtggaaccgacactcaatgtttcaaggtgcttaaagctgtatgtatatacaagagcctttttttttctctgtcaacagattcaatattgttatacttttattacgaaaatccgtcgatattaagaaaattccaatgctaagaaaatttac

SEQ ID NO: 106546 - protein, 1051 aa, Arabidopsis thaliana
  peptide (1)..(1051): Ceres Seq. ID no. 13619870
MESHSSLSSSSSSSPPSSLSSESCCVKVAVNVRPLIGDEVTQGCRECVSVSPVTPQVQMGTHPFTFDHVYGSNGSPSSLMFEECVAPLVDGLFHGYNATVLAYGQTGSGKTYTMGTGIKDGTKNGLIPQVMSALFNKIDSVKHQMGFQLHVSFIEILKEEVLDLLDSSVPFNRLANGTPGKVVLSKSPVQIRESPNGVITLSGATEVPIATKEEMASCLEQGSLTRATGSTNMNNESSRSHAIFTITLEQMRKISSISVVKDTVDEDMGEEYCCAKLHLVDLAGSERAKRTGSGGVRLKEGIHINRGLLALGNVISALGDEKRRKEGAHVPYRDSKLTRLLQDSLGGNSKTVMIACISPADINAEETLNTLKYANRARNIQNKPVANKDLICSEMQKMRQELQYLQATLCARGATSSEEVQVMREKIMKLESANEELSRELHIYRSKRVTLDYCNIDAQEDGVIFSKDDGLKRGFESMDSDYEMSEATSGGISEDIGAAEEWEHALRQNSMGKELNELSKRLEEKESEMRVCGIGTETIRQHFEKKMMELEKEKRTVQDERDMLLAEVEELAASSDRQAQVARDNHAHKLKALETQILNLKKKQENQVEVLKQKQKSEDAAKRLKTEIQCIKAQKVQLQQKMKQEAEQFRQWKASQEKELLQLKKEGRKTEHERLKLEALNRRQKMVLQRKTEEAAMATKRLKELLEARKSSPHDISVIANGQPPSRQTNEKSLRKWLDNELEVMAKVHQVRFQYEKQIQVRAALAVELTSLRQEMEFPSNSHQEKNGQFRFLSPNTRLERIASLESMLDVSSNALTAMGSQLSEAEEREHSLHAKPRWNHIQSMTDAKYLLQYVFDSTAEARSKIWEKDRDIKEKKEQLNDLLCLLQLTEVQNREILKEKKTREQTVSIALASTSSSYSGSSRSSSKHYGDNNASDDPSSPSSTYHRATKHLKYTGPGIVNISVRESEALLEETRKMKAMKKMGQSGKLWKWKRSHHQWLLQFKWKWQKPWKLSEWIKQNDETTMHVMSKSHHDDEDDHSWNRHSMFQGA

SEQ ID NO: 106547 - protein, 993 aa, Arabidopsis thaliana
  peptide (1)..(993): Ceres Seq. ID no. 13619871
MGTHPFTFDHVYGSNGSPSSLMFEECVAPLVDGLFHGYNATVLAYGQTGSGKTYTMGTGIKDGTKNGLIPQVMSALFNKIDSVKHQMGFQLHVSFIEILKEEVLDLLDSSVPFNRLANGTPGKVVLSKSPVQIRESPNGVITLSGATEVPIATKEEMASCLEQGSLTRATGSTNMNNESSRSHAIFTITLEQMRKISSISVVKDTVDEDMGEEYCCAKLHLVDLAGSERAKRTGSGGVRLKEGIHINRGLLALGNVISALGDEKRRKEGAHVPYRDSKLTRLLQDSLGGNSKTVMIACISPADINAEETLNTLKYANRARNIQNKPVANKDLICSEMQKMRQELQYLQATLCARGATSSEEVQVMREKIMKLESANEELSRELHIYRSKRVTLDYCNIDAQEDGVIFSKDDGLKRGFESMDSDYEMSEATSGGISEDIGAAEEWEHALRQNSMGKELNELSKRLEEKESEMRVCGIGTETIRQHFEKKMMELEKEKRTVQDERDMLLAEVEELAASSDRQAQVARDNHAHKLKALETQILNLKKKQENQVEVLKQKQKSEDAAKRLKTEIQCIKAQKVQLQQKMKQEAEQFRQWKASQEKELLQLKKEGRKTEHERLKLEALNRRQKMVLQRKTEEAAMATKRLKELLEARKSSPHDISVIANGQPPSRQTNEKSLRKWLDNELEVMAKVHQVRFQYEKQIQVRAALAVELTSLRQEMEFPSNSHQEKNGQFRFLSPNTRLERIASLESMLDVSSNALTAMGSQLSEAEEREHSLHAKPRWNHIQSMTDAKYLLQYVFDSTAEARSKIWEKDRDIKEKKEQLNDLLCLLQLTEVQNREILKEKKTREQTVSIALASTSSSYSGSSRSSSKHYGDNNASDDPSSPSSTYHRATKHLKYTGPGIVNISVRESEALLEETRKMKAMKKMGQSGKLWKWKRSHHQWLLQFKWKWQKPWKLSEWIKQNDETTMHVMSKSHHDDEDDHSWNRHSMFQGA

SEQ ID NO: 106548 - protein, 972 aa, Arabidopsis thaliana
  peptide (1)..(972): Ceres Seq. ID no. 13619872
MFEECVAPLVDGLFHGYNATVLAYGQTGSGKTYTMGTGIKDGTKNGLIPQVMSALFNKIDSVKHQMGFQLHVSFIEILKEEVLDLLDSSVPFNRLANGTPGKVVLSKSPVQIRESPNGVITLSGATEVPIATKEEMASCLEQGSLTRATGSTNMNNESSRSHAIFTITLEQMRKISSISVVKDTVDEDMGEEYCCAKLHLVDLAGSERAKRTGSGGVRLKEGIHINRGLLALGNVISALGDEKRRKEGAHVPYRDSKLTRLLQDSLGGNSKTVMIACISPADINAEETLNTLKYANRARNIQNKPVANKDLICSEMQKMRQELQYLQATLCARGATSSEEVQVMREKIMKLESANEELSRELHIYRSKRVTLDYCNIDAQEDGVIFSKDDGLKRGFESMDSDYEMSEATSGGISEDIGAAEEWEHALRQNSMGKELNELSKRLEEKESEMRVCGIGTETIRQHFEKKMMELEKEKRTVQDERDMLLAEVEELAASSDRQAQVARDNHAHKLKALETQILNLKKKQENQVEVLKQKQKSEDAAKRLKTEIQCIKAQKVQLQQKMKQEAEQFRQWKASQEKELLQLKKEGRKTEHERLKLEALNRRQKMVLQRKTEEAAMATKRLKELLEARKSSPHDISVIANGQPPSRQTNEKSLRKWLDNELEVMAKVHQVRFQYEKQIQVRAALAVELTSLRQEMEFPSNSHQEKNGQFRFLSPNTRLERIASLESMLDVSSNALTAMGSQLSEAEEREHSLHAKPRWNHIQSMTDAKYLLQYVFDSTAEARSKIWEKDRDIKEKKEQLNDLLCLLQLTEVQNREILKEKKTREQTVSIALASTSSSYSGSSRSSSKHYGDNNASDDPSSPSSTYHRATKHLKYTGPGIVNISVRESEALLEETRKMKAMKKMGQSGKLWKWKRSHHQWLLQFKWKWQKPWKLSEWIKQNDETTMHVMSKSHHDDEDDHSWNRHSMFQGA

SEQ ID NO: 106549 - DNA, 927 bp, Arabidopsis thaliana
  misc_feature (1)..(927): Ceres Seq. ID no. 13619922
  misc_feature (1)..(927): Ortholog of  Ceres SEQ ID NO 12611884 as cited in SEQ ID NO 51018
  misc_feature (1)..(927): Ortholog of  Ceres SEQ ID NO 12609093 as cited in SEQ ID NO 52008
  misc_feature (1)..(927): Ortholog of  Ceres SEQ ID NO 12609839 as cited in SEQ ID NO 52022
  misc_feature (1)..(927): Ortholog of  Ceres SEQ ID NO 13638885 as cited in SEQ ID NO 55803
  misc_feature (1)..(927): Ortholog of  Ceres SEQ ID NO 14301452 as cited in SEQ ID NO 60984
  misc_feature (1)..(927): Ortholog of  Ceres SEQ ID NO 12587429 as cited in SEQ ID NO 63113
  misc_feature (1)..(927): Ortholog of  Ceres SEQ ID NO 12615635 as cited in SEQ ID NO 63133
  misc_feature (1)..(927): Ortholog of  Ceres SEQ ID NO 12586351 as cited in SEQ ID NO 64028
  misc_feature (1)..(927): Ortholog of  Ceres SEQ ID NO 13654441 as cited in SEQ ID NO 67814
  misc_feature (1)..(927): Ortholog of  Ceres SEQ ID NO 14309027 as cited in SEQ ID NO 0
catcgctgtctggaacagatcaaaccacagctgttcaattcctatcccacacaaaaaaaaaaaaaacacgcacacaaaaacaagagctgtgagtttgatcaatctcttcaaaaagtgtaacacatgggtctaatgaatcggtcaaagaatgatgagtacgtaaagctactaggagcatggcctagcccttttgtgctgagaactcggatcgcacttaacctaaagaacgtagcatacgagtatctagaagaagaagatactttgagttcggagagcgttttaaactataaccccgtccataaacagatccctatcctcattcatggcaacaaaccaatccgtgaatctctcaacatcgtcatgtatgttgatgagacttggctctccggtcctcccatccttccctctgatccatttgatcgcgctgtggctcgattttgggacgtctatatcgatgaacactgtttcacatcaatcaatggagtggcagtagcaaaaggtgaggagaacataaatgcggcgatagctaagctagagcagtgtatggctctattggaagaaacgtttcaagaatgcagcaaaggaagaggcttctttggaggagaaaacatcgggttcatcgacattggtttcggctcgatgttgggtcctcttacggttcttgagaaatttaccggcgtcaagttcatacatcctgaaaacacaccaggtcttttccattgggctgacagattctacgcccatgaagcggtcaagcctgtcatgcccgatatcgaaaaactggtccagttcgctaggctcaagttcaatacttcaatctttaaatgaaaaccaaggacttataaatatatatacgacgactaaattaacataatcgagttcatggaattaataagatgtaaactcgtttagttaaaaggcgtagtc

SEQ ID NO: 106550 - protein, 234 aa, Arabidopsis thaliana
  peptide (1)..(234): Ceres Seq. ID no. 13619923
MGLMNRSKNDEYVKLLGAWPSPFVLRTRIALNLKNVAYEYLEEEDTLSSESVLNYNPVHKQIPILIHGNKPIRESLNIVMYVDETWLSGPPILPSDPFDRAVARFWDVYIDEHCFTSINGVAVAKGEENINAAIAKLEQCMALLEETFQECSKGRGFFGGENIGFIDIGFGSMLGPLTVLEKFTGVKFIHPENTPGLFHWADRFYAHEAVKPVMPDIEKLVQFARLKFNTSIFK

SEQ ID NO: 106551 - protein, 231 aa, Arabidopsis thaliana
  peptide (1)..(231): Ceres Seq. ID no. 13619924
MNRSKNDEYVKLLGAWPSPFVLRTRIALNLKNVAYEYLEEEDTLSSESVLNYNPVHKQIPILIHGNKPIRESLNIVMYVDETWLSGPPILPSDPFDRAVARFWDVYIDEHCFTSINGVAVAKGEENINAAIAKLEQCMALLEETFQECSKGRGFFGGENIGFIDIGFGSMLGPLTVLEKFTGVKFIHPENTPGLFHWADRFYAHEAVKPVMPDIEKLVQFARLKFNTSIFK

SEQ ID NO: 106552 - protein, 155 aa, Arabidopsis thaliana
  peptide (1)..(155): Ceres Seq. ID no. 13619925
MYVDETWLSGPPILPSDPFDRAVARFWDVYIDEHCFTSINGVAVAKGEENINAAIAKLEQCMALLEETFQECSKGRGFFGGENIGFIDIGFGSMLGPLTVLEKFTGVKFIHPENTPGLFHWADRFYAHEAVKPVMPDIEKLVQFARLKFNTSIFK

SEQ ID NO: 106553 - DNA, 1802 bp, Arabidopsis thaliana
  misc_feature (1)..(1802): Ceres Seq. ID no. 13619930
  misc_feature (1)..(1802): Ortholog of  Ceres SEQ ID NO 14312057 as cited in SEQ ID NO 58388
agtttcttctccggcgaagaagaggataacgaaaagaaaacacatagctatgaacggagcttcgctctgcaactccgttttgcttcattctcattctctctctcgttttcagtcatcctcttcttcttgttctgtgtatctgatttcttctgcgcgtactacgtctaagtatatctcaatttctcatagaattcgacagagctttcgagaagttattgaaaaaaggagtaatgggttttgttcattcgctgtaaacaagcgtagaagtggcgattccgttattgtggagtcagacgatgatgatgaagaagatgatgaagattggggtgaatttgatggagaagatgaaggagaagaagaagaagaagatgaaggagagttcttaccaatggataagatgaagaaatggttagagaaaaagcctcgtggatttggtttaggtaaaaagtacgaaactttaattgaagataagttgctcgacgaaattgagcaaagttggaaagctcaagctgctaatctcaataagcttaagaatgatcctctcaagtctcaacagcttaagcgtgacgataatctcctcaaaggaactggagaaactcaaattgggtttcgtgttcgtgtgactaatcttcctaagaagaagaatgttcatagagatcttaaggttgcgtttaaagaagtaagtggcgttttgagtataacaccagctgtgtctgggaataagaagactaaggatcctgtgtgtaaaggatttgctcatgttgatttcaaaactgagattgatgcaaacaggtttgtgaaacagttcacgggacagagcttagcatttgggaaggttataaagcaaatcaaatgtcaggttgtggagtttacttctgatgattctgtatcgaaggaagtgtacttagataacggtttcaaggtgcagaagcttccgtattctggtcttgaaggagattctagtgctgatgttgttgaagaagaggttttgttgggttcaggggaagaatcggatgattcagaagaagaggtagatgaaagagaagtggaagacgatgagcggaatcatatctctagtagcatagaatcttctcccattgaaatgacacgtgattcgaataccaagttaaagtttgagaaacaagttgtgaagcgagagataagagaacatgaggaactagagacacctttagtttcattccaggtgaataaatctgaggaagctgcagcggaaacacacttggatgatgaacaatctgaggaagctgtagcagaaacactcttgaatgatgaacttgatggggatgatgaagaagaagttgctgaagacaatcttgaacctctgaacagttcattgtcatcctcagaagaaaatagagtagatagaatccgtaggctagagcaaaagcttctcggtaaagaaaaactcttgggtggaggagttggctttgataaaccagaagcaaaacccgctagagttgaaggaaagaagaaggagaaaaagaagaagacaaagattcttgtgaaaggccaagccaaaaaggggacaaagatagaaatccctggatcatcaaagaggttaaaggtgaaggagaaggctctattaactggcgtcttagtcaagtatgcggctaaagttgcttcaacctcaaacaatgatgaatgatatcattaacaagtgatcaaattttgatataatctttcatcaactgctagtagtgagccatcttcgatttgtttttataaaagtgttacatgaataggtgataacgttacgtggggaaatgctattttttctttct

SEQ ID NO: 106554 - protein, 554 aa, Arabidopsis thaliana
  peptide (1)..(554): Ceres Seq. ID no. 13619931
VSSPAKKRITKRKHIAMNGASLCNSVLLHSHSLSRFQSSSSSCSVYLISSARTTSKYISISHRIRQSFREVIEKRSNGFCSFAVNKRRSGDSVIVESDDDDEEDDEDWGEFDGEDEGEEEEEDEGEFLPMDKMKKWLEKKPRGFGLGKKYETLIEDKLLDEIEQSWKAQAANLNKLKNDPLKSQQLKRDDNLLKGTGETQIGFRVRVTNLPKKKNVHRDLKVAFKEVSGVLSITPAVSGNKKTKDPVCKGFAHVDFKTEIDANRFVKQFTGQSLAFGKVIKQIKCQVVEFTSDDSVSKEVYLDNGFKVQKLPYSGLEGDSSADVVEEEVLLGSGEESDDSEEEVDEREVEDDERNHISSSIESSPIEMTRDSNTKLKFEKQVVKREIREHEELETPLVSFQVNKSEEAAAETHLDDEQSEEAVAETLLNDELDGDDEEEVAEDNLEPLNSSLSSSEENRVDRIRRLEQKLLGKEKLLGGGVGFDKPEAKPARVEGKKKEKKKKTKILVKGQAKKGTKIEIPGSSKRLKVKEKALLTGVLVKYAAKVASTSNNDE

SEQ ID NO: 106555 - protein, 538 aa, Arabidopsis thaliana
  peptide (1)..(538): Ceres Seq. ID no. 13619932
MNGASLCNSVLLHSHSLSRFQSSSSSCSVYLISSARTTSKYISISHRIRQSFREVIEKRSNGFCSFAVNKRRSGDSVIVESDDDDEEDDEDWGEFDGEDEGEEEEEDEGEFLPMDKMKKWLEKKPRGFGLGKKYETLIEDKLLDEIEQSWKAQAANLNKLKNDPLKSQQLKRDDNLLKGTGETQIGFRVRVTNLPKKKNVHRDLKVAFKEVSGVLSITPAVSGNKKTKDPVCKGFAHVDFKTEIDANRFVKQFTGQSLAFGKVIKQIKCQVVEFTSDDSVSKEVYLDNGFKVQKLPYSGLEGDSSADVVEEEVLLGSGEESDDSEEEVDEREVEDDERNHISSSIESSPIEMTRDSNTKLKFEKQVVKREIREHEELETPLVSFQVNKSEEAAAETHLDDEQSEEAVAETLLNDELDGDDEEEVAEDNLEPLNSSLSSSEENRVDRIRRLEQKLLGKEKLLGGGVGFDKPEAKPARVEGKKKEKKKKTKILVKGQAKKGTKIEIPGSSKRLKVKEKALLTGVLVKYAAKVASTSNNDE

SEQ ID NO: 106556 - protein, 425 aa, Arabidopsis thaliana
  peptide (1)..(425): Ceres Seq. ID no. 13619933
MDKMKKWLEKKPRGFGLGKKYETLIEDKLLDEIEQSWKAQAANLNKLKNDPLKSQQLKRDDNLLKGTGETQIGFRVRVTNLPKKKNVHRDLKVAFKEVSGVLSITPAVSGNKKTKDPVCKGFAHVDFKTEIDANRFVKQFTGQSLAFGKVIKQIKCQVVEFTSDDSVSKEVYLDNGFKVQKLPYSGLEGDSSADVVEEEVLLGSGEESDDSEEEVDEREVEDDERNHISSSIESSPIEMTRDSNTKLKFEKQVVKREIREHEELETPLVSFQVNKSEEAAAETHLDDEQSEEAVAETLLNDELDGDDEEEVAEDNLEPLNSSLSSSEENRVDRIRRLEQKLLGKEKLLGGGVGFDKPEAKPARVEGKKKEKKKKTKILVKGQAKKGTKIEIPGSSKRLKVKEKALLTGVLVKYAAKVASTSNNDE

SEQ ID NO: 106557 - DNA, 1430 bp, Arabidopsis thaliana
  misc_feature (1)..(1430): Ceres Seq. ID no. 13619958
  misc_feature (1)..(1430): Ortholog of  Ceres SEQ ID NO 14306667 as cited in SEQ ID NO 52925
  misc_feature (1)..(1430): Ortholog of  Ceres SEQ ID NO 15177522 as cited in SEQ ID NO 0
atcattcacattacactctttaagtcttaaacgaaacaatggcccttcaagctgcttctttggtctcctctgctttctctgtccgcaaagatggaaaattaaatgcttcagcatcatcatcattcaaagagtctagtctgttcggtgtttcactttcggagcaaagcaaagctgactttgtctcttcctcattgagatgcaagagggaacagagcttgaggaataataaagcgattattcgagctcaagcaatcgcgacttcaactccatcagtcacaaaatcttccttagaccgcaagaaaacacttagaaaaggaaacgtggttgtcacgggagcttcttcagggctaggtttagcaacggcaaaggcattagccgagacaggtaaatggcacgtgataatggcgtgcagagacttcctcaaggctgagagagccgctcaatctgcagggatgcctaaggacagctacactgtgatgcatttggacttggcgtctttggacagcgtgaggcagtttgttgataacttcaggcgagctgagatgcctctcgatgtgttggtctgcaatgccgcagtctatcagccaacggctaatcaacctactttcactgctgaagggtttgagcttagcgttgggataaaccatttgggccactttcttctttcaagattgttgattgatgacttgaagaactccgattatccatcaaaacgtctcatcattgttggatccataaccggaaacactaatacattggctggtaatgtacctccaaaggctaatcttggtgatttgaggggactagcaggcgggttgaacgggctaaacagctcggcgatgatagatggaggagattttgttggcgcaaaggcgtataaagatagcaaagtctgcaacatgttgacaatgcaggagtttcataggcgtttccatgaagacaccggcataacttttgcttccctttaccccggttgtattgcaacgactggtttgttcagagagcatattcctcttttccgtaccctcttccctcctttccagaagtacatcacaaaaggttacgtctccgagtcagaggctgggaaaagacttgctcaggtggtggctgatccaagcttgacgaagtcgggagtgtattggagctggaacaagacctcggcttcatttgagaatcagctgtctcaagaagctagcgatgtcgagaaggctcgtagagtttgggaagtcagcgagaagctcgtaggcttggcctaaaatttgatatgagatttttcctcggtgtttcaacctttggtttggcttaagatgagaaacaaacaaaaaaggagacattaataaagcctgtaacaactttgatttagtagttgtgttttggctgattctatctgtaatgaaacaaataattccacttttcaagttttttttgtc

SEQ ID NO: 106558 - protein, 405 aa, Arabidopsis thaliana
  peptide (1)..(405): Ceres Seq. ID no. 13619959
MALQAASLVSSAFSVRKDGKLNASASSSFKESSLFGVSLSEQSKADFVSSSLRCKREQSLRNNKAIIRAQAIATSTPSVTKSSLDRKKTLRKGNVVVTGASSGLGLATAKALAETGKWHVIMACRDFLKAERAAQSAGMPKDSYTVMHLDLASLDSVRQFVDNFRRAEMPLDVLVCNAAVYQPTANQPTFTAEGFELSVGINHLGHFLLSRLLIDDLKNSDYPSKRLIIVGSITGNTNTLAGNVPPKANLGDLRGLAGGLNGLNSSAMIDGGDFVGAKAYKDSKVCNMLTMQEFHRRFHEDTGITFASLYPGCIATTGLFREHIPLFRTLFPPFQKYITKGYVSESEAGKRLAQVVADPSLTKSGVYWSWNKTSASFENQLSQEASDVEKARRVWEVSEKLVGLA

SEQ ID NO: 106559 - protein, 284 aa, Arabidopsis thaliana
  peptide (1)..(284): Ceres Seq. ID no. 13619960
MACRDFLKAERAAQSAGMPKDSYTVMHLDLASLDSVRQFVDNFRRAEMPLDVLVCNAAVYQPTANQPTFTAEGFELSVGINHLGHFLLSRLLIDDLKNSDYPSKRLIIVGSITGNTNTLAGNVPPKANLGDLRGLAGGLNGLNSSAMIDGGDFVGAKAYKDSKVCNMLTMQEFHRRFHEDTGITFASLYPGCIATTGLFREHIPLFRTLFPPFQKYITKGYVSESEAGKRLAQVVADPSLTKSGVYWSWNKTSASFENQLSQEASDVEKARRVWEVSEKLVGLA

SEQ ID NO: 106560 - protein, 267 aa, Arabidopsis thaliana
  peptide (1)..(267): Ceres Seq. ID no. 13619961
MPKDSYTVMHLDLASLDSVRQFVDNFRRAEMPLDVLVCNAAVYQPTANQPTFTAEGFELSVGINHLGHFLLSRLLIDDLKNSDYPSKRLIIVGSITGNTNTLAGNVPPKANLGDLRGLAGGLNGLNSSAMIDGGDFVGAKAYKDSKVCNMLTMQEFHRRFHEDTGITFASLYPGCIATTGLFREHIPLFRTLFPPFQKYITKGYVSESEAGKRLAQVVADPSLTKSGVYWSWNKTSASFENQLSQEASDVEKARRVWEVSEKLVGLA

SEQ ID NO: 106561 - DNA, 1205 bp, Arabidopsis thaliana
  misc_feature (1)..(1205): Ceres Seq. ID no. 13619962
  misc_feature (1)..(1205): Ortholog of  Ceres SEQ ID NO 14314939 as cited in SEQ ID NO 58010
atggcgcctcgtcttttcacatgttttggcgtcaaaggatcttcaacttccaccaccaccggaaaaggtatttccggtcataacgcggctaatgtagctgctgatgttccggtaggtgatggacctattcttgttcagcttttctcatctcaaggatgtaaaacttcgcctgaggcggagatgcttgtatcacgtcttggacgtggtgatttcgatggaaagatccgtcgagacggtggatctagtggttctccggcgatggttttggtttttcacgttgattattgggattatcttggatggaaagatccttatggatcgagtcagtggaccgtgagacaaaaggcctatatcgaggctttgaatcaagatacaatgtttactccacagtttgttgttcaaggtcgtgttcaattacttgggaatgaagaagagtccttgcttaagtctattgttgaagctcctaggtttccgtctcctgcgtttcgggccacatttcaaagaccaacatcagaaacccttcaagtatctctcaccggagctttgaggatgaaagtggactcgagcgggatcgatataatggtggcgctatatgaaaacggtttggtgaatgattgcgctcgaggagagaactcaggaagagtcttgtccaatgactacgttgtaagaaagctagaaaagttatgcaccgttaaagatttaacgggaaaaaagacggtgtcagggacagctcatttcacggtttgggatggattcaacagctctaaatgtggagtcgctgtttttctacagaacacatctcttcaaatttttggtacgcagagttttcaattgcctgatgagatttgacaaaggaacaaaatttctgaatctattttttttttttttatagaaatgaattttgcacttttgtgttcgttcatatttggttattattggaacttttgtgtgtatagaaggatatttgtcactctcattataggcatttgctttgtttaaaccctttcaattttctttctttctaagttatgccatcccactccacttttaggacagcattatataatgattttaatatataaaccaaacttagtattttgtgggtttaaatccgatgcaggttgacaaatgttttgttgacttgtgttaattcgtgaagttttgtaaggacgataataattgaaacattaatatggaagttattg

SEQ ID NO: 106562 - protein, 282 aa, Arabidopsis thaliana
  peptide (1)..(282): Ceres Seq. ID no. 13619963
MAPRLFTCFGVKGSSTSTTTGKGISGHNAANVAADVPVGDGPILVQLFSSQGCKTSPEAEMLVSRLGRGDFDGKIRRDGGSSGSPAMVLVFHVDYWDYLGWKDPYGSSQWTVRQKAYIEALNQDTMFTPQFVVQGRVQLLGNEEESLLKSIVEAPRFPSPAFRATFQRPTSETLQVSLTGALRMKVDSSGIDIMVALYENGLVNDCARGENSGRVLSNDYVVRKLEKLCTVKDLTGKKTVSGTAHFTVWDGFNSSKCGVAVFLQNTSLQIFGTQSFQLPDEI

SEQ ID NO: 106563 - protein, 222 aa, Arabidopsis thaliana
  peptide (1)..(222): Ceres Seq. ID no. 13619964
MLVSRLGRGDFDGKIRRDGGSSGSPAMVLVFHVDYWDYLGWKDPYGSSQWTVRQKAYIEALNQDTMFTPQFVVQGRVQLLGNEEESLLKSIVEAPRFPSPAFRATFQRPTSETLQVSLTGALRMKVDSSGIDIMVALYENGLVNDCARGENSGRVLSNDYVVRKLEKLCTVKDLTGKKTVSGTAHFTVWDGFNSSKCGVAVFLQNTSLQIFGTQSFQLPDEI

SEQ ID NO: 106564 - protein, 196 aa, Arabidopsis thaliana
  peptide (1)..(196): Ceres Seq. ID no. 13619965
MVLVFHVDYWDYLGWKDPYGSSQWTVRQKAYIEALNQDTMFTPQFVVQGRVQLLGNEEESLLKSIVEAPRFPSPAFRATFQRPTSETLQVSLTGALRMKVDSSGIDIMVALYENGLVNDCARGENSGRVLSNDYVVRKLEKLCTVKDLTGKKTVSGTAHFTVWDGFNSSKCGVAVFLQNTSLQIFGTQSFQLPDEI

SEQ ID NO: 106565 - DNA, 1050 bp, Arabidopsis thaliana
  misc_feature (1)..(1050): Ceres Seq. ID no. 13619970
  misc_feature (1)..(1050): Ortholog of  Ceres SEQ ID NO 14314550 as cited in SEQ ID NO 52321
aacaaaagaaaaacataaaaggaaaggcaaaaagaagatgtgagcttgtgaatgccaaaagatcacataactttctctctgtttcatcaatggccgagaaagtccatgagatcgccggaaagataactcctttctgccggaaaatagttcacgtgaacagaaaatggagaatcatcgagagggtatcgatctttggagatttctttaggtttctatggagaaaaattgtttcttgttcaagtatcatcgaaaaacctattctttaccggcgaatcgttcacaagatttcttccaccgcgggcgatatctttgacggagacgacgatactacgacagaacctactgtttccggtagaaggtttggttcaagttcggattcggatttggttagtctcaagatcagtttattaggcgattgtcaaacagggaagactacttttgtagtaaaatatgttggagatgagaatcaaagtttcttggagatgacgggtttgaatttgatggacaaaactttttatgttcaaggagttactatttcgtttagcatttgggatgtgggaggtgatgaaaagagatcaaaagatcatataccaattgcttgtaaagatgcagtagcaatcttgttcatgtttgatctaaccagtcgatctactcttaacagtgtcttcgggtggtatagccaggcaagaaaatggaacaagacggcaattccgattctaataggaacaaaattcgatgactttgttcggctcccacccaatcttcagtggaccatcgtcactcaggcaagagcatatgcgaaggtgatgaatgcgtcattgttcttctcaagtgcgacacacaacataaatgtgaacaagatcttcaaattcattttggctagactttttaatttgccttggaagattgacagaaatttgaccttaggtgaacccattatcgactacgattcctaatttagtctactttaattatttatcatttttgtacataattttttttttttaaaaagaggtgaacgaatatcgtcgataaaaaaaaatatagttg

SEQ ID NO: 106566 - protein, 317 aa, Arabidopsis thaliana
  peptide (1)..(317): Ceres Seq. ID no. 13619971
QKKNIKGKAKRRCELVNAKRSHNFLSVSSMAEKVHEIAGKITPFCRKIVHVNRKWRIIERVSIFGDFFRFLWRKIVSCSSIIEKPILYRRIVHKISSTAGDIFDGDDDTTTEPTVSGRRFGSSSDSDLVSLKISLLGDCQTGKTTFVVKYVGDENQSFLEMTGLNLMDKTFYVQGVTISFSIWDVGGDEKRSKDHIPIACKDAVAILFMFDLTSRSTLNSVFGWYSQARKWNKTAIPILIGTKFDDFVRLPPNLQWTIVTQARAYAKVMNASLFFSSATHNINVNKIFKFILARLFNLPWKIDRNLTLGEPIIDYDS

SEQ ID NO: 106567 - protein, 288 aa, Arabidopsis thaliana
  peptide (1)..(288): Ceres Seq. ID no. 13619972
MAEKVHEIAGKITPFCRKIVHVNRKWRIIERVSIFGDFFRFLWRKIVSCSSIIEKPILYRRIVHKISSTAGDIFDGDDDTTTEPTVSGRRFGSSSDSDLVSLKISLLGDCQTGKTTFVVKYVGDENQSFLEMTGLNLMDKTFYVQGVTISFSIWDVGGDEKRSKDHIPIACKDAVAILFMFDLTSRSTLNSVFGWYSQARKWNKTAIPILIGTKFDDFVRLPPNLQWTIVTQARAYAKVMNASLFFSSATHNINVNKIFKFILARLFNLPWKIDRNLTLGEPIIDYDS

SEQ ID NO: 106568 - DNA, 723 bp, Arabidopsis thaliana
  misc_feature (1)..(723): Ceres Seq. ID no. 13619973
  misc_feature (1)..(723): Ortholog of  Ceres SEQ ID NO 12618180 as cited in SEQ ID NO 64539
cacttgaagctattcaacaatttttatagctttcttcctctccaaaaccacaccaaaaaaaaaaaaaaaaaatttgattttcagatccaatcaaccagagatgagagataacaacaataacaacacaagagaagaagagagaagcagttcttcaaagcagcaacaaccacaagctcctatgtctttgaagatcatagattcatgtctcagactaagtgtggttcctctcagtgttgcaaccatctggttaactgtcactaaccacgaatccaacccggactacggcaatttagagtacaactccatcatgggtctcaagtatatggttggtgtgagtgccatatctgctatttatgctctgctctctactgtttcttcatgggtcacatgtttagtctccaaagcttggctcttctttattcctgaccaggttttagcttatgtgatgacaacatcagtagcaggagcaacagagatagtgtatctacttaacaaaggagacaaaatagtgacatggagtgaaatgtgttcttcttatccacattattgttcaaaactcacaattgctttgggacttcatgtctttgttcttttctttttcttatttctctctgtcatttctgcttatagagcttttagtccctttgatcctccttgtgattctcaaaccaataatgatgcttaaattagtcagttttggattcaactttatcaaaatgttgc

SEQ ID NO: 106569 - protein, 194 aa, Arabidopsis thaliana
  peptide (1)..(194): Ceres Seq. ID no. 13619974
MRDNNNNNTREEERSSSSKQQQPQAPMSLKIIDSCLRLSVVPLSVATIWLTVTNHESNPDYGNLEYNSIMGLKYMVGVSAISAIYALLSTVSSWVTCLVSKAWLFFIPDQVLAYVMTTSVAGATEIVYLLNKGDKIVTWSEMCSSYPHYCSKLTIALGLHVFVLFFFLFLSVISAYRAFSPFDPPCDSQTNNDA

SEQ ID NO: 106570 - protein, 168 aa, Arabidopsis thaliana
  peptide (1)..(168): Ceres Seq. ID no. 13619975
MSLKIIDSCLRLSVVPLSVATIWLTVTNHESNPDYGNLEYNSIMGLKYMVGVSAISAIYALLSTVSSWVTCLVSKAWLFFIPDQVLAYVMTTSVAGATEIVYLLNKGDKIVTWSEMCSSYPHYCSKLTIALGLHVFVLFFFLFLSVISAYRAFSPFDPPCDSQTNNDA

SEQ ID NO: 106571 - protein, 125 aa, Arabidopsis thaliana
  peptide (1)..(125): Ceres Seq. ID no. 13619976
MGLKYMVGVSAISAIYALLSTVSSWVTCLVSKAWLFFIPDQVLAYVMTTSVAGATEIVYLLNKGDKIVTWSEMCSSYPHYCSKLTIALGLHVFVLFFFLFLSVISAYRAFSPFDPPCDSQTNNDA

SEQ ID NO: 106572 - DNA, 962 bp, Arabidopsis thaliana
  misc_feature (1)..(962): Ceres Seq. ID no. 13619977
  misc_feature (1)..(962): Ortholog of  Ceres SEQ ID NO 13661969 as cited in SEQ ID NO 61215
  misc_feature (1)..(962): Ortholog of  Ceres SEQ ID NO 12614809 as cited in SEQ ID NO 68808
  misc_feature (1)..(962): Ortholog of  Ceres SEQ ID NO 12634366 as cited in SEQ ID NO 0
  misc_feature (1)..(962): Ortholog of  Ceres SEQ ID NO 15175257 as cited in SEQ ID NO 0
attctcactgttgagagagagcagacagcagagagcaatgacgtcgatggagaggatggagagagacgcaatggagacggtggctccatacgctcgggtgacttatcaccgccgtgttcgtggtgacttggatgacacacttcctaaaccttatttgccgagagcactacaagcacctgacatggaacacccacaaggaacaccagatcatagacataatggccttagtgttcttcagcaacatgtcgctttcttcgatttggacaataatggcatcatttatccctttgaaaccttctctgggttccggttactcggtttcaatttactcgcgtcgcttatcttggctgctggtatcaacatagctcttagctatgctactctcccgggatggttaccgtctccgttcttccctatatatattcacaacattcacaaggcaaagcacggaagcgactctaaaacatatgacaatgaaggaaggtatacaccagcgaatcttgagttgatgtttagcaaatacgcgaggaccataccagacaagttgagtcttggagagctatgggacatgaccgaaggaaaccgcgatgcctttgacttttttggatggttagcgagcaaagtggaatggggtgtattgtatgcattagcgagtgatgaagaaggattcttgtctaaagaagccataaggcggtgcttcgatgggagcttgttcgagtattgtgccaagaactacgctgagatcaaggagtacaagacgtactactgatcatgatgatcggtggttttttgtattcaaagcaacacgctcgtaggcttctgaactattacgggaaacaattgaattgaaccaaatagtggttatgttaggaagcaataaggtgtatgttgtgttcgtttattatgcataaaaacacttcaatagtggtttattcaatataatatccacttgcgttttcttt

SEQ ID NO: 106573 - protein, 255 aa, Arabidopsis thaliana
  peptide (1)..(255): Ceres Seq. ID no. 13619978
FSLLRESRQQRAMTSMERMERDAMETVAPYARVTYHRRVRGDLDDTLPKPYLPRALQAPDMEHPQGTPDHRHNGLSVLQQHVAFFDLDNNGIIYPFETFSGFRLLGFNLLASLILAAGINIALSYATLPGWLPSPFFPIYIHNIHKAKHGSDSKTYDNEGRYTPANLELMFSKYARTIPDKLSLGELWDMTEGNRDAFDFFGWLASKVEWGVLYALASDEEGFLSKEAIRRCFDGSLFEYCAKNYAEIKEYKTYY

SEQ ID NO: 106574 - protein, 243 aa, Arabidopsis thaliana
  peptide (1)..(243): Ceres Seq. ID no. 13619979
MTSMERMERDAMETVAPYARVTYHRRVRGDLDDTLPKPYLPRALQAPDMEHPQGTPDHRHNGLSVLQQHVAFFDLDNNGIIYPFETFSGFRLLGFNLLASLILAAGINIALSYATLPGWLPSPFFPIYIHNIHKAKHGSDSKTYDNEGRYTPANLELMFSKYARTIPDKLSLGELWDMTEGNRDAFDFFGWLASKVEWGVLYALASDEEGFLSKEAIRRCFDGSLFEYCAKNYAEIKEYKTYY

SEQ ID NO: 106575 - protein, 240 aa, Arabidopsis thaliana
  peptide (1)..(240): Ceres Seq. ID no. 13619980
MERMERDAMETVAPYARVTYHRRVRGDLDDTLPKPYLPRALQAPDMEHPQGTPDHRHNGLSVLQQHVAFFDLDNNGIIYPFETFSGFRLLGFNLLASLILAAGINIALSYATLPGWLPSPFFPIYIHNIHKAKHGSDSKTYDNEGRYTPANLELMFSKYARTIPDKLSLGELWDMTEGNRDAFDFFGWLASKVEWGVLYALASDEEGFLSKEAIRRCFDGSLFEYCAKNYAEIKEYKTYY

SEQ ID NO: 106576 - DNA, 1071 bp, Arabidopsis thaliana
  misc_feature (1)..(1071): Ceres Seq. ID no. 13619985
  misc_feature (1)..(1071): Ortholog of  Ceres SEQ ID NO 15177654 as cited in SEQ ID NO 59933
  misc_feature (1)..(1071): Ortholog of  Ceres SEQ ID NO 14303600 as cited in SEQ ID NO 64632
attgtgttagtggtaatcaaatccggtgaaaatggagcggagccgagtgaccagagaagcaccgaccggaaccaggatcctgcttgcttcactctctgcgatggttgcagagtcagttacgtttccgattgatctcacaaagactagaatgcagctccatggttcgggatccgcttctggtgcgcatcggattggcgctttcggagtcgtatcggagattgcgagaaaggaaggagtgattggtctctacaaaggtctatctccggcgattatcagacacctgttctacacgcctatcagaatcattggatacgagaatttgaaaggactcatcgtcagatctgaaactaacaatagcgagtctcttcctctcgccacaaaggctctcgtcggaggattttctggtgttatagctcaggtagtggctagtccagctgatttggtcaaagtgagaatgcaagcagatggtagattggtgagccaaggcctgaaaccgaggtactcgggaccaatcgaggcttttaccaaaatcctacaatcagaaggagtaaaagggttatggaaaggtgttcttccaaacatccagagagcatttctagtgaatatgggagaactagcttgctatgatcacgccaaacactttgtcatcgataagaagattgctgaggataacatttttgcgcacactcttgcttctataatgtcgggtcttgcttcgacaagtttgagttgtccagctgatgtggtgaagacgaggatgatgaaccagggtgaaaatgctgtgtacagaaattcttacgactgtttggtgaagacggttaagtttgaaggaataagagctttgtggaaaggtttcttcccgacatgggcaaggcttggaccgtggcagttcgtgttttgggtctcctatgagaagtttagactgctggcaggaatctcttccttctagacctgagaaactggaaaagcaaatttgagatttgtgttctttagttcttacttgttagttgttacacattttgtaagaaccttgagaagtagcatcagtttctgattaacgcgagaagagtt

SEQ ID NO: 106577 - protein, 305 aa, Arabidopsis thaliana; identical to SEQ ID NO: 39574
  peptide (1)..(305): Ceres Seq. ID no. 13619986

SEQ ID NO: 106578 - protein, 282 aa, Arabidopsis thaliana; identical to SEQ ID NO: 39575
  peptide (1)..(282): Ceres Seq. ID no. 13619987

SEQ ID NO: 106579 - protein, 266 aa, Arabidopsis thaliana; identical to SEQ ID NO: 39576
  peptide (1)..(266): Ceres Seq. ID no. 13619988

SEQ ID NO: 106580 - DNA, 971 bp, Arabidopsis thaliana
  misc_feature (1)..(971): Ceres Seq. ID no. 13619993
  misc_feature (1)..(971): Ortholog of  Ceres SEQ ID NO 15171228 as cited in SEQ ID NO 56948
  misc_feature (1)..(971): Ortholog of  Ceres SEQ ID NO 13597134 as cited in SEQ ID NO 64501
acatcatcaacttcatcaattcatcacctttgtctctctttcaagcttctctgtgtgtgatctccgttggtcaacaacaactacaacagcttattgagcagagatggatcatcaatttggatatggtgttgaagttactgggttatctccatctgttactcataatgatcttatcgatttcttctctttctctggtactatccaagatattgatattgtcaggtcgggtgagcaagcttgtactgcttatgtgatgtttaaggattcttattctcaagaaactgctgttttactcactggcgcaacgatattggatcagcgtgtttgtataactcgttggggacaacatcacgaagagttcgatttctggaatgcgacttcgcgaggttttgaagatgaatcggactcacaacattatgctcaacgaagcgagttcaacgctggagaagcagtgacaaaagctcaagaagtggtgaaaataatgcttgccacaggattcgtgctaggcaaagacgctttaagcaaagctaaagcctttgatgaatcccacggcgtatcagctgcagcggtggctagagtatctcaactagaacagaggattggtcttactgacaaaatctttaccggacttgaagctgttagaatgactgaccaaaggtatcatgtttcagatacagctaaatcagctgtctttgccacaggaagaaccgcggcagcagctgcaactagtgttgtcaatagcagttacttctccagcggagctctttggctgtctggtgcattagagagagctgctaaagccgcatctgatctcggtacccgcggctcaaggcagtgaatagaccaatggcccgattcagaaccgtattcgtctgtgaatatatatgatgcaaagctgatcatgaataactggctcatgaagtgtgataagaccaaattttatcaaaacgaataccatatagaaatctatc

SEQ ID NO: 106581 - protein, 244 aa, Arabidopsis thaliana; identical to SEQ ID NO: 28288
  peptide (1)..(244): Ceres Seq. ID no. 13619994

SEQ ID NO: 106582 - protein, 194 aa, Arabidopsis thaliana; identical to SEQ ID NO: 28289
  peptide (1)..(194): Ceres Seq. ID no. 13619995

SEQ ID NO: 106583 - DNA, 1575 bp, Arabidopsis thaliana
  misc_feature (1)..(1575): Ceres Seq. ID no. 13620003
  misc_feature (1)..(1575): Ortholog of  Ceres SEQ ID NO 14307296 as cited in SEQ ID NO 53966
  misc_feature (1)..(1575): Ortholog of  Ceres SEQ ID NO 15175368 as cited in SEQ ID NO 60071
  misc_feature (1)..(1575): Ortholog of  Ceres SEQ ID NO 13528157 as cited in SEQ ID NO 60102
  misc_feature (1)..(1575): Ortholog of  Ceres SEQ ID NO 15225423 as cited in SEQ ID NO 64689
tttgtcactgggagggaagggagagagtgaaaaattgaaaatatctagttttttttttctctctcttgcttttaggctttaggctttcactactaatactctcttagtttaagacattgccttcacatccaaacacaaatgcaaatctttgtctcctctcttccttcaaagtctttcattacaaaaccctaatatctctaatcttctctctgtctctcttaagggcaatatcttcaatagagttctgaactttggaagcatattaagatatcaaagtaattttctacttttagttgtgaagctagtctctcctctgtccccaaaccaagaaacaatttgcaaagagaaagcaaaaggtttttgaagaagacccaattaaaaaagatggaaattgcaagtcaagaagatcatgatatgcccatcccattaaacactacatttggtggtggtggtagtcatggtcacatgatccatcatcatgatcatcatgctgctaattctgctcctccaactcacaacaacaacaatactactcaaccacctccaatgccgttacatggtaatggtcatggcaacaattatgatcatcatcatcatcaagatcctcatcatgttggttacaacgctatcatcaagaagcctatgataaagtacaaggagtgtctcaagaaccatgcagcagctatgggaggcaatgctactgatgggtgtggagagtttatgccaagtggtgaagatggctccattgaggctctcacttgctcagcttgcaattgccacaggaacttccatagaaaagaagtggaaggcgaactcgcagccaccgccatgtccccttaccaccaacaccctccacaccgaaaactcatgctcaaccaccaaaagatcagatcagctatgccacaccaaatgatcatgcccattggagtctctaactaccggtacatgcataacaactccgagtccgaggactttatggaggaagatggcgtaaccaccgcatctagatcgctaccaaacctgccatacaaccagaagaagaggttcaggacaaagttcacgccggaacagaaggagaagatgcttagttttgctgagaaagttgggtggaaaatacaaaggcaagaagattgtgttgttcaaaggttttgtgaagagattggagtgaagagaagagtgcttaaggtttggatgcacaacaacaagatccatttctccaagaagaacaacattaacctcgaagacaacgacaacgaaaagatcaacaatctcaacaatgttgatctgtccggtaataacgacatgactaagatcgtcccatgatataattaataacgttatttttatatgatctttgataattatttagttatctttatgttagctactagggttttaattttatcttctagctggtttggttttattttatatatataagctcatttcgctatctctcgttaaacccatggattttatataattttctgctctttgttgtgttttatttatttggaagttatatatattaatcttgttgtaataaatgtatgaccagccgtatttttcttcttc

SEQ ID NO: 106584 - protein, 312 aa, Arabidopsis thaliana; identical to SEQ ID NO: 43570
  peptide (1)..(312): Ceres Seq. ID no. 13620004

SEQ ID NO: 106585 - protein, 302 aa, Arabidopsis thaliana; identical to SEQ ID NO: 43571
  peptide (1)..(302): Ceres Seq. ID no. 13620005

SEQ ID NO: 106586 - protein, 285 aa, Arabidopsis thaliana; identical to SEQ ID NO: 43572
  peptide (1)..(285): Ceres Seq. ID no. 13620006

SEQ ID NO: 106587 - DNA, 928 bp, Arabidopsis thaliana
  misc_feature (1)..(928): Ceres Seq. ID no. 13620007
  misc_feature (1)..(928): Ortholog of  Ceres SEQ ID NO 13638976 as cited in SEQ ID NO 55790
  misc_feature (1)..(928): Ortholog of  Ceres SEQ ID NO 13595442 as cited in SEQ ID NO 56456
  misc_feature (1)..(928): Ortholog of  Ceres SEQ ID NO 12616626 as cited in SEQ ID NO 64532
  misc_feature (1)..(928): Ortholog of  Ceres SEQ ID NO 12635864 as cited in SEQ ID NO 0
aaattgctttttaaaatccctcctcacacagattccttccttcatcacctcacacactctctacgcttgacatggccttcgatctccaccatggctcagcttcagatacgcattcatcagaacttccgtcgttttctctcccaccttatcctcagatgataatggaagcgattgagtccttgaacgataagaacggctgcaacaaaacgacgattgctaagcacatcgagtcgactcaacaaactctaccgccgtcacacatgacgctgctcagctaccatctcaaccagatgaagaaaaccggtcagctaatcatggtgaagaacaattatatgaaaccagatccagatgctcctcctaagcgtggtcgtggccgtcctccgaagcagaagactcaggccgaatctgacgccgctgctgctgctgttgttgctgccaccgtcgtctctacagatccgcctagatctcgtggccgtccaccgaagccgaaagatccatcggagcctccccaggagaaggtcattaccggatctggaaggccacgaggacgaccaccgaagagaccgagaacagattcggagacggttgctgcgccggaaccggcagctcaggcgacaggtgagcgtaggggacgtgggagacctccgaaggtgaagccgacggtggttgctccggttgggtgctgaattaatcggtacttatgcaatttcggaatctttagttactgaaaaatggaatctcttagagagtaagagagtgctttaatttagcttaattagatttatttggatttctttcagtatttggattgtaaactttagaatttgtgtgtgtgttgttgcttagtcctgagataagatataacattagcgactgtgtattattattattactgcattgtgttatgtgaaactttgttctcttgttg

SEQ ID NO: 106588 - protein, 204 aa, Arabidopsis thaliana; identical to SEQ ID NO: 28497
  peptide (1)..(204): Ceres Seq. ID no. 13620008

SEQ ID NO: 106589 - protein, 176 aa, Arabidopsis thaliana; identical to SEQ ID NO: 28498
  peptide (1)..(176): Ceres Seq. ID no. 13620009

SEQ ID NO: 106590 - protein, 174 aa, Arabidopsis thaliana; identical to SEQ ID NO: 28499
  peptide (1)..(174): Ceres Seq. ID no. 13620010

SEQ ID NO: 106591 - DNA, 1570 bp, Arabidopsis thaliana
  misc_feature (1)..(1570): Ceres Seq. ID no. 13620011
  misc_feature (1)..(1570): Ortholog of  Ceres SEQ ID NO 15178236 as cited in SEQ ID NO 67053
actacttggattcctacttcttcttcttcttcctctgattctctcccattccaatcaatctctagggttcttcttcagcaatacttcagaagctggttttggccatggaacccaatgggtacaggaaagaaagaagaaaggaacaacatttggggagaatgaatggtggtggtggtgatgttgagactgatcttgatccatggactgcatgggcttacaagcctcgcactatctctcttctccttattggcgcttgttttctcatttgggctagtggagctcttgatcctgacagcactacatctgatgatcttgtcacttctgtcaaaaggggagtgtgggctatgatcgctgtctttcttgcttactctttgctccaggccccttcaacggttctaatcaggccccatcctgcaatctggcgcttagttcatggaatggccgtcatttacttagttgcacttacttttttgctctttcagagacgtgatgatgcacggcagttcatgaagtttctccaccctgaccttggaatagaacttcctgagaaatcatacggtgctgattgccgtatatatgtgcctgatcacccaacaaacaggtttaagaatctttatgacacagtatttgatgagtttttcttggctcacatctttggttggtgggggaaagcaattctgatccggaaccagccgcttctttgggtgctttcaattggttttgagttattggaggttacttttcggcatatgttaccaaatttcaacgagtgctggtgggacagtattgttcttgatatcttgatatgcaactggtttggtatctgggcaggaatgtatacagttcgatattttgatggaaaaacatatgagtgggttggcattagccgccagcctaacattattggcaaagtgaaaaggacactggggcagttcacaccagctcactgggacaaagacgagtggcatccgctgcagggaccttggcgttttattcaagtactcactctttgcatcatattcttgacagtggagctgaacacattctttctcaagtttagcctgtggatcccccctcgaaacccagtgattctctataggctgatcttgtggtggctcatagcgataccaacaacacgggagtacaattcatatcttcaagacagaaaacctgtgaaaaaggtgggagcattctgttggctgtcactggggatatgcatagtagaacttctcatctgcatcaagtttggaagtggattgtacccaacagaaatgccattgtgggtagtgacactatggggaagtgtgggacttggacttgtggccttcttgctgtcttggacatggaagatccagaagatcctcgcgcaaaagagacgttaagcgcatcattattgttgcagcagagacgagagagaaatagaggtgagacagtgaaatgccattgtggtttttttttgtaaatagggagaagaaggaacgatgtaaatgcaattttctttagggatagtgtgtgatattcaacatttacgaagattccatcaattctttcatgcatcaaaagttctttc

SEQ ID NO: 106592 - protein, 425 aa, Arabidopsis thaliana
  peptide (1)..(425): Ceres Seq. ID no. 13620012
MEPNGYRKERRKEQHLGRMNGGGGDVETDLDPWTAWAYKPRTISLLLIGACFLIWASGALDPDSTTSDDLVTSVKRGVWAMIAVFLAYSLLQAPSTVLIRPHPAIWRLVHGMAVIYLVALTFLLFQRRDDARQFMKFLHPDLGIELPEKSYGADCRIYVPDHPTNRFKNLYDTVFDEFFLAHIFGWWGKAILIRNQPLLWVLSIGFELLEVTFRHMLPNFNECWWDSIVLDILICNWFGIWAGMYTVRYFDGKTYEWVGISRQPNIIGKVKRTLGQFTPAHWDKDEWHPLQGPWRFIQVLTLCIIFLTVELNTFFLKFSLWIPPRNPVILYRLILWWLIAIPTTREYNSYLQDRKPVKKVGAFCWLSLGICIVELLICIKFGSGLYPTEMPLWVVTLWGSVGLGLVAFLLSWTWKIQKILAQKRR

SEQ ID NO: 106593 - protein, 407 aa, Arabidopsis thaliana
  peptide (1)..(407): Ceres Seq. ID no. 13620013
MNGGGGDVETDLDPWTAWAYKPRTISLLLIGACFLIWASGALDPDSTTSDDLVTSVKRGVWAMIAVFLAYSLLQAPSTVLIRPHPAIWRLVHGMAVIYLVALTFLLFQRRDDARQFMKFLHPDLGIELPEKSYGADCRIYVPDHPTNRFKNLYDTVFDEFFLAHIFGWWGKAILIRNQPLLWVLSIGFELLEVTFRHMLPNFNECWWDSIVLDILICNWFGIWAGMYTVRYFDGKTYEWVGISRQPNIIGKVKRTLGQFTPAHWDKDEWHPLQGPWRFIQVLTLCIIFLTVELNTFFLKFSLWIPPRNPVILYRLILWWLIAIPTTREYNSYLQDRKPVKKVGAFCWLSLGICIVELLICIKFGSGLYPTEMPLWVVTLWGSVGLGLVAFLLSWTWKIQKILAQKRR

SEQ ID NO: 106594 - protein, 345 aa, Arabidopsis thaliana
  peptide (1)..(345): Ceres Seq. ID no. 13620014
MIAVFLAYSLLQAPSTVLIRPHPAIWRLVHGMAVIYLVALTFLLFQRRDDARQFMKFLHPDLGIELPEKSYGADCRIYVPDHPTNRFKNLYDTVFDEFFLAHIFGWWGKAILIRNQPLLWVLSIGFELLEVTFRHMLPNFNECWWDSIVLDILICNWFGIWAGMYTVRYFDGKTYEWVGISRQPNIIGKVKRTLGQFTPAHWDKDEWHPLQGPWRFIQVLTLCIIFLTVELNTFFLKFSLWIPPRNPVILYRLILWWLIAIPTTREYNSYLQDRKPVKKVGAFCWLSLGICIVELLICIKFGSGLYPTEMPLWVVTLWGSVGLGLVAFLLSWTWKIQKILAQKRR

SEQ ID NO: 106595 - DNA, 1217 bp, Arabidopsis thaliana
  misc_feature (1)..(1217): Ceres Seq. ID no. 13620022
  misc_feature (1)..(1217): Ortholog of  Ceres SEQ ID NO 14315275 as cited in SEQ ID NO 52556
  misc_feature (1)..(1217): Ortholog of  Ceres SEQ ID NO 13597260 as cited in SEQ ID NO 63885
attccatcaatttctcatccttgttgttttcttcttcttcttcttcctcttcttttatgttcatcgccgtcgaagtttctccggtaatggaagacatcacacggcagagcaaaaaaacttcggttgagaatgaaaccggcgatgatcagtcagcaacatcagtagtccttaaagctaaacgcaaacgccgatcgcaaccacgagacgctccaccccaacgtagctccgtccatagaggcgtcacaaggcatcgatggactggaaggtacgaagcacatttgtgggataagaatagttggaacgaaactcagaccaagaaaggaagacaagtatatttaggggcatatgacgaggaagatgcagcagcacgtgcctacgacttagcagcattgaaatattggggacgagacaccatcttgaacttccctttgtgtaattatgaagaagacatcaaagaaatggaaagccagtcaaaggaagagtatattggatctttgagaagaaaaagtagtgggttttcacgaggtgtatcaaaatacagaggcgttgcaaagcatcaccacaatgggagatgggaagctcgaatcggaagagtgtttggcaataaatatttataccttggaacttacgcgacgcaagaagaagcagctatagcgtacgatatcgcagctatcgagtaccgtggactcaacgccgttactaacttcgacatcagccgttatctgaaactcccggtgccggagaaccctatcgataccgcgaataatctcctcgagagtccgcattctgatcttagcccatttataaaacctaaccacgagtctgacttatcacagagtcaatcttcgtcagaggacaacgatgatcggaaaacaaagctcttgaagtcgtcacctttagtggcagaggaggtaatcggaccatcgacgccacctgagattgctccgcctcgtcggagcttcccggaagatatccagacgtatttcgggtgtcaaaactccggcaagttaacggcggaggaagatgatgttatcttcggtgatttagattctttccttacgcctgatttctacagcgagttaaatgattgctaaagtgttgttcttctgataagttttgttttttagttgttcagaatctcggttgtgaaaatcaacattgacacatcgattattctttcttgtgacaatcttatataataaagtttgaatcttttt

SEQ ID NO: 106596 - protein, 363 aa, Arabidopsis thaliana
  peptide (1)..(363): Ceres Seq. ID no. 13620023
SINFSSLLFSSSSSSSSFMFIAVEVSPVMEDITRQSKKTSVENETGDDQSATSVVLKAKRKRRSQPRDAPPQRSSVHRGVTRHRWTGRYEAHLWDKNSWNETQTKKGRQVYLGAYDEEDAAARAYDLAALKYWGRDTILNFPLCNYEEDIKEMESQSKEEYIGSLRRKSSGFSRGVSKYRGVAKHHHNGRWEARIGRVFGNKYLYLGTYATQEEAAIAYDIAAIEYRGLNAVTNFDISRYLKLPVPENPIDTANNLLESPHSDLSPFIKPNHESDLSQSQSSSEDNDDRKTKLLKSSPLVAEEVIGPSTPPEIAPPRRSFPEDIQTYFGCQNSGKLTAEEDDVIFGDLDSFLTPDFYSELNDC

SEQ ID NO: 106597 - protein, 345 aa, Arabidopsis thaliana
  peptide (1)..(345): Ceres Seq. ID no. 13620024
MFIAVEVSPVMEDITRQSKKTSVENETGDDQSATSVVLKAKRKRRSQPRDAPPQRSSVHRGVTRHRWTGRYEAHLWDKNSWNETQTKKGRQVYLGAYDEEDAAARAYDLAALKYWGRDTILNFPLCNYEEDIKEMESQSKEEYIGSLRRKSSGFSRGVSKYRGVAKHHHNGRWEARIGRVFGNKYLYLGTYATQEEAAIAYDIAAIEYRGLNAVTNFDISRYLKLPVPENPIDTANNLLESPHSDLSPFIKPNHESDLSQSQSSSEDNDDRKTKLLKSSPLVAEEVIGPSTPPEIAPPRRSFPEDIQTYFGCQNSGKLTAEEDDVIFGDLDSFLTPDFYSELNDC

SEQ ID NO: 106598 - protein, 335 aa, Arabidopsis thaliana; identical to SEQ ID NO: 42965
  peptide (1)..(335): Ceres Seq. ID no. 13620025

SEQ ID NO: 106599 - DNA, 993 bp, Arabidopsis thaliana
  misc_feature (1)..(993): Ceres Seq. ID no. 13620044
  misc_feature (1)..(993): Ortholog of  Ceres SEQ ID NO 15168573 as cited in SEQ ID NO 57822
  misc_feature (1)..(993): Ortholog of  Ceres SEQ ID NO 12592883 as cited in SEQ ID NO 67862
atttttcggatcggaccaattcgactaatcggttccggtttctttcccggggcaaggtagagctagagatttcgaagaagaaacgaaagggagagagagagatagacaagttccgcgatgaacgaaggctcgagcgaagaagtaacgaggacggtaatggaagagaaaccagaacagaaacaaagaggatctctggagaaaggaagatcgtgcaaaggctatttatattactcttccactctcaaatccaagtctaagaaccctcgctgcgtcggaatccctcgtactctccgtcaagttcctgattatgttgttggacaatctgaagctgaagcttctaaagaaggaaggaccttagctgatttttactatggatgtttgggttattccgtctacatgactgataaagactcatctgccattaagcaacatacaaagactcaacttcccgtttgtgtcggtcttgagatattagcagatagaagagcagcttctggcaatacttcatctgttccagcccgtgtccaaaatagaaaagattctcgggaggtgcctgtgcctcagcaccagaacaataaaccagcctctgccactgccactgccacaaacacagaaaacggcttcttaaccaggttcacaagaaacgcaaacctggttgcagcaggggtgatgaagaacatgaagagagttggtaactatgtgaaagaaactgtggatgattccttggacccatatcgcaagcgaccaaaataaagaaactttttacattagatgtggagacaacaaacccaaaaaaaatgaccgacagacgacaggatatgaaatcttatttgacacttttttggattctcttgaatcatcaaaataataaaatcaacaaaaaaaatggctgtatgatttgtttaagcaggccatgtcccaaagtaatatgtacaccttcctcagttctggtttactgataatattcatatcccaatgaggttcacttttatt

SEQ ID NO: 106600 - protein, 211 aa, Arabidopsis thaliana
  peptide (1)..(211): Ceres Seq. ID no. 13620045
MNEGSSEEVTRTVMEEKPEQKQRGSLEKGRSCKGYLYYSSTLKSKSKNPRCVGIPRTLRQVPDYVVGQSEAEASKEGRTLADFYYGCLGYSVYMTDKDSSAIKQHTKTQLPVCVGLEILADRRAASGNTSSVPARVQNRKDSREVPVPQHQNNKPASATATATNTENGFLTRFTRNANLVAAGVMKNMKRVGNYVKETVDDSLDPYRKRPK

SEQ ID NO: 106601 - protein, 198 aa, Arabidopsis thaliana
  peptide (1)..(198): Ceres Seq. ID no. 13620046
MEEKPEQKQRGSLEKGRSCKGYLYYSSTLKSKSKNPRCVGIPRTLRQVPDYVVGQSEAEASKEGRTLADFYYGCLGYSVYMTDKDSSAIKQHTKTQLPVCVGLEILADRRAASGNTSSVPARVQNRKDSREVPVPQHQNNKPASATATATNTENGFLTRFTRNANLVAAGVMKNMKRVGNYVKETVDDSLDPYRKRPK

SEQ ID NO: 106602 - protein, 118 aa, Arabidopsis thaliana
  peptide (1)..(118): Ceres Seq. ID no. 13620047
MTDKDSSAIKQHTKTQLPVCVGLEILADRRAASGNTSSVPARVQNRKDSREVPVPQHQNNKPASATATATNTENGFLTRFTRNANLVAAGVMKNMKRVGNYVKETVDDSLDPYRKRPK

SEQ ID NO: 106603 - DNA, 1829 bp, Arabidopsis thaliana
  misc_feature (1)..(1829): Ceres Seq. ID no. 13620048
  misc_feature (1)..(1829): Ortholog of  Ceres SEQ ID NO 12613725 as cited in SEQ ID NO 68196
ataacactcaaacacaagtcaaagtacctcctgcttccacttgttctctgccatggctaattcagactctggtgacaaagaagcgcatcgctctagcaagcatggtggctggatcactttaccgttcatgctcgttacattgttaggcatgtcgataacttattttggatgggtaatgaacttgatcgtcttcttgatcgaggaattcaacatcaagagcatcgcagctgttcagatttcaaatattgtcaatggagttgtcaacatgttgcctgttgtcgcagccatcctagccgattccttttttgggaacattcctgtcatctcagcctccgctttcatttctctaactggaatatcgctcttgactcttattgcatctttggactatttgagacctagaccgtgtgaaacgggatcaattttatgccaatcaccatcaaaactacaacttgggatcttgtatgcagccttagctctagtgatcactggaacagctgggacgcggttcatcttggcatccgcaggtgcaaaccaatataagaaacctaaagaacaaggaaggttcttcaactggtactttttcacactatatggtggagcgattactggcacgacagcaattgtatatgcacaggacaatgctagctggaagcttggattcggtctctgcgtcgctgctaacttgatcagtttcatcattttcgtcgctgggaagagactctacgagcatgaccaacctttgggaagtccttatacaagtctagttcgcgttttagtcgctgctacaatgaaacgaaaggctgtgatttcatacaaagacgaagactatcatcaccgcgagctcgaaaaagagaccaagacttatgttgcaatgccctccaagagcttcaggttcttgaaccgtgcagcattgaagacagaaggagactcaaataataacatgtggaggctatgctctgttcaggaagtagaagatttcaaagccgttctccgacttgtccctctctggacatctgtcatgttcctcagcgctcccctagcggtgcaaatgagcatgactgtcctccaagctatggtcatggaccgtaaacttggcccacacttcaaagtctctgctgggtctatgcaagtcatagcactcgtctctggatgcgtctttatcatacttaacaactggactacctatcccatgtatcagaagctaatccgcaaaccgctgacaccgctacaaaaagtcgggatcggccacgttttgacaatcttaagcatggcgatatcagccgttgttgaagcaaagaggctgaaaacagttgaaaatagccatctcatgtcagtgctatggctggttcctgctctcgtgattaatggaataggtgaggcctttcattttccagcaaatattgcaatattctatggagaattccctgagtctctaaggaacacagcgacttcattgacctcggtggtgatgggaatctctttctatctgagcacagctcttatcgatgtgatccagaggaccaccaagtggttaccaaatgacataaaccacggaagggttgacaatgtttacttggtattagtcattataggagtctctaatttcggctacttccttgtctgctcttggttttacaaatacagaaacctcaagaatgatgatcatgaacaagatcttaaagatgttacaaactaggacactaacgtgttctgtcctcgttttctctatattgtagttgtgtcttcatgcaactaacttatgtgctacatgcaaactcactgtttgccgtttgtgtttacttttaccaataaatgttatttgtacc

SEQ ID NO: 106604 - protein, 548 aa, Arabidopsis thaliana
  peptide (1)..(548): Ceres Seq. ID no. 13620049
MANSDSGDKEAHRSSKHGGWITLPFMLVTLLGMSITYFGWVMNLIVFLIEEFNIKSIAAVQISNIVNGVVNMLPVVAAILADSFFGNIPVISASAFISLTGISLLTLIASLDYLRPRPCETGSILCQSPSKLQLGILYAALALVITGTAGTRFILASAGANQYKKPKEQGRFFNWYFFTLYGGAITGTTAIVYAQDNASWKLGFGLCVAANLISFIIFVAGKRLYEHDQPLGSPYTSLVRVLVAATMKRKAVISYKDEDYHHRELEKETKTYVAMPSKSFRFLNRAALKTEGDSNNNMWRLCSVQEVEDFKAVLRLVPLWTSVMFLSAPLAVQMSMTVLQAMVMDRKLGPHFKVSAGSMQVIALVSGCVFIILNNWTTYPMYQKLIRKPLTPLQKVGIGHVLTILSMAISAVVEAKRLKTVENSHLMSVLWLVPALVINGIGEAFHFPANIAIFYGEFPESLRNTATSLTSVVMGISFYLSTALIDVIQRTTKWLPNDINHGRVDNVYLVLVIIGVSNFGYFLVCSWFYKYRNLKNDDHEQDLKDVTN

SEQ ID NO: 106605 - protein, 523 aa, Arabidopsis thaliana
  peptide (1)..(523): Ceres Seq. ID no. 13620050
MLVTLLGMSITYFGWVMNLIVFLIEEFNIKSIAAVQISNIVNGVVNMLPVVAAILADSFFGNIPVISASAFISLTGISLLTLIASLDYLRPRPCETGSILCQSPSKLQLGILYAALALVITGTAGTRFILASAGANQYKKPKEQGRFFNWYFFTLYGGAITGTTAIVYAQDNASWKLGFGLCVAANLISFIIFVAGKRLYEHDQPLGSPYTSLVRVLVAATMKRKAVISYKDEDYHHRELEKETKTYVAMPSKSFRFLNRAALKTEGDSNNNMWRLCSVQEVEDFKAVLRLVPLWTSVMFLSAPLAVQMSMTVLQAMVMDRKLGPHFKVSAGSMQVIALVSGCVFIILNNWTTYPMYQKLIRKPLTPLQKVGIGHVLTILSMAISAVVEAKRLKTVENSHLMSVLWLVPALVINGIGEAFHFPANIAIFYGEFPESLRNTATSLTSVVMGISFYLSTALIDVIQRTTKWLPNDINHGRVDNVYLVLVIIGVSNFGYFLVCSWFYKYRNLKNDDHEQDLKDVTN

SEQ ID NO: 106606 - protein, 516 aa, Arabidopsis thaliana
  peptide (1)..(516): Ceres Seq. ID no. 13620051
MSITYFGWVMNLIVFLIEEFNIKSIAAVQISNIVNGVVNMLPVVAAILADSFFGNIPVISASAFISLTGISLLTLIASLDYLRPRPCETGSILCQSPSKLQLGILYAALALVITGTAGTRFILASAGANQYKKPKEQGRFFNWYFFTLYGGAITGTTAIVYAQDNASWKLGFGLCVAANLISFIIFVAGKRLYEHDQPLGSPYTSLVRVLVAATMKRKAVISYKDEDYHHRELEKETKTYVAMPSKSFRFLNRAALKTEGDSNNNMWRLCSVQEVEDFKAVLRLVPLWTSVMFLSAPLAVQMSMTVLQAMVMDRKLGPHFKVSAGSMQVIALVSGCVFIILNNWTTYPMYQKLIRKPLTPLQKVGIGHVLTILSMAISAVVEAKRLKTVENSHLMSVLWLVPALVINGIGEAFHFPANIAIFYGEFPESLRNTATSLTSVVMGISFYLSTALIDVIQRTTKWLPNDINHGRVDNVYLVLVIIGVSNFGYFLVCSWFYKYRNLKNDDHEQDLKDVTN

SEQ ID NO: 106607 - DNA, 771 bp, Arabidopsis thaliana
  misc_feature (1)..(771): Ceres Seq. ID no. 13620055
  misc_feature (1)..(771): Ortholog of  Ceres SEQ ID NO 14307589 as cited in SEQ ID NO 20466
  misc_feature (1)..(771): Ortholog of  Ceres SEQ ID NO 13584238 as cited in SEQ ID NO 64216
  misc_feature (1)..(771): Ortholog of  Ceres SEQ ID NO 13661001 as cited in SEQ ID NO 67531
atgatgcaagaggagggaaaccgaaaaggtccatggacagaacaggaagacatacttctggtaaattttgttcacttatttggagatcgacgatgggattttatagcaaaagtatcaggtttgaacagaacaggaaagagttgcaggctaagatgggttaattacctacatcctggtctcaaacgtggcaagatgacgcctcaagaagagcgcctcgtccttgagcttcacgctaagtggggaaacaggtggtcgaaaatagcccgaaaattgccgggacgaacggataacgagataaagaactactggaggactcatatgaggaagaaagctcaagaaaagaagcgtcctgtttccccaacttcctcattttccaactgcagctcgtcatctgtgaccactaccaccaccaatactcaagatacatcgtgccactcgcgtaaatcttcaggggaagtgagcttttacgacactggaggttcccgatccactagagagatgaatcaagaaaacgaagacgtgtactcgttggatgatatatggagagagattgatcactcagcagtaaacataataaaaccggttaaagacatctactcagaacaaagccattgcttaagttacccaaatctagcttcaccatcatgggaaagctcattggattctatatggaacatggatgcagataaaagtaagatatcgtcttactttgcaaatgatcagtttcctttctgtttccaacacagtagatcaccatggtcgtcaggttaa

SEQ ID NO: 106608 - protein, 256 aa, Arabidopsis thaliana
  peptide (1)..(256): Ceres Seq. ID no. 13620056
MMQEEGNRKGPWTEQEDILLVNFVHLFGDRRWDFIAKVSGLNRTGKSCRLRWVNYLHPGLKRGKMTPQEERLVLELHAKWGNRWSKIARKLPGRTDNEIKNYWRTHMRKKAQEKKRPVSPTSSFSNCSSSSVTTTTTNTQDTSCHSRKSSGEVSFYDTGGSRSTREMNQENEDVYSLDDIWREIDHSAVNIIKPVKDIYSEQSHCLSYPNLASPSWESSLDSIWNMDADKSKISSYFANDQFPFCFQHSRSPWSSG

SEQ ID NO: 106609 - protein, 255 aa, Arabidopsis thaliana
  peptide (1)..(255): Ceres Seq. ID no. 13620057
MQEEGNRKGPWTEQEDILLVNFVHLFGDRRWDFIAKVSGLNRTGKSCRLRWVNYLHPGLKRGKMTPQEERLVLELHAKWGNRWSKIARKLPGRTDNEIKNYWRTHMRKKAQEKKRPVSPTSSFSNCSSSSVTTTTTNTQDTSCHSRKSSGEVSFYDTGGSRSTREMNQENEDVYSLDDIWREIDHSAVNIIKPVKDIYSEQSHCLSYPNLASPSWESSLDSIWNMDADKSKISSYFANDQFPFCFQHSRSPWSSG

SEQ ID NO: 106610 - protein, 192 aa, Arabidopsis thaliana
  peptide (1)..(192): Ceres Seq. ID no. 13620058
MTPQEERLVLELHAKWGNRWSKIARKLPGRTDNEIKNYWRTHMRKKAQEKKRPVSPTSSFSNCSSSSVTTTTTNTQDTSCHSRKSSGEVSFYDTGGSRSTREMNQENEDVYSLDDIWREIDHSAVNIIKPVKDIYSEQSHCLSYPNLASPSWESSLDSIWNMDADKSKISSYFANDQFPFCFQHSRSPWSSG

SEQ ID NO: 106611 - DNA, 1453 bp, Arabidopsis thaliana
  misc_feature (1)..(1453): Ceres Seq. ID no. 13620067
  misc_feature (1)..(1453): Ortholog of  Ceres SEQ ID NO 14308851 as cited in SEQ ID NO 55618
aaatttttgaaacccaatttcagggcacgattccacaacctctttcttttcttctagatctacgtaaattcatcagctagagattgaaaaatggcggacggtgaagatattcagccgctcgtttgcgataacgggactggaatggtcaaggctggttttgcaggtgatgatgctcctagagctgtattcccaagtatcgttggccgtccacgtcacacgggagtgatggttggaatgggacaaaaggatgcatacgtcggagacgaggcacagtcgaaacgtggtatcttgactctcaagtatccaattgagcatggtattgtcaacaactgggatgatatggagaagatttggcatcacactttctacaatgagctgcgtgttgccccggaagagcatccggttttgctaaccgaagcgccgcttaatccgaaggctaaccgtgagaagatgacacagatcatgtttgaaacattcaacactcctgctatgtatgttgccattcaagctgttctctccctctatgctagtggccgtactactggtattgttttggactctggagatggtgtgagccacacggtaccaatctacgagggttatgcacttccacacgcaatcctgcgtcttgatcttgcaggtcgtgacctaaccgaccacctcatgaaaatcctgacagagcgtggttactcattcaccacaactgctgagcgtgagattgtcagagacatgaaggagaagctctcgtacattgccttggactatgagcaagagcttgagacttccaaaaccagctcatctgtggagaagagcttcgagctgccagacggtcaagtgataaccatcggggcagagcgtttccggtgtcctgaagttctgttccagccatccatgatcggaatggaaaatccgggaattcatgaaactacttacaactcaatcatgaaatgtgatgtggatatcaggaaggatctttatggaaacattgtgcttagtggtggcaccacaatgtttggcgggattggtgataggatgagtaaagaaatcaccgcgttggcgccgagcagtatgaagatcaaagtggttgctccaccggaaaggaagtacagtgtttggatcggtggctctatcttggcttctctcagtactttccagcagatgtggattgcgaaagccgagtatgatgaatctggaccgtcgatcgtccacaggaagtgcttctgatcaaaagtcaccaagtaaaacaagagcggtaaaaattttgatatcagtttttcaccctgaagccatttgctataattactcacaacttctctatttgtgttcttttattcttgtccctcattgttcattttaatctctcttttgcaacaaagcaacttaaaaaaacagatcagtcattaacagaatgttattattatatgtatacatattagtatacacccattatctt

SEQ ID NO: 106612 - protein, 377 aa, Arabidopsis thaliana
  peptide (1)..(377): Ceres Seq. ID no. 13620068
MADGEDIQPLVCDNGTGMVKAGFAGDDAPRAVFPSIVGRPRHTGVMVGMGQKDAYVGDEAQSKRGILTLKYPIEHGIVNNWDDMEKIWHHTFYNELRVAPEEHPVLLTEAPLNPKANREKMTQIMFETFNTPAMYVAIQAVLSLYASGRTTGIVLDSGDGVSHTVPIYEGYALPHAILRLDLAGRDLTDHLMKILTERGYSFTTTAEREIVRDMKEKLSYIALDYEQELETSKTSSSVEKSFELPDGQVITIGAERFRCPEVLFQPSMIGMENPGIHETTYNSIMKCDVDIRKDLYGNIVLSGGTTMFGGIGDRMSKEITALAPSSMKIKVVAPPERKYSVWIGGSILASLSTFQQMWIAKAEYDESGPSIVHRKCF

SEQ ID NO: 106613 - protein, 360 aa, Arabidopsis thaliana
  peptide (1)..(360): Ceres Seq. ID no. 13620069
MVKAGFAGDDAPRAVFPSIVGRPRHTGVMVGMGQKDAYVGDEAQSKRGILTLKYPIEHGIVNNWDDMEKIWHHTFYNELRVAPEEHPVLLTEAPLNPKANREKMTQIMFETFNTPAMYVAIQAVLSLYASGRTTGIVLDSGDGVSHTVPIYEGYALPHAILRLDLAGRDLTDHLMKILTERGYSFTTTAEREIVRDMKEKLSYIALDYEQELETSKTSSSVEKSFELPDGQVITIGAERFRCPEVLFQPSMIGMENPGIHETTYNSIMKCDVDIRKDLYGNIVLSGGTTMFGGIGDRMSKEITALAPSSMKIKVVAPPERKYSVWIGGSILASLSTFQQMWIAKAEYDESGPSIVHRKCF

SEQ ID NO: 106614 - protein, 332 aa, Arabidopsis thaliana
  peptide (1)..(332): Ceres Seq. ID no. 13620070
MVGMGQKDAYVGDEAQSKRGILTLKYPIEHGIVNNWDDMEKIWHHTFYNELRVAPEEHPVLLTEAPLNPKANREKMTQIMFETFNTPAMYVAIQAVLSLYASGRTTGIVLDSGDGVSHTVPIYEGYALPHAILRLDLAGRDLTDHLMKILTERGYSFTTTAEREIVRDMKEKLSYIALDYEQELETSKTSSSVEKSFELPDGQVITIGAERFRCPEVLFQPSMIGMENPGIHETTYNSIMKCDVDIRKDLYGNIVLSGGTTMFGGIGDRMSKEITALAPSSMKIKVVAPPERKYSVWIGGSILASLSTFQQMWIAKAEYDESGPSIVHRKCF

SEQ ID NO: 106615 - DNA, 1628 bp, Arabidopsis thaliana
  misc_feature (1)..(1628): Ceres Seq. ID no. 13620071
  misc_feature (1)..(1628): Ortholog of  Ceres SEQ ID NO 13597843 as cited in SEQ ID NO 64850
  misc_feature (1)..(1628): Ortholog of  Ceres SEQ ID NO 13662880 as cited in SEQ ID NO 65422
  misc_feature (1)..(1628): Ortholog of  Ceres SEQ ID NO 12779098 as cited in SEQ ID NO 67698
  misc_feature (1)..(1628): Ortholog of  Ceres SEQ ID NO 13596180 as cited in SEQ ID NO 67941
  misc_feature (1)..(1628): Ortholog of  Ceres SEQ ID NO 13591190 as cited in SEQ ID NO 68044
  misc_feature (1)..(1628): Ortholog of  Ceres SEQ ID NO 13595961 as cited in SEQ ID NO 68223
  misc_feature (1)..(1628): Ortholog of  Ceres SEQ ID NO 13596089 as cited in SEQ ID NO 68373
attggcgtgcgattattcttgctttgaaaaatgaacagttgactatagaaaatggtctcatttggaagattgtgggattttagttattacttggatcacgtataggattcagagacaagagaagagaaaagaggagagaaatggagaaaagggtagagaagagaaggattgtgttagttccggttgctgcacaaggacatgtaaccccaatgatgcagcttgggaaagcccttcaatcaaagggcttcttaattactgttgctcagagacagttcaatcaaataggctcatcattgcaacactttcctggttttgactttgtcaccataccagaaagcttacctcagtctgaatctaagaaactaggaccagctgagtatcttatgaatctcaacaaaacaagcgaggcaagcttcaaggagtgtataagtcagttatcgatgcaacaaggcaatgatatagcatgtatcatctatgacaagcttatgtacttctgtgaagcagcagctaaggagtttaagattcctagtgttatcttcagcactagcagtgctacaattcaagtttgctactgtgttttaagtgaactcagtgccgagaagttcttgatcgacatgaaagatcctgaaaagcaagataaggtgttggaaggtttgcatcctttaaggtacaaagacctaccaacttcaggatttggaccattagagccacttttggagatgtgtagggaagtagttaacaaaagaacagcttccgctgttatcatcaacacggcgagctgtctagagagcttgtctctgtcatggctgcaacaagaacttggaattccagtgtatccattaggccctcttcacattacagcttcatcgccgggacctagtttactgcaagaggacatgagctgcattgaatggctgaacaagcagaaaccaaggtcagtcatatacataagcttgggaaccaaagctcacatggagaccaaggagatgttagagatggcctggggattgttgaatagcaaccaacctttcttatgggtcatccgacctggctctgttgcaggcttcgagtggatagagttattaccagaggaagtcattaagatggtaacagaaagaggatacatagcgaaatgggcaccgcagatagaagtacttggacatcctgcagtgggaggattctggagccactgtggatggaactcaacactcgagagtattgtggaaggagtcccaatgatttgcaggcctttacaaggcgaacaaaagttaaatgcgatgtatatagaaagtgtttggaaaatagggattcaacttgaaggtgaagtggaaagggaaggtgtagagagagctgtgaagaggttgatcatagatgaagaaggtgcagccatgagggagagggctcttgatttaaaagagaagctcaatgcctcggtaagaagtggaggctcctcatacaacgcactggatgagcttgtcaagttcttgaatacagagtgaagatgcttaacttcatatattacaaaagaacttcgattataagaaaactccaatagaaatgtttacattctttggaatattaatttttgtcttccgttaaagttcataattatcaaaatttaaaacttg

SEQ ID NO: 106616 - protein, 452 aa, Arabidopsis thaliana
  peptide (1)..(452): Ceres Seq. ID no. 13620072
MEKRVEKRRIVLVPVAAQGHVTPMMQLGKALQSKGFLITVAQRQFNQIGSSLQHFPGFDFVTIPESLPQSESKKLGPAEYLMNLNKTSEASFKECISQLSMQQGNDIACIIYDKLMYFCEAAAKEFKIPSVIFSTSSATIQVCYCVLSELSAEKFLIDMKDPEKQDKVLEGLHPLRYKDLPTSGFGPLEPLLEMCREVVNKRTASAVIINTASCLESLSLSWLQQELGIPVYPLGPLHITASSPGPSLLQEDMSCIEWLNKQKPRSVIYISLGTKAHMETKEMLEMAWGLLNSNQPFLWVIRPGSVAGFEWIELLPEEVIKMVTERGYIAKWAPQIEVLGHPAVGGFWSHCGWNSTLESIVEGVPMICRPLQGEQKLNAMYIESVWKIGIQLEGEVEREGVERAVKRLIIDEEGAAMRERALDLKEKLNASVRSGGSSYNALDELVKFLNTE

SEQ ID NO: 106617 - protein, 429 aa, Arabidopsis thaliana
  peptide (1)..(429): Ceres Seq. ID no. 13620073
MMQLGKALQSKGFLITVAQRQFNQIGSSLQHFPGFDFVTIPESLPQSESKKLGPAEYLMNLNKTSEASFKECISQLSMQQGNDIACIIYDKLMYFCEAAAKEFKIPSVIFSTSSATIQVCYCVLSELSAEKFLIDMKDPEKQDKVLEGLHPLRYKDLPTSGFGPLEPLLEMCREVVNKRTASAVIINTASCLESLSLSWLQQELGIPVYPLGPLHITASSPGPSLLQEDMSCIEWLNKQKPRSVIYISLGTKAHMETKEMLEMAWGLLNSNQPFLWVIRPGSVAGFEWIELLPEEVIKMVTERGYIAKWAPQIEVLGHPAVGGFWSHCGWNSTLESIVEGVPMICRPLQGEQKLNAMYIESVWKIGIQLEGEVEREGVERAVKRLIIDEEGAAMRERALDLKEKLNASVRSGGSSYNALDELVKFLNTE

SEQ ID NO: 106618 - protein, 428 aa, Arabidopsis thaliana
  peptide (1)..(428): Ceres Seq. ID no. 13620074
MQLGKALQSKGFLITVAQRQFNQIGSSLQHFPGFDFVTIPESLPQSESKKLGPAEYLMNLNKTSEASFKECISQLSMQQGNDIACIIYDKLMYFCEAAAKEFKIPSVIFSTSSATIQVCYCVLSELSAEKFLIDMKDPEKQDKVLEGLHPLRYKDLPTSGFGPLEPLLEMCREVVNKRTASAVIINTASCLESLSLSWLQQELGIPVYPLGPLHITASSPGPSLLQEDMSCIEWLNKQKPRSVIYISLGTKAHMETKEMLEMAWGLLNSNQPFLWVIRPGSVAGFEWIELLPEEVIKMVTERGYIAKWAPQIEVLGHPAVGGFWSHCGWNSTLESIVEGVPMICRPLQGEQKLNAMYIESVWKIGIQLEGEVEREGVERAVKRLIIDEEGAAMRERALDLKEKLNASVRSGGSSYNALDELVKFLNTE

SEQ ID NO: 106619 - DNA, 1681 bp, Arabidopsis thaliana
  misc_feature (1)..(1681): Ceres Seq. ID no. 13620090
  misc_feature (1)..(1681): Ortholog of  Ceres SEQ ID NO 13594380 as cited in SEQ ID NO 58039
  misc_feature (1)..(1681): Ortholog of  Ceres SEQ ID NO 13597407 as cited in SEQ ID NO 64106
ctcattcaaattttattacaaagagggagaccagaatattcctccttttgtcttcaagattttaaagccatggccggtggagctcttaccgatgaaggaggcctaaagagagctcatctctatgaacatcggatcacttcttacttcatcttcgcttgcatcgtcggatccatgggaggctctcttttcggctatgatcttggagtctctggtggtgttacatcaatggacgatttcttgaaagagttcttcccagggatctacaaaagaaagcaaatgcatctaaacgaaacagattactgcaaatacgacaatcaaatcctcacactcttcacttcttctctctacttcgccggtttaatctcaactttcggagcttcttacgtcaccagaatctacggtaggagaggaagcatcctcgttggctctgtcagcttcttcctcggaggagtgattaacgctgcagccaaaaacatcctcatgttaatccttggtcgaatcttcctcggcataggcattggattcggaaaccaggcggttccgctatacctctcggagatggctccagcgaagattagaggaactgtgaatcagcttttccagctaacaacttgcattggaattctagttgctaatttgataaactacaaaacagagcaaatccatccatggggatggagactctctctcggtctcgccaccgtcccagctatactcatgttcctcggtggactcgttttgcctgaaacacccaatagtcttgtcgagcaagggaagctcgagaaggctaaagccgtgctgatcaaagtacgtggcacaaacaatatagaagctgagtttcaggatcttgtcgaagccagtgacgctgctagagccgtgaagaatccgtttcgcaatcttcttgctagaagaaacagaccgcagctagtgattggagccattgggcttcctgcgtttcagcaactaaccggaatgaattcgatcctgttttatgctccggttatgtttcagagcttagggtttggtggatctgcgtcgcttatctcgtctaccattacaaatgctgcgcttgttgtcgcggcgatcatgtctatgtattcagctgataaatttggaagaaggtttcttcttcttgaagctagcgtggagatgttctgttacatggttgtagtaggagtaacactagccttgaagtttggggaaggtaaggagctaccaaaatcgctcggtctgattcttgtggtccttatctgtctatttgtattggcgtatggtcgatcttggggtccaatgggatggttagttccgagcgagcttttccctctagagactcgatcagccggtcagagcgttgtggtgtgcgtgaaccttttcttcacggctctaatcgcgcagtgtttcctggtgtcgctgtgccatctcaagtacggaatattccttttattcgccggacttatattggggatgggaagcttcgtttactttctgttgccggagacgaaacaggttccgattgaagaggtttatcttctttggagacagcattggttatggaagaaatatgtcgaagatgttgatgaataagatcaatcgataaatgaataaacattttcttgtttgtcaaaaaataagcattttttgtcacaaaaatacagaatgaataaaacattttaaattcgtt

SEQ ID NO: 106620 - protein, 527 aa, Arabidopsis thaliana
  peptide (1)..(527): Ceres Seq. ID no. 13620091
LIQILLQRGRPEYSSFCLQDFKAMAGGALTDEGGLKRAHLYEHRITSYFIFACIVGSMGGSLFGYDLGVSGGVTSMDDFLKEFFPGIYKRKQMHLNETDYCKYDNQILTLFTSSLYFAGLISTFGASYVTRIYGRRGSILVGSVSFFLGGVINAAAKNILMLILGRIFLGIGIGFGNQAVPLYLSEMAPAKIRGTVNQLFQLTTCIGILVANLINYKTEQIHPWGWRLSLGLATVPAILMFLGGLVLPETPNSLVEQGKLEKAKAVLIKVRGTNNIEAEFQDLVEASDAARAVKNPFRNLLARRNRPQLVIGAIGLPAFQQLTGMNSILFYAPVMFQSLGFGGSASLISSTITNAALVVAAIMSMYSADKFGRRFLLLEASVEMFCYMVVVGVTLALKFGEGKELPKSLGLILVVLICLFVLAYGRSWGPMGWLVPSELFPLETRSAGQSVVVCVNLFFTALIAQCFLVSLCHLKYGIFLLFAGLILGMGSFVYFLLPETKQVPIEEVYLLWRQHWLWKKYVEDVDE

SEQ ID NO: 106621 - protein, 504 aa, Arabidopsis thaliana
  peptide (1)..(504): Ceres Seq. ID no. 13620092
MAGGALTDEGGLKRAHLYEHRITSYFIFACIVGSMGGSLFGYDLGVSGGVTSMDDFLKEFFPGIYKRKQMHLNETDYCKYDNQILTLFTSSLYFAGLISTFGASYVTRIYGRRGSILVGSVSFFLGGVINAAAKNILMLILGRIFLGIGIGFGNQAVPLYLSEMAPAKIRGTVNQLFQLTTCIGILVANLINYKTEQIHPWGWRLSLGLATVPAILMFLGGLVLPETPNSLVEQGKLEKAKAVLIKVRGTNNIEAEFQDLVEASDAARAVKNPFRNLLARRNRPQLVIGAIGLPAFQQLTGMNSILFYAPVMFQSLGFGGSASLISSTITNAALVVAAIMSMYSADKFGRRFLLLEASVEMFCYMVVVGVTLALKFGEGKELPKSLGLILVVLICLFVLAYGRSWGPMGWLVPSELFPLETRSAGQSVVVCVNLFFTALIAQCFLVSLCHLKYGIFLLFAGLILGMGSFVYFLLPETKQVPIEEVYLLWRQHWLWKKYVEDVDE

SEQ ID NO: 106622 - protein, 470 aa, Arabidopsis thaliana
  peptide (1)..(470): Ceres Seq. ID no. 13620093
MGGSLFGYDLGVSGGVTSMDDFLKEFFPGIYKRKQMHLNETDYCKYDNQILTLFTSSLYFAGLISTFGASYVTRIYGRRGSILVGSVSFFLGGVINAAAKNILMLILGRIFLGIGIGFGNQAVPLYLSEMAPAKIRGTVNQLFQLTTCIGILVANLINYKTEQIHPWGWRLSLGLATVPAILMFLGGLVLPETPNSLVEQGKLEKAKAVLIKVRGTNNIEAEFQDLVEASDAARAVKNPFRNLLARRNRPQLVIGAIGLPAFQQLTGMNSILFYAPVMFQSLGFGGSASLISSTITNAALVVAAIMSMYSADKFGRRFLLLEASVEMFCYMVVVGVTLALKFGEGKELPKSLGLILVVLICLFVLAYGRSWGPMGWLVPSELFPLETRSAGQSVVVCVNLFFTALIAQCFLVSLCHLKYGIFLLFAGLILGMGSFVYFLLPETKQVPIEEVYLLWRQHWLWKKYVEDVDE

SEQ ID NO: 106623 - DNA, 1404 bp, Arabidopsis thaliana
  misc_feature (1)..(1404): Ceres Seq. ID no. 13620098
  misc_feature (1)..(1404): Ortholog of  Ceres SEQ ID NO 13647016 as cited in SEQ ID NO 20325
  misc_feature (1)..(1404): Ortholog of  Ceres SEQ ID NO 15179824 as cited in SEQ ID NO 66250
  misc_feature (1)..(1404): Ortholog of  Ceres SEQ ID NO 13657872 as cited in SEQ ID NO 66357
ctctcttttctcctcaccttctctctctcaacatctctctctttctctgtcttctctctgtctcaacgagaatatgactaaccagaatgtcatcgtttccgacaggaaacccatcttgggtttgaaaaccatcactgtctctgtctctaactctcctctgttctctaattcctttcccacttactttaacttccctcgtcgaaagctcttgaaacttcttgaagcagccgacaaaaacaacttagttgttgctccaaagattacgtctatgatcgattccatgcgtgattcttcccctacacgtctcagatcctcttcctatgactctgtttcagataacgacgacaaaacatcttggatcgttcgttttccttcggctttaaatatgtttgatgagattgtgaatgctgcgaaagggaaacagattgtcatgtttcttgattacgacggaactctttctcccatagttgaagatcccgacaaagctttcataacccatgagatgagagaagtcgtaaaagacgtggcttcgaatttcccgactgctattgtcaccgggagatccattgagaaggttcgtagttttgtccaagtaaacgagatttactacgccggaagccacggcatggacattgaaggtccgaccaacgaaaatagtaacggccagagtaatgaaagagtgctattccaacctgctcgtgaatttttaccgatgatcgagaaggtggttaatattttagaggaaaaaacaaaatggatccctggggctatggtggagaacaacaagttttgtctgtccgtacattttcgacgtgttgatgagaagagatggcctgcattagctgaagtagtaaaatcagttcttattgattatccaaagctgaaactaacccaaggtagaaaggtacttgaaatccgccccacaatcaaatgggacaagggccaggcactcaattttttactaaaatcattaggatatgaaaattcggatgatgttgtgccggtgtatatcggggatgaccgtactgacgaagatgcgtttaaggttttacgtgaaaggggacaaggttttgggattcttgtctcaaaagtaccaaaggacaccaatgcctcttattctcttcaagacccttctcaggttaacaagtttctggaacgtttagtagaatggaagaggaagacagtgggagaagagtgaaagacatgcaacataattacacaaataacacctgagttttgagtagattattaatttatataaacaccctttttaaattagtagatgcctggagggtgtttcggccagaagtttttcttttaatctacatcgaaccgaaaattgtaaatttcgtgtaacgatttagaaatggaaaaatatattaataatttactcattcttatttg

SEQ ID NO: 106624 - protein, 398 aa, Arabidopsis thaliana
  peptide (1)..(398): Ceres Seq. ID no. 13620099
SLFSSPSLSQHLSLSLSSLCLNENMTNQNVIVSDRKPILGLKTITVSVSNSPLFSNSFPTYFNFPRRKLLKLLEAADKNNLVVAPKITSMIDSMRDSSPTRLRSSSYDSVSDNDDKTSWIVRFPSALNMFDEIVNAAKGKQIVMFLDYDGTLSPIVEDPDKAFITHEMREVVKDVASNFPTAIVTGRSIEKVRSFVQVNEIYYAGSHGMDIEGPTNENSNGQSNERVLFQPAREFLPMIEKVVNILEEKTKWIPGAMVENNKFCLSVHFRRVDEKRWPALAEVVKSVLIDYPKLKLTQGRKVLEIRPTIKWDKGQALNFLLKSLGYENSDDVVPVYIGDDRTDEDAFKVLRERGQGFGILVSKVPKDTNASYSLQDPSQVNKFLERLVEWKRKTVGEE

SEQ ID NO: 106625 - protein, 374 aa, Arabidopsis thaliana
  peptide (1)..(374): Ceres Seq. ID no. 13620100
MTNQNVIVSDRKPILGLKTITVSVSNSPLFSNSFPTYFNFPRRKLLKLLEAADKNNLVVAPKITSMIDSMRDSSPTRLRSSSYDSVSDNDDKTSWIVRFPSALNMFDEIVNAAKGKQIVMFLDYDGTLSPIVEDPDKAFITHEMREVVKDVASNFPTAIVTGRSIEKVRSFVQVNEIYYAGSHGMDIEGPTNENSNGQSNERVLFQPAREFLPMIEKVVNILEEKTKWIPGAMVENNKFCLSVHFRRVDEKRWPALAEVVKSVLIDYPKLKLTQGRKVLEIRPTIKWDKGQALNFLLKSLGYENSDDVVPVYIGDDRTDEDAFKVLRERGQGFGILVSKVPKDTNASYSLQDPSQVNKFLERLVEWKRKTVGEE

SEQ ID NO: 106626 - protein, 309 aa, Arabidopsis thaliana
  peptide (1)..(309): Ceres Seq. ID no. 13620101
MIDSMRDSSPTRLRSSSYDSVSDNDDKTSWIVRFPSALNMFDEIVNAAKGKQIVMFLDYDGTLSPIVEDPDKAFITHEMREVVKDVASNFPTAIVTGRSIEKVRSFVQVNEIYYAGSHGMDIEGPTNENSNGQSNERVLFQPAREFLPMIEKVVNILEEKTKWIPGAMVENNKFCLSVHFRRVDEKRWPALAEVVKSVLIDYPKLKLTQGRKVLEIRPTIKWDKGQALNFLLKSLGYENSDDVVPVYIGDDRTDEDAFKVLRERGQGFGILVSKVPKDTNASYSLQDPSQVNKFLERLVEWKRKTVGEE

SEQ ID NO: 106627 - DNA, 2387 bp, Arabidopsis thaliana
  misc_feature (1)..(2387): Ceres Seq. ID no. 13620108
  misc_feature (1)..(2387): Ortholog of  Ceres SEQ ID NO 13663839 as cited in SEQ ID NO 60834
  misc_feature (1)..(2387): Ortholog of  Ceres SEQ ID NO 14313284 as cited in SEQ ID NO 67146
  misc_feature (1)..(2387): Ortholog of  Ceres SEQ ID NO 14308925 as cited in SEQ ID NO 0
gcatcagtacttctctctgctctcaagataattttgttctctcaatttcattcttaaaccctagttcttcgattttttccgatctacgacaatggcggacgctgaaacctttgctttccaagctgagatcaaccagttgctttccctcatcatcaataccttttactctaacaaggagatcttcctccgtgaactcatcagtaactcttctgatgctttggacaagattagattcgagtccttgacggacaagagcaagctcgatggtcagcctgagctcttcattcacatcattcccgacaagactaacaacaccttgaccattattgatagtggtattggcatgaccaaggctgatttggtcaacaaccttggaacaattgcaagatctggaaccaaggaattcatggaagcactggctgctggagctgatgttagcatgattggtcagtttggtgttggtttctactctgcttacttggttgctgacaaggttgttgttactaccaagcacaatgacgatgagcagtacgtgtgggagtctcaggccgggggatctttcactgtgaccagagacacctctggggagactcttggtagaggaacaaagatggttctttacctcaaggaagaccagttggagtaccttgaggagcgaaggcttaaggatttggtgaagaagcactctgagttcatcagctacccaatctctctctggattgagaagaccattgagaaggagatctctgatgatgaagaggaggaagagaagaaggatgaggaaggcaaggttgaggaagttgatgaggagaaagaaaaggaggagaagaaaaagaagaagattaaggaggtttctcatgagtgggatttggtgaacaagcagaagcctatctggatgaggaagccagaggagatcaacaaggaggagtacgctgctttctacaagagtctcagcaatgattgggaggagcatttggctgtgaagcatttctctgttgaaggacagcttgagttcaaagctatcctctttgttcccaagagagctccttttgatctctttgacactaagaagaagcccaacaacatcaagctctatgtccgtcgtgtcttcatcatggacaactgtgaagacatcatccctgagtacctcggatttgtgaaaggtattgtcgactctgaagatcttcctctcaacatctcgagagagacattgcagcagaacaagatcctcaaggtcatccgcaagaaccttgtgaagaagtgccttgagctcttctttgagattgctgagaacaaggaagactacaacaagttctacgaggctttctctaagaacctgaagctcggtatccatgaggactcccaaaacagaaccaagattgctgagttgctccgttaccactcaaccaagagcggtgatgaattgactagtctcaaggactacgtgacaaggatgaaggaaggtcagaacgatatcttctacatcactggtgagagcaagaaggctgttgagaactctccattccttgagaagctcaagaagaaaggtattgaagttctctacatggttgatgcgattgatgagtacgctattggtcagcttaaggaattcgagggaaagaaacttgtttctgcaaccaaggaaggtctgaaactggatgagaccgaagatgaaaagaagaagaaagaagagctcaaggagaagtttgaaggactctgcaaagtgatcaaagacgttttgggtgacaaggtcgagaaggttattgtttctgaccgtgttgtggactcaccgtgctgtcttgtaaccggcgaatacggctggactgcaaacatggagaggatcatgaaagctcaagccttgagagacagcagcatggctggttacatgtcgagtaagaagacaatggagattaatccagagaactccatcatggatgagttgagaaagcgagctgacgcagacaagaacgacaagtctgtgaaggaccttgtgcttctcctctttgagaccgctcttctcacttctggtttcagccttgatgagccaaacactttcggaagcaggatccacaggatgctgaagcttggactgagcattgatgacgatgatgctgttgaagccgatgctgagatgcctccccttgaagacgatgctgatgccgaaggtagcaagatggaggaagtcgactaatttatcacacaaaagtcgactaaattattagcggtgttataagactatggttttctttttttcttttcgttaaaacttatgttattttggtgattatcttcacgaattttttctatggttttattgttgtgaagatatttctctgaactcggttttatgacaaagattctattatgctcaagagactgattcttac

SEQ ID NO: 106628 - protein, 699 aa, Arabidopsis thaliana
  peptide (1)..(699): Ceres Seq. ID no. 13620109
MADAETFAFQAEINQLLSLIINTFYSNKEIFLRELISNSSDALDKIRFESLTDKSKLDGQPELFIHIIPDKTNNTLTIIDSGIGMTKADLVNNLGTIARSGTKEFMEALAAGADVSMIGQFGVGFYSAYLVADKVVVTTKHNDDEQYVWESQAGGSFTVTRDTSGETLGRGTKMVLYLKEDQLEYLEERRLKDLVKKHSEFISYPISLWIEKTIEKEISDDEEEEEKKDEEGKVEEVDEEKEKEEKKKKKIKEVSHEWDLVNKQKPIWMRKPEEINKEEYAAFYKSLSNDWEEHLAVKHFSVEGQLEFKAILFVPKRAPFDLFDTKKKPNNIKLYVRRVFIMDNCEDIIPEYLGFVKGIVDSEDLPLNISRETLQQNKILKVIRKNLVKKCLELFFEIAENKEDYNKFYEAFSKNLKLGIHEDSQNRTKIAELLRYHSTKSGDELTSLKDYVTRMKEGQNDIFYITGESKKAVENSPFLEKLKKKGIEVLYMVDAIDEYAIGQLKEFEGKKLVSATKEGLKLDETEDEKKKKEELKEKFEGLCKVIKDVLGDKVEKVIVSDRVVDSPCCLVTGEYGWTANMERIMKAQALRDSSMAGYMSSKKTMEINPENSIMDELRKRADADKNDKSVKDLVLLLFETALLTSGFSLDEPNTFGSRIHRMLKLGLSIDDDDAVEADAEMPPLEDDADAEGSKMEEVD

SEQ ID NO: 106629 - protein, 615 aa, Arabidopsis thaliana
  peptide (1)..(615): Ceres Seq. ID no. 13620110
MTKADLVNNLGTIARSGTKEFMEALAAGADVSMIGQFGVGFYSAYLVADKVVVTTKHNDDEQYVWESQAGGSFTVTRDTSGETLGRGTKMVLYLKEDQLEYLEERRLKDLVKKHSEFISYPISLWIEKTIEKEISDDEEEEEKKDEEGKVEEVDEEKEKEEKKKKKIKEVSHEWDLVNKQKPIWMRKPEEINKEEYAAFYKSLSNDWEEHLAVKHFSVEGQLEFKAILFVPKRAPFDLFDTKKKPNNIKLYVRRVFIMDNCEDIIPEYLGFVKGIVDSEDLPLNISRETLQQNKILKVIRKNLVKKCLELFFEIAENKEDYNKFYEAFSKNLKLGIHEDSQNRTKIAELLRYHSTKSGDELTSLKDYVTRMKEGQNDIFYITGESKKAVENSPFLEKLKKKGIEVLYMVDAIDEYAIGQLKEFEGKKLVSATKEGLKLDETEDEKKKKEELKEKFEGLCKVIKDVLGDKVEKVIVSDRVVDSPCCLVTGEYGWTANMERIMKAQALRDSSMAGYMSSKKTMEINPENSIMDELRKRADADKNDKSVKDLVLLLFETALLTSGFSLDEPNTFGSRIHRMLKLGLSIDDDDAVEADAEMPPLEDDADAEGSKMEEVD

SEQ ID NO: 106630 - protein, 594 aa, Arabidopsis thaliana
  peptide (1)..(594): Ceres Seq. ID no. 13620111
MEALAAGADVSMIGQFGVGFYSAYLVADKVVVTTKHNDDEQYVWESQAGGSFTVTRDTSGETLGRGTKMVLYLKEDQLEYLEERRLKDLVKKHSEFISYPISLWIEKTIEKEISDDEEEEEKKDEEGKVEEVDEEKEKEEKKKKKIKEVSHEWDLVNKQKPIWMRKPEEINKEEYAAFYKSLSNDWEEHLAVKHFSVEGQLEFKAILFVPKRAPFDLFDTKKKPNNIKLYVRRVFIMDNCEDIIPEYLGFVKGIVDSEDLPLNISRETLQQNKILKVIRKNLVKKCLELFFEIAENKEDYNKFYEAFSKNLKLGIHEDSQNRTKIAELLRYHSTKSGDELTSLKDYVTRMKEGQNDIFYITGESKKAVENSPFLEKLKKKGIEVLYMVDAIDEYAIGQLKEFEGKKLVSATKEGLKLDETEDEKKKKEELKEKFEGLCKVIKDVLGDKVEKVIVSDRVVDSPCCLVTGEYGWTANMERIMKAQALRDSSMAGYMSSKKTMEINPENSIMDELRKRADADKNDKSVKDLVLLLFETALLTSGFSLDEPNTFGSRIHRMLKLGLSIDDDDAVEADAEMPPLEDDADAEGSKMEEVD

SEQ ID NO: 106631 - DNA, 1112 bp, Arabidopsis thaliana
  misc_feature (1)..(1112): Ceres Seq. ID no. 13620120
  misc_feature (1)..(1112): Ortholog of  Ceres SEQ ID NO 14301482 as cited in SEQ ID NO 63355
aaagagagcgataatcccaaggaagaaaccaaagaaaaaaaatggtgaagatcaaatcgaacttgaagcagcttaagctctccgttccagctcaagaatccccaatctcttccttcctgactgcgagtggaacatttcacgatggagattttcttctgaatcaaaaggggctaaggttgacgtcagatgagaagcaatcaaggcaatctgatagcaaggagcttgatttcgaaattactgctgaagacttagagactgtcaaagtcatcggaaaaggcagtggtggtgttgttcaattagttcgtcataaatgggttggcaaattctttgctatgaaggtcatacagatgaatatacaagaagaaatccgtaagcaaattgttcaggagcttaaaataaaccaagcatcatcacaatgtccacatgtagtagtttgctaccattctttctatcacaatggagccttttcgcttgtgcttgaatacatggaccgtggatctcttgcggatgtgattagacaagtcaagactattcttgaaccttaccttgctgttgtctgtaaacaggttttgctaggtcttgtgtacctacacaacgaaagacatgtcatacacagagacattaagccatcaaaccttcttgtaaaccataaaggggaagtgaaaatctcagattttggtgtaagtgcaagtcttgctagctccatgggacagagggacacatttgttggaacctacaactatatgtcgcctgagaggattagtggaagcacatatgactacagcagtgacatttggagtttggggatgtcagtgttagaatgtgcaataggaagatttccttatttagaatctgaagatcagcaaaacccgccaagcttttatgaactcttggcagcaatagtagagaatccaccaccaactgctccttctgatcaattctcacctgaattctgctcctttgtatcagcctgcatacaaaaagatcctccagcaagagcatcatctttggacctcttgagtcatccattcataaaaaagtttgaggacaaggatatcgatctcgggatacttgttggcactctggaaccacctgttaactaccttagataa

SEQ ID NO: 106632 - protein, 356 aa, Arabidopsis thaliana
  peptide (1)..(356): Ceres Seq. ID no. 13620121
MVKIKSNLKQLKLSVPAQESPISSFLTASGTFHDGDFLLNQKGLRLTSDEKQSRQSDSKELDFEITAEDLETVKVIGKGSGGVVQLVRHKWVGKFFAMKVIQMNIQEEIRKQIVQELKINQASSQCPHVVVCYHSFYHNGAFSLVLEYMDRGSLADVIRQVKTILEPYLAVVCKQVLLGLVYLHNERHVIHRDIKPSNLLVNHKGEVKISDFGVSASLASSMGQRDTFVGTYNYMSPERISGSTYDYSSDIWSLGMSVLECAIGRFPYLESEDQQNPPSFYELLAAIVENPPPTAPSDQFSPEFCSFVSACIQKDPPARASSLDLLSHPFIKKFEDKDIDLGILVGTLEPPVNYLR

SEQ ID NO: 106633 - protein, 259 aa, Arabidopsis thaliana
  peptide (1)..(259): Ceres Seq. ID no. 13620122
MKVIQMNIQEEIRKQIVQELKINQASSQCPHVVVCYHSFYHNGAFSLVLEYMDRGSLADVIRQVKTILEPYLAVVCKQVLLGLVYLHNERHVIHRDIKPSNLLVNHKGEVKISDFGVSASLASSMGQRDTFVGTYNYMSPERISGSTYDYSSDIWSLGMSVLECAIGRFPYLESEDQQNPPSFYELLAAIVENPPPTAPSDQFSPEFCSFVSACIQKDPPARASSLDLLSHPFIKKFEDKDIDLGILVGTLEPPVNYLR

SEQ ID NO: 106634 - protein, 254 aa, Arabidopsis thaliana
  peptide (1)..(254): Ceres Seq. ID no. 13620123
MNIQEEIRKQIVQELKINQASSQCPHVVVCYHSFYHNGAFSLVLEYMDRGSLADVIRQVKTILEPYLAVVCKQVLLGLVYLHNERHVIHRDIKPSNLLVNHKGEVKISDFGVSASLASSMGQRDTFVGTYNYMSPERISGSTYDYSSDIWSLGMSVLECAIGRFPYLESEDQQNPPSFYELLAAIVENPPPTAPSDQFSPEFCSFVSACIQKDPPARASSLDLLSHPFIKKFEDKDIDLGILVGTLEPPVNYLR

SEQ ID NO: 106635 - DNA, 1265 bp, Arabidopsis thaliana
  misc_feature (1)..(1265): Ceres Seq. ID no. 13620124
  misc_feature (1)..(1265): Ortholog of  Ceres SEQ ID NO 13594269 as cited in SEQ ID NO 57656
  misc_feature (1)..(1265): Ortholog of  Ceres SEQ ID NO 12613979 as cited in SEQ ID NO 68579
ggtgacaagagcagagagagtcgccatggacgcagcagattgctatctcgaaggaaacgccgacgccgtagaattctgtcctcacgagtcttacgcaaacttgctcgcagcttcgacttatacacttcaagaaggagattgtccctctcgatccgggtcagtgtatctatttgatgtcggagatgttgaagatgttggcttgaatcttatccagaaaattgacactgctggagttttcgatatccggtggagtcgtggtggcgatggaggagacgtggcgcttgctcaggctgatgctgatggatgcttgatagtttacaagatagatgagactgaaagtaaaggtactctgagagaagtctccgggaaaagaatcagctcatcaatgtgtctttgtttggattgggatccatcatcaacatcaatcgttgttggtttatcagatggctctgcttcagttgtttcattcacggattctaatctagaaacagttcaagaatggaaagggcatgactttgagctttggacggcgtcattcgatctcaacaatcctaatttggtctatactggatcagatgattgcaagttcagctgttgggatatcagagatagtccggctgacaatcgggtttttcagaattccaaagttcatacaatgggtgtttgctgtatttcatcaaacccaagtgatccttactctatattcaccggaagttatgatgaaaccttaagagtttgggacacgaggtctgtttcgagacctctgaacgaaacatcagtgtctttaggtggtggagtgtggagaatcaagcaccatccttctctgagcggtgttgtattggcggcttgtatgcataacggttttgctttagcgaaggttagtgatgggaaaggtgaagtgttggagagttataacaagcatcattctcttgcttatggagcagattggtacagagggaaagatcagaagcaaagcgttgtggcaacttgttcgttttatgatcggcttcttcgggtatggatgccgataactgatttttccacacgatgttcctaaacttaagaacacagctgttaaggtagattcatctgtgctccgacttgaattaggaaatttctttgagctctgatttcgaagggtcatgttgttgtacttcgttttccttatttcccggaatatttatttggttgaagttgtttcaagaaccatctgatatggttgaaacaacttgaaccccatacttaatgaaagtgaatttaataac

SEQ ID NO: 106636 - protein, 351 aa, Arabidopsis thaliana
  peptide (1)..(351): Ceres Seq. ID no. 13620125
VTRAERVAMDAADCYLEGNADAVEFCPHESYANLLAASTYTLQEGDCPSRSGSVYLFDVGDVEDVGLNLIQKIDTAGVFDIRWSRGGDGGDVALAQADADGCLIVYKIDETESKGTLREVSGKRISSSMCLCLDWDPSSTSIVVGLSDGSASVVSFTDSNLETVQEWKGHDFELWTASFDLNNPNLVYTGSDDCKFSCWDIRDSPADNRVFQNSKVHTMGVCCISSNPSDPYSIFTGSYDETLRVWDTRSVSRPLNETSVSLGGGVWRIKHHPSLSGVVLAACMHNGFALAKVSDGKGEVLESYNKHHSLAYGADWYRGKDQKQSVVATCSFYDRLLRVWMPITDFSTRCS

SEQ ID NO: 106637 - protein, 343 aa, Arabidopsis thaliana
  peptide (1)..(343): Ceres Seq. ID no. 13620126
MDAADCYLEGNADAVEFCPHESYANLLAASTYTLQEGDCPSRSGSVYLFDVGDVEDVGLNLIQKIDTAGVFDIRWSRGGDGGDVALAQADADGCLIVYKIDETESKGTLREVSGKRISSSMCLCLDWDPSSTSIVVGLSDGSASVVSFTDSNLETVQEWKGHDFELWTASFDLNNPNLVYTGSDDCKFSCWDIRDSPADNRVFQNSKVHTMGVCCISSNPSDPYSIFTGSYDETLRVWDTRSVSRPLNETSVSLGGGVWRIKHHPSLSGVVLAACMHNGFALAKVSDGKGEVLESYNKHHSLAYGADWYRGKDQKQSVVATCSFYDRLLRVWMPITDFSTRCS

SEQ ID NO: 106638 - protein, 223 aa, Arabidopsis thaliana
  peptide (1)..(223): Ceres Seq. ID no. 13620127
MCLCLDWDPSSTSIVVGLSDGSASVVSFTDSNLETVQEWKGHDFELWTASFDLNNPNLVYTGSDDCKFSCWDIRDSPADNRVFQNSKVHTMGVCCISSNPSDPYSIFTGSYDETLRVWDTRSVSRPLNETSVSLGGGVWRIKHHPSLSGVVLAACMHNGFALAKVSDGKGEVLESYNKHHSLAYGADWYRGKDQKQSVVATCSFYDRLLRVWMPITDFSTRCS

SEQ ID NO: 106639 - DNA, 1184 bp, Arabidopsis thaliana
  misc_feature (1)..(1184): Ceres Seq. ID no. 13620131
  misc_feature (1)..(1184): Ortholog of  Ceres SEQ ID NO 14314628 as cited in SEQ ID NO 56888
attcttcaaagctcccactaaaacctattaagagagaaagatatatacagagagagatcatggacggtaggggaggttgttgcatagccagatatggtggttacggtggtcgctacggtctctccaaagcagatcgaatcatgcttcgttttcgtcccattgctcctaaaccggccagcgacggtggaagtgtctctctcaccgggaagagcggctccaccacaactacaagtggtggaagctccgatctctcaggtaaatctgggagaggaaagagaaagtatcaaaaagattgttccggtgggaactcccgaaggtgcaataagaagaagagagatctaagtggagacactgctactaccacggcggttacattgtctcttttaccagagacgcctgagaaacgagtttttccagatctgaatgcttttccggtggagaagcagaagcgaaacggtcctttatggctgagtttcaacggcggtggtgagattttaacgccgtacaaaacggcggagatatcacgaaggacggtggtggtttcgtcgtgtgtgacggttgagcgtgtgactgacgcttggatcgacggttatggattaggggagacaaatcaggagaggaagatgaatctagtggaagacacgtgtcctggttttatatcggacggtgtagggagagtcacgtggaccaatgaggcgtataagaagatggctagagaagatattaatattccgatggaggaaggtgtaccggaggatattagttacgataattttcacgtgaacgtacggttagtgatgaaggagaggccgatgctaacgtacccagctttcacatgcagagtgagattacagtacacgtgtcaagatcgagaaagaggatccgtcacggtgccttgtgacgtgtggagaatggacggcggtggttttgcgtggaggcttgacgttaaggcagctttgtgtctgtgacgttctttcattcgccaccgttggatttacaatggtgaaaatgatgaatggtcccgatcgtatcgtatcacacatggcccttcgtagaactaaaaatatagcaagtgataaactttggttatttaattttcaccttgaacatatgtttctgtgttttattttttagtttgctttcttctttagttagtattttgtttataaaatgctgttttctct

SEQ ID NO: 106640 - protein, 321 aa, Arabidopsis thaliana
  peptide (1)..(321): Ceres Seq. ID no. 13620132
SSKLPLKPIKRERYIQREIMDGRGGCCIARYGGYGGRYGLSKADRIMLRFRPIAPKPASDGGSVSLTGKSGSTTTTSGGSSDLSGKSGRGKRKYQKDCSGGNSRRCNKKKRDLSGDTATTTAVTLSLLPETPEKRVFPDLNAFPVEKQKRNGPLWLSFNGGGEILTPYKTAEISRRTVVVSSCVTVERVTDAWIDGYGLGETNQERKMNLVEDTCPGFISDGVGRVTWTNEAYKKMAREDINIPMEEGVPEDISYDNFHVNVRLVMKERPMLTYPAFTCRVRLQYTCQDRERGSVTVPCDVWRMDGGGFAWRLDVKAALCL

SEQ ID NO: 106641 - protein, 302 aa, Arabidopsis thaliana
  peptide (1)..(302): Ceres Seq. ID no. 13620133
MDGRGGCCIARYGGYGGRYGLSKADRIMLRFRPIAPKPASDGGSVSLTGKSGSTTTTSGGSSDLSGKSGRGKRKYQKDCSGGNSRRCNKKKRDLSGDTATTTAVTLSLLPETPEKRVFPDLNAFPVEKQKRNGPLWLSFNGGGEILTPYKTAEISRRTVVVSSCVTVERVTDAWIDGYGLGETNQERKMNLVEDTCPGFISDGVGRVTWTNEAYKKMAREDINIPMEEGVPEDISYDNFHVNVRLVMKERPMLTYPAFTCRVRLQYTCQDRERGSVTVPCDVWRMDGGGFAWRLDVKAALCL

SEQ ID NO: 106642 - protein, 275 aa, Arabidopsis thaliana
  peptide (1)..(275): Ceres Seq. ID no. 13620134
MLRFRPIAPKPASDGGSVSLTGKSGSTTTTSGGSSDLSGKSGRGKRKYQKDCSGGNSRRCNKKKRDLSGDTATTTAVTLSLLPETPEKRVFPDLNAFPVEKQKRNGPLWLSFNGGGEILTPYKTAEISRRTVVVSSCVTVERVTDAWIDGYGLGETNQERKMNLVEDTCPGFISDGVGRVTWTNEAYKKMAREDINIPMEEGVPEDISYDNFHVNVRLVMKERPMLTYPAFTCRVRLQYTCQDRERGSVTVPCDVWRMDGGGFAWRLDVKAALCL

SEQ ID NO: 106643 - DNA, 1135 bp, Arabidopsis thaliana
  misc_feature (1)..(1135): Ceres Seq. ID no. 13620135
  misc_feature (1)..(1135): Ortholog of  Ceres SEQ ID NO 12636774 as cited in SEQ ID NO 372
  misc_feature (1)..(1135): Ortholog of  Ceres SEQ ID NO 13582350 as cited in SEQ ID NO 56734
  misc_feature (1)..(1135): Ortholog of  Ceres SEQ ID NO 12476493 as cited in SEQ ID NO 58163
  misc_feature (1)..(1135): Ortholog of  Ceres SEQ ID NO 12615466 as cited in SEQ ID NO 62761
  misc_feature (1)..(1135): Ortholog of  Ceres SEQ ID NO 13597295 as cited in SEQ ID NO 63743
  misc_feature (1)..(1135): Ortholog of  Ceres SEQ ID NO 12617090 as cited in SEQ ID NO 64005
  misc_feature (1)..(1135): Ortholog of  Ceres SEQ ID NO 13597439 as cited in SEQ ID NO 64081
  misc_feature (1)..(1135): Ortholog of  Ceres SEQ ID NO 13597233 as cited in SEQ ID NO 64370
  misc_feature (1)..(1135): Ortholog of  Ceres SEQ ID NO 13599438 as cited in SEQ ID NO 0
atggaagttgagagagatcaacacatttctccaccatctcttatggccaagacgatccctatcatcgatctaagcaatcttgacgaagagctagtggcacatgcggtggtgaaagggagtgaagagtggggcatttttcacgtggttaatcacggaatcccgatggatttgatacagcggttgaaggacgttggtacacagttcttcgagctcccggagacggagaagaaagccgtagcaaaacaagatggctccaaagacttcgaaggttacacgacgaatctcaagtatgtaaaaggtgaggtttggaccgagaatctttttcacagaatctggccaccgacgtgtatcaattttgattactggcccaagaatcctcctcaatacagggaagtgattgaggagtacacaaaggagactaagaagctatccgagaggattttagggtatttatcagagggattagggttaccaagtgaggccttgatacaaggtctcggtggggaatcgaccgagtatgtaatgaggatcaacaattatcctcctgacccgaaacctgatttgactctaggagtgccggagcacactgacatcattggaatcacaatcattatcaccaatgaagttccagggcttcagattttcaaggacgatcattggttagatgtccactacattccctcctctataaccgtcaacattggcgatcagataatggctgagcaatggaaagtacaagaatgtgttgcatagagcgatagtggataaggagaatcaaaggatgtcatggccggtttttgtggatgctaatcctgatgtggttatcggaccattgccggagctcattaccggcgataatccatcaaagttcaagcctattacttgcaaggactttaagtaccgtaggctcctcaaacttcctatcgagtgaactcaaatatattagttgagtcttgtgtgtttactacatatatattgtgatattgttatattttaagttaagggtgtgtaaaagaattgatatactactaaaacaatacctacactacatgcactcaaaatattcttaaaagtatttaagtgctatattaatattttgtattcaaatttcatcaaaatatttaaagaaaattac

SEQ ID NO: 106644 - protein, 250 aa, Arabidopsis thaliana
  peptide (1)..(250): Ceres Seq. ID no. 13620136
MEVERDQHISPPSLMAKTIPIIDLSNLDEELVAHAVVKGSEEWGIFHVVNHGIPMDLIQRLKDVGTQFFELPETEKKAVAKQDGSKDFEGYTTNLKYVKGEVWTENLFHRIWPPTCINFDYWPKNPPQYREVIEEYTKETKKLSERILGYLSEGLGLPSEALIQGLGGESTEYVMRINNYPPDPKPDLTLGVPEHTDIIGITIIITNEVPGLQIFKDDHWLDVHYIPSSITVNIGDQIMAEQWKVQECVA

SEQ ID NO: 106645 - protein, 236 aa, Arabidopsis thaliana
  peptide (1)..(236): Ceres Seq. ID no. 13620137
MAKTIPIIDLSNLDEELVAHAVVKGSEEWGIFHVVNHGIPMDLIQRLKDVGTQFFELPETEKKAVAKQDGSKDFEGYTTNLKYVKGEVWTENLFHRIWPPTCINFDYWPKNPPQYREVIEEYTKETKKLSERILGYLSEGLGLPSEALIQGLGGESTEYVMRINNYPPDPKPDLTLGVPEHTDIIGITIIITNEVPGLQIFKDDHWLDVHYIPSSITVNIGDQIMAEQWKVQECVA

SEQ ID NO: 106646 - protein, 196 aa, Arabidopsis thaliana
  peptide (1)..(196): Ceres Seq. ID no. 13620138
MDLIQRLKDVGTQFFELPETEKKAVAKQDGSKDFEGYTTNLKYVKGEVWTENLFHRIWPPTCINFDYWPKNPPQYREVIEEYTKETKKLSERILGYLSEGLGLPSEALIQGLGGESTEYVMRINNYPPDPKPDLTLGVPEHTDIIGITIIITNEVPGLQIFKDDHWLDVHYIPSSITVNIGDQIMAEQWKVQECVA

SEQ ID NO: 106647 - DNA, 2688 bp, Arabidopsis thaliana
  misc_feature (1)..(2688): Ceres Seq. ID no. 13620143
  misc_feature (1)..(2688): Ortholog of  Ceres SEQ ID NO 12609770 as cited in SEQ ID NO 51477
  misc_feature (1)..(2688): Ortholog of  Ceres SEQ ID NO 15177764 as cited in SEQ ID NO 57561
gacgaattttggttcgctgctgcataatttttacccatacatcttcctcatcttctctctccgtgttgactcttgaggcgatccaacaaacaacaacaacaacgccgcgattctcgagggaccaatccgttcagagagattaaagctgagctgagcttctccttataaaggaagatactgcttgttctacggaattttgagagatgcctcgggacttgtcaagatcgaggtcaccgtctccatcaccttcacgtcgtagaaagcactcgaggtctcccgtaaggcagaggcatagcaggaggagtagaagagacagaagcccttctccatactcatctcattcgtatagcaggtgatacccctagtgtttgttttttccgctattcgtttgccttagttatcattcgtttatacgaactgtaagaaacattggtggaacacggttatagatagacatgtaaagtttacagactcaagaattgcttttagtaaagttcctacttatagatatattttctacccttctctaaaagagagtgcaatgtctggatgctgctggctctgtatcgtaagcgtttttttgagtgatgctgcgtattggaaatatatcgtgtttatttggctgttgtgattaaatttgttgcaagagaatatgttttatgacctgagctttgtgatttttagaatgaaacctgtatattcggtaaagacataagttaagctgggataatagcactactgatagtctgatctagtttatattttaattgtatctgtagattattagttagaatcagttttaagagcgactatattatgttcttttaaatggagtttgttagcaatagtgatacaaaaccaccactattccttaggtaagataatatagtaatttgttgagaacatggctgagaagctaggaaaatgatacatgcgcttaccattataaaatagctcagtttcttcccgttcccacgggaggggaaatgagcagctgatggattgctcttaggtgttctttcattgatcccttgtctcgttagcttctcttcgtgtgataaaagttggagctgataattctttacagtgtatgaggtaactgcacatacttttgttttctttatgtgtaactgtgggctacctgatgcctagtcttcacgtgcgtggtacttcattagttccatctttttgcttactactttattttgggtaatgttcaggcgaaaaagtcgttctatttctcctaggcgccatcgaagtcgatctgttactcctaagagacgttctccaaccccaaaacgttacaaaagacaaaagagtaggagttcaactccatctcctgcaaaaagatctcccgccgcaacccttgagtcagccaaaaataggaatggagaaaaacttaaaagagaagaggaagaacgaaaaaggtaaatcaatacaaaattttgaagtaagatggatgttatggtgaaattaaggttttttgttctcaaatgttattttagtgtagtgtggaagtccttgattgttagtctcaaaagtgcgacaggttttatggtattctctcacaggctttgcttatggaagataagctatatttcgatttgtttatatttgatcctctggcacaaatgttcgtactatctcgatttgatgagttaccgtttgtcattacatggatcatgattgacttagagatgtaaatatgtccaaagcacaagaataatcttggtgaaggtttgcttgtgttatggtgacaaaaaagaaatttcttcacgaaatttaccattggtattgggaggagtgaaaatggaaacgatctcaacattttttacggatttgcaataaaattttggtcttttgctgttcaagattgaagacatcaggaaatgagaaagttcaggtgatattcaatattctgaacctgctgtggatgtcctctaatttttcactgtatttgctaccaggcgacagcgtgaagcagaactgaagctaatagaggaagaaactgtgaaacgggttgaagaagctattcgaaagaaggtcgaagaaagcttacagtctgagaaaatcaaaatggaaattctaacgctgttggaggaagggcgaaagagacttaatgaagaagtcgcggctcaacttgaggaggagaaagaggcttctcttattgaggctaaagaaaaagagggtgttatgcggtgtttgtcacaggaaagagagcaacaagagaaagaagagagggagagaatagcagaggagaacctaaagagagtggaagaagctcagagaaaagaagcaatggagaggcaaaggaaagaggaggaacggtatcgagagctagaggagctgcaacgacagaaagaagaagcgatgcgaaggaagaaagctgaagaggaagaagaacgtctcaaacagatgaaactgttgggtaaaaacaaatcacggcctaaattatcctttgccttaagctccaagtaaatgcgtgcatgcatgaagataaaaggattgatgtgatggatgatgatatgcatcttcttcctctcaaagatgctttatgattattgttattagtgcttcttgttggagcttaaactcttttatggcttttaattttttgtaattctatttttctcgttttgtaattttacgttaggttaatggtgatgaatgataatatagcaatgattc

SEQ ID NO: 106648 - protein, 133 aa, Arabidopsis thaliana; identical to SEQ ID NO: 29634
  peptide (1)..(133): Ceres Seq. ID no. 13620144

SEQ ID NO: 106649 - protein, 94 aa, Arabidopsis thaliana; identical to SEQ ID NO: 29635
  peptide (1)..(94): Ceres Seq. ID no. 13620145

SEQ ID NO: 106650 - protein, 76 aa, Arabidopsis thaliana; identical to SEQ ID NO: 29636
  peptide (1)..(76): Ceres Seq. ID no. 13620146

SEQ ID NO: 106651 - DNA, 1107 bp, Arabidopsis thaliana
  misc_feature (1)..(1107): Ceres Seq. ID no. 13620150
  misc_feature (1)..(1107): Ortholog of  Ceres SEQ ID NO 13594298 as cited in SEQ ID NO 57803
  misc_feature (1)..(1107): Ortholog of  Ceres SEQ ID NO 13503476 as cited in SEQ ID NO 61978
  misc_feature (1)..(1107): Ortholog of  Ceres SEQ ID NO 12578438 as cited in SEQ ID NO 62201
  misc_feature (1)..(1107): Ortholog of  Ceres SEQ ID NO 12617675 as cited in SEQ ID NO 64656
gcattacctctctctctctctctcttcgaaatattcgaagtagagacaaccaatggagacggaaaggaggatcataacgagctgttctgccatgacggctctgttcttgttcatgacggctctaatggcgtcgtcctctatcgcagcaacaccgacacaatcgtttgaagataatttcaacattatgtggtctgaaaatcacttcacgacttccgatgatggagagatctggaatctttccttagataacgacaccggatgtggatttcagacaaagcacatgtatagattcggatggtttagtatgaagctaaagctcgtcggaggcgactccgccggcgtcgtcaccgcttactacatgtgttcggagaatggggcaggaccggagagagacgagatagatttcgaatttctagggaaccgaaccggacagccttacattattcagaccaatgtgtataagaacggaaccgggaatcgggagatgcgacattccctctggttcgacccgaccaaggattatcacacctactcaattctttggaataaccaccagcttgtgttcttcgtggatagggtaccaattcgagtatacaagaacagtgataaggtaccaaacaacgacttcttcccgaaccagaagccgatgtacttgttctccagcatttggaacgctgacgattgggctacacgtggtggtctggagaagactgactggaaaaaagctccattcgtctcttcttacaaggacttcgccgtcgaaggctgccgttggaaggatccattccctgcatgcgtctctaccacaacagagaattggtgggatcagtacgacgcgtggcatttgtccaagacacagaagatggattatgcgtgggtgcagcgtaatctcgtcgtatacgattattgcaaagacagtgagaggttccctactcttccttgggagtgttccattagcccttgggcttaaaatcaattttgttttgagtgtattaaagtggaaatggtttatgtaataattttactctcttttttttggcatttcttattttgttatggactatatcctctgtttatttatttaattaattatttatttagtcggct

SEQ ID NO: 106652 - protein, 305 aa, Arabidopsis thaliana; identical to SEQ ID NO: 27882
  peptide (1)..(305): Ceres Seq. ID no. 13620151

SEQ ID NO: 106653 - protein, 292 aa, Arabidopsis thaliana; identical to SEQ ID NO: 27883
  peptide (1)..(292): Ceres Seq. ID no. 13620152

SEQ ID NO: 106654 - protein, 285 aa, Arabidopsis thaliana; identical to SEQ ID NO: 27884
  peptide (1)..(285): Ceres Seq. ID no. 13620153

SEQ ID NO: 106655 - DNA, 1811 bp, Arabidopsis thaliana
  misc_feature (1)..(1811): Ceres Seq. ID no. 13620154
  misc_feature (1)..(1811): Ortholog of  Ceres SEQ ID NO 14311219 as cited in SEQ ID NO 56635
  misc_feature (1)..(1811): Ortholog of  Ceres SEQ ID NO 15169615 as cited in SEQ ID NO 66708
  misc_feature (1)..(1811): Ortholog of  Ceres SEQ ID NO 15169619 as cited in SEQ ID NO 67512
gagagaaatcagcttcaagcttaagagagcttcgaaagcgaaagcgacgatttcttctccatcgtgagagcaaatctccagagccgttttctcttcttcttcttcctcctcgcgccgtctctgaaactccatcatcgtatcaatcaaattgcttcctcctccaaattgaaaaacaatggaattggattcggagaacaaattgttgaagacgggtttggttatagtggcgacacttgttatagccaaactcatcttctctttcttcacttctgattctaagaagaagcgtcttcctcctactcttaaagcttggcctccattggttggaagtcttatcaaattcttgaaaggacctattattatgcttagagaggaataccctaagcttggaagtgtgtttactgttaatcttgttcacaaaaagattacttttcttattggtcctgaagtctctgctcattttttcaaagcttctgaatctgatcttagtcagcaggaagtgtatcagttcaatgtccctacttttggtcctggagttgttttcgatgttgattattctgttcgtcaggagcagtttcggttcttcactgaggcacttagagttaacaagttgaagggttatgtggatatgatggttactgaagctgaggattacttctctaaatggggagagagtggtgaagttgatattaaggttgagctagagaggctcatcatcttgactgcaagtagatgtttactgggtcgagaagttcgtgatcagctttttgatgatgtctctgctttgttccatgaccttgacaatggaatgcttcccatcagtgttctcttcccatatctcccaattccagctcaccgccgtcgtgaccgtgcccgagaaaagctttcggagattttcgcaaaaatcattgggtcgagaaaacgctctggaaaaacagagaacgacatgctgcagtgtttcatcgaatcaaagtacaaagatggtagacagacaaccgaatctgaagtcactggtttgctcattgctgctctgtttgcaggacaacacacgagctctatcacttccacctggaccggtgcttatctgatgcgatacaaagagtacttctcagctgctcttgatgagcagaagaacctgattgcgaaacatggagacaagatcgatcatgatatcttatccgagatggatgttctctaccgctgcattaaggaagcgttgaggcttcaccctccactcatcatgttaatgagagcctcgcacagtgatttcagcgtgacagctcgggatggaaaaacttacgatatcccaaagggtcacatcgttgcaacctcccctgcatttgccaaccgcttaccgcacatcttcaaagaccccgacacctacgacccagaaagattctcccctggaagagaagaggacaaagccgcaggggcattctcgtacattgcattcggagggggaaggcacgggtgccttggagagccgtttgcttacctgcagatcaaagccatatggagtcatttgttgaggaacttcgagcttgagctagtttcaccgttccctgagattgactggaacgctatggtggttggagttaaaggcaatgtgatggtgcgttacaagaggcgccagctttcttaaagacaagtttaaggttattgcagctttggatttttctctctggtttctgctttgcttttgtccctctctggttttagttttgttgttgaataattcttctgtttttataaactgttgttactctttaattgacatttatttttaagcttcctaagtttgttggttctgc

SEQ ID NO: 106656 - protein, 488 aa, Arabidopsis thaliana; identical to SEQ ID NO: 39837
  peptide (1)..(488): Ceres Seq. ID no. 13620155

SEQ ID NO: 106657 - protein, 426 aa, Arabidopsis thaliana; identical to SEQ ID NO: 39838
  peptide (1)..(426): Ceres Seq. ID no. 13620156

SEQ ID NO: 106658 - protein, 337 aa, Arabidopsis thaliana; identical to SEQ ID NO: 39839
  peptide (1)..(337): Ceres Seq. ID no. 13620157

SEQ ID NO: 106659 - DNA, 1096 bp, Arabidopsis thaliana
  misc_feature (1)..(1096): Ceres Seq. ID no. 13620158
  misc_feature (1)..(1096): Ortholog of  Ceres SEQ ID NO 13595341 as cited in SEQ ID NO 56398
  misc_feature (1)..(1096): Ortholog of  Ceres SEQ ID NO 15173764 as cited in SEQ ID NO 57550
  misc_feature (1)..(1096): Ortholog of  Ceres SEQ ID NO 15227118 as cited in SEQ ID NO 59038
  misc_feature (1)..(1096): Ortholog of  Ceres SEQ ID NO 13597299 as cited in SEQ ID NO 63785
  misc_feature (1)..(1096): Ortholog of  Ceres SEQ ID NO 13663895 as cited in SEQ ID NO 66923
cttagtattttccgacgaggaaagttcttcaaattcgctgttgaattttgtttctcggagaaattatcaaaaccctagacgatcacattatcgcttctgagatcaaagacgatgcagcaattactgttcgctgttgttctcttcgaggttgttgtgataatggcgctttccttcaagacgccgattaggaagctgttgattatgagcttggatcgttccaagcgtggtcgtggaccggtggtgattcagacggtttctgcgacggttattgtgcttctggtgacgagcgtgtacaatatgatggggatccagaagcgttggatcgaagatggtgtagtgaatcctacagatgaggttatcatggctaagcatctccttgaatcgactcttatgggtggttttctattccttgggctaatgatagacaggctgcatcattacatgagggagctacgcataagaaggaagaacatggaagttataaagaaggaaggagcattattggaaggtgttaaggccagaggtttagatgaagttaaaaacttgatggaagaaattacgtccttcggaaaaggcaagagcagctggactctgagcttgaggcaaggtctaaagaaatccgtaccgagaaaactagtgcggttgctctacagaagcaatctgaagggttccttattgagtttaaccggttgcttgaggaaaaccaggtgctgcgagaccaattgcacactgtggattcgaaactttcgcgttcaagcagcaaaaagaatacttgagagaccttattccaacacttgaaacttctttgcgattctgccgtctgaatatatatgtttcgagtttgatatcaggagcttgtggtttggtgttatcgcatcttgttaacatggaagatgattgggaaagatcagagaatacaaaacaagtataggtttgcttcttgtttaagtgtttagctaaggtagaaattaatcaattcttctgctataggaaactgtaactcgttgtaacttgttcatttcgcaacaaaaacttctcgaattggttcttatttccttccatatacgtatacagtcgctgcaagtgggttgtcatt

SEQ ID NO: 106660 - protein, 228 aa, Arabidopsis thaliana
  peptide (1)..(228): Ceres Seq. ID no. 13620159
MQQLLFAVVLFEVVVIMALSFKTPIRKLLIMSLDRSKRGRGPVVIQTVSATVIVLLVTSVYNMMGIQKRWIEDGVVNPTDEVIMAKHLLESTLMGGFLFLGLMIDRLHHYMRELRIRRKNMEVIKKEGALLEGVKARGLDEVKNLMEEITSFGKGKSSWTLSLRQGLKKSVPRKLVRLLYRSNLKGSLLSLTGCLRKTRCCETNCTLWIRNFRVQAAKRILERPYSNT

SEQ ID NO: 106661 - protein, 212 aa, Arabidopsis thaliana
  peptide (1)..(212): Ceres Seq. ID no. 13620160
MALSFKTPIRKLLIMSLDRSKRGRGPVVIQTVSATVIVLLVTSVYNMMGIQKRWIEDGVVNPTDEVIMAKHLLESTLMGGFLFLGLMIDRLHHYMRELRIRRKNMEVIKKEGALLEGVKARGLDEVKNLMEEITSFGKGKSSWTLSLRQGLKKSVPRKLVRLLYRSNLKGSLLSLTGCLRKTRCCETNCTLWIRNFRVQAAKRILERPYSNT

SEQ ID NO: 106662 - protein, 198 aa, Arabidopsis thaliana
  peptide (1)..(198): Ceres Seq. ID no. 13620161
MSLDRSKRGRGPVVIQTVSATVIVLLVTSVYNMMGIQKRWIEDGVVNPTDEVIMAKHLLESTLMGGFLFLGLMIDRLHHYMRELRIRRKNMEVIKKEGALLEGVKARGLDEVKNLMEEITSFGKGKSSWTLSLRQGLKKSVPRKLVRLLYRSNLKGSLLSLTGCLRKTRCCETNCTLWIRNFRVQAAKRILERPYSNT

SEQ ID NO: 106663 - DNA, 1007 bp, Arabidopsis thaliana
  misc_feature (1)..(1007): Ceres Seq. ID no. 13620162
  misc_feature (1)..(1007): Ortholog of  Ceres SEQ ID NO 14310748 as cited in SEQ ID NO 53379
  misc_feature (1)..(1007): Ortholog of  Ceres SEQ ID NO 15179906 as cited in SEQ ID NO 67006
aaaccctttaattgaaaaaaaaaacaaattacttctctttccttcgatcatcgtcttcctctggttctcagatctttgaatcgagcagaagcaattttaaatctcctatcagtgaatttttattactggagaagtaataaggcaaagatggtgaaaatgacattgatagctcgtgttactgatgggttacctctagctgaggggctcgatgatggacgtgacttaccggattcagatatgtataaacaacaggtcaaagctttgtttaagaatctgtccagaggtcaaaatgacgcttcaagaatgtccgttgaaactggcccctatgttttccattacatcatagaaggacgtgtttgctacttgacaatgtgtgaccgctcttacccaaagaaactcgctttccaatacctggaagatctcaagaatgaatttgaacgtgtcaatgggcctaacattgaaacagctgctcggccttatgcctttattaaatttgatacattcatacagaaaaccaagaaactgtaccaagacactcgtacgcaacgaaacatcgccaagttgaatgatgaactctatgaggttcatcaaataatgacccggaatgtgcaagaagtcttaggtgttggtgaaaagctggaccaggtgagcgagatgtcgagccggttaacatctgaatctcgtatatatgctgataaggctaaagatttgaaccgtcaggctttgatccgaaaatgggcaccagtcgcaattgtgttcggtgtagtcttcctccttttctgggtcaagaacaagctatggtaaaaaaaaaaggaggaatctaaggctattttcgtaatttagcggacttctccagacatatgtcgacctcccctaccggactcaagtctcagattccggcacccaaaatatcttctttctttcaaagagaaactttgacacattttgtacttctgtagtatgcaaactttatgagactggtcatagtatcatccattatactcttt

SEQ ID NO: 106664 - protein, 218 aa, Arabidopsis thaliana; identical to SEQ ID NO: 25673
  peptide (1)..(218): Ceres Seq. ID no. 13620163

SEQ ID NO: 106665 - protein, 215 aa, Arabidopsis thaliana; identical to SEQ ID NO: 25674
  peptide (1)..(215): Ceres Seq. ID no. 13620164

SEQ ID NO: 106666 - protein, 188 aa, Arabidopsis thaliana; identical to SEQ ID NO: 25675
  peptide (1)..(188): Ceres Seq. ID no. 13620165

SEQ ID NO: 106667 - DNA, 749 bp, Arabidopsis thaliana
  misc_feature (1)..(749): Ceres Seq. ID no. 13620169
  misc_feature (1)..(749): Ortholog of  Ceres SEQ ID NO 15172691 as cited in SEQ ID NO 56148
  misc_feature (1)..(749): Ortholog of  Ceres SEQ ID NO 15226850 as cited in SEQ ID NO 62501
gttaaaagttacaaacgcgactctctgatcctaaatttcgttgtacagagaagaagcaaaagagagaaacatctgacccggaatctgacctgaaaacccggaagaatcgaaaaatggggaaagatggtctgagcgacgatcaggtctcgtcgatgaaggaagccttcatgctcttcgacaccgatggcgacggcaaaatcgcaccgtcagagctcgggatcctcatgcgatctctcggcggaaacccgacccaagcccagctgaaatccataatcgcatccgagaatctctcttcaccgtttgatttcaacagattcctcgatctcatggcgaaacatctgaagacggaacctttcgatcgccagctccgtgacgcattcaaagtgctcgataaggaaggtaccgggttcgttgctgtggcggatctgaggcatattctgaccagtatcggagagaagctggagcctaatgagttcgatgagtggatcaaggaggtggatgttggatccgatggaaagatccggtatgaagatttcatagcaaggatggttgctaagtgagatctaatcttttatgttttgaaagttgaaatttttaagaagagattctttgtgtttttttcacttgtttgtttgatttcgagcgaatcctagctagggtttgttttatcattgtggaatttgcttactaactttgtcttcttcatgtttgttttcatttttaatggaaatgttgtctgtgtgattcct

SEQ ID NO: 106668 - protein, 148 aa, Arabidopsis thaliana; identical to SEQ ID NO: 24638
  peptide (1)..(148): Ceres Seq. ID no. 13620170

SEQ ID NO: 106669 - protein, 135 aa, Arabidopsis thaliana; identical to SEQ ID NO: 24639
  peptide (1)..(135): Ceres Seq. ID no. 13620171

SEQ ID NO: 106670 - protein, 130 aa, Arabidopsis thaliana; identical to SEQ ID NO: 24640
  peptide (1)..(130): Ceres Seq. ID no. 13620172

SEQ ID NO: 106671 - DNA, 835 bp, Arabidopsis thaliana
  misc_feature (1)..(835): Ceres Seq. ID no. 13620173
  misc_feature (1)..(835): Ortholog of  Ceres SEQ ID NO 15172970 as cited in SEQ ID NO 51736
  misc_feature (1)..(835): Ortholog of  Ceres SEQ ID NO 13598157 as cited in SEQ ID NO 61570
  misc_feature (1)..(835): Ortholog of  Ceres SEQ ID NO 15173774 as cited in SEQ ID NO 61771
  misc_feature (1)..(835): Ortholog of  Ceres SEQ ID NO 15175549 as cited in SEQ ID NO 0
atatatcttatggatcggacgctcttgggcttttcttgaaaccactataaaacctatctcaattctttcattttctccacacccaattcactcacaacctagctagctagtaaacagtattttctatataccaaaaatggcttcaagttccatagctcttttcttggctctcaatcttctctttttcacaacaatctccgcctgtggtagctgtactccgtgcggcggaggttgcccctctcccaagccaaagccaactcctaaaccaaccccaagccctagctctggctcgagcaagtgccctaaagacaccctcaagctcggtgtctgcgctaatgtgctcaacggcctcctggacttgacccttggcaagccaccggtcgagccatgctgcagcctcatccaaggactcgctgatgttgaggcagccgtttgtctctgcaccgctcttaaggctaacattcttggaatcaacttgaacctcccaatatctttaagtctactccttaatgtttgcagcaaacaacttcctcctggcttccaatgctaaaaaccatattgatatataatttaaatacacttatgtgtgtattaatttatcttcttgttttaaagagacagggtgattctctatactcttatattgtgtctttatatatcttgatctgtggtttcttctactctgcttgctctggtgttcattggggtgatccgtaagattcctgaagtttacagtttcattatttcctattatatatactcttaccattgggggtattgttgtattggtttgtattatgattctatgaattaataagaatttaacttttatgtt

SEQ ID NO: 106672 - protein, 137 aa, Arabidopsis thaliana; identical to SEQ ID NO: 20894
  peptide (1)..(137): Ceres Seq. ID no. 13620174

SEQ ID NO: 106673 - DNA, 1621 bp, Arabidopsis thaliana
  misc_feature (1)..(1621): Ceres Seq. ID no. 13620179
  misc_feature (1)..(1621): Ortholog of  Ceres SEQ ID NO 13594209 as cited in SEQ ID NO 59089
  misc_feature (1)..(1621): Ortholog of  Ceres SEQ ID NO 14308007 as cited in SEQ ID NO 65760
  misc_feature (1)..(1621): Ortholog of  Ceres SEQ ID NO 13502874 as cited in SEQ ID NO 66298
  misc_feature (1)..(1621): Ortholog of  Ceres SEQ ID NO 12614124 as cited in SEQ ID NO 68392
actccgatagaaacagagccaacaaaacaaaaacagaggaagaaaaacaaaaatgacgatcttgctctgtttcttcttagtttcacttcttactatcgtatcatcaatctttcttaaacagaataaaacctcaaaattcaatcttcccccaagcccttcaagccttccgatcattggaaacttacaccatctcgcaggattgcctcacagatgttttcataagctctctatcaaatacggacccttggtctttcttcgtctcgggtctgttccggttgttgtgatctcatcgagtgaagcagctgaagcagttctcaaaaccaatgacttggaatgttgcagccgaccaaagacggtggggagcggaaaactctcttacggtttcaaagacatcactttcgcaccatacggtatataagagaggaagaggtcgacttcgtggtcaagaaagtgtcagaatcagctttgaagcaatctcctgtggatttaagcaaaacctttttctccctcaccgctagtatcatttgtagagtcgccttaggacagaatttcaatgaaagcggctttgttatcgatcaagacaggatcgaagaacttgttaccgaatcagcagaagctctagggactttcactttctctgacttcttccctggtggacttggaagatttgtagattggttgtttcaacgacacaagaagatcaacaaagtctttaaggaacttgatgctttttatcagcatgtgattgatgatcacttgaagccagagggaagaaagaatcaagatattgtcaccttgattttggatatgatcgataaacaagaagattcagattctttcaaactcaacatggataatctcaaggcaattgtcatggatgtatttctcgcggggatagatacaagcgcggtaacaatgatttgggcgatgacagaacttattagaaaccctagagtgatgaagaaggctcaagaaagtattcgaaccactctgggtctcaagaaggaaagaatcactgaagaagatttaggcaaagttgagtatttgaaccacatactcaaggaaacttttaggttacacccggcacttccatttgtggtgccaagggaaacaatgtctcacatcaagatccaaggctatgatattccaccgaaaacacaaatccagcttaacgtgtggacgatcggacgtgaccctaagcgttggaatgaccctgaagaattcaaccctgaaaggtttgcaaatagctctgtagattttagaggacaacattttgacctattaccgtttggttctggtcgaaggatttgtcccggaatgccaatggcgattgctagtgtggaactagcattgatgaatttgctttattattttgattggagtatgcctgatgggactaaaggtgaagacattgatatggaagaagctggtaatatctctattgtcaagaaaatacctcttcaacttgtgcctgttcaacgttattgatgagcaataatataagctcgataacatggaaagtgtatgaagcaaaaaacataagattctttagattttgttgtgttatataagaaagaaatgttccaataataaatcaagaaagaataacttttgttcattt

SEQ ID NO: 106674 - protein, 384 aa, Arabidopsis thaliana
  peptide (1)..(384): Ceres Seq. ID no. 13620180
MLQPTKDGGERKTLLRFQRHHFRTIRYIREEEVDFVVKKVSESALKQSPVDLSKTFFSLTASIICRVALGQNFNESGFVIDQDRIEELVTESAEALGTFTFSDFFPGGLGRFVDWLFQRHKKINKVFKELDAFYQHVIDDHLKPEGRKNQDIVTLILDMIDKQEDSDSFKLNMDNLKAIVMDVFLAGIDTSAVTMIWAMTELIRNPRVMKKAQESIRTTLGLKKERITEEDLGKVEYLNHILKETFRLHPALPFVVPRETMSHIKIQGYDIPPKTQIQLNVWTIGRDPKRWNDPEEFNPERFANSSVDFRGQHFDLLPFGSGRRICPGMPMAIASVELALMNLLYYFDWSMPDGTKGEDIDMEEAGNISIVKKIPLQLVPVQRY

SEQ ID NO: 106675 - protein, 226 aa, Arabidopsis thaliana
  peptide (1)..(226): Ceres Seq. ID no. 13620181
MIDKQEDSDSFKLNMDNLKAIVMDVFLAGIDTSAVTMIWAMTELIRNPRVMKKAQESIRTTLGLKKERITEEDLGKVEYLNHILKETFRLHPALPFVVPRETMSHIKIQGYDIPPKTQIQLNVWTIGRDPKRWNDPEEFNPERFANSSVDFRGQHFDLLPFGSGRRICPGMPMAIASVELALMNLLYYFDWSMPDGTKGEDIDMEEAGNISIVKKIPLQLVPVQRY

SEQ ID NO: 106676 - protein, 212 aa, Arabidopsis thaliana
  peptide (1)..(212): Ceres Seq. ID no. 13620182
MDNLKAIVMDVFLAGIDTSAVTMIWAMTELIRNPRVMKKAQESIRTTLGLKKERITEEDLGKVEYLNHILKETFRLHPALPFVVPRETMSHIKIQGYDIPPKTQIQLNVWTIGRDPKRWNDPEEFNPERFANSSVDFRGQHFDLLPFGSGRRICPGMPMAIASVELALMNLLYYFDWSMPDGTKGEDIDMEEAGNISIVKKIPLQLVPVQRY

SEQ ID NO: 106677 - DNA, 4068 bp, Arabidopsis thaliana
  misc_feature (1)..(4068): Ceres Seq. ID no. 13620187
  misc_feature (1)..(4068): Ortholog of  Ceres SEQ ID NO 13600310 as cited in SEQ ID NO 5086
aatgagaagaggcaattaaaaatctcccgtgactctcgtctccccatctctctctctccctctgcccaaatttctggggcaaatttgttcatcagatctactacaatctctctttttcttcgggtatggagggccaacgaggcagtaattcttcgttgagctctggcaatggcaccgaagtcgccaccgacgtttcttcttgcttctatgttcccaatccctctggaaccgatttcgatgccgagtcgtcttctcttcctcctctctccccagctcctcaagtggcattgtcaattcctgcggagcttgccgccgccattcccctcatcgatcgcttccaggttgaagcttttctgcggctaatgcagaaacaaatccagtctgctgggaagcgtggcttcttctattccaaaaagtcctctggctccaatgtccgcgagcgcttcacatttgaggatatgctttgctttcaaaaggatccaatccccacatctctcctcaagattaacagcgatctcgtcagccgtgctaccaagttgtttcatctcatcttaaaatatatgggtgttgattcatctgatcgatctacgcctcccagtttagatgaacgcattgacctcgttggaaagctcttcaaaaaaactttgaagcgtgttgaactcagggacgaactttttgcccaaatctccaaacagactagacataatcctgacaggcaatacttgatcaaagcttgggaattgatgtacttatgtgcctcctctatgcctcctagcaaagatatcggtggatatctatctgagtatattcataatgtcgcacacgatgcaactattgaaccggatgctcaggttcttgctgttaacactttgaaagctttaaagcgctctatcaaagctggtcctaggcacaccacacctggtcgtgaagaaattgaagcccttttgaccggtagaaagctcacaaccattgtcttctttctcgatgaaacttttgaagaaatttcatatgacatggctaccacagtgtctgatgctgttgagctagctggaacaattaaactatcagctttctctagctttagtttgtttgaatgtcgtaaagttgtttcaagttctaaatcatctgatcccggaaatgaggaatatataggattggatgataacaagtatattggagatctcctcgcagaatttaaagctattaaagatcgaaataaaggagagatactacactgcaaactggtatttaaaaaaaaattattccgagagtctgatgaagctgtaacagatctgatgtttgtgcaactttcgtatgttcaactgcaacatgactatttgctaggaaactatcctgttgggagggacgatgctgcacagctttgtgccttgcaaattcttgttgggattgggtttgtcaatagtccagagtcatgcattgattggacatcacttcttgagcggtttttgccaagacaaatagcaataacccgagcaaagcgtgaatgggaattggatatccttgctcgctaccgttcaatggagaacgtgaccaaagatgatgcaagacaacaatttctacggatactgaaggcactgccatacgggaattcagttttttttagcgtacgcaagatagatgatccgatcggtcttttacctgggcgaatcattttgggtatcaacaaacgtggggttcacttttttcgaccggttcctaaagaatatctgcactctgctgaactacgtgacatcatgcaatttggcagcagtaacactgctgtctttttcaaaatgagagtcgctggtgttcttcacatatttcagttcgagacaaaacagggagaagaaatttgtgttgctttgcaaacacatataaatgatgtcatgttgcgtcgttactccaaagctcgatctgctgccaatagcttggttaatggagatatatcttgtagttctaagccgcaaaattttgaagtgtatgaaaaacgtttgcaagatttgtctaaggcttatgaagagtcccaaaagaagattgagaagttgatggatgaacaacaagagaaaaatcagcaagaagttactctgcgtgaagagttagaagctatacacaatggtttggagcttgaaaggagaaaattgttggaggttactttagaccgagataaacttaggtcattgtgtgacgagaagggaacaactattcaatccttgatgtctgaactgcgaggaatggaagcaaggttggcaaagtcgggcaacacaaaatcaagtaaagagacaaaatcagaattagccgaaatgaataatcagatattatacaagatccaaaaggagttagaagttcgaaataaggaattgcatgtcgcagttgataattcaaagaggttgttgagtgaaaacaagatattggagcaaaatctcaatattgaaaagaagaaaaaagaggaggttgaaattcatcaaaagagatatgaacaagaaaaaaaggtgttaaagcttcgagtttctgaacttgaaaataagcttgaagtacttgctcaagacttggatagtgctgagtctacgattgaaagtaagaattctgacatgctgctgttgcaaaataacttgaaagaacttgaggagttaagagaaatgaaagaggacattgacagaaaaaatgagcaaacagctgccattttgaaaatgcaaggagcccaacttgctgagctagaaatactttataaggaagaacaagttttaaggaaaagatactataataccatagaagatatgaaagggaagattagagtttattgtcgaataagacctctaaatgaaaaagagagttcagagagggaaaaacaaatgctgacaactgtggatgagtttactgttgaacatccatggaaagacgacaaaagaaagcaacacatatatgatcgcgtatttgacatgcgtgctagtcaagatgatatctttgaagacacaaagtatttggtacagtcggctgtagatgggtataacgtttgcatctttgcatatggtcaaactggttctggaaaaactttcactatatatgggcatgagagcaatcctggactcacacctcgagctacaaaggaactgttcaacatattaaagcgagatagcaagagattttcattttctctaaaggcatatatggtggaactttatcaagacacacttgtagaccttttgttaccaaaaagtgcaagacgcttgaaactagagattaaaaaagattcaaagggaatggtctttgtagagaatgtgacaactattcctatatcaactttggaggaactgcgaatgattcttgaacggggatcggaacgacgacatgtttctggaacaaatatgaatgaagaaagctcaagatctcacctcatattatcagttgttattgaaagtattgatcttcaaacccagtctgctgcgaggggcaagctgagttttgtggatcttgctggttctgagagagttaaaaagtcgggctcagctggttgtcaactcaaagaagctcaaagtatcaacaaatcactttctgcattaggtgatgttattggtgctttatcttctggcaaccagcatattccttataggaatcacaagctaacgatgttgatgagcgattcattgggcggcaatgccaagacgttaatgtttgttaatgtgtctccagccgaatcaaatttggacgagacgtacaattctcttctatatgcatcgagagtgagaacgatcgtgaatgatcccagcaaacatatatcatccaaagagatggtgcgattgaagaagttggtagcatactggaaagagcaagccggtaaaaaaggtgaggaagaagacttggtggatattgaggaagatcgtacacgaaaagatgaggcagatagttgaagaaagctgacatgaaattcgtctaggtgaaattgagactatagtatcactggttttcaccattctttttgtaggaagttcctgctttatagtagagtttctatcgaagagtagtcctatatgtctcaaactttctctcttttgatgagatcttcattacaag

SEQ ID NO: 106678 - protein, 1259 aa, Arabidopsis thaliana
  peptide (1)..(1259): Ceres Seq. ID no. 13620188
MEGQRGSNSSLSSGNGTEVATDVSSCFYVPNPSGTDFDAESSSLPPLSPAPQVALSIPAELAAAIPLIDRFQVEAFLRLMQKQIQSAGKRGFFYSKKSSGSNVRERFTFEDMLCFQKDPIPTSLLKINSDLVSRATKLFHLILKYMGVDSSDRSTPPSLDERIDLVGKLFKKTLKRVELRDELFAQISKQTRHNPDRQYLIKAWELMYLCASSMPPSKDIGGYLSEYIHNVAHDATIEPDAQVLAVNTLKALKRSIKAGPRHTTPGREEIEALLTGRKLTTIVFFLDETFEEISYDMATTVSDAVELAGTIKLSAFSSFSLFECRKVVSSSKSSDPGNEEYIGLDDNKYIGDLLAEFKAIKDRNKGEILHCKLVFKKKLFRESDEAVTDLMFVQLSYVQLQHDYLLGNYPVGRDDAAQLCALQILVGIGFVNSPESCIDWTSLLERFLPRQIAITRAKREWELDILARYRSMENVTKDDARQQFLRILKALPYGNSVFFSVRKIDDPIGLLPGRIILGINKRGVHFFRPVPKEYLHSAELRDIMQFGSSNTAVFFKMRVAGVLHIFQFETKQGEEICVALQTHINDVMLRRYSKARSAANSLVNGDISCSSKPQNFEVYEKRLQDLSKAYEESQKKIEKLMDEQQEKNQQEVTLREELEAIHNGLELERRKLLEVTLDRDKLRSLCDEKGTTIQSLMSELRGMEARLAKSGNTKSSKETKSELAEMNNQILYKIQKELEVRNKELHVAVDNSKRLLSENKILEQNLNIEKKKKEEVEIHQKRYEQEKKVLKLRVSELENKLEVLAQDLDSAESTIESKNSDMLLLQNNLKELEELREMKEDIDRKNEQTAAILKMQGAQLAELEILYKEEQVLRKRYYNTIEDMKGKIRVYCRIRPLNEKESSEREKQMLTTVDEFTVEHPWKDDKRKQHIYDRVFDMRASQDDIFEDTKYLVQSAVDGYNVCIFAYGQTGSGKTFTIYGHESNPGLTPRATKELFNILKRDSKRFSFSLKAYMVELYQDTLVDLLLPKSARRLKLEIKKDSKGMVFVENVTTIPISTLEELRMILERGSERRHVSGTNMNEESSRSHLILSVVIESIDLQTQSAARGKLSFVDLAGSERVKKSGSAGCQLKEAQSINKSLSALGDVIGALSSGNQHIPYRNHKLTMLMSDSLGGNAKTLMFVNVSPAESNLDETYNSLLYASRVRTIVNDPSKHISSKEMVRLKKLVAYWKEQAGKKGEEEDLVDIEEDRTRKDEADS

SEQ ID NO: 106679 - protein, 1180 aa, Arabidopsis thaliana
  peptide (1)..(1180): Ceres Seq. ID no. 13620189
MQKQIQSAGKRGFFYSKKSSGSNVRERFTFEDMLCFQKDPIPTSLLKINSDLVSRATKLFHLILKYMGVDSSDRSTPPSLDERIDLVGKLFKKTLKRVELRDELFAQISKQTRHNPDRQYLIKAWELMYLCASSMPPSKDIGGYLSEYIHNVAHDATIEPDAQVLAVNTLKALKRSIKAGPRHTTPGREEIEALLTGRKLTTIVFFLDETFEEISYDMATTVSDAVELAGTIKLSAFSSFSLFECRKVVSSSKSSDPGNEEYIGLDDNKYIGDLLAEFKAIKDRNKGEILHCKLVFKKKLFRESDEAVTDLMFVQLSYVQLQHDYLLGNYPVGRDDAAQLCALQILVGIGFVNSPESCIDWTSLLERFLPRQIAITRAKREWELDILARYRSMENVTKDDARQQFLRILKALPYGNSVFFSVRKIDDPIGLLPGRIILGINKRGVHFFRPVPKEYLHSAELRDIMQFGSSNTAVFFKMRVAGVLHIFQFETKQGEEICVALQTHINDVMLRRYSKARSAANSLVNGDISCSSKPQNFEVYEKRLQDLSKAYEESQKKIEKLMDEQQEKNQQEVTLREELEAIHNGLELERRKLLEVTLDRDKLRSLCDEKGTTIQSLMSELRGMEARLAKSGNTKSSKETKSELAEMNNQILYKIQKELEVRNKELHVAVDNSKRLLSENKILEQNLNIEKKKKEEVEIHQKRYEQEKKVLKLRVSELENKLEVLAQDLDSAESTIESKNSDMLLLQNNLKELEELREMKEDIDRKNEQTAAILKMQGAQLAELEILYKEEQVLRKRYYNTIEDMKGKIRVYCRIRPLNEKESSEREKQMLTTVDEFTVEHPWKDDKRKQHIYDRVFDMRASQDDIFEDTKYLVQSAVDGYNVCIFAYGQTGSGKTFTIYGHESNPGLTPRATKELFNILKRDSKRFSFSLKAYMVELYQDTLVDLLLPKSARRLKLEIKKDSKGMVFVENVTTIPISTLEELRMILERGSERRHVSGTNMNEESSRSHLILSVVIESIDLQTQSAARGKLSFVDLAGSERVKKSGSAGCQLKEAQSINKSLSALGDVIGALSSGNQHIPYRNHKLTMLMSDSLGGNAKTLMFVNVSPAESNLDETYNSLLYASRVRTIVNDPSKHISSKEMVRLKKLVAYWKEQAGKKGEEEDLVDIEEDRTRKDEADS

SEQ ID NO: 106680 - protein, 1148 aa, Arabidopsis thaliana
  peptide (1)..(1148): Ceres Seq. ID no. 13620190
MLCFQKDPIPTSLLKINSDLVSRATKLFHLILKYMGVDSSDRSTPPSLDERIDLVGKLFKKTLKRVELRDELFAQISKQTRHNPDRQYLIKAWELMYLCASSMPPSKDIGGYLSEYIHNVAHDATIEPDAQVLAVNTLKALKRSIKAGPRHTTPGREEIEALLTGRKLTTIVFFLDETFEEISYDMATTVSDAVELAGTIKLSAFSSFSLFECRKVVSSSKSSDPGNEEYIGLDDNKYIGDLLAEFKAIKDRNKGEILHCKLVFKKKLFRESDEAVTDLMFVQLSYVQLQHDYLLGNYPVGRDDAAQLCALQILVGIGFVNSPESCIDWTSLLERFLPRQIAITRAKREWELDILARYRSMENVTKDDARQQFLRILKALPYGNSVFFSVRKIDDPIGLLPGRIILGINKRGVHFFRPVPKEYLHSAELRDIMQFGSSNTAVFFKMRVAGVLHIFQFETKQGEEICVALQTHINDVMLRRYSKARSAANSLVNGDISCSSKPQNFEVYEKRLQDLSKAYEESQKKIEKLMDEQQEKNQQEVTLREELEAIHNGLELERRKLLEVTLDRDKLRSLCDEKGTTIQSLMSELRGMEARLAKSGNTKSSKETKSELAEMNNQILYKIQKELEVRNKELHVAVDNSKRLLSENKILEQNLNIEKKKKEEVEIHQKRYEQEKKVLKLRVSELENKLEVLAQDLDSAESTIESKNSDMLLLQNNLKELEELREMKEDIDRKNEQTAAILKMQGAQLAELEILYKEEQVLRKRYYNTIEDMKGKIRVYCRIRPLNEKESSEREKQMLTTVDEFTVEHPWKDDKRKQHIYDRVFDMRASQDDIFEDTKYLVQSAVDGYNVCIFAYGQTGSGKTFTIYGHESNPGLTPRATKELFNILKRDSKRFSFSLKAYMVELYQDTLVDLLLPKSARRLKLEIKKDSKGMVFVENVTTIPISTLEELRMILERGSERRHVSGTNMNEESSRSHLILSVVIESIDLQTQSAARGKLSFVDLAGSERVKKSGSAGCQLKEAQSINKSLSALGDVIGALSSGNQHIPYRNHKLTMLMSDSLGGNAKTLMFVNVSPAESNLDETYNSLLYASRVRTIVNDPSKHISSKEMVRLKKLVAYWKEQAGKKGEEEDLVDIEEDRTRKDEADS

SEQ ID NO: 106681 - DNA, 932 bp, Arabidopsis thaliana
  misc_feature (1)..(932): Ceres Seq. ID no. 13620191
  misc_feature (1)..(932): Ortholog of  Ceres SEQ ID NO 13582624 as cited in SEQ ID NO 56287
  misc_feature (1)..(932): Ortholog of  Ceres SEQ ID NO 13597264 as cited in SEQ ID NO 63897
  misc_feature (1)..(932): Ortholog of  Ceres SEQ ID NO 13656452 as cited in SEQ ID NO 65745
cgcaaacaacataacatggcttccaccaaaatttccttagtctttttcctttgcctcgtaggtccttgtataggcgctggaaccacaagcgctgccgaatcagtcagtagcattgtgacacaaggtttctttaacaacattatcaaccaagccggtaatggctgcacgagaaaaagattcaacacccgcgactctttcattgacgctgctaataattttccaaactttgcaagttccgttacaagacgtgaaattgcaagcatgtttgctcatgtcactcacgagaccggacacttctgctacatagaagaaataaagaaaaggtcacgtggtaggtgcgacgagaacgtagagcagagaccatgtccatcacagagtaaaggtcactccggtcgtggtcatcagagtctcggtctcgaccttctacgccagcctgagcttgtgggtagcaacccaactgtagctttcaggaagggtttgtcgttttggattaatagcgtaaggccggtgctgaaccaaggatttggagccactataagagccatcaatgggatggaatgtaacggtgggaattcaggtgcggtcaaggcaaggattgggtactatagagactattgtagacagcttggtgtggatcctggtcataaccttagttgctaaaacgttttacaaacgcatacacgtgacgtgtcacgtgataatgcggaataagaagttacatttcaaacagggcaaggattcagaatcgcaagtacatgaattaacattctgtaactgttaattgtatcaagttgtgttaatatataagagctaggagaattggtctttcttatgtctagctagtaaccatctatgtttgtagctaggagctacttgttgtttctagttgtttgtctatctaagccaatcatacaaaatctatgcttattcac

SEQ ID NO: 106682 - protein, 219 aa, Arabidopsis thaliana
  peptide (1)..(219): Ceres Seq. ID no. 13620192
RKQHNMASTKISLVFFLCLVGPCIGAGTTSAAESVSSIVTQGFFNNIINQAGNGCTRKRFNTRDSFIDAANNFPNFASSVTRREIASMFAHVTHETGHFCYIEEIKKRSRGRCDENVEQRPCPSQSKGHSGRGHQSLGLDLLRQPELVGSNPTVAFRKGLSFWINSVRPVLNQGFGATIRAINGMECNGGNSGAVKARIGYYRDYCRQLGVDPGHNLSC

SEQ ID NO: 106683 - protein, 214 aa, Arabidopsis thaliana
  peptide (1)..(214): Ceres Seq. ID no. 13620193
MASTKISLVFFLCLVGPCIGAGTTSAAESVSSIVTQGFFNNIINQAGNGCTRKRFNTRDSFIDAANNFPNFASSVTRREIASMFAHVTHETGHFCYIEEIKKRSRGRCDENVEQRPCPSQSKGHSGRGHQSLGLDLLRQPELVGSNPTVAFRKGLSFWINSVRPVLNQGFGATIRAINGMECNGGNSGAVKARIGYYRDYCRQLGVDPGHNLSC

SEQ ID NO: 106684 - protein, 132 aa, Arabidopsis thaliana
  peptide (1)..(132): Ceres Seq. ID no. 13620194
MFAHVTHETGHFCYIEEIKKRSRGRCDENVEQRPCPSQSKGHSGRGHQSLGLDLLRQPELVGSNPTVAFRKGLSFWINSVRPVLNQGFGATIRAINGMECNGGNSGAVKARIGYYRDYCRQLGVDPGHNLSC

SEQ ID NO: 106685 - DNA, 3220 bp, Arabidopsis thaliana
  misc_feature (1)..(3220): Ceres Seq. ID no. 13620199
  misc_feature (1)..(3220): Ortholog of  Ceres SEQ ID NO 13646569 as cited in SEQ ID NO 20745
gtgtctcataataaggtagtgccactactactatagcggttttatcatcttctacgcttcgatttcgtcgtcctcctcccaacaaagtttgttaggaaacgaatactcgaacagccatttcttctctatttctcgtgcgatgacgacgactgtggaggacaatcgcgaggtcctcgaggctgttttgaaagaagcggtcgatctggaaaatgtgccaattgaagaagtatttgagaatctgagatgtagcaaggaaggtctcactacacaagctgctgatgaaagacttgctctctttggccataacaaactcgaagagaaaaaggaaagcaaattccttaagtttttaggctttatgtggaaccctctttcctgggtgatggaagctgctgctattatggctattgcgcttgctaatggaggaggaaaacctcctgattggcaagactttgttggtattatcactctgcttgtgattaactccaccatcagtttcattgaggagaacaatgcaggaaacgctgcagctgctctcatggcccgtctagccccgaaagcaaaggttcttcgagatggaaggtggggtgagcaggatgctgcgattctcgttcccggtgatataatcagcatcaagcttggggatatcgtcccagctgatgcacgccttctcgagggtgatccccttaagatcgatcagtctgctcttactggtgaatctctaccagtaaccaaaagttctggagatggtgtctattccggttctacatgcaaacaaggagagatcgaagcagttgttatcgcaactggcgtccataccttttttggaaaggctgctcaccttgttgatacgacaaaccaaattggtcatttccaacaggttttaactgcaattgggaacttttgcatctgctctattgctgtggggatgctcattgagattgtcgtgatgtaccctattcaacaccgagcataccgccctgggattgataaccttcttgtgcttctcattggtggaattccaattgccatgcctacagttctgtctgtgaccatggcaattggctcccacagactatctcagcagggagctatcactaagagaatgacggcgattgaggaaatggctggcatggacgttctttgcagtgacaagacgggcactttgacattgaataaacttactgttgacaaaaatctgattgaagttttcatgaaaggagtggatgcagatactgttgtcctgatggcagctcgagcctccagactagagaaccaagatgctatagatgctgctatagtcgggatgctggcagatcctaaagatgcacgagctggtatccaggaggttcactttcttcctttcaatcctactgataagagaacggctctgacatatattgacaatgagggtaacacacatagagtgagcaaaggtgctcctgagcaaatcttaaatcttgcacacaataaatcagagattgagcggagagttcatgctgttattgataagttcgctgaaaggggtctgcgatctcttgctgtggcgtaccaggatgttcctgaagggaggaaggatagtgctggaggtccttggcaatttgtgggtctcatgcctctttttgatccgcctaggcatgacagtgctgagacgataagaagggctttaaatcttggtgtgagtgttaaaatgatcacaggggatcaactggctataggaaaagagactgggcgccgtttggggatgggaaccaacatgtacccctcatccgctttacttggacagaacaaggatgagtcgatagttgctttacctgtcgatgagctcatagagaaagctgatggctttgcggggttttctgcagagcataaatatgagatagtgaagcgattacaagccaggaaacatatatgtggaatgacgggtgatggtgtaaatgatgctcctgctcttaaaaaggctgacataggcattgcagttgctgatgccactgatgcagctcgtagcgcatcggatattgttcttactgaacctggtcttagcgttatcatcagtgctgttttgaccagtcgtgctatcttccagagaatgaaaaattatactatctacgcagtctccatcacaatccgtattgttctgggctttatgcttctggctctcatatggcagtttgacttcccacctttcatggtccttatcattgccattcttaatgatggtacgatcatgacaatatcaaaggacagggtgaaaccttcccctcttccagatagctggaagctttctgagatttttgctaccggtgttgtctttggcagttacatggccatgatgaccgttatatttttctgggtttcatacaaaaccgatttcttcccgagaacttttggagttgcgacacttgagaaaactgctcatgatgatttccgaaagcttgcctcagccatatacctgcaagtcagtattatcagtcaggcacttatctttgtgacccgatcgcgaagctggtcttttgtggaacgtcccgggatatttcttatgattgcctttatcctcgctcagttggtggctactctaattgcagtctatgcaaattggagctttgctgcgatagaaggaataggttggggatgggccggggtcatttggctctataacatcatattctacatcccccttgatttcatcaaattcttcatccgctacgctcttagtggcagagcctgggatcttgttatcgaacaaagggttgcgttcacaaggcaaaaagattttgggaaagaacaaagagagctgcaatgggctcacgcacaaagaacgctccatggtctacaagcaccagatactaagatgttcacagatcgaacccatgtcagtgaacttaaccaaatggctgaagaagccaagaggagagctgaaattgctaggttgcgtgaacttcacacgctcaagggccatgttgaatcagtggtgagactcaaaggactcgacatagaaaccattcaacaagcttacactgtctgagaaagtgagtgcaagctgatttcagttgggtcatgaaggttgtgtctgtagttaatacatacatattgcatataaatatcgaatcctcgtagccttcttttagcggtttgttatgttctgttctgttgtggtgatgaaagaagaaacagaaacttcgtacggaggttgaaattagcaacaaaaaacttattttacaat

SEQ ID NO: 106686 - protein, 960 aa, Arabidopsis thaliana
  peptide (1)..(960): Ceres Seq. ID no. 13620200
MTTTVEDNREVLEAVLKEAVDLENVPIEEVFENLRCSKEGLTTQAADERLALFGHNKLEEKKESKFLKFLGFMWNPLSWVMEAAAIMAIALANGGGKPPDWQDFVGIITLLVINSTISFIEENNAGNAAAALMARLAPKAKVLRDGRWGEQDAAILVPGDIISIKLGDIVPADARLLEGDPLKIDQSALTGESLPVTKSSGDGVYSGSTCKQGEIEAVVIATGVHTFFGKAAHLVDTTNQIGHFQQVLTAIGNFCICSIAVGMLIEIVVMYPIQHRAYRPGIDNLLVLLIGGIPIAMPTVLSVTMAIGSHRLSQQGAITKRMTAIEEMAGMDVLCSDKTGTLTLNKLTVDKNLIEVFMKGVDADTVVLMAARASRLENQDAIDAAIVGMLADPKDARAGIQEVHFLPFNPTDKRTALTYIDNEGNTHRVSKGAPEQILNLAHNKSEIERRVHAVIDKFAERGLRSLAVAYQDVPEGRKDSAGGPWQFVGLMPLFDPPRHDSAETIRRALNLGVSVKMITGDQLAIGKETGRRLGMGTNMYPSSALLGQNKDESIVALPVDELIEKADGFAGFSAEHKYEIVKRLQARKHICGMTGDGVNDAPALKKADIGIAVADATDAARSASDIVLTEPGLSVIISAVLTSRAIFQRMKNYTIYAVSITIRIVLGFMLLALIWQFDFPPFMVLIIAILNDGTIMTISKDRVKPSPLPDSWKLSEIFATGVVFGSYMAMMTVIFFWVSYKTDFFPRTFGVATLEKTAHDDFRKLASAIYLQVSIISQALIFVTRSRSWSFVERPGIFLMIAFILAQLVATLIAVYANWSFAAIEGIGWGWAGVIWLYNIIFYIPLDFIKFFIRYALSGRAWDLVIEQRVAFTRQKDFGKEQRELQWAHAQRTLHGLQAPDTKMFTDRTHVSELNQMAEEAKRRAEIARLRELHTLKGHVESVVRLKGLDIETIQQAYTV

SEQ ID NO: 106687 - protein, 888 aa, Arabidopsis thaliana
  peptide (1)..(888): Ceres Seq. ID no. 13620201
MWNPLSWVMEAAAIMAIALANGGGKPPDWQDFVGIITLLVINSTISFIEENNAGNAAAALMARLAPKAKVLRDGRWGEQDAAILVPGDIISIKLGDIVPADARLLEGDPLKIDQSALTGESLPVTKSSGDGVYSGSTCKQGEIEAVVIATGVHTFFGKAAHLVDTTNQIGHFQQVLTAIGNFCICSIAVGMLIEIVVMYPIQHRAYRPGIDNLLVLLIGGIPIAMPTVLSVTMAIGSHRLSQQGAITKRMTAIEEMAGMDVLCSDKTGTLTLNKLTVDKNLIEVFMKGVDADTVVLMAARASRLENQDAIDAAIVGMLADPKDARAGIQEVHFLPFNPTDKRTALTYIDNEGNTHRVSKGAPEQILNLAHNKSEIERRVHAVIDKFAERGLRSLAVAYQDVPEGRKDSAGGPWQFVGLMPLFDPPRHDSAETIRRALNLGVSVKMITGDQLAIGKETGRRLGMGTNMYPSSALLGQNKDESIVALPVDELIEKADGFAGFSAEHKYEIVKRLQARKHICGMTGDGVNDAPALKKADIGIAVADATDAARSASDIVLTEPGLSVIISAVLTSRAIFQRMKNYTIYAVSITIRIVLGFMLLALIWQFDFPPFMVLIIAILNDGTIMTISKDRVKPSPLPDSWKLSEIFATGVVFGSYMAMMTVIFFWVSYKTDFFPRTFGVATLEKTAHDDFRKLASAIYLQVSIISQALIFVTRSRSWSFVERPGIFLMIAFILAQLVATLIAVYANWSFAAIEGIGWGWAGVIWLYNIIFYIPLDFIKFFIRYALSGRAWDLVIEQRVAFTRQKDFGKEQRELQWAHAQRTLHGLQAPDTKMFTDRTHVSELNQMAEEAKRRAEIARLRELHTLKGHVESVVRLKGLDIETIQQAYTV

SEQ ID NO: 106688 - protein, 880 aa, Arabidopsis thaliana
  peptide (1)..(880): Ceres Seq. ID no. 13620202
MEAAAIMAIALANGGGKPPDWQDFVGIITLLVINSTISFIEENNAGNAAAALMARLAPKAKVLRDGRWGEQDAAILVPGDIISIKLGDIVPADARLLEGDPLKIDQSALTGESLPVTKSSGDGVYSGSTCKQGEIEAVVIATGVHTFFGKAAHLVDTTNQIGHFQQVLTAIGNFCICSIAVGMLIEIVVMYPIQHRAYRPGIDNLLVLLIGGIPIAMPTVLSVTMAIGSHRLSQQGAITKRMTAIEEMAGMDVLCSDKTGTLTLNKLTVDKNLIEVFMKGVDADTVVLMAARASRLENQDAIDAAIVGMLADPKDARAGIQEVHFLPFNPTDKRTALTYIDNEGNTHRVSKGAPEQILNLAHNKSEIERRVHAVIDKFAERGLRSLAVAYQDVPEGRKDSAGGPWQFVGLMPLFDPPRHDSAETIRRALNLGVSVKMITGDQLAIGKETGRRLGMGTNMYPSSALLGQNKDESIVALPVDELIEKADGFAGFSAEHKYEIVKRLQARKHICGMTGDGVNDAPALKKADIGIAVADATDAARSASDIVLTEPGLSVIISAVLTSRAIFQRMKNYTIYAVSITIRIVLGFMLLALIWQFDFPPFMVLIIAILNDGTIMTISKDRVKPSPLPDSWKLSEIFATGVVFGSYMAMMTVIFFWVSYKTDFFPRTFGVATLEKTAHDDFRKLASAIYLQVSIISQALIFVTRSRSWSFVERPGIFLMIAFILAQLVATLIAVYANWSFAAIEGIGWGWAGVIWLYNIIFYIPLDFIKFFIRYALSGRAWDLVIEQRVAFTRQKDFGKEQRELQWAHAQRTLHGLQAPDTKMFTDRTHVSELNQMAEEAKRRAEIARLRELHTLKGHVESVVRLKGLDIETIQQAYTV

SEQ ID NO: 106689 - DNA, 1775 bp, Arabidopsis thaliana
  misc_feature (1)..(1775): Ceres Seq. ID no. 13620206
  misc_feature (1)..(1775): Ortholog of  Ceres SEQ ID NO 12610323 as cited in SEQ ID NO 56055
aatgtaatctaattttagaaaagaaaaatgaaaaagttgaacagaatcctgaaaatattgtaagaaattttctaaaccgaaaaaacaaaaagacaaaaaccaaaaaattgcgatctgaaccgagcacaaaaccgtaaaggtttcagctttaccaaaatttagaggagtgtgtaaatgttacggagaaggaggagccaaaaaattcaaattggcgctcaagtatcttgggaaattccccctctctctttttaggaaatccctccaaaatacaatatcaaattctcaatcgcagacatcgtttgcgtcaaccatgtcagatctatcgccagaaagattcaaacttgccgttacttctccttcttccataccggaatcttcttcggctttacaattacaccattcctatagtcgcaaacagaaatctctcggacttctttgtaccaatttcttagctttgtataatcgagaagggattgaaatggttgggcttgatgatgctgcctcgaaattaggagtggagagacgaagaatctatgatattgttaatgttctggagagtgttggggttttaacaagaagagcaaagaatcagtatacgtggaaagggttttccgcaattccaggagcattgaaggagctacaagaagagggggttaaggacacttttcatcgtttctatgtcaatgagaatgttaaaggatctgatgatgaggatgatgatgaagagtcttctcagcctcactctagtagccagactgatagttcaaaacctggttctcttccccaatcttcagatccctccaaaatagataaccgacgagagaaatctttaggattgcttactcagaactttatcaaactctttatttgctctgaagctattaggatcatctcccttgatgacgctgcaaaattactgcttggtgatgcccacaatacatcaataatgcgaactaaagtgaggcggctttatgatatagcaaatgtcttgtcgtcaatgaatctcatagagaagactcacaccttagattctaggaaaccagctttcaagtggttagggtacaatggtgagcctactttcacactgagcagcgatttgttgcaattggagtcaagaaaaagagctttcggaactgatattacaaacgtcaatgttaagagaagcaaatcatcatcttcgtcccaagaaaacgctacagagagaaggctaaagatgaaaaagcactcaacaccagagagttcttataacaaaagctttgatgttcatgaatcaagacatggatcaagaggaggttaccattttggaccttttgcaccaggcactggtacatatccaactgctggtttagaggataactctaggagagcttttgatgttgagaatctggattctgattaccgtccctcttaccaaaaccaagttttgaaagacctcttttcccattacatggatgcttggaagacatggttcagcgaagtcacccaggagaatccattacctaatacatcacaacaccgttagatcttctttttcttcttcttcttcttcttcttcttcttcttcttcttcttctcttacctgtgaacatcaatcatcattcgtgtagagagcttcaagagtcatttcttttgatcaatgtggtttagtttctccacacaattgtaactgcaagaatccgacattaattcacagatcgcataccctctttgctttctgaagtttactgtaggctgtaacttttgtatgttacatataagagcattcatctttcgcc

SEQ ID NO: 106690 - protein, 403 aa, Arabidopsis thaliana
  peptide (1)..(403): Ceres Seq. ID no. 13620207
MSDLSPERFKLAVTSPSSIPESSSALQLHHSYSRKQKSLGLLCTNFLALYNREGIEMVGLDDAASKLGVERRRIYDIVNVLESVGVLTRRAKNQYTWKGFSAIPGALKELQEEGVKDTFHRFYVNENVKGSDDEDDDEESSQPHSSSQTDSSKPGSLPQSSDPSKIDNRREKSLGLLTQNFIKLFICSEAIRIISLDDAAKLLLGDAHNTSIMRTKVRRLYDIANVLSSMNLIEKTHTLDSRKPAFKWLGYNGEPTFTLSSDLLQLESRKRAFGTDITNVNVKRSKSSSSSQENATERRLKMKKHSTPESSYNKSFDVHESRHGSRGGYHFGPFAPGTGTYPTAGLEDNSRRAFDVENLDSDYRPSYQNQVLKDLFSHYMDAWKTWFSEVTQENPLPNTSQHR

SEQ ID NO: 106691 - protein, 347 aa, Arabidopsis thaliana
  peptide (1)..(347): Ceres Seq. ID no. 13620208
MVGLDDAASKLGVERRRIYDIVNVLESVGVLTRRAKNQYTWKGFSAIPGALKELQEEGVKDTFHRFYVNENVKGSDDEDDDEESSQPHSSSQTDSSKPGSLPQSSDPSKIDNRREKSLGLLTQNFIKLFICSEAIRIISLDDAAKLLLGDAHNTSIMRTKVRRLYDIANVLSSMNLIEKTHTLDSRKPAFKWLGYNGEPTFTLSSDLLQLESRKRAFGTDITNVNVKRSKSSSSSQENATERRLKMKKHSTPESSYNKSFDVHESRHGSRGGYHFGPFAPGTGTYPTAGLEDNSRRAFDVENLDSDYRPSYQNQVLKDLFSHYMDAWKTWFSEVTQENPLPNTSQHR

SEQ ID NO: 106692 - DNA, 1253 bp, Arabidopsis thaliana
  misc_feature (1)..(1253): Ceres Seq. ID no. 13620213
  misc_feature (1)..(1253): Ortholog of  Ceres SEQ ID NO 12583469 as cited in SEQ ID NO 51031
  misc_feature (1)..(1253): Ortholog of  Ceres SEQ ID NO 13597389 as cited in SEQ ID NO 63426
  misc_feature (1)..(1253): Ortholog of  Ceres SEQ ID NO 13595998 as cited in SEQ ID NO 68161
acaaccattttcattagaagctcaaatttcaaatctcacttccttatcacaatgtcttcctctatctctcccctcctcacaaccgccatctccgtcgcaatcctcctcttctccaccatctccacagcggcgacaattccaaacatccaccgtccattcaacaaaatctacgccttcggagattctttcaccgacaccggaaactcacgctccggcgaaggaccagccggattcggacacttgtcaagtcctccatacggcatgactttcttccgacgaccaacaaaccgttactccgacggtcgtctaaccatcgacttcgtggcagagtcaatgaatttaccgtttctgccaccgtatctcagcctcaaaaccactaacgctaacggcacagcaacggatactcacggcgttaatttcgctgtctctggatcaacggtgattaaacacgcgtttttcgtcaagaacaatctgtcgcttgatatgactcctcagtctatagaaacagagcttgcttggtttgagaagtacttggagacacttggaacgaatcagaaggtttcgttgtttaaagattctctcttttggattggagaaattggagtgaatgattatgcgtatacccttggatctactgtgtcaagtgacaccattagagaacttagtatctcaacttttacaaggtttttggagacattgttgaacaaaggtgtgaaatatatgttggtgcaaggacatccagcaactggatgcttaacgttagcaatgtcgttggccgcagaagatgatcgggacagtctaggatgtgtgcagagtgccaataaccaaagttacactcacaatcttgcccttcaatccaaacttaaacaacttaggatcaagtatccgagtgccacaatagtctacgcagattactggaacgcgtaccgtgcggtgattaaacaccctagcaagtacggtatcaccgagaagttcaaggcgtgttgtggaattggagagccgtacaacttccaagtgttccaaacgtgtgggacggatgcagctacagtgtgtaaggacccgaatcaatacatcaattgggacggagtccacttgaccgaggctatgtataaggttatggccgatatgttccttgacggcactttcactcgtcctagatttagtgacttgttgatcaagaaactaaactatttatgaatgaattgttttactgattttttatataagatttaatggttttggagttttttttt

SEQ ID NO: 106693 - protein, 398 aa, Arabidopsis thaliana
  peptide (1)..(398): Ceres Seq. ID no. 13620214
TTIFIRSSNFKSHFLITMSSSISPLLTTAISVAILLFSTISTAATIPNIHRPFNKIYAFGDSFTDTGNSRSGEGPAGFGHLSSPPYGMTFFRRPTNRYSDGRLTIDFVAESMNLPFLPPYLSLKTTNANGTATDTHGVNFAVSGSTVIKHAFFVKNNLSLDMTPQSIETELAWFEKYLETLGTNQKVSLFKDSLFWIGEIGVNDYAYTLGSTVSSDTIRELSISTFTRFLETLLNKGVKYMLVQGHPATGCLTLAMSLAAEDDRDSLGCVQSANNQSYTHNLALQSKLKQLRIKYPSATIVYADYWNAYRAVIKHPSKYGITEKFKACCGIGEPYNFQVFQTCGTDAATVCKDPNQYINWDGVHLTEAMYKVMADMFLDGTFTRPRFSDLLIKKLNYL

SEQ ID NO: 106694 - protein, 381 aa, Arabidopsis thaliana
  peptide (1)..(381): Ceres Seq. ID no. 13620215
MSSSISPLLTTAISVAILLFSTISTAATIPNIHRPFNKIYAFGDSFTDTGNSRSGEGPAGFGHLSSPPYGMTFFRRPTNRYSDGRLTIDFVAESMNLPFLPPYLSLKTTNANGTATDTHGVNFAVSGSTVIKHAFFVKNNLSLDMTPQSIETELAWFEKYLETLGTNQKVSLFKDSLFWIGEIGVNDYAYTLGSTVSSDTIRELSISTFTRFLETLLNKGVKYMLVQGHPATGCLTLAMSLAAEDDRDSLGCVQSANNQSYTHNLALQSKLKQLRIKYPSATIVYADYWNAYRAVIKHPSKYGITEKFKACCGIGEPYNFQVFQTCGTDAATVCKDPNQYINWDGVHLTEAMYKVMADMFLDGTFTRPRFSDLLIKKLNYL

SEQ ID NO: 106695 - protein, 311 aa, Arabidopsis thaliana
  peptide (1)..(311): Ceres Seq. ID no. 13620216
MTFFRRPTNRYSDGRLTIDFVAESMNLPFLPPYLSLKTTNANGTATDTHGVNFAVSGSTVIKHAFFVKNNLSLDMTPQSIETELAWFEKYLETLGTNQKVSLFKDSLFWIGEIGVNDYAYTLGSTVSSDTIRELSISTFTRFLETLLNKGVKYMLVQGHPATGCLTLAMSLAAEDDRDSLGCVQSANNQSYTHNLALQSKLKQLRIKYPSATIVYADYWNAYRAVIKHPSKYGITEKFKACCGIGEPYNFQVFQTCGTDAATVCKDPNQYINWDGVHLTEAMYKVMADMFLDGTFTRPRFSDLLIKKLNYL

SEQ ID NO: 106696 - DNA, 1031 bp, Arabidopsis thaliana
  misc_feature (1)..(1031): Ceres Seq. ID no. 13620217
  misc_feature (1)..(1031): Ortholog of  Ceres SEQ ID NO 14315275 as cited in SEQ ID NO 52556
  misc_feature (1)..(1031): Ortholog of  Ceres SEQ ID NO 13597260 as cited in SEQ ID NO 63885
atggcaaaagtctctgggaggagcaagaaaacaatcgttgacgatgaaatcagcgataaaacagcgtctgcgtctgagtctgcgtccattgccttaacatccaaacgcaaacgtaagtcgccgcctcgaaacgctcctcttcaacgcagctccccttacagaggcgtcacaagatggactgggagatacgaagcgcatttgtgggataagaacagctggaacgatacacagaccaagaaaggacgtcaaggggcttacgacgaagaagaagcagcagcacgtgcctacgacttagcagcattgaagtactggggacgagacacactcttgaacttccctttgccgagttatgacgaagacgtcaaagaaatggaaggccaatccaaggaagagtatattggatcattgagaagaaaaagtagtggattttctcgcggtgtatcaaaatacagaggcgttgcaaggcatcaccataatgggagatgggaagctagaattggaagggtgtttggtaataaatatctatatcttggaacatacgccacgcaagaagaagcagcaatcgcctacgacatcgcggcaatagagtaccgtggacttaacgccgttaccaatttcgacgtcagccgttatctaaaccctaacgccgccgcggataaagccgattccgattctaagcccattcgaagccctagtcgcgagcccgaatcgtcggatgataacaaatctccgaaatcagaggaagtaatcgaaccatctacatcgccggaagtgattccaactcgccggagcttccccgacgatatccagacgtattttgggtgtcaagattccggcaagttagcgactgaggaagacgtaatattcgattgtttcaattcttatataaatcctggcttctataacgagtttgattatggaccttaatcgtattttctacaagttttgttttgattatctacncaatacatcaaatattatttcttagtgatgatgataacattctatcttaaagctctcaaaaatttctt

SEQ ID NO: 106697 - protein, 308 aa, Arabidopsis thaliana
  peptide (1)..(308): Ceres Seq. ID no. 13620218
MAKVSGRSKKTIVDDEISDKTASASESASIALTSKRKRKSPPRNAPLQRSSPYRGVTRWTGRYEAHLWDKNSWNDTQTKKGRQGAYDEEEAAARAYDLAALKYWGRDTLLNFPLPSYDEDVKEMEGQSKEEYIGSLRRKSSGFSRGVSKYRGVARHHHNGRWEARIGRVFGNKYLYLGTYATQEEAAIAYDIAAIEYRGLNAVTNFDVSRYLNPNAAADKADSDSKPIRSPSREPESSDDNKSPKSEEVIEPSTSPEVIPTRRSFPDDIQTYFGCQDSGKLATEEDVIFDCFNSYINPGFYNEFDYGP

SEQ ID NO: 106698 - protein, 185 aa, Arabidopsis thaliana; identical to SEQ ID NO: 88970
  peptide (1)..(185): Ceres Seq. ID no. 13620219

SEQ ID NO: 106699 - DNA, 3146 bp, Arabidopsis thaliana
  misc_feature (1)..(3146): Ceres Seq. ID no. 13620220
  misc_feature (1)..(3146): Ortholog of  Ceres SEQ ID NO 14306557 as cited in SEQ ID NO 53442
gcactggaagtgggatcaccaccactgcgcttcttcttcttcgtcatctctgatcccccctgcgatcaggggccatttccgtcgataatccgatctccggttcagacattcgtttggacttgcaaagatgccactgagactcgaaatcaagcgtaagtttgctcaaagatcagaaagagtcaaatctgtagatctccatccaacagagccatggatcctggcaagtttgtattccggaactctgtgcatctggaattaccagacccagacaatggtaaaatctttcgacgtgactgaattgcctgttcggtcagcaaagttcattgcacggaagcagtgggttgtagctggagctgatgacatgtttattcgtgtctacaactacaacactatggataagatcaaagtatttgaggctcatgctgattacattcgctgtgttgctgttcatcccacgcttccctatgtcttatcatcatctgatgatatgctcatcaagctctgggactgggaaaagggttggctttgcactcaaattttcgaaggccattcccattatgttatgcaagtcactttcaaccccaaagacaccaatacttttgctagtgcatcccttgaccgtaccataaaaatatggaatcttggctctccggatccaaattttactttggatgcacatctcaaaggggtaaactgtgtagactactttactggtggggataaaccatacctaatcactggttctgatgatcatactgctaaggtgtgggattaccaaacaaagagttgcgttcagactctcgaaggtcatacacacaatgtttctgcagtatcttttcatccagagctacctataattattacaggatccgaggatggaactgttcgcatatggcacgccaccacttacaggcttgagaatacattgaactatggccttgagagggtttgggctattggacacattaaaggttcacgccgggttgtaattggttatgacgaaggatccataatggtgaaacttggccgtgaaataccagtggctagtatggataacagcggaaaaattatttgggctaaacacaatgagatacatactgtaaacatcaagagtgtgggcgcagatgaggtcactgatggtgagagacttcctttggccgttaaagagctagggacctgcgatctttatcctcaaagcttgaagcacaaccctaatggtaggtttgtggtagtttgtggagatggtgagtatattatctacactgccttggcgtggcgaaataggtcatttggctctgcgctagaatttgtttggtcatctgatggggagcatgctgtcagggaaagctcgacaaagatcaagatcttcagcaagaatttccaggaaaagaagactgtgagacccaccttctcagcagagcacatttttggtgggacgttattgacaatgtgctcaagtgattttatatgcttctatgattgggcggaatgtaggttgattaggcgaatagatgttactgtcaaaaatctttattgggcggacagtggtgatctagttgcaattgccagtgatacatcattctacatccttaagttcaatcgtgacattgtttcctcttattttgatggcggtaaacaaattgatgaggaaggcattgaggacgcatttgagcttctcaatgaaaccaatgaacgtgttcggactggcttatgggttggggattgttttatctataccaactcttcttggaggcttaattactgtgttggtggtgaggtaactacaatgtatcatctggaccgtcctatgtacttgttgggttatctcgctaatcaaagcagggtttatttgattgacaaagagttcaatgttattggatacactttacttttaagtttgattgagtacaagactcttgtgatgcgtggagatttggaacaggctaatgaagtcttaccttcaattcctaaggagcaccataatagcgtggcacactttttggagtcacgtggcatgacagaagatgctctagaagtagcaactgatcctgactacagatttgagttggccatacagctcggtagattggctgtcgcaaaggacattgctgtagaggcacaaaatgaatctaaatggaagcaacttggagaattagctatgtcaagtgggaagctggatatggctgaggaatgcatgaggcatgctatggatttgagtggtctgctgctgctttattcttcattgggagatgcagatggaatgatgaagctggcagcacttgcaaaagagcaaggaaagaacaatgtcgcttttctttgcttgttcatgttgggtcaagtagaagactgcctgcatctgttggtggaaagtaatcgaatacctgaagccgctctgatggcgagatcgtaccttccaagcaaggtctccgaaatagtggcattgtggagaaacgatttgaccaagataagtccaaaggctgctgaatctctggctgatcccgaagagtatcccaatctctttgaggagtggcaagtcgccctgtcccttgaaaatagagctgcagagacgaggggcgtccatcctcctgctggggattattgtagtcatgcagacagagatcatacaactttagtggatgcttttagaattatgcaaatagaggaagagggtcgacttgagcaaggggatgttctcgacgaggttggggaagagggggaagatggagaggaagaggaggaggaggatcgtcaggaagagagtagtgatgggagacagcagaatgtggaagaagaggctgttgtggtggacgctgactctacggatggtgctgtgctagttaatggtaacgagtctgaagaacagtgggttctaacaccgccacaagagtagggttggtgaagagtgaagacatacacagatagatattttcttggctttgaaacttgatacattcagcagagaaatgaggcagcacagagagagattagtttccattgttaaaaaaactgatctattgatagcttccgctttgtgcttttaatacagatacatattaaaaaaaaagggggttttgggactcttatgtagctttaacttatgagagatttcacctgtagaatatctgttttgaactgagatttcaccc

SEQ ID NO: 106700 - protein, 920 aa, Arabidopsis thaliana; identical to SEQ ID NO: 105909
  peptide (1)..(920): Ceres Seq. ID no. 13620221

SEQ ID NO: 106701 - protein, 872 aa, Arabidopsis thaliana; identical to SEQ ID NO: 105910
  peptide (1)..(872): Ceres Seq. ID no. 13620222

SEQ ID NO: 106702 - protein, 842 aa, Arabidopsis thaliana; identical to SEQ ID NO: 105911
  peptide (1)..(842): Ceres Seq. ID no. 13620223

SEQ ID NO: 106703 - DNA, 1587 bp, Arabidopsis thaliana
  misc_feature (1)..(1587): Ceres Seq. ID no. 13620224
  misc_feature (1)..(1587): Ortholog of  Ceres SEQ ID NO 14313743 as cited in SEQ ID NO 59555
gcattcacacaacaacaacaactaagaaatggcacgatatgaattcttccgccaaatattcattgtcttgtctatagtttctccgttggtcagatctttcactgtgatcacctccgactcgacggccccatctgctctgatcgacggcccacaaactggattcacgatgaccaatgacggcgctcgcacggagcctgacgagcaagacgccgtctacgacattatgcgtgcgaccggcaacgactgggctgccgcgattccagacgtttgccgagggagatggcacgggatcgagtgtatgccggaccaggataacgtctaccacgtggtctctctgtcgttcggagcgctctcagacgacacggcgtttccgacttgtgatccacaacgctcttacgtctctgagtccctcacgaggctcaaacacctcaaagccttgttcttctaccgatgtttaggccgcgccccacagcgcataccggcgtttctgggacgcctcggctcgagtctgcaaacgctggttctgagggagaatggttttttgggacctatccctgacgaattgggcaatctcaccaatttgaaagttcttgatttgcataaaaatcacctcaacggctccattcccttgtcgttcaaccggttctccggtttaagatcgcttgatttgagtggtaaccggttgactggttccattcccggttttgttcttccggcgctgagcgttctggatttgaaccagaatcttttaaccggaccggttccacccacactcacaagctgtggatcgttgatcaaaatcgatcttagccgaaacagagtcactggtcctatcccagaatcgattaaccggctcaaccaattagtgcttttggatttgagctataaccggttatcaggtccattcccgtcttctctccaaggcctaaactctcttcaagctttaatgctcaaaggcaacacaaaattctcaacaacgattcctgaaaacgcgttcaaagggctcaagaacttgatgattcttgttctctcgaatacgaacatccagggctcgataccgaaatcattgactcggttaaacagtcttcgggtccttcacctagagggcaataatctgaccggagagattcctttggagttccgggacgtgaagcatctaagcgagctgaggctcaacgataacagtctgacaggaccagtaccgttcgagagagacacagtgtggaggatgaggagaaagctgaggctgtataacaatgctggtttgtgtgttaaccgggacagtgacttggatgatgcattcggttcaaaatctggttcaactgtaagattgtgtgatgcagaaacgtcgagaccagctccttccggtacggtccagcacctatctagagaagaagacggtgctttgccggacggagctacggacgtgtcaagcacttccaagtctttggggttctcctatctttctgcattctttcttgtattccctaatttcatttttatgctaatatctagttagaggagggatgataaaactgctgtaaatacttcccgagtttaataatgttagttagatgccttttctcc

SEQ ID NO: 106704 - protein, 496 aa, Arabidopsis thaliana
  peptide (1)..(496): Ceres Seq. ID no. 13620225
MARYEFFRQIFIVLSIVSPLVRSFTVITSDSTAPSALIDGPQTGFTMTNDGARTEPDEQDAVYDIMRATGNDWAAAIPDVCRGRWHGIECMPDQDNVYHVVSLSFGALSDDTAFPTCDPQRSYVSESLTRLKHLKALFFYRCLGRAPQRIPAFLGRLGSSLQTLVLRENGFLGPIPDELGNLTNLKVLDLHKNHLNGSIPLSFNRFSGLRSLDLSGNRLTGSIPGFVLPALSVLDLNQNLLTGPVPPTLTSCGSLIKIDLSRNRVTGPIPESINRLNQLVLLDLSYNRLSGPFPSSLQGLNSLQALMLKGNTKFSTTIPENAFKGLKNLMILVLSNTNIQGSIPKSLTRLNSLRVLHLEGNNLTGEIPLEFRDVKHLSELRLNDNSLTGPVPFERDTVWRMRRKLRLYNNAGLCVNRDSDLDDAFGSKSGSTVRLCDAETSRPAPSGTVQHLSREEDGALPDGATDVSSTSKSLGFSYLSAFFLVFPNFIFMLISS

SEQ ID NO: 106705 - protein, 450 aa, Arabidopsis thaliana
  peptide (1)..(450): Ceres Seq. ID no. 13620226
MTNDGARTEPDEQDAVYDIMRATGNDWAAAIPDVCRGRWHGIECMPDQDNVYHVVSLSFGALSDDTAFPTCDPQRSYVSESLTRLKHLKALFFYRCLGRAPQRIPAFLGRLGSSLQTLVLRENGFLGPIPDELGNLTNLKVLDLHKNHLNGSIPLSFNRFSGLRSLDLSGNRLTGSIPGFVLPALSVLDLNQNLLTGPVPPTLTSCGSLIKIDLSRNRVTGPIPESINRLNQLVLLDLSYNRLSGPFPSSLQGLNSLQALMLKGNTKFSTTIPENAFKGLKNLMILVLSNTNIQGSIPKSLTRLNSLRVLHLEGNNLTGEIPLEFRDVKHLSELRLNDNSLTGPVPFERDTVWRMRRKLRLYNNAGLCVNRDSDLDDAFGSKSGSTVRLCDAETSRPAPSGTVQHLSREEDGALPDGATDVSSTSKSLGFSYLSAFFLVFPNFIFMLISS

SEQ ID NO: 106706 - protein, 431 aa, Arabidopsis thaliana
  peptide (1)..(431): Ceres Seq. ID no. 13620227
MRATGNDWAAAIPDVCRGRWHGIECMPDQDNVYHVVSLSFGALSDDTAFPTCDPQRSYVSESLTRLKHLKALFFYRCLGRAPQRIPAFLGRLGSSLQTLVLRENGFLGPIPDELGNLTNLKVLDLHKNHLNGSIPLSFNRFSGLRSLDLSGNRLTGSIPGFVLPALSVLDLNQNLLTGPVPPTLTSCGSLIKIDLSRNRVTGPIPESINRLNQLVLLDLSYNRLSGPFPSSLQGLNSLQALMLKGNTKFSTTIPENAFKGLKNLMILVLSNTNIQGSIPKSLTRLNSLRVLHLEGNNLTGEIPLEFRDVKHLSELRLNDNSLTGPVPFERDTVWRMRRKLRLYNNAGLCVNRDSDLDDAFGSKSGSTVRLCDAETSRPAPSGTVQHLSREEDGALPDGATDVSSTSKSLGFSYLSAFFLVFPNFIFMLISS

SEQ ID NO: 106707 - DNA, 945 bp, Arabidopsis thaliana
  misc_feature (1)..(945): Ceres Seq. ID no. 13620228
  misc_feature (1)..(945): Ortholog of  Ceres SEQ ID NO 15169786 as cited in SEQ ID NO 59711
ttcactttcctctcaaatctccaataagtaaactctctcatcgaaagcttaaaagcatcatcaccacaagaaagaaaagaaaagagtagaatcgaacatgaaggggggtttgcttgtggacgatgaatttatacacggagaagaaaggagcctgactgttcggaaaacatctctgtttttcgccggcgatggtttcacagtttacgactgcaagggaagtttggtgtttcgggttgactcttacggtggtcccaacacccgcgacaccgacgaggttgtcctcatggacgctcacggccgttgtctcctcaccctccgacgaaagaggccgagtttgcgacggagatgggaggggtatctcggggagagatcggacggccagaaaccgatcttcggggtaaggagatcttcgataatcgggaggaacagtgtgacggtggaggtgtacggggactaccagtgcagcgagtacctgatagaaggtagtttcggggcaaggaactgcacggtggtggaggcggagacgaggcggaaggtggcggagataaggcgcaaagtggatgcgtcaacgaacgtgatgcttgggaaagacgttttctcgttgaacgtgaagcccggttttgatggagcctttgcaatgggattggttcttgtgcttgatcaaatctacggcgacgatctccttgaggttggtgaggaacaggtgcacccttccgcagaagatctctgatttgatttttcaccctttttttgtttttgttttcttcttttttggtgggacgcaaacaaaatcgagtggaaaaataataattattgtgagtttgtgtcggtttgaaaggaaacgatttggacaaattatttctcgtcattcccatgggctgttgtaatctggtttgaatttcttactcagttacagctgtttgatttgaaagaaaaaaagggttt

SEQ ID NO: 106708 - protein, 210 aa, Arabidopsis thaliana
  peptide (1)..(210): Ceres Seq. ID no. 13620229
MKGGLLVDDEFIHGEERSLTVRKTSLFFAGDGFTVYDCKGSLVFRVDSYGGPNTRDTDEVVLMDAHGRCLLTLRRKRPSLRRRWEGYLGERSDGQKPIFGVRRSSIIGRNSVTVEVYGDYQCSEYLIEGSFGARNCTVVEAETRRKVAEIRRKVDASTNVMLGKDVFSLNVKPGFDGAFAMGLVLVLDQIYGDDLLEVGEEQVHPSAEDL

SEQ ID NO: 106709 - protein, 148 aa, Arabidopsis thaliana
  peptide (1)..(148): Ceres Seq. ID no. 13620230
MDAHGRCLLTLRRKRPSLRRRWEGYLGERSDGQKPIFGVRRSSIIGRNSVTVEVYGDYQCSEYLIEGSFGARNCTVVEAETRRKVAEIRRKVDASTNVMLGKDVFSLNVKPGFDGAFAMGLVLVLDQIYGDDLLEVGEEQVHPSAEDL

SEQ ID NO: 106710 - DNA, 1220 bp, Arabidopsis thaliana
  misc_feature (1)..(1220): Ceres Seq. ID no. 13620255
  misc_feature (1)..(1220): Ortholog of  Ceres SEQ ID NO 12364737 as cited in SEQ ID NO 51089
  misc_feature (1)..(1220): Ortholog of  Ceres SEQ ID NO 14311515 as cited in SEQ ID NO 51680
  misc_feature (1)..(1220): Ortholog of  Ceres SEQ ID NO 13595567 as cited in SEQ ID NO 56760
  misc_feature (1)..(1220): Ortholog of  Ceres SEQ ID NO 13655302 as cited in SEQ ID NO 63307
  misc_feature (1)..(1220): Ortholog of  Ceres SEQ ID NO 13597380 as cited in SEQ ID NO 64054
  misc_feature (1)..(1220): Ortholog of  Ceres SEQ ID NO 12625474 as cited in SEQ ID NO 64169
  misc_feature (1)..(1220): Ortholog of  Ceres SEQ ID NO 13597502 as cited in SEQ ID NO 64681
  misc_feature (1)..(1220): Ortholog of  Ceres SEQ ID NO 15180805 as cited in SEQ ID NO 0
atgtaaaatgaacacaaacagaaagaagatgaaagtccatattggaggatatgtgttgatacttgccttgacggtttctgttatattacagcagcctgagttggtcactggacaagctagagttcctgctatgtttgtacttggagactcattggtcgatgctggtaacaacaactttctacaaactgtagctcgagccaatttcctcccttatggcatcgacatgaactaccagcctactggcagatttagcaacggcctgactttcattgatctgctagctcggttgttagaaattccatcaccccctcccttcgcggatccaaccacatcaggcaatagaatcctccaaggagttaactacgcgtctgcagctgctggcatcctcgatgtatcaggctacaactatggtggaagattcagcctgaaccagcaaatggtgaatctagagacgacactaagccaactgcgaacgatgatgagtccccaaaactttacggattacttagcaaggtcgcttgtggttctcgtttttggaagcaatgactatatcaacaactaccttatgcctaatctctacgattccagcataagattcagaccacctgactttgccaatctacttctcagtcaatacgctcgccagcttctgactctttacagcctaggtctaagaaaaatatttatacctggagtagcaccactaggctgcataccaaaccaacgagccagaggtatctcgccacctgatagatgtgttgacagcgtgaatcagattctaggcacatttaaccaagggctaaagtcacttgttgatcagctgaaccagcgatcacctggagccatctatgtatacggcaacacctatagcgcaattggtgacatcttaaacaacccagctgcttacggatttagcgtagtagacagggcttgttgcgggattgggaggaaccaaggacaaattacatgtctgccgttgcagactccttgtcccaacagaaatcagtatgtcttttgggatgcattccatcctactcagactgctaactccattctggctagacgagctttctatggtccaccttccgacgcatatcctgtcaatgtccaacagatgacactccttcactagtatattttggttttcgtgtttctttgaagttgtatgttataatgattgaacctatctatctatgagtatcgagtatcaagttgaaacc

SEQ ID NO: 106711 - protein, 376 aa, Arabidopsis thaliana
  peptide (1)..(376): Ceres Seq. ID no. 13620256
CKMNTNRKKMKVHIGGYVLILALTVSVILQQPELVTGQARVPAMFVLGDSLVDAGNNNFLQTVARANFLPYGIDMNYQPTGRFSNGLTFIDLLARLLEIPSPPPFADPTTSGNRILQGVNYASAAAGILDVSGYNYGGRFSLNQQMVNLETTLSQLRTMMSPQNFTDYLARSLVVLVFGSNDYINNYLMPNLYDSSIRFRPPDFANLLLSQYARQLLTLYSLGLRKIFIPGVAPLGCIPNQRARGISPPDRCVDSVNQILGTFNQGLKSLVDQLNQRSPGAIYVYGNTYSAIGDILNNPAAYGFSVVDRACCGIGRNQGQITCLPLQTPCPNRNQYVFWDAFHPTQTANSILARRAFYGPPSDAYPVNVQQMTLLH

SEQ ID NO: 106712 - protein, 374 aa, Arabidopsis thaliana
  peptide (1)..(374): Ceres Seq. ID no. 13620257
MNTNRKKMKVHIGGYVLILALTVSVILQQPELVTGQARVPAMFVLGDSLVDAGNNNFLQTVARANFLPYGIDMNYQPTGRFSNGLTFIDLLARLLEIPSPPPFADPTTSGNRILQGVNYASAAAGILDVSGYNYGGRFSLNQQMVNLETTLSQLRTMMSPQNFTDYLARSLVVLVFGSNDYINNYLMPNLYDSSIRFRPPDFANLLLSQYARQLLTLYSLGLRKIFIPGVAPLGCIPNQRARGISPPDRCVDSVNQILGTFNQGLKSLVDQLNQRSPGAIYVYGNTYSAIGDILNNPAAYGFSVVDRACCGIGRNQGQITCLPLQTPCPNRNQYVFWDAFHPTQTANSILARRAFYGPPSDAYPVNVQQMTLLH

SEQ ID NO: 106713 - protein, 367 aa, Arabidopsis thaliana
  peptide (1)..(367): Ceres Seq. ID no. 13620258
MKVHIGGYVLILALTVSVILQQPELVTGQARVPAMFVLGDSLVDAGNNNFLQTVARANFLPYGIDMNYQPTGRFSNGLTFIDLLARLLEIPSPPPFADPTTSGNRILQGVNYASAAAGILDVSGYNYGGRFSLNQQMVNLETTLSQLRTMMSPQNFTDYLARSLVVLVFGSNDYINNYLMPNLYDSSIRFRPPDFANLLLSQYARQLLTLYSLGLRKIFIPGVAPLGCIPNQRARGISPPDRCVDSVNQILGTFNQGLKSLVDQLNQRSPGAIYVYGNTYSAIGDILNNPAAYGFSVVDRACCGIGRNQGQITCLPLQTPCPNRNQYVFWDAFHPTQTANSILARRAFYGPPSDAYPVNVQQMTLLH

SEQ ID NO: 106714 - DNA, 2851 bp, Arabidopsis thaliana
  misc_feature (1)..(2851): Ceres Seq. ID no. 13620267
  misc_feature (1)..(2851): Ortholog of  Ceres SEQ ID NO 15180432 as cited in SEQ ID NO 0
aaaaccggcgagacggaaaatttcagcgtttccgaactttccattagagtcgcgagacgatagatgagactcgttccagaaatttaatcgttgcttctcttcccagctgatctgcgtccaacatcactgtttccaggatcttcagaatcagcgaaggaagaagataagaggacgacgaagtaattgaagttggagaatcgcacatttggctctcgatatttgctcaatgacttcttattcgaggtagccttcaatttaggatcggagttcgtaaataaggtgatttagcgaagatgatggtcgaagatcttggtgtggaagcgaaggaagcggctgtgcgagaagtggcgaagctcttacccttacctgaacttttgcagtctatttcttcaatcaaggccgattacatcgctcgtcaacaggcaaatgatgcacagctcagtactatggttgctgagcaggttgaacaagctcaagctgggttagagtcactttcatcatctgagaaaaccatttatgaactgcgggataatttcatttctatcgacaagctttgtcaggaatgtcaaactttgattgacaatcatgaccaaataaagctgctgagtaacgccaggaataatctaaacaaaactctaaaggatgtagaaggtatgatgtcaatttctgttgaagctgctgcggctagggattctttgagtgatgataaagaaatcgttaacacttatgagagattaacagcacttgatggtaaacgaagatttgcattagcagctgctggagaggaggttgggaggctgagggagtattttgaagatgttgatagaacatgggaaacattcgagaagacactatggggtcatgtttccaactattacaaactttctaaagaaagtccgcaaacactggttcgtgctttgagggttgttgagatgcaagaaattctagaccaacagcttgctgaagaagcagcagaggctgagggagaaggtgcgatggcatctgtagcaaatcctcgaaggcctggcaagaaatctactacaacgtcagcgtcgtcaaagggtcttgctcaacagaaattaaaagtccaagggaaaggctacaaggacaaatgctacgagcaaattcggaaggcggttgaagatcgattcaacaggcttttgacgcttgtctttgaagatctaaaagcagctttggaagaagctagaatgattggagaggaacttggagatatttatgactatgtggctccttgttttcctccaagatacgagatatttcagcttatggtgaacctgtataccgagagattcatacaaatgctcagattgctcagtgacagagcaaacgatctgacaaatatagagattttaaaggtgactggttgggtggtagagtaccaagaaaacttgattgcacttggtgttgatgattcactagctcaagtgtgttctgagagcggttcaatggatcctctaatgaatgcatatgttgaaagaatgcaagctacaacgaagaaatggtacatgaatatcctagaggcggataaggtgcaaccacctaaaaaaactgaggaaggaaaattatatacaccggctgctgtagatttattcagaatacttggagagcaagtgcaaattgtcagagataacagcacggatgttatgttgtacaggattgctttagctattattcaggttatgattgatttccaagcagctgaaaagaagagagttgatgaacctgcatctgatattggtctggaacctctatgcgctatgataaacaacaaccttcgctgctacgaccttgccatggagttaagtaatagcactttagaagctcttccacaaaattatgcagagcaggtgaattttgaagacacttgcaaaggtttcttggaggtggctaaggaagcagtgcatcaaacagttcgcgttatctttgaggatccaggagttcaggaattacttgtcaagctttaccagaaagaatggtgcgagggacaggttaccgagtacctcgtggcaactttcggtgattatttcacagatgtgaaaatgtatgtcgaagaaagatcatttagaagatttgtcgaagcatgtttggaagaaacagtcgttgtctatgttgaccatctcctaactcagaaaaactacatcaaggaagaaactattgaacggatgaggctagatgaagaggttctcatggatttctttagggagtatataagtgcatctaaagtggagagcagaatcagaataatgagcgatctgagagaacttgcatctgcagagagtctagatgcatttacactcgtgtactcgaatattctagagcaccagcctgactgcccggccgaggtcgtagagaagcttgttagtctgcgtgaaggcataccacggaaggacacaaaagaggtggtacaagagtgcaaagagatatatgagaacacactggtagatggtaatcctccaaagacaggatttgtattcccgagagtcaagtgcttaactgcttccaaaggatctatgtggcgaaaactcacttaatctgtaaaacagcgttcagcgtttgcgtccgtaactgcttttctagttgagatgatgttctttctccaaattatggcgtttgcgtccatgtcttctttttctttgcatggtatctttcctctgtaaattctgtgttttctcttgttttgttctttttcttacctttattcctggatttgaaagttgaaacgctcggtggccacttgcactaggatattatcccgttgtatttaggaggcgtatttttttgtcgcaaattttaattctactgtttcatttaattttgataaaatcttctt

SEQ ID NO: 106715 - protein, 752 aa, Arabidopsis thaliana; identical to SEQ ID NO: 30478
  peptide (1)..(752): Ceres Seq. ID no. 13620268

SEQ ID NO: 106716 - protein, 751 aa, Arabidopsis thaliana; identical to SEQ ID NO: 30479
  peptide (1)..(751): Ceres Seq. ID no. 13620269

SEQ ID NO: 106717 - protein, 701 aa, Arabidopsis thaliana; identical to SEQ ID NO: 30480
  peptide (1)..(701): Ceres Seq. ID no. 13620270

SEQ ID NO: 106718 - DNA, 1801 bp, Arabidopsis thaliana
  misc_feature (1)..(1801): Ceres Seq. ID no. 13620271
  misc_feature (1)..(1801): Ortholog of  Ceres SEQ ID NO 15177258 as cited in SEQ ID NO 51386
ctttcacaacaaaaaaactcttttctttttgtctgctcgtttttcttttcataatgggagccttggaagcagaaagagccgccaacaatgctacggcgttagagacacagtcgtcaccggaagatctcggtcaaccatctcctctgcgtaagatcatctccgtcgcttcaatcgccgccggtgtacagttcgggtgggccttacagctttctcttctgactccttacatacaactcctcgggatccctcacaaatggtcgtcttacatgtggctttgtggtcctatctccggcatgattgttcaaccgatcgtcggttaccacagtgaccgatgcgagtccagattcggtcgccgtcgtcctttcattgccgccggagtcgcactcgtagccgtctcggttttccttatcggattcgcggcggatatgggacatagttttggagataaactcgagaacaaggtaaggactcgagccattataatcttcctaaccgggttttggttcctcgacgtggctaacaacaccttacaaggaccatgccgtgctttcttagccgatttagccgccggagacgctaaaaaaacgcgagtcgcaaacgcgtgtttctccttctttatggcggttggaaacgttttgggttacgctgctggatcttacactaaccttcacaaaatgtttcctttcacaatgacaaaagcttgcgacatctattgtgcgaatctcaagacttgtttcttcttatccatcactctcctccttatcgtcacattctcgtctctatggtacgttaaagacaaacaatggtctccacctcaaggagacaaggaggagaaaacatcaagtctttttttctttggagaaatctttggagctgttagacacatgaaacgtcccatggtgatgcttctaattgtcacggtcattaattggatcgcttggtttccatttattttgtatgataccgattggatgggtcgtgaagtgtacggtggaaactcagatggagatgaacgatcgaagaaactttacgaccaaggagttcaggctggtgcattgggattgatgtttaattctatacttcttggtttcgtgtcacttggtgttgaatcgattggtcggaaaatgggaggagctaaacgactttggggatgtgtgaatttcatactcgccataggtttggccatgacggttcttgttactaaatcggctgagcatcaccgggaaatcgccggtcctttagccggaccgagcagtggtattaaagccggagtatttagtctctttaccgttcttggtatcccattggccattacttacagtattccatttgcactagcgtccattttctcaaccaattccggtgccggccaaggactttcattaggcgttttaaatatagcgatttgtataccacaaatgatagtatcattctcaagtggaccattggacgctcaattcggcggtggaaacctaccttcatttgtggtcggagcaattgccgcggcggttagtggagtcttagcgttaaccgttttaccttcaccgcctccggacgcaccagccatgtcaggggctatgggattccattagttaactagtttttacatatatatgaatttccatctaatacagtattgttgtgcaaaagtgaaacccccaaaaaatggataaagtgagaaaaataaaccttggtcgtctgtcttttactgttctttagttttttttttttttttacttttgttattgatgttagtcaatttgttttcgttttgtttggacgttaataaattctgtgtttg

SEQ ID NO: 106719 - protein, 529 aa, Arabidopsis thaliana
  peptide (1)..(529): Ceres Seq. ID no. 13620272
FTTKKLFSFCLLVFLFIMGALEAERAANNATALETQSSPEDLGQPSPLRKIISVASIAAGVQFGWALQLSLLTPYIQLLGIPHKWSSYMWLCGPISGMIVQPIVGYHSDRCESRFGRRRPFIAAGVALVAVSVFLIGFAADMGHSFGDKLENKVRTRAIIIFLTGFWFLDVANNTLQGPCRAFLADLAAGDAKKTRVANACFSFFMAVGNVLGYAAGSYTNLHKMFPFTMTKACDIYCANLKTCFFLSITLLLIVTFSSLWYVKDKQWSPPQGDKEEKTSSLFFFGEIFGAVRHMKRPMVMLLIVTVINWIAWFPFILYDTDWMGREVYGGNSDGDERSKKLYDQGVQAGALGLMFNSILLGFVSLGVESIGRKMGGAKRLWGCVNFILAIGLAMTVLVTKSAEHHREIAGPLAGPSSGIKAGVFSLFTVLGIPLAITYSIPFALASIFSTNSGAGQGLSLGVLNIAICIPQMIVSFSSGPLDAQFGGGNLPSFVVGAIAAAVSGVLALTVLPSPPPDAPAMSGAMGFH

SEQ ID NO: 106720 - protein, 512 aa, Arabidopsis thaliana
  peptide (1)..(512): Ceres Seq. ID no. 13620273
MGALEAERAANNATALETQSSPEDLGQPSPLRKIISVASIAAGVQFGWALQLSLLTPYIQLLGIPHKWSSYMWLCGPISGMIVQPIVGYHSDRCESRFGRRRPFIAAGVALVAVSVFLIGFAADMGHSFGDKLENKVRTRAIIIFLTGFWFLDVANNTLQGPCRAFLADLAAGDAKKTRVANACFSFFMAVGNVLGYAAGSYTNLHKMFPFTMTKACDIYCANLKTCFFLSITLLLIVTFSSLWYVKDKQWSPPQGDKEEKTSSLFFFGEIFGAVRHMKRPMVMLLIVTVINWIAWFPFILYDTDWMGREVYGGNSDGDERSKKLYDQGVQAGALGLMFNSILLGFVSLGVESIGRKMGGAKRLWGCVNFILAIGLAMTVLVTKSAEHHREIAGPLAGPSSGIKAGVFSLFTVLGIPLAITYSIPFALASIFSTNSGAGQGLSLGVLNIAICIPQMIVSFSSGPLDAQFGGGNLPSFVVGAIAAAVSGVLALTVLPSPPPDAPAMSGAMGFH

SEQ ID NO: 106721 - protein, 441 aa, Arabidopsis thaliana
  peptide (1)..(441): Ceres Seq. ID no. 13620274
MWLCGPISGMIVQPIVGYHSDRCESRFGRRRPFIAAGVALVAVSVFLIGFAADMGHSFGDKLENKVRTRAIIIFLTGFWFLDVANNTLQGPCRAFLADLAAGDAKKTRVANACFSFFMAVGNVLGYAAGSYTNLHKMFPFTMTKACDIYCANLKTCFFLSITLLLIVTFSSLWYVKDKQWSPPQGDKEEKTSSLFFFGEIFGAVRHMKRPMVMLLIVTVINWIAWFPFILYDTDWMGREVYGGNSDGDERSKKLYDQGVQAGALGLMFNSILLGFVSLGVESIGRKMGGAKRLWGCVNFILAIGLAMTVLVTKSAEHHREIAGPLAGPSSGIKAGVFSLFTVLGIPLAITYSIPFALASIFSTNSGAGQGLSLGVLNIAICIPQMIVSFSSGPLDAQFGGGNLPSFVVGAIAAAVSGVLALTVLPSPPPDAPAMSGAMGFH

SEQ ID NO: 106722 - DNA, 1649 bp, Arabidopsis thaliana
  misc_feature (1)..(1649): Ceres Seq. ID no. 13620283
  misc_feature (1)..(1649): Ortholog of  Ceres SEQ ID NO 14311313 as cited in SEQ ID NO 53503
  misc_feature (1)..(1649): Ortholog of  Ceres SEQ ID NO 14311625 as cited in SEQ ID NO 55184
  misc_feature (1)..(1649): Ortholog of  Ceres SEQ ID NO 14310588 as cited in SEQ ID NO 58770
gtaaaataataccataaaactagaaattggaaagagagagagatatggcaatagaaaggcaagtgacggaagcagaggagccagtaagtccatttgcacgcttgtttagcttgccgggtctcgatgtcttcaacattgtaaccattggatgcaaaaccgaaggcaatgcctcaaccatcgtcgaaggcataaagaacacattgatcaaccatccacgcttctctagcatactggtgactggtcatggtgagcacaaaggaaaagctagatggattccaacgaaaataaacgtagaagagcatgtcattgttccggatatagatcccaacattgagaatcctgatgagtttcttgaagattatacatcaaacatggctctttctccaatggatatgtccaaacctttatgggagtttcatttattgaaacttaaaacatcacatgcggaagctgtgaccgtggctaggttccatcattctttgggcgacggaatgtctcttatgtctcttttactcgcttgtactcggaaaacatgtgatcccgaggcattccccacttttgtggctccgaagaaaaacaaagcgaagaacgtttgtttttctttggtagcttggttatggttcatagtaagacttatgttccacacttgtgttgaagtcatcaagtctatagtttttatatgtcgtgcgagtgacacctcagctcatataatgggaaaaccaggagctacacttagcgctaataagttcattcatcgaatcattagtttagatgatgtcaaaatggtgaagaacgccatgaatatgactgtaaatgatgttctttttgggatggtacaagctggtctttctcgatatttgaaccaaagatatgatcttgaaacatcttcaaagtcaagaaaaaatctacacaatatcggtcttcatggtgttgttttctttaatctaaggccaaatagaaatattgaggatttggctaaaatgatggcaaaaggttcaaagtgtagatggggaaactcaataggttatgttctgattcctttggggatgaagccacaggatgatgtatttgaatatgttcgacaagccaaaactatcatggatggtaaaaaacattccctcgaacctctattttcttatggattgctcaaagtaacaatggaggttttcggattaaggggactcaagactcttgtgaagagaatatttggtagcacaacaatgatattctcaaatgtggttggtccagacgaagaaattagcttttttggccatcgaatagcttacattgctgcaagtacctttggtgtcccacaggcactcaatatctgtattcaaagctatgtggacaaacttataatcaacattggggttgatgtagacgtgattccagaccctcatcacctttgtgatctcatcattgaagctctccgcatgatgaattctgctgctccaaaaaaggtttttcatgcttcaaaggtttaaacgaaatgtttggcgtacaaaagaattgagcatggaattattttcaataccttgcctcctaccatctctttaatttttattggtctacgaccatctcatgatatatgagtttatcatctttctatgtactacactattactgtgtgagataatgagtttcggttc

SEQ ID NO: 106723 - protein, 479 aa, Arabidopsis thaliana
  peptide (1)..(479): Ceres Seq. ID no. 13620284
MAIERQVTEAEEPVSPFARLFSLPGLDVFNIVTIGCKTEGNASTIVEGIKNTLINHPRFSSILVTGHGEHKGKARWIPTKINVEEHVIVPDIDPNIENPDEFLEDYTSNMALSPMDMSKPLWEFHLLKLKTSHAEAVTVARFHHSLGDGMSLMSLLLACTRKTCDPEAFPTFVAPKKNKAKNVCFSLVAWLWFIVRLMFHTCVEVIKSIVFICRASDTSAHIMGKPGATLSANKFIHRIISLDDVKMVKNAMNMTVNDVLFGMVQAGLSRYLNQRYDLETSSKSRKNLHNIGLHGVVFFNLRPNRNIEDLAKMMAKGSKCRWGNSIGYVLIPLGMKPQDDVFEYVRQAKTIMDGKKHSLEPLFSYGLLKVTMEVFGLRGLKTLVKRIFGSTTMIFSNVVGPDEEISFFGHRIAYIAASTFGVPQALNICIQSYVDKLIINIGVDVDVIPDPHHLCDLIIEALRMMNSAAPKKVFHASKV

SEQ ID NO: 106724 - protein, 370 aa, Arabidopsis thaliana
  peptide (1)..(370): Ceres Seq. ID no. 13620285
MALSPMDMSKPLWEFHLLKLKTSHAEAVTVARFHHSLGDGMSLMSLLLACTRKTCDPEAFPTFVAPKKNKAKNVCFSLVAWLWFIVRLMFHTCVEVIKSIVFICRASDTSAHIMGKPGATLSANKFIHRIISLDDVKMVKNAMNMTVNDVLFGMVQAGLSRYLNQRYDLETSSKSRKNLHNIGLHGVVFFNLRPNRNIEDLAKMMAKGSKCRWGNSIGYVLIPLGMKPQDDVFEYVRQAKTIMDGKKHSLEPLFSYGLLKVTMEVFGLRGLKTLVKRIFGSTTMIFSNVVGPDEEISFFGHRIAYIAASTFGVPQALNICIQSYVDKLIINIGVDVDVIPDPHHLCDLIIEALRMMNSAAPKKVFHASKV

SEQ ID NO: 106725 - protein, 365 aa, Arabidopsis thaliana
  peptide (1)..(365): Ceres Seq. ID no. 13620286
MDMSKPLWEFHLLKLKTSHAEAVTVARFHHSLGDGMSLMSLLLACTRKTCDPEAFPTFVAPKKNKAKNVCFSLVAWLWFIVRLMFHTCVEVIKSIVFICRASDTSAHIMGKPGATLSANKFIHRIISLDDVKMVKNAMNMTVNDVLFGMVQAGLSRYLNQRYDLETSSKSRKNLHNIGLHGVVFFNLRPNRNIEDLAKMMAKGSKCRWGNSIGYVLIPLGMKPQDDVFEYVRQAKTIMDGKKHSLEPLFSYGLLKVTMEVFGLRGLKTLVKRIFGSTTMIFSNVVGPDEEISFFGHRIAYIAASTFGVPQALNICIQSYVDKLIINIGVDVDVIPDPHHLCDLIIEALRMMNSAAPKKVFHASKV

SEQ ID NO: 106726 - DNA, 1440 bp, Arabidopsis thaliana
  misc_feature (1)..(1440): Ceres Seq. ID no. 13620294
  misc_feature (1)..(1440): Ortholog of  Ceres SEQ ID NO 14311136 as cited in SEQ ID NO 56694
aaaagcttcgatcttttaatgttgtttgatcggtagacaatcgatgccaaagtgtgaagatacctcagtccttacctatctccagaaattgcagtagtagattctgaaagaaaatgggaattgtggaaaggataaaagagatcgaagccgagatggctcggacgcagaagaacaaagctacagagtatcatcttggtcagctcaaggcaaaaattgcaaagctcagaacacaactcttagagcctccaaaaggctctagtggaggtggggatggttttgaagttacaaagtatgggcatggacgtgttgcacttataggatttccaagtgttggaaagtctacgcttttgacaatgttaactggcacacattctgaagcagcctcatatgaatttacaacacttacatgcatccctggagttattcactacaatgacaccaaaatccagttgcttgatcttcctgggattattgaaggtgcttcagaaggaaagggacgagggaggcaggttattgctgttgcaaagtcttcagaccttgtgttgatggttcttgatgcctcaaaaagtgaaggccacaggcaaatactgactaaggagcttgaagcagttggtctgcgtctgaacaaaagacctccacagatatactttaagaagaagaagactggtgggatttctttcaacactacaacccccttgactcgcattgatgagaagctctgttatcaaattctgcatgaatacaagattcacaatgctgaggttctatttcgtgaagatgctacggtggatgactttattgatgtcgttgaaggcaatcgcaaatacatcaaatgtgtatatgtctacaacaaaatagatgttgttggaatcgatgacgttgataggctggcacggcagccaaattctattgttattagctgcaacctaaagctaaacttagacagactacttgcaagaatgtgggacgaaatgggacttgtgagagtttactcaaagcctcaaagccagcaaccagatttcgatgaaccctttgtcctctcagctgatagaggtggctgcacagttgaagatttctgtaaccaagtccacagaactctggtgaaggatatgaagtatgcactagtttggggcacaagcgctaggcactaccctcaacactgtggtctttttcatcatcttgaggatgaagatgttgttcaaattgtcaagaaaaaggtgagagaagaagggggaaggggacggttcaagtcacactcgaacgcacctgctagaattgcagaccgagagaagaaagctccactaaagcaataaaacagttactcatcctgagttatcccaagtaatacagatctcatgtgtattagaactatgtaatagttgttgctcaccaattctactgtaaattctgttcttagtctataaaaaggcattggcatcc

SEQ ID NO: 106727 - protein, 399 aa, Arabidopsis thaliana
  peptide (1)..(399): Ceres Seq. ID no. 13620295
MGIVERIKEIEAEMARTQKNKATEYHLGQLKAKIAKLRTQLLEPPKGSSGGGDGFEVTKYGHGRVALIGFPSVGKSTLLTMLTGTHSEAASYEFTTLTCIPGVIHYNDTKIQLLDLPGIIEGASEGKGRGRQVIAVAKSSDLVLMVLDASKSEGHRQILTKELEAVGLRLNKRPPQIYFKKKKTGGISFNTTTPLTRIDEKLCYQILHEYKIHNAEVLFREDATVDDFIDVVEGNRKYIKCVYVYNKIDVVGIDDVDRLARQPNSIVISCNLKLNLDRLLARMWDEMGLVRVYSKPQSQQPDFDEPFVLSADRGGCTVEDFCNQVHRTLVKDMKYALVWGTSARHYPQHCGLFHHLEDEDVVQIVKKKVREEGGRGRFKSHSNAPARIADREKKAPLKQ

SEQ ID NO: 106728 - protein, 386 aa, Arabidopsis thaliana
  peptide (1)..(386): Ceres Seq. ID no. 13620296
MARTQKNKATEYHLGQLKAKIAKLRTQLLEPPKGSSGGGDGFEVTKYGHGRVALIGFPSVGKSTLLTMLTGTHSEAASYEFTTLTCIPGVIHYNDTKIQLLDLPGIIEGASEGKGRGRQVIAVAKSSDLVLMVLDASKSEGHRQILTKELEAVGLRLNKRPPQIYFKKKKTGGISFNTTTPLTRIDEKLCYQILHEYKIHNAEVLFREDATVDDFIDVVEGNRKYIKCVYVYNKIDVVGIDDVDRLARQPNSIVISCNLKLNLDRLLARMWDEMGLVRVYSKPQSQQPDFDEPFVLSADRGGCTVEDFCNQVHRTLVKDMKYALVWGTSARHYPQHCGLFHHLEDEDVVQIVKKKVREEGGRGRFKSHSNAPARIADREKKAPLKQ

SEQ ID NO: 106729 - protein, 319 aa, Arabidopsis thaliana
  peptide (1)..(319): Ceres Seq. ID no. 13620297
MLTGTHSEAASYEFTTLTCIPGVIHYNDTKIQLLDLPGIIEGASEGKGRGRQVIAVAKSSDLVLMVLDASKSEGHRQILTKELEAVGLRLNKRPPQIYFKKKKTGGISFNTTTPLTRIDEKLCYQILHEYKIHNAEVLFREDATVDDFIDVVEGNRKYIKCVYVYNKIDVVGIDDVDRLARQPNSIVISCNLKLNLDRLLARMWDEMGLVRVYSKPQSQQPDFDEPFVLSADRGGCTVEDFCNQVHRTLVKDMKYALVWGTSARHYPQHCGLFHHLEDEDVVQIVKKKVREEGGRGRFKSHSNAPARIADREKKAPLKQ

SEQ ID NO: 106730 - DNA, 1756 bp, Arabidopsis thaliana
  misc_feature (1)..(1756): Ceres Seq. ID no. 13620306
  misc_feature (1)..(1756): Ortholog of  Ceres SEQ ID NO 15168464 as cited in SEQ ID NO 59187
  misc_feature (1)..(1756): Ortholog of  Ceres SEQ ID NO 15171618 as cited in SEQ ID NO 59968
atttctttctaatttcttctcttcatgaattaagccaaaccaacaaaaaaaatcatttaattttcgcggagagatggagaaattctcgtacaactcttatccagattcaaccgactcgtcaccgagatctcgtgagatcgaattcgataacccgccgcctccatgggatgatcagaaccagaaccagcagcaacatagctacaaggtgaagtttatgtgcagctatggcggcaagattcagccacggcctcacgataatcagctcacttacgtaaacggagaaacgaagattctttccgttgatcgcgggattagattccctgttttagcttccaaactctccaccgtatgcggcggcggtgatggcggcggaggagaagttacgtttaagtatcagcttccgggagaagacttagacgctttgatctcggttacgaacgatgatgatctggagcatatgatgcacgagtacgatcgcttgcttcgtttgtcgtctaagccagcgaggatgcgtttgtttctcttcccggcttcttctggatttggttctcaaagttcgactcaatcggatcgagatcgcttcgtcgaggcgttgaacactgttcctaggctatctgaatcggagaaatccgtaactgctcctccgaataatgcggattttttgtttggatcggagaaagttgcagctccgccgccgccaccaccggctgaggtgaaattaccggttcctgtggcgttagaaccgcctttgtttaacgatccgcgtgtgattcaaccggatcacgtcgtaaatccgatggaaattcaaagacaaatgcaggaatttcagaggatgcatattagggatcaagaacaacaacaacaacaggaagctgtatacagaaggaagagtaacgaagacggtttaatagaaaccggaggtggatacttctctccaccgtacatacaaaatcctgcgccaccaccgccacagcagacgattcctcaaacgaatccgcaagctcctccgatgacgactttctggcaaggaaaccacaatccaggagtcgtatttccaacaaccacacatggattaggattaccagagcaaccagtttacatgatcccatctccatctccatctccggtgtaccacgcgccaccaccaccgcaaccgcaaggtgtcatcagaccaatacttacaggacaagtaaaccaaggcggctactatcctcaggtacagagagtggcttcagatacttacagagaaccacaccaatcaccgtacaacgtggctcagccacttcaggcacctataggaacaaaagcagcacaacaacaacaacctcctcctcctcagccttttacctctggtcctccaccaccgcaatacaccgcagtaccaccgccacgacaagtagtaggattaccagatacatcagcgtatactcaggtgacttacactggaggaatggggaaacaagtttattacacggaggctccaccgccgcagtaccatggagttggcttacctgtaactggtatgagtgaattgagaactggaccggacgggaagcttgttgctatgaacatggcacctaaagtttcatctcagagttcagattcggctgtttgattgatgaggtatttcatatggttgaatcagattattgttaatctattacaacaaatttcatcatcttttatatatatatatatatatagtgtaattaagatcactttggtgtctgataaataatgtttttttctttttccc

SEQ ID NO: 106731 - protein, 513 aa, Arabidopsis thaliana
  peptide (1)..(513): Ceres Seq. ID no. 13620307
MEKFSYNSYPDSTDSSPRSREIEFDNPPPPWDDQNQNQQQHSYKVKFMCSYGGKIQPRPHDNQLTYVNGETKILSVDRGIRFPVLASKLSTVCGGGDGGGGEVTFKYQLPGEDLDALISVTNDDDLEHMMHEYDRLLRLSSKPARMRLFLFPASSGFGSQSSTQSDRDRFVEALNTVPRLSESEKSVTAPPNNADFLFGSEKVAAPPPPPPAEVKLPVPVALEPPLFNDPRVIQPDHVVNPMEIQRQMQEFQRMHIRDQEQQQQQEAVYRRKSNEDGLIETGGGYFSPPYIQNPAPPPPQQTIPQTNPQAPPMTTFWQGNHNPGVVFPTTTHGLGLPEQPVYMIPSPSPSPVYHAPPPPQPQGVIRPILTGQVNQGGYYPQVQRVASDTYREPHQSPYNVAQPLQAPIGTKAAQQQQPPPPQPFTSGPPPPQYTAVPPPRQVVGLPDTSAYTQVTYTGGMGKQVYYTEAPPPQYHGVGLPVTGMSELRTGPDGKLVAMNMAPKVSSQSSDSAV

SEQ ID NO: 106732 - protein, 466 aa, Arabidopsis thaliana
  peptide (1)..(466): Ceres Seq. ID no. 13620308
MCSYGGKIQPRPHDNQLTYVNGETKILSVDRGIRFPVLASKLSTVCGGGDGGGGEVTFKYQLPGEDLDALISVTNDDDLEHMMHEYDRLLRLSSKPARMRLFLFPASSGFGSQSSTQSDRDRFVEALNTVPRLSESEKSVTAPPNNADFLFGSEKVAAPPPPPPAEVKLPVPVALEPPLFNDPRVIQPDHVVNPMEIQRQMQEFQRMHIRDQEQQQQQEAVYRRKSNEDGLIETGGGYFSPPYIQNPAPPPPQQTIPQTNPQAPPMTTFWQGNHNPGVVFPTTTHGLGLPEQPVYMIPSPSPSPVYHAPPPPQPQGVIRPILTGQVNQGGYYPQVQRVASDTYREPHQSPYNVAQPLQAPIGTKAAQQQQPPPPQPFTSGPPPPQYTAVPPPRQVVGLPDTSAYTQVTYTGGMGKQVYYTEAPPPQYHGVGLPVTGMSELRTGPDGKLVAMNMAPKVSSQSSDSAV

SEQ ID NO: 106733 - protein, 385 aa, Arabidopsis thaliana
  peptide (1)..(385): Ceres Seq. ID no. 13620309
MMHEYDRLLRLSSKPARMRLFLFPASSGFGSQSSTQSDRDRFVEALNTVPRLSESEKSVTAPPNNADFLFGSEKVAAPPPPPPAEVKLPVPVALEPPLFNDPRVIQPDHVVNPMEIQRQMQEFQRMHIRDQEQQQQQEAVYRRKSNEDGLIETGGGYFSPPYIQNPAPPPPQQTIPQTNPQAPPMTTFWQGNHNPGVVFPTTTHGLGLPEQPVYMIPSPSPSPVYHAPPPPQPQGVIRPILTGQVNQGGYYPQVQRVASDTYREPHQSPYNVAQPLQAPIGTKAAQQQQPPPPQPFTSGPPPPQYTAVPPPRQVVGLPDTSAYTQVTYTGGMGKQVYYTEAPPPQYHGVGLPVTGMSELRTGPDGKLVAMNMAPKVSSQSSDSAV

SEQ ID NO: 106734 - DNA, 1657 bp, Arabidopsis thaliana
  misc_feature (1)..(1657): Ceres Seq. ID no. 13620323
  misc_feature (1)..(1657): Ortholog of  Ceres SEQ ID NO 14315418 as cited in SEQ ID NO 57506
agtgtgagagagagagcgagagatatgaaagcttaaagctttgagaaagagcaactactgtgtgtataaactatcaatattattagtcttctcgtcttccttaagatcccaacagctattgaatccaatttgttcttgggtcttgttaaaagttttcgactttgctcaatttgtcgaatttgccatcgaaaatttagtaaaatgcgtggccttgatcgatggatagctgaagcaatcagatcagagtcattagatcacaatggtcaaatcatctgcggtgggttgtttctcgaagaatctcttccttcctcgtctgtctcttttctttcgtcgaaggattgttccgtcaattcgtgtcgcttcagtcaaaagtcgagttttttgaagtttaggagacgaaacgggaccagggaacctctgtttctgtctgttagtttatcgattaacgagagtaatggtgaggaagaagaaggtgaagggtataatggtcaaaacggctttaaatcggagaaaggttcggtgttgatcggtggtggtcaagaatctaaggagaagcgtagggttaaggaaaatggagcaggagctctcaacacaaccaagcatttatgggctggagcttttgcagccatggtttcaagaacttgcattgcacctcttgaacggatgaagctagaatacattgttcgcggagagcaagggaatcttcttgaactcattcagaggattgcaacaaatgaagggattagaggattttggaaagggaatttggttaatattctcagaactgctccctttaagtccatcaacttctatgcatatgatacatatagaggtcagcttctgaaattgtccgggaatgaagaaacgacaaatttcgagaggtttgttgctggtgcagctgccggagtaacagctagtttgctttgtctaccacttgatactataagaacggttatggtggcacccggtggagaagcattaggtggtgtagttggtgcattccgtcacatgattcaaactgaaggtttcttttccctatacaaaggtcttgtaccttcacttgttagtatggctccatcgggagctgtgttctacggtgtctatgatattttaaaatcagcttaccttcatacaccggaaggtaagaaacggcttgaacacatgaagcaagaaggtgaagaacttaatgctttcgatcaactcgagcttggtcccatgagaactttgttatatggagcaatcgcaggggcttgctcagaagcagcaacatatccgtttgaagttgtgagaaggcgtttacaaatgcagtcacatgctaaaaggttaagcgcagtggctacttgtgtgaagatcattgaacaaggaggtgttcctgctctatatgctggcttgattcccagcttattgcaggttttgccttccgcggcaatcagttactttgtttacgagttcatgaaagttgttctgaaagtagaatcatccgcataagacaataagcaatgagaaatgacacaattactgctggagctgcttcagaggagagttttttcgttttctttttggggtttacactgattcgtgtagtttttccacacttcatcgaaaacagataagaggttgtgaaacgtttttttgcaagaaataataagatttgggc

SEQ ID NO: 106735 - protein, 428 aa, Arabidopsis thaliana
  peptide (1)..(428): Ceres Seq. ID no. 13620324
MRGLDRWIAEAIRSESLDHNGQIICGGLFLEESLPSSSVSFLSSKDCSVNSCRFSQKSSFLKFRRRNGTREPLFLSVSLSINESNGEEEEGEGYNGQNGFKSEKGSVLIGGGQESKEKRRVKENGAGALNTTKHLWAGAFAAMVSRTCIAPLERMKLEYIVRGEQGNLLELIQRIATNEGIRGFWKGNLVNILRTAPFKSINFYAYDTYRGQLLKLSGNEETTNFERFVAGAAAGVTASLLCLPLDTIRTVMVAPGGEALGGVVGAFRHMIQTEGFFSLYKGLVPSLVSMAPSGAVFYGVYDILKSAYLHTPEGKKRLEHMKQEGEELNAFDQLELGPMRTLLYGAIAGACSEAATYPFEVVRRRLQMQSHAKRLSAVATCVKIIEQGGVPALYAGLIPSLLQVLPSAAISYFVYEFMKVVLKVESSA

SEQ ID NO: 106736 - protein, 286 aa, Arabidopsis thaliana
  peptide (1)..(286): Ceres Seq. ID no. 13620325
MVSRTCIAPLERMKLEYIVRGEQGNLLELIQRIATNEGIRGFWKGNLVNILRTAPFKSINFYAYDTYRGQLLKLSGNEETTNFERFVAGAAAGVTASLLCLPLDTIRTVMVAPGGEALGGVVGAFRHMIQTEGFFSLYKGLVPSLVSMAPSGAVFYGVYDILKSAYLHTPEGKKRLEHMKQEGEELNAFDQLELGPMRTLLYGAIAGACSEAATYPFEVVRRRLQMQSHAKRLSAVATCVKIIEQGGVPALYAGLIPSLLQVLPSAAISYFVYEFMKVVLKVESSA

SEQ ID NO: 106737 - protein, 274 aa, Arabidopsis thaliana
  peptide (1)..(274): Ceres Seq. ID no. 13620326
MKLEYIVRGEQGNLLELIQRIATNEGIRGFWKGNLVNILRTAPFKSINFYAYDTYRGQLLKLSGNEETTNFERFVAGAAAGVTASLLCLPLDTIRTVMVAPGGEALGGVVGAFRHMIQTEGFFSLYKGLVPSLVSMAPSGAVFYGVYDILKSAYLHTPEGKKRLEHMKQEGEELNAFDQLELGPMRTLLYGAIAGACSEAATYPFEVVRRRLQMQSHAKRLSAVATCVKIIEQGGVPALYAGLIPSLLQVLPSAAISYFVYEFMKVVLKVESSA

SEQ ID NO: 106738 - DNA, 1725 bp, Arabidopsis thaliana
  misc_feature (1)..(1725): Ceres Seq. ID no. 13620334
  misc_feature (1)..(1725): Ortholog of  Ceres SEQ ID NO 13657138 as cited in SEQ ID NO 65923
  misc_feature (1)..(1725): Ortholog of  Ceres SEQ ID NO 13584744 as cited in SEQ ID NO 69137
gcttccctcttttgtgttctttttgttttctgggtgaatattgtatgaacctttgactgggatttttccgaagaagaatcccagacgacgtaatttttctccaagctatggctgttgaagagatggagaagaagatcaaaggaagccaagagacggagctacataaaaacgacttatcaatcgaagacccatctccaagatgcgtgcttgaaattccggtaatgagttcagattccgataacagcagcagttgtagctcgtgttctcctgataaatcatcgtcgccattatcaacaactcctccaaacgtttcgtcttttcatcaatggaacaagatgatcgaatccatcaagaagaaatcaattaggagattctctgtcattcctctcctcgctagctacgagctcacccgcaaaaagaaacaaccgaaactatctccttgttcagaaaacgacttcgattgtgatcaaatcctcgtcgctaaaccttcgtggcgtaatttcaccttcgacgaactcgttgccgccaccgacaattttaatcccgagaacatgattgggaaaggaggacatgcggaggtgtacaaaggggttttaccggacggagagactgtggcgatcaagaagctgacgagacatgcaaaggaagtagaagaacgagtcagtgatttcttatcggagcttgggataatcgcacatgttaaccatccaaacgcagctaggcttcgtggtttcagttgtgatcgcggtttgcattttgtgcttgagtactcttctcatggcagtcttgcttctctactctttggatcagaggagtgtttggattggaagaaacggtataaagtggctatgggtatagctgatggtttgagttatcttcataacgattgccctcgacggattattcaccgagacatcaaagcttccaacattttgctctctcaagactacgaagctcagatttcggattttggactagctaagtggctcccagagcattggcctcatcacattgttttccctatcgaaggcacattcggatatctagctccagagtacttcatgcacgggattgtcgatgagaagacggatgtttttgcttttggtgtattgcttctagagatcataactggtcgtcgagctgttgataccgatagccggcaaagcatagttatgtgggcaaaacctcttctggagaagaacaacatggaagaaatagttgatcctcagctaggcaatgactttgatgaaaccgagatgaaacgagtgatgcaaacagcttcaatgtgcatacaccatgtatccactatgcgtcctgacatgaaccggttggttcagctgttgcgcggagatgaccagttagctgaacaaaaaccaggtggagcaagaacagtgagtctcgacgattgcgacttagatcacacctcttcctcttaccttaacgatctcactcgacatagacagctcttaatggagtaagcaatctgatgataccaatactttaaaaaaaactcctctcacagagaagaagaaacaacaagaagcaaaaatgttcttctttccctttttcttgtctgtgattttgcttcgtcttctccattgtaaaaatcttaaaaagagggaatatgttgtatgtattaatttggcttttgtcttcaaattctggttgtctcttatgttgtaaaattctaaaattcagatgataaaattcacaatttgtaatgcc

SEQ ID NO: 106739 - protein, 456 aa, Arabidopsis thaliana
  peptide (1)..(456): Ceres Seq. ID no. 13620335
MAVEEMEKKIKGSQETELHKNDLSIEDPSPRCVLEIPVMSSDSDNSSSCSSCSPDKSSSPLSTTPPNVSSFHQWNKMIESIKKKSIRRFSVIPLLASYELTRKKKQPKLSPCSENDFDCDQILVAKPSWRNFTFDELVAATDNFNPENMIGKGGHAEVYKGVLPDGETVAIKKLTRHAKEVEERVSDFLSELGIIAHVNHPNAARLRGFSCDRGLHFVLEYSSHGSLASLLFGSEECLDWKKRYKVAMGIADGLSYLHNDCPRRIIHRDIKASNILLSQDYEAQISDFGLAKWLPEHWPHHIVFPIEGTFGYLAPEYFMHGIVDEKTDVFAFGVLLLEIITGRRAVDTDSRQSIVMWAKPLLEKNNMEEIVDPQLGNDFDETEMKRVMQTASMCIHHVSTMRPDMNRLVQLLRGDDQLAEQKPGGARTVSLDDCDLDHTSSSYLNDLTRHRQLLME

SEQ ID NO: 106740 - protein, 451 aa, Arabidopsis thaliana
  peptide (1)..(451): Ceres Seq. ID no. 13620336
MEKKIKGSQETELHKNDLSIEDPSPRCVLEIPVMSSDSDNSSSCSSCSPDKSSSPLSTTPPNVSSFHQWNKMIESIKKKSIRRFSVIPLLASYELTRKKKQPKLSPCSENDFDCDQILVAKPSWRNFTFDELVAATDNFNPENMIGKGGHAEVYKGVLPDGETVAIKKLTRHAKEVEERVSDFLSELGIIAHVNHPNAARLRGFSCDRGLHFVLEYSSHGSLASLLFGSEECLDWKKRYKVAMGIADGLSYLHNDCPRRIIHRDIKASNILLSQDYEAQISDFGLAKWLPEHWPHHIVFPIEGTFGYLAPEYFMHGIVDEKTDVFAFGVLLLEIITGRRAVDTDSRQSIVMWAKPLLEKNNMEEIVDPQLGNDFDETEMKRVMQTASMCIHHVSTMRPDMNRLVQLLRGDDQLAEQKPGGARTVSLDDCDLDHTSSSYLNDLTRHRQLLME

SEQ ID NO: 106741 - protein, 418 aa, Arabidopsis thaliana
  peptide (1)..(418): Ceres Seq. ID no. 13620337
MSSDSDNSSSCSSCSPDKSSSPLSTTPPNVSSFHQWNKMIESIKKKSIRRFSVIPLLASYELTRKKKQPKLSPCSENDFDCDQILVAKPSWRNFTFDELVAATDNFNPENMIGKGGHAEVYKGVLPDGETVAIKKLTRHAKEVEERVSDFLSELGIIAHVNHPNAARLRGFSCDRGLHFVLEYSSHGSLASLLFGSEECLDWKKRYKVAMGIADGLSYLHNDCPRRIIHRDIKASNILLSQDYEAQISDFGLAKWLPEHWPHHIVFPIEGTFGYLAPEYFMHGIVDEKTDVFAFGVLLLEIITGRRAVDTDSRQSIVMWAKPLLEKNNMEEIVDPQLGNDFDETEMKRVMQTASMCIHHVSTMRPDMNRLVQLLRGDDQLAEQKPGGARTVSLDDCDLDHTSSSYLNDLTRHRQLLME

SEQ ID NO: 106742 - DNA, 1524 bp, Arabidopsis thaliana
  misc_feature (1)..(1524): Ceres Seq. ID no. 13620338
  misc_feature (1)..(1524): Ortholog of  Ceres SEQ ID NO 13582281 as cited in SEQ ID NO 51014
  misc_feature (1)..(1524): Ortholog of  Ceres SEQ ID NO 14315606 as cited in SEQ ID NO 53515
  misc_feature (1)..(1524): Ortholog of  Ceres SEQ ID NO 12617417 as cited in SEQ ID NO 65089
atctacgaagagagaccatggccgagccaaaaccgaagcttcatgttgcagtgttcccatggttagctttaggtcacatgattccttacttgcaactctcaaagctcatagcaaggaaaggccatactgtgtccttcatctccacagctcgtaacatttcacgtcttcccaatatatcctccgacctttccgtgaatttcgtttctttgccgttaagtcaaaccgtcgaccatctcccagagaacgctgaggccaccactgatgtcccggagactcacatagcttatctgaagaaagcatttgatgggctttctgaagctttcacagagtttttagaagcttccaaaccaaactggatagtgtatgatatcttgcaccattgggtcccgcctatcgctgagaagctcggcgtgagacgagccatcttctgcacgttcaacgcagcttccatcatcatcatcggtgggccagcatcagtcatgattcaaggtcatgaccctcgaaagactgctgaagatcttatcgtgcctccaccatgggtcccgtttgagaccaacatagtttaccgtctctttgaagctaagaggatcatggagtatcccacggcaggtgtaactggagttgaattgaacgacaactgtagattgggtttggcttacgttggctctgaggttattgtgattagatcatgtatggaactcgaacctgagtggattcaattgctcagtaaactccaaggaaagcctgtgattccaattggtttactcccggctacaccaatggatgatgcagatgacgagggaacatggttagacatcagagaatggctagacagacatcaagcaaagtctgtggtttatgtagccttaggaactgaagtgacaattagtaacgaagagattcaaggtttagctcatgggttggagctttgcaggttacctttcttttggacgctaaggaagaggactagagcttctatgctactacctgatgggttcaaagagagagtcaaagagcgtggagtcatttggaccgagtgggtacctcagaccaagatactgagccatggttcagttggtgggtttgttactcattgtggttggggatcagctgtggaagggcttagctttggtgtccctttgatcatgtttccatgtaacctagaccagccgctagtggctaggttgctcagtgggatgaatataggcttggagattccaaggaatgagcgagacgggctgttcacgagtgcttctgttgcagagacaatcagacatgttgttgtggaagaagaaggaaagatctacaggaacaatgctgcatctcagcaaaagaaaatattcgggaacaagagattgcaagatcagtatgcggatggttttatcgagtttctggagaatcctatagcaggagtgtagagcaaaataatgaagaattatactgtcttctctgtcaacgtcagcgatgtgtgtaataagagttgagaaataaggcacaatcaatgtgataaccaatgttaatttt

SEQ ID NO: 106743 - protein, 471 aa, Arabidopsis thaliana
  peptide (1)..(471): Ceres Seq. ID no. 13620339
LRRETMAEPKPKLHVAVFPWLALGHMIPYLQLSKLIARKGHTVSFISTARNISRLPNISSDLSVNFVSLPLSQTVDHLPENAEATTDVPETHIAYLKKAFDGLSEAFTEFLEASKPNWIVYDILHHWVPPIAEKLGVRRAIFCTFNAASIIIIGGPASVMIQGHDPRKTAEDLIVPPPWVPFETNIVYRLFEAKRIMEYPTAGVTGVELNDNCRLGLAYVGSEVIVIRSCMELEPEWIQLLSKLQGKPVIPIGLLPATPMDDADDEGTWLDIREWLDRHQAKSVVYVALGTEVTISNEEIQGLAHGLELCRLPFFWTLRKRTRASMLLPDGFKERVKERGVIWTEWVPQTKILSHGSVGGFVTHCGWGSAVEGLSFGVPLIMFPCNLDQPLVARLLSGMNIGLEIPRNERDGLFTSASVAETIRHVVVEEEGKIYRNNAASQQKKIFGNKRLQDQYADGFIEFLENPIAGV

SEQ ID NO: 106744 - protein, 466 aa, Arabidopsis thaliana
  peptide (1)..(466): Ceres Seq. ID no. 13620340
MAEPKPKLHVAVFPWLALGHMIPYLQLSKLIARKGHTVSFISTARNISRLPNISSDLSVNFVSLPLSQTVDHLPENAEATTDVPETHIAYLKKAFDGLSEAFTEFLEASKPNWIVYDILHHWVPPIAEKLGVRRAIFCTFNAASIIIIGGPASVMIQGHDPRKTAEDLIVPPPWVPFETNIVYRLFEAKRIMEYPTAGVTGVELNDNCRLGLAYVGSEVIVIRSCMELEPEWIQLLSKLQGKPVIPIGLLPATPMDDADDEGTWLDIREWLDRHQAKSVVYVALGTEVTISNEEIQGLAHGLELCRLPFFWTLRKRTRASMLLPDGFKERVKERGVIWTEWVPQTKILSHGSVGGFVTHCGWGSAVEGLSFGVPLIMFPCNLDQPLVARLLSGMNIGLEIPRNERDGLFTSASVAETIRHVVVEEEGKIYRNNAASQQKKIFGNKRLQDQYADGFIEFLENPIAGV

SEQ ID NO: 106745 - protein, 446 aa, Arabidopsis thaliana
  peptide (1)..(446): Ceres Seq. ID no. 13620341
MIPYLQLSKLIARKGHTVSFISTARNISRLPNISSDLSVNFVSLPLSQTVDHLPENAEATTDVPETHIAYLKKAFDGLSEAFTEFLEASKPNWIVYDILHHWVPPIAEKLGVRRAIFCTFNAASIIIIGGPASVMIQGHDPRKTAEDLIVPPPWVPFETNIVYRLFEAKRIMEYPTAGVTGVELNDNCRLGLAYVGSEVIVIRSCMELEPEWIQLLSKLQGKPVIPIGLLPATPMDDADDEGTWLDIREWLDRHQAKSVVYVALGTEVTISNEEIQGLAHGLELCRLPFFWTLRKRTRASMLLPDGFKERVKERGVIWTEWVPQTKILSHGSVGGFVTHCGWGSAVEGLSFGVPLIMFPCNLDQPLVARLLSGMNIGLEIPRNERDGLFTSASVAETIRHVVVEEEGKIYRNNAASQQKKIFGNKRLQDQYADGFIEFLENPIAGV

SEQ ID NO: 106746 - DNA, 1464 bp, Arabidopsis thaliana
  misc_feature (1)..(1464): Ceres Seq. ID no. 13620342
  misc_feature (1)..(1464): Ortholog of  Ceres SEQ ID NO 14304969 as cited in SEQ ID NO 53193
  misc_feature (1)..(1464): Ortholog of  Ceres SEQ ID NO 14314851 as cited in SEQ ID NO 54014
  misc_feature (1)..(1464): Ortholog of  Ceres SEQ ID NO 14307442 as cited in SEQ ID NO 54239
  misc_feature (1)..(1464): Ortholog of  Ceres SEQ ID NO 15227214 as cited in SEQ ID NO 55368
  misc_feature (1)..(1464): Ortholog of  Ceres SEQ ID NO 13638897 as cited in SEQ ID NO 55839
  misc_feature (1)..(1464): Ortholog of  Ceres SEQ ID NO 14302561 as cited in SEQ ID NO 56543
  misc_feature (1)..(1464): Ortholog of  Ceres SEQ ID NO 15177710 as cited in SEQ ID NO 59217
  misc_feature (1)..(1464): Ortholog of  Ceres SEQ ID NO 15173484 as cited in SEQ ID NO 61804
  misc_feature (1)..(1464): Ortholog of  Ceres SEQ ID NO 13596958 as cited in SEQ ID NO 63319
  misc_feature (1)..(1464): Ortholog of  Ceres SEQ ID NO 12614573 as cited in SEQ ID NO 68344
  misc_feature (1)..(1464): Ortholog of  Ceres SEQ ID NO 12614814 as cited in SEQ ID NO 68816
  misc_feature (1)..(1464): Ortholog of  Ceres SEQ ID NO 13624040 as cited in SEQ ID NO 0
aattttaatctcggctacgagtttctgggtaatgataattaagcttttttctgctttaatggaaggaccttgacacttctctctctctttctctttgctattcatcttctacagtttcttaaaaattatactcttcttctccaaaatatctcagactctcttatttttgatcgtcttcttcttcttcgttgtgagcttccatttttcatccaggatttgttttttccgtttgaggtaaagcagctttgcagttaaagaaaccttgagtatccaatgtccccggaagaggagctacagagcaatgtatcggtggctagttcttcacctactagcaattgcatctccaggaacactctaggaggacttaaagagcataactacttgggtctctctgattgttcttctgttggaagctctactctctctccccttgctgaagatgacaaagctactatcagcctcaaggctacggagctgacacttggtcttcctggatcacaatctcctgcgagagacacagagcttaaccttttgagcccagcaaagctagatgagaagccattctttcctttgcttccttctaaagatgagatatgctcctcctcgcaaaagaacaatgcatcgggaaacaaaagaggcttttctgacacaatggatcagtttgctgaagctaaaagttcagtgtatactgagaaaaactggatgttccctgaagcagcagccacccagtctgtaacaaagaaagatgtgccacaaaacatacccaaaggacagtctagcactacaaacaatagctctagtccacctgcagccaaggcacaaattgtcggttggcctccagtgagatcctacaggaagaacacattggccactacttgtaagaacagtgacgaagttgatgggaggccaggttctggggctctcttcgtgaaggtcagtatggatggtgctccttatctgaggaaagttgacctgaggagctacactaactacggggagctttcttcagccttggagaaaatgttcaccactttcactcttggtcaatgtggatctaatggagctgctgggaaggatatgcttagtgagaccaagctcaaggatcttttgaatggaaaagactatgtgctcacttatgaggataaggatggtgactggatgcttgttggagatgttccgtgggagatgtttattgatgtctgcaagaagctgaagataatgaaagggtgtgatgctattgggttagctgcagctccgagagcaatggagaaatcgaagatgagagcttaaaagatggaacatgacaaagctttctaactatacaaaatatgtgcgatcttttggtggtgtttttaaatttcaaaacatcaatatctttagtttctgaatttttaaaatgaagtaagtaagactacgaatgtaaggaaatgaagaagaattaaaaatgatctatttttgttgttt

SEQ ID NO: 106747 - protein, 338 aa, Arabidopsis thaliana; identical to SEQ ID NO: 21776
  peptide (1)..(338): Ceres Seq. ID no. 13620343

SEQ ID NO: 106748 - protein, 212 aa, Arabidopsis thaliana; identical to SEQ ID NO: 21777
  peptide (1)..(212): Ceres Seq. ID no. 13620344

SEQ ID NO: 106749 - protein, 195 aa, Arabidopsis thaliana; identical to SEQ ID NO: 21778
  peptide (1)..(195): Ceres Seq. ID no. 13620345

SEQ ID NO: 106750 - DNA, 1148 bp, Arabidopsis thaliana
  misc_feature (1)..(1148): Ceres Seq. ID no. 13620354
  misc_feature (1)..(1148): Ortholog of  Ceres SEQ ID NO 15227018 as cited in SEQ ID NO 0
agaaaaaaaaaaaccactcctcgatgtctgatcaacagcttgaaacagagatcaacttctggggagagacttcagaagaagattactttaatctcaaaggcatcatcggctccaaatctttcttcacttcccctcgaggtctcaacctcttcactcgttcatggcttccctcttcctcttctccgccacgtggtctcatcttcatggtccatggctacggcaatgacgtcagctggactttccagtccactcccatttttcttgctcagatgggtttcgcttgctttgctctcgacatcgaaggtcatggccgatctgacggtgtccgcgcctatgttccctccgtagatctagtcgtcgatgacatcatctctttctttaattcgattaagcaaaaccctaaatttcaaggcttacctcggtttctcttcggagaatcaatgggcggtgcgatttgtcttttgatccaattcgctgatccgttagggtttgatggagcggttttggttgctcccatgtgtaaaatctcggacaaggtgagacctaaatggccggttgatcagtttctgattatgatctcaagattcttgccgacttgggcgattgttccgacggaagatctgttggagaagtcgatcaaagttgaagagaagaaaccgattgccaagaggaatccgatgaggtacaatgagaaaccgcggttaggtacagtgatggagctacttagggttactgattacttagggaagaagctaaaagatgttagcattcccttcattattgtgcacggaagtgcagatgctgtgactgatcctgaagtgagcagagagttgtacgaacatgctaagagcaaagataagacattgaagatctatgacgggatgatgcattcgatgttgttcggtgaacccgacgacaacattgagattgttcgtaaagatattgttagctggttgaatgatagatgtggtggagacaaaaccaaaacccaggtttgaattcattgtttgtctgattctctctcattggtgctgtaaggtttgtatagtcatattttatcatggaaaaatgtttggattaagtgactagaaattgatgtacacattgttcttgcaggtttttcttgataatattcagtttcattctat

SEQ ID NO: 106751 - protein, 331 aa, Arabidopsis thaliana
  peptide (1)..(331): Ceres Seq. ID no. 13620355
KKKNHSSMSDQQLETEINFWGETSEEDYFNLKGIIGSKSFFTSPRGLNLFTRSWLPSSSSPPRGLIFMVHGYGNDVSWTFQSTPIFLAQMGFACFALDIEGHGRSDGVRAYVPSVDLVVDDIISFFNSIKQNPKFQGLPRFLFGESMGGAICLLIQFADPLGFDGAVLVAPMCKISDKVRPKWPVDQFLIMISRFLPTWAIVPTEDLLEKSIKVEEKKPIAKRNPMRYNEKPRLGTVMELLRVTDYLGKKLKDVSIPFIIVHGSADAVTDPEVSRELYEHAKSKDKTLKIYDGMMHSMLFGEPDDNIEIVRKDIVSWLNDRCGGDKTKTQV

SEQ ID NO: 106752 - protein, 324 aa, Arabidopsis thaliana
  peptide (1)..(324): Ceres Seq. ID no. 13620356
MSDQQLETEINFWGETSEEDYFNLKGIIGSKSFFTSPRGLNLFTRSWLPSSSSPPRGLIFMVHGYGNDVSWTFQSTPIFLAQMGFACFALDIEGHGRSDGVRAYVPSVDLVVDDIISFFNSIKQNPKFQGLPRFLFGESMGGAICLLIQFADPLGFDGAVLVAPMCKISDKVRPKWPVDQFLIMISRFLPTWAIVPTEDLLEKSIKVEEKKPIAKRNPMRYNEKPRLGTVMELLRVTDYLGKKLKDVSIPFIIVHGSADAVTDPEVSRELYEHAKSKDKTLKIYDGMMHSMLFGEPDDNIEIVRKDIVSWLNDRCGGDKTKTQV

SEQ ID NO: 106753 - protein, 264 aa, Arabidopsis thaliana
  peptide (1)..(264): Ceres Seq. ID no. 13620357
MVHGYGNDVSWTFQSTPIFLAQMGFACFALDIEGHGRSDGVRAYVPSVDLVVDDIISFFNSIKQNPKFQGLPRFLFGESMGGAICLLIQFADPLGFDGAVLVAPMCKISDKVRPKWPVDQFLIMISRFLPTWAIVPTEDLLEKSIKVEEKKPIAKRNPMRYNEKPRLGTVMELLRVTDYLGKKLKDVSIPFIIVHGSADAVTDPEVSRELYEHAKSKDKTLKIYDGMMHSMLFGEPDDNIEIVRKDIVSWLNDRCGGDKTKTQV

SEQ ID NO: 106754 - DNA, 1512 bp, Arabidopsis thaliana
  misc_feature (1)..(1512): Ceres Seq. ID no. 13620358
  misc_feature (1)..(1512): Ortholog of  Ceres SEQ ID NO 14315626 as cited in SEQ ID NO 52943
  misc_feature (1)..(1512): Ortholog of  Ceres SEQ ID NO 14302742 as cited in SEQ ID NO 66899
  misc_feature (1)..(1512): Ortholog of  Ceres SEQ ID NO 14313536 as cited in SEQ ID NO 67925
agcattgttttgttatcttcttcttcatcacaatttttctacggtcagagattcaaaagagttctttctctctatcttattctccgatcatcatgatgcagcagccaccacccggaggtatccttccacatcacgctcctcctccttctgcgcaacaacagtacggttaccaacaaccttacgggattgctggagctgctccaccaccaccacagatgtggaatcctcaagcggcggcgccgccatcagttcagcctacgaccgctgacgagatccggactctttggatcggggacttacagtattggatggatgagaatttcctctacggttgctttgctcataccggagagatggtttctgctaaagtgattcgtaacaagcaaaccggtcaagttgaaggatacggtttcattgaattcgcatctcatgctgctgctgaaagagttctacaaacattcaacaacgctcctatcccgagctttcctgatcagctctttagactgaactgggcatcattgagttcaggagataaacgagacgattcaccggactacacgatatttgtcggtgatctggctgctgatgttacggattatatcttacttgagacgttcagagcctcttatccgtcagtgaagggtgcaaaggttgttattgacagagtcactggacgtacaaaaggatatgggtttgttaggttttctgatgaaagtgaacagatccgtgctatgacggagatgaatggcgttccttgttctactagacctatgagaattggtcccgctgctagcaagaaaggtgtaactggtcaaagagattcataccagagctctgctgcaggggtaacaactgataatgatccaaataacacaactgtttttgttggtggattagatgcatctgtcacggatgatcatctgaagaatgtctttagccaatatggtgagattgtgcatgtgaaaatacccgctggaaagcgctgtggattcgttcagttttccgagaagagctgtgcagaggaagctcttagaatgctgaatggagtgcaattaggcggaacaaccgtcaggctctcatggggccgaagtccttcgaacaaacagtcgggggatccgagccagttttactacggtgggtatggacaaggacaggagcagtatgggtacacgatgcctcaagaccctaatgcatattacggaggctactctggtggaggatacagcggtggttaccagcagacaccacaggcaggacagcaaccaccacaacagccaccacagcagcaacaagtcgggtttagctactaaccccgagagtattgcttgagttaatgtcactctgcttgttgtttgcgtactttgttatgaacttgtttctgcgtgccttgttatgaatattttcccaaacacagtttatttgtctttgcttttctctaggtgtgtgttgagtttttaactcttaataatgtttctgcgatgcttctgtttttaatgttttcatcaccttttg

SEQ ID NO: 106755 - protein, 435 aa, Arabidopsis thaliana
  peptide (1)..(435): Ceres Seq. ID no. 13620359
HCFVIFFFITIFLRSEIQKSSFSLSYSPIIMMQQPPPGGILPHHAPPPSAQQQYGYQQPYGIAGAAPPPPQMWNPQAAAPPSVQPTTADEIRTLWIGDLQYWMDENFLYGCFAHTGEMVSAKVIRNKQTGQVEGYGFIEFASHAAAERVLQTFNNAPIPSFPDQLFRLNWASLSSGDKRDDSPDYTIFVGDLAADVTDYILLETFRASYPSVKGAKVVIDRVTGRTKGYGFVRFSDESEQIRAMTEMNGVPCSTRPMRIGPAASKKGVTGQRDSYQSSAAGVTTDNDPNNTTVFVGGLDASVTDDHLKNVFSQYGEIVHVKIPAGKRCGFVQFSEKSCAEEALRMLNGVQLGGTTVRLSWGRSPSNKQSGDPSQFYYGGYGQGQEQYGYTMPQDPNAYYGGYSGGGYSGGYQQTPQAGQQPPQQPPQQQQVGFSY

SEQ ID NO: 106756 - protein, 405 aa, Arabidopsis thaliana; identical to SEQ ID NO: 21464
  peptide (1)..(405): Ceres Seq. ID no. 13620360

SEQ ID NO: 106757 - protein, 404 aa, Arabidopsis thaliana; identical to SEQ ID NO: 21465
  peptide (1)..(404): Ceres Seq. ID no. 13620361

SEQ ID NO: 106758 - DNA, 2355 bp, Arabidopsis thaliana
  misc_feature (1)..(2355): Ceres Seq. ID no. 13620366
  misc_feature (1)..(2355): Ortholog of  Ceres SEQ ID NO 12617323 as cited in SEQ ID NO 64129
atgggagcatcagattcaactctgctaggctctcaggaaaatcgaggtgatgtgattacgactatatctcatcgatcagaaatagtcgatcccattctcgagaatcttaaagctctcacagtaagtaggccaatattgaagtctcctcccacggaaagtagcttaacagatatcttagtgagaaaagctctatccagttcctcttccaatacggttgatcctcaaatacttgtagagctcttctccatttaccgagaatggcaagagaacaaagctcaagaaattaccaagagacaggaagatatagaaaacaagatagaagtcgcagatgctttggcgactaaacttttacagaggtttaaccactctgtttctgcaatgaggacaactgcccagcatttatctcaagttcatggtttgcaggtggagctcggggagcttaaaggaagattgacagaggtgatcagcaactgcgatacattatgtaagagaattaattctgagggacctgaatctctgaggtccacagtggcgcctttttctcttgcatctcccgattcggtcagtataaatactactacaactctgtcttctaaacccgaggcataagagtaaatactcttaatggtagttagattggtgaatcgaatacgtgtagttctacagcatactttctgatctcctctgattttgcatagatgcatgatgatgctattgattgatctttttgttacaaatcattgttttcttttgtcatttcatctttaggcttttcgatttgtacaatcgcttgtgaccagtaagaaaccattgttctgataaggggaaaattcatatgtaataaatatgctttgtttgccttttgatacaaaatccacaatggacgattggcagtgtatggagttgaacaacttgaaacaacgaaagagaacaacaacaaatgaaacaaaattacatttcaatgaaaaagcagataatgattactcttctttgccacctccccatatcaaggttgctgctgagcgtccatgtaaccagcgtcggcgagcactttctccctcttggccagctcaaggtcttcgtccaccatcatcttcaccagcttctcgaaccctacttttggcttccaccccaacatttcctttgccttgcttgcgtctcctttcagattgtcgacctccgtgggccggaagtaccttttgtcgatctcgacatggtctttccagttgagccccacgtacccgaaagacacgtccagaaactccttgacggtgtgtgattcctcagttgcaaccacatagtcatctggtttctcctgctgcagcatcagccacattgcttccacgtagtctcctgcgaaaccccagtctcttgaagcctgtatatttcccaggaagagcttggtctgcaatccgaccttgatccttcccaaggcccgagtgattttccgagtcacgaagttctcgcctctgcgaggtgactcgtggttgaagaggattccgttgcaggcgtacagaccgtaggcctctcggtaattgactgtgtaccaatgagcagcgcatttggacgcagcgtagggagatctcggatggaagggcgtggtctctgactgcggaggaggagttgacccgaacatctccgaagagccagcctggtagtacttgatggcgcggccattgtcaatgttgtgagatctgacagcctccaggagacgaagagctccagtagcgacaacgtcagcagtgtaatcagggatctcgaaggagacggcaacgtgggactgagcagcaaggttgtagacctcgtcaggcttgatgacgtcgagccaacggcggagggaggaggcatcagagagatcaccgtagtggagcttcatgagagctttgttgacgttgtggggatcaacgtagatatggttgagtcgctgagtgttaaaattggaggatcgtcggatgaggccgtgaacttcgtagcctttctcgagcaggaactcggtcaggtaagatccatcttggccagtgattccggtgaccagtgcaatcttcctcggcttcacaatgtcggaatcgccattgagagatctggaggccattgatgggtgggtgcagagtcagatcggatcagaagaaatgattgggcacgtcgcgctttctgtttttgattttagcgtcaactgattcgatgacttatatataataaagcccaaggacgaagaagacagagagagagggttacttctgtaaactttaaaggtgaatctgtatggctacgtaaagttgtacttgtatggcaaatcgccggcaagcgttgaccgattacgaatattttactatctattgggccaagatgggcttt

SEQ ID NO: 106759 - protein, 202 aa, Arabidopsis thaliana
  peptide (1)..(202): Ceres Seq. ID no. 13620367
MGASDSTLLGSQENRGDVITTISHRSEIVDPILENLKALTVSRPILKSPPTESSLTDILVRKALSSSSSNTVDPQILVELFSIYREWQENKAQEITKRQEDIENKIEVADALATKLLQRFNHSVSAMRTTAQHLSQVHGLQVELGELKGRLTEVISNCDTLCKRINSEGPESLRSTVAPFSLASPDSVSINTTTTLSSKPEA

SEQ ID NO: 106760 - protein, 127 aa, Arabidopsis thaliana
  peptide (1)..(127): Ceres Seq. ID no. 13620368
MLCLPFDTKSTMDDWQCMELNNLKQRKRTTTNETKLHFNEKADNDYSSLPPPHIKVAAERPCNQRRRALSPSWPAQGLRPPSSSPASRTLLLASTPTFPLPCLRLLSDCRPPWAGSTFCRSRHGLSS

SEQ ID NO: 106761 - protein, 116 aa, Arabidopsis thaliana
  peptide (1)..(116): Ceres Seq. ID no. 13620369
MDDWQCMELNNLKQRKRTTTNETKLHFNEKADNDYSSLPPPHIKVAAERPCNQRRRALSPSWPAQGLRPPSSSPASRTLLLASTPTFPLPCLRLLSDCRPPWAGSTFCRSRHGLSS

SEQ ID NO: 106762 - DNA, 1589 bp, Arabidopsis thaliana
  misc_feature (1)..(1589): Ceres Seq. ID no. 13620374
  misc_feature (1)..(1589): Ortholog of  Ceres SEQ ID NO 14315862 as cited in SEQ ID NO 60207
  misc_feature (1)..(1589): Ortholog of  Ceres SEQ ID NO 13660129 as cited in SEQ ID NO 67547
aatgagttttacggaggagctcgcagctgcaggtaggtagcggaaacaagagatctttatatattccttcctctcttctctaacctaattccggcgaagaagaagacggaaaaagccctgactagtgaagaatccgatgtcagcgactgctctctcgagattaaacccagtttctcaatttgggtttcaaagaatcgttgctgggaaaagtaagagcttcttctccaattcgggtcaaaggagattgttttctgatagttctcggtttcgtcaagccatggctgcttctggttctttgccagtgtttggagacgcttgtttggatgatttggttactacttgttcaaatggcttagacttcactaagaagcgttctagtggtggtagcttcactattaattgtcctgtagctagcatgagacttgggaagagagggggaatgatgaagaaccgattggtttgtcactattctgttgttgatccgctagaaaagagtcgtgcactctttgggacattgtctaagagtgttcatacttctcctatggcttgtttctcggttggaccggctcatgagctgtcttctcttaacggtggttctcaagagtcaccaccaactactactacatctcttaagagtcttaggctagtgtcggggtcatgttatctcccgcatcctgaaaaggaagctacaggtggagaagacgctcactttatctgcgatgaagaacaagctattggagttgcagatggagttggcggttgggctgaggttggtgttaatgcgggactgttttcgcgtgagcttatgtcttattcagtatctgcaattcaagaacagcataaaggttcttctatcgaccctttagtggtgttagagaaagcacattctcaaaccaaagccaaaggctcctccacggcttgtatcatcgttttaaaagataagggattacacgccattaatctcggagacagtggattcacggtggttagagagggaaccacggtgtttcagtctccggttcagcagcatggattcaacttcacttatcaattagagagtgggaacagtgccgacgtccctagctccggtcaggtattcacaattgatgttcagtctggagatgtcattgtcgctggaacagatggagtgtatgataatttatacaatgaagagatcacaggagtggtggttagctcggtgagggccggtttagacccgaaaggcacagctcagaagattgcagagttggcacgtcaaagagcagtcgacaaaaaacggcagagccctttcgcaactgcggctcaggaggctggctacaggtattacggaggaaagcttgatgacatcactgccgtcgtttcttacgtcacctcatcttaagagaccaaattgatgatcttctgtttaaacggtccaatcccgccaaaatctgacgataccttttcttttattttttgttgtgtttttttgaaaaacttgttacggtattaaaagtcctcaggaggtcattaaatgtgtatttttcacggaatcaaaatatagtttagctaagttatgaaacgtgaatctaattgtgtttacttaggtg

SEQ ID NO: 106763 - protein, 414 aa, Arabidopsis thaliana
  peptide (1)..(414): Ceres Seq. ID no. 13620375
MSATALSRLNPVSQFGFQRIVAGKSKSFFSNSGQRRLFSDSSRFRQAMAASGSLPVFGDACLDDLVTTCSNGLDFTKKRSSGGSFTINCPVASMRLGKRGGMMKNRLVCHYSVVDPLEKSRALFGTLSKSVHTSPMACFSVGPAHELSSLNGGSQESPPTTTTSLKSLRLVSGSCYLPHPEKEATGGEDAHFICDEEQAIGVADGVGGWAEVGVNAGLFSRELMSYSVSAIQEQHKGSSIDPLVVLEKAHSQTKAKGSSTACIIVLKDKGLHAINLGDSGFTVVREGTTVFQSPVQQHGFNFTYQLESGNSADVPSSGQVFTIDVQSGDVIVAGTDGVYDNLYNEEITGVVVSSVRAGLDPKGTAQKIAELARQRAVDKKRQSPFATAAQEAGYRYYGGKLDDITAVVSYVTSS

SEQ ID NO: 106764 - protein, 367 aa, Arabidopsis thaliana
  peptide (1)..(367): Ceres Seq. ID no. 13620376
MAASGSLPVFGDACLDDLVTTCSNGLDFTKKRSSGGSFTINCPVASMRLGKRGGMMKNRLVCHYSVVDPLEKSRALFGTLSKSVHTSPMACFSVGPAHELSSLNGGSQESPPTTTTSLKSLRLVSGSCYLPHPEKEATGGEDAHFICDEEQAIGVADGVGGWAEVGVNAGLFSRELMSYSVSAIQEQHKGSSIDPLVVLEKAHSQTKAKGSSTACIIVLKDKGLHAINLGDSGFTVVREGTTVFQSPVQQHGFNFTYQLESGNSADVPSSGQVFTIDVQSGDVIVAGTDGVYDNLYNEEITGVVVSSVRAGLDPKGTAQKIAELARQRAVDKKRQSPFATAAQEAGYRYYGGKLDDITAVVSYVTSS

SEQ ID NO: 106765 - protein, 321 aa, Arabidopsis thaliana
  peptide (1)..(321): Ceres Seq. ID no. 13620377
MRLGKRGGMMKNRLVCHYSVVDPLEKSRALFGTLSKSVHTSPMACFSVGPAHELSSLNGGSQESPPTTTTSLKSLRLVSGSCYLPHPEKEATGGEDAHFICDEEQAIGVADGVGGWAEVGVNAGLFSRELMSYSVSAIQEQHKGSSIDPLVVLEKAHSQTKAKGSSTACIIVLKDKGLHAINLGDSGFTVVREGTTVFQSPVQQHGFNFTYQLESGNSADVPSSGQVFTIDVQSGDVIVAGTDGVYDNLYNEEITGVVVSSVRAGLDPKGTAQKIAELARQRAVDKKRQSPFATAAQEAGYRYYGGKLDDITAVVSYVTSS

SEQ ID NO: 106766 - DNA, 1638 bp, Arabidopsis thaliana
  misc_feature (1)..(1638): Ceres Seq. ID no. 13620378
  misc_feature (1)..(1638): Ortholog of  Ceres SEQ ID NO 13594209 as cited in SEQ ID NO 59089
  misc_feature (1)..(1638): Ortholog of  Ceres SEQ ID NO 15169611 as cited in SEQ ID NO 65939
  misc_feature (1)..(1638): Ortholog of  Ceres SEQ ID NO 14307960 as cited in SEQ ID NO 66187
  misc_feature (1)..(1638): Ortholog of  Ceres SEQ ID NO 13502874 as cited in SEQ ID NO 66298
  misc_feature (1)..(1638): Ortholog of  Ceres SEQ ID NO 12614124 as cited in SEQ ID NO 68392
  misc_feature (1)..(1638): Ortholog of  Ceres SEQ ID NO 14308011 as cited in SEQ ID NO 69234
gactactctccagaatcatgcgactagtctccagaattatgtgttcacgaatgggtgagatgattgatttgtttctactcgctctcatggccggattcattgcagtggcgtatgttttccgatcaaagcagaagaagaatttaccgccaaatcctgtaggttttccggtgatcggacacctccaccttctcaaagaacctgttcaccgttcccttcgtgacctctctcgaaacctcggcatcgacgtgtttattctccggctaggctctcgtcgagcggtggttgtaacgtcagcttcagctgcggaggagttcttatctcagcaaaacgatgttgttttcgccaacaggcctctcgctactttaactgaatacatgggttacaacaacacgctggttagcacagctccgtacggggagcattggcgcagactccgccgtttctgcgccgtagatatcttgtccaccgctcgtctcagagacttttcggatatacggagagacgaagtgagagctatgattcggaagatcaacgtggaactggtaacatcaggaggcagtgtcagattgaaactccagccgtttctttatgggcttacgtataacatcctaatgagcatggtcgctggaaaacgagaggaagacgaggaaactaaggaagttcggaagctgattagggaggtgttcgatttcgctggtgttaattatgtcggagattttctcccgactctgaagctctttgatcttgatggatacagaaagagagcaaagaaactcgcttcgaaattggacaagtttatgcagaaattagtcgacgagcatcggaaaaacagaggaaaagcagagcttgagaaaacgatgatcactcgtttgctgtctcttcaagaatcagaacctgaatgttacactgatgatatcatcaaagggctcgtacaggtgatgttgcttgctggaacggacacaaccgcagtgacgttggagtgggctatggctaaccttctaaatcatccggaagttttaaggaaactcaaaacggaactaaacgaggtttcgaaagaagggcgtgtgtttgaggaatcagatactggcaagtgtccctatctcaacaatgtgatctctgagactcttcgtttgtttccggcggcgcccttacttgtcccacacgcttcatccactgactgtgaagtcgctggatttgacattccacgtcgcacctggctatttatcaatgcgtgggctattcagagagacccaaatgtatgggatgacccagaaactttcaaaccagagaggtttgaatcagagacccatcgtggtaagtttctgcctttcggaatcggtaggagagcatgtcctggtatgggcctggcccaactagtactgagcttagctttaggctcattgatccagtgtttcgattgggagagagacaatgacgttgccgttgacatgtcggaaggaaagggtcttaccatgcccaaatctgtgcctttagttgccaaatgcaagtctttaccaatcctcgacaaacttgttctttaactggatcatttatctttcactttgtgatactttgtgtattaatttgatctattatcatcattaagcgtagttataaataaaaatttattttattttc

SEQ ID NO: 106767 - protein, 512 aa, Arabidopsis thaliana
  peptide (1)..(512): Ceres Seq. ID no. 13620379
LLSRIMRLVSRIMCSRMGEMIDLFLLALMAGFIAVAYVFRSKQKKNLPPNPVGFPVIGHLHLLKEPVHRSLRDLSRNLGIDVFILRLGSRRAVVVTSASAAEEFLSQQNDVVFANRPLATLTEYMGYNNTLVSTAPYGEHWRRLRRFCAVDILSTARLRDFSDIRRDEVRAMIRKINVELVTSGGSVRLKLQPFLYGLTYNILMSMVAGKREEDEETKEVRKLIREVFDFAGVNYVGDFLPTLKLFDLDGYRKRAKKLASKLDKFMQKLVDEHRKNRGKAELEKTMITRLLSLQESEPECYTDDIIKGLVQVMLLAGTDTTAVTLEWAMANLLNHPEVLRKLKTELNEVSKEGRVFEESDTGKCPYLNNVISETLRLFPAAPLLVPHASSTDCEVAGFDIPRRTWLFINAWAIQRDPNVWDDPETFKPERFESETHRGKFLPFGIGRRACPGMGLAQLVLSLALGSLIQCFDWERDNDVAVDMSEGKGLTMPKSVPLVAKCKSLPILDKLVL

SEQ ID NO: 106768 - protein, 507 aa, Arabidopsis thaliana
  peptide (1)..(507): Ceres Seq. ID no. 13620380
MRLVSRIMCSRMGEMIDLFLLALMAGFIAVAYVFRSKQKKNLPPNPVGFPVIGHLHLLKEPVHRSLRDLSRNLGIDVFILRLGSRRAVVVTSASAAEEFLSQQNDVVFANRPLATLTEYMGYNNTLVSTAPYGEHWRRLRRFCAVDILSTARLRDFSDIRRDEVRAMIRKINVELVTSGGSVRLKLQPFLYGLTYNILMSMVAGKREEDEETKEVRKLIREVFDFAGVNYVGDFLPTLKLFDLDGYRKRAKKLASKLDKFMQKLVDEHRKNRGKAELEKTMITRLLSLQESEPECYTDDIIKGLVQVMLLAGTDTTAVTLEWAMANLLNHPEVLRKLKTELNEVSKEGRVFEESDTGKCPYLNNVISETLRLFPAAPLLVPHASSTDCEVAGFDIPRRTWLFINAWAIQRDPNVWDDPETFKPERFESETHRGKFLPFGIGRRACPGMGLAQLVLSLALGSLIQCFDWERDNDVAVDMSEGKGLTMPKSVPLVAKCKSLPILDKLVL

SEQ ID NO: 106769 - protein, 500 aa, Arabidopsis thaliana
  peptide (1)..(500): Ceres Seq. ID no. 13620381
MCSRMGEMIDLFLLALMAGFIAVAYVFRSKQKKNLPPNPVGFPVIGHLHLLKEPVHRSLRDLSRNLGIDVFILRLGSRRAVVVTSASAAEEFLSQQNDVVFANRPLATLTEYMGYNNTLVSTAPYGEHWRRLRRFCAVDILSTARLRDFSDIRRDEVRAMIRKINVELVTSGGSVRLKLQPFLYGLTYNILMSMVAGKREEDEETKEVRKLIREVFDFAGVNYVGDFLPTLKLFDLDGYRKRAKKLASKLDKFMQKLVDEHRKNRGKAELEKTMITRLLSLQESEPECYTDDIIKGLVQVMLLAGTDTTAVTLEWAMANLLNHPEVLRKLKTELNEVSKEGRVFEESDTGKCPYLNNVISETLRLFPAAPLLVPHASSTDCEVAGFDIPRRTWLFINAWAIQRDPNVWDDPETFKPERFESETHRGKFLPFGIGRRACPGMGLAQLVLSLALGSLIQCFDWERDNDVAVDMSEGKGLTMPKSVPLVAKCKSLPILDKLVL

SEQ ID NO: 106770 - DNA, 1364 bp, Arabidopsis thaliana
  misc_feature (1)..(1364): Ceres Seq. ID no. 13620394
  misc_feature (1)..(1364): Ortholog of  Ceres SEQ ID NO 14304273 as cited in SEQ ID NO 53621
  misc_feature (1)..(1364): Ortholog of  Ceres SEQ ID NO 13595438 as cited in SEQ ID NO 56490
  misc_feature (1)..(1364): Ortholog of  Ceres SEQ ID NO 14314104 as cited in SEQ ID NO 63109
gtcggaaaatacggacggcgtcgtcgttctttttgacggtgtagctcaccggcgtcgatttttagatttttttttaagggaaacactaagcagcaaattacaagtgggtgatttgtgtttgttacatagtcttatatctaactatgtcagattctggtgagcctaaaccttctcagcaagaagaacctctacctcaacctgctgcccaagaaactcagtctcaacaagtttgcactttcttcaagaagccaacgaaaagtaaaaacataagaaaaagaaccattgacgctgatgaagaagacggagattcgaaaagcgaaagctctattctacaaaatctaaagaaagttgcaaaacccgatagcaagttatacttttcttctggaccatctaagagttctactacaacgagtggagctcctgagaggtccgtctttcactacgattcatccaaggaaatccaggttcagaacgacagtggagcaacagcaacccttgaaactgagaccgacttcaatcaagacgcacgagctatccgtgagagagttcttaaaaaagcagacgaagcattgaaagggaataagaaaaaggcttctgatgagaagctgtacaaaggaattcatggatatacagatcacaaagctgggtttagaagagaacaaacaatctcgagcgagaaagctggaggctcacacgggccattaagagcttctgctcacataagagtgtcggctagattcgattaccagccagacatttgcaaggattacaaagaaaccggatactgtggatatggagattcgtgtaagttcttgcatgaccgtggggattacaaaccaggatggcagatagagaaagagtgggaagaagcagagaaagttaggaagagaaataaagctatgggagttgaggatgaagatgatgaggctgacaaggatagcgacgaagacgaaaatgcattgccctttgcttgcttcatttgcagggagccttttgttgatccagttgtcaccaaatgcaagcattacttctgtgagcattgtgctttaaagcatcacacgaagaacaagaagtgctttgtgtgtaaccaaccaacaatggggattttcaatgcagcacatgagatcaagaagagaatggctgaagaacggagtaaagctgaacaaggattgtgaagtccttgtttcactggacaaaaaggcaaaaactatatttggttatttacttgaggaaagctttttgttttgttgtactcactggcctatatatattcattcggatgacgacgatagttgtttcaaactgattaacttttaaatttaaacaaactgaaaattgaatcagagttttggagtcaacttccc

SEQ ID NO: 106771 - protein, 343 aa, Arabidopsis thaliana
  peptide (1)..(343): Ceres Seq. ID no. 13620395
MSDSGEPKPSQQEEPLPQPAAQETQSQQVCTFFKKPTKSKNIRKRTIDADEEDGDSKSESSILQNLKKVAKPDSKLYFSSGPSKSSTTTSGAPERSVFHYDSSKEIQVQNDSGATATLETETDFNQDARAIRERVLKKADEALKGNKKKASDEKLYKGIHGYTDHKAGFRREQTISSEKAGGSHGPLRASAHIRVSARFDYQPDICKDYKETGYCGYGDSCKFLHDRGDYKPGWQIEKEWEEAEKVRKRNKAMGVEDEDDEADKDSDEDENALPFACFICREPFVDPVVTKCKHYFCEHCALKHHTKNKKCFVCNQPTMGIFNAAHEIKKRMAEERSKAEQGL

SEQ ID NO: 106772 - DNA, 811 bp, Arabidopsis thaliana
  misc_feature (1)..(811): Ceres Seq. ID no. 13620396
  misc_feature (1)..(811): Ortholog of  Ceres SEQ ID NO 15173146 as cited in SEQ ID NO 61836
  misc_feature (1)..(811): Ortholog of  Ceres SEQ ID NO 14309121 as cited in SEQ ID NO 0
aaaattaaaccaaagaaacaaacaatccttgttctcgccgaaatagagaattttgtgaatctgggtttttagttcaggtgttaatataagattttgatcaaaagaagacgagattcgatccgatccgatctgattgaagaagaaatggcgaatctgtatgtgaaagcggttccaccaccggatatgaataggaatacggaatggttcatgtatccaggagtttggacgacttacatgcttattctcttcttcggttggctcgttgttctctctgtctctggttgttcccctggaatggcttggactgttgttaatctcgctcacttcgttgtaacgtatcacagcttccactggatgaaaggaactccttttgcagatgaccaaggaatctacaatggtttaacttggtgggaacaaatggacaatggtcaacagcttacccgcaaccgcaaatttcttaccctagttcctgttgttctgtacttgattgcatcgcatacaacagattacagacatccatggctgttcctcaacacactcgctgtgatggttctcgttgttgccaagttccccaacatgcacaaggtacgcatctttggtatcaatggtgataaataagtttcctttacggcaagagaacacctgaaagaaggaaaaggggatataagcgaacatatatatgtgtaaatgttcatatgagttggtttaattctcgagtcatgttttttgttggatatttgtaagtaaactctctaattttgaagctttcatcttttaccttttataatagacacgaaaaagctttcccttc

SEQ ID NO: 106773 - protein, 157 aa, Arabidopsis thaliana; identical to SEQ ID NO: 29363
  peptide (1)..(157): Ceres Seq. ID no. 13620397

SEQ ID NO: 106774 - protein, 144 aa, Arabidopsis thaliana; identical to SEQ ID NO: 29364
  peptide (1)..(144): Ceres Seq. ID no. 13620398

SEQ ID NO: 106775 - protein, 136 aa, Arabidopsis thaliana; identical to SEQ ID NO: 29365
  peptide (1)..(136): Ceres Seq. ID no. 13620399

SEQ ID NO: 106776 - DNA, 1282 bp, Arabidopsis thaliana
  misc_feature (1)..(1282): Ceres Seq. ID no. 13620419
  misc_feature (1)..(1282): Ortholog of  Ceres SEQ ID NO 15171634 as cited in SEQ ID NO 57593
  misc_feature (1)..(1282): Ortholog of  Ceres SEQ ID NO 14301936 as cited in SEQ ID NO 67361
acaccaagcataaaaaaaagtcgcgacgttctcattctttctcgaatcataccacagagagagagagaacaaaaagaagcaatcgtcgaaagtcatgttcgctacaaaaacagttctctttatcgccgtcgtgtcacttctcggaacgttttcatccgccgctgtcgatacttttatctacggtggttgctcacaagaaaagtactttccgggatcgccttacgagtcaaacgttaactctctactcacctcgttcgttagctcagcttctctctacacatacaacaacttcaccaccaacggaatctccggcgacagttcctccgtctacggtttgtaccagtgtcgcggtgatctctcctccggctcgggagattgtgcaagatgcgtcgcgcgagcagtaagccgtctagggagtctctgcgccatggcaagcggtggcgcgttgcagctcgaaggctgtttcgttaaatacgacaacacgacgttcctcggtgttgaggataagacggtggtggttcgacgttgtggaccaccggttggttataactcggacgagatgactcgtagagactcggtggtgggttctttagcggcgagtagcggtggttcatacagagtaggagtgtcgggggaactgcaaggtgtggcgcagtgcaccggagatcttagtgcgactgagtgtcaagactgtttgatggaagcgatcggacggctgagaacggattgcggaggagctgcttggggtgacgtgtacttagcaaagtgctacgcgcgttactctgcgcgtggaggtcactctagagccaacggctatggtgggaatcgtaataacaatgatgacgatgagatagagaaaacacttgcaatcatagttggcttaattgctggagttacgttactcgtcgtatttctctcttttatggcaaaatcgtgcgagagaggtaaaggtgggaagtaaataacgttatgggacttttgacttgtatcatcaatttatggttttaaaaaagaatcaaatgcgtaaaggagaaagaaaagcgaagagattcttcatattctccactaaaatcctaaaggatgtttcttttttgacccactttaattgaagttttactatttttcaaatgtatagaaaactcacgccgtttagatttgtgatcgtatctttacgtaagaacatttaaaagtggcgcatatgcaatttatctttgatatgtatttctaattatcataatcacttaacgttgtagtttaaaggaattattgttgattttgtgtt

SEQ ID NO: 106777 - protein, 288 aa, Arabidopsis thaliana; identical to SEQ ID NO: 43586
  peptide (1)..(288): Ceres Seq. ID no. 13620420

SEQ ID NO: 106778 - protein, 177 aa, Arabidopsis thaliana; identical to SEQ ID NO: 43587
  peptide (1)..(177): Ceres Seq. ID no. 13620421

SEQ ID NO: 106779 - DNA, 1160 bp, Arabidopsis thaliana
  misc_feature (1)..(1160): Ceres Seq. ID no. 13620422
  misc_feature (1)..(1160): Ortholog of  Ceres SEQ ID NO 13594740 as cited in SEQ ID NO 51721
  misc_feature (1)..(1160): Ortholog of  Ceres SEQ ID NO 14316497 as cited in SEQ ID NO 58285
  misc_feature (1)..(1160): Ortholog of  Ceres SEQ ID NO 13595944 as cited in SEQ ID NO 68153
gtctcataccagataaaacaaagtaagaagaagatgaagatgcacgtatgttttagtgtgattttgatgtttctaagcatcttcttcatcaatggtgctttgtcgaagcttgaaaggttgaaacatccggtgaagaagaaatctgatggctctctgagttttcttgttatcggagattggggacgcaaaggtggttttaatcaatctctcgttgcacatcagatgggagttgtgggagagaaattagacatagattttgtgatatcagtaggagataatttctacgacgacggattaaaaggagtcaatgatccttcctttgaagcctctttctctcatatctacactcatcctagtctccaaaaacaatggtattcagttttgggtaaccatgattacagaggaaatgttgaagcacaactaagtaaagttctcacccaaaaagattggagatggttttgtcgcagatcttttgtcttatcctcaggaatggtggattttttcttcgcggacacaaatccttttgtagaaaaatacttcactgaaccagaagatcacacttatgattggagaaatgtcttaccaagaaataaatacatctcaaacctcttacatgatttagatttagagattaaaaagtcgcgtgccacatggaaatttgtcgtgggacatcacgggatcaaaaccgcaggtaatcacggtgtgactcaagagcttgtagatcaacttcttccaattctagaggagaataaagtggacttgtacataaatggacatgatcactgcttgcaacacattggttctcacggtaaaacccaatttcttacaagtggaggaggatcaaaggcatggagaggacatgttcagccatgggatccaaaagaactcaaactgtattacgatggacaaggtttcatgtctcttcacatcactcactccaaagctaaattcatctactatgatgtttccggcaatgttcttcaccgatcctcattgtccaaaagatctgctcatctttaaataacatttctaagaataaaatttgcacacaatttaatttaagtttttatttacaataaatttattgatgtatgattattgaacacaatggtcttgaataatatagagttttttcacgttctgaaaacgtggttccgttg

SEQ ID NO: 106780 - protein, 339 aa, Arabidopsis thaliana
  peptide (1)..(339): Ceres Seq. ID no. 13620423
VSYQIKQSKKKMKMHVCFSVILMFLSIFFINGALSKLERLKHPVKKKSDGSLSFLVIGDWGRKGGFNQSLVAHQMGVVGEKLDIDFVISVGDNFYDDGLKGVNDPSFEASFSHIYTHPSLQKQWYSVLGNHDYRGNVEAQLSKVLTQKDWRWFCRRSFVLSSGMVDFFFADTNPFVEKYFTEPEDHTYDWRNVLPRNKYISNLLHDLDLEIKKSRATWKFVVGHHGIKTAGNHGVTQELVDQLLPILEENKVDLYINGHDHCLQHIGSHGKTQFLTSGGGSKAWRGHVQPWDPKELKLYYDGQGFMSLHITHSKAKFIYYDVSGNVLHRSSLSKRSAHL

SEQ ID NO: 106781 - protein, 328 aa, Arabidopsis thaliana
  peptide (1)..(328): Ceres Seq. ID no. 13620424
MKMHVCFSVILMFLSIFFINGALSKLERLKHPVKKKSDGSLSFLVIGDWGRKGGFNQSLVAHQMGVVGEKLDIDFVISVGDNFYDDGLKGVNDPSFEASFSHIYTHPSLQKQWYSVLGNHDYRGNVEAQLSKVLTQKDWRWFCRRSFVLSSGMVDFFFADTNPFVEKYFTEPEDHTYDWRNVLPRNKYISNLLHDLDLEIKKSRATWKFVVGHHGIKTAGNHGVTQELVDQLLPILEENKVDLYINGHDHCLQHIGSHGKTQFLTSGGGSKAWRGHVQPWDPKELKLYYDGQGFMSLHITHSKAKFIYYDVSGNVLHRSSLSKRSAHL

SEQ ID NO: 106782 - protein, 326 aa, Arabidopsis thaliana
  peptide (1)..(326): Ceres Seq. ID no. 13620425
MHVCFSVILMFLSIFFINGALSKLERLKHPVKKKSDGSLSFLVIGDWGRKGGFNQSLVAHQMGVVGEKLDIDFVISVGDNFYDDGLKGVNDPSFEASFSHIYTHPSLQKQWYSVLGNHDYRGNVEAQLSKVLTQKDWRWFCRRSFVLSSGMVDFFFADTNPFVEKYFTEPEDHTYDWRNVLPRNKYISNLLHDLDLEIKKSRATWKFVVGHHGIKTAGNHGVTQELVDQLLPILEENKVDLYINGHDHCLQHIGSHGKTQFLTSGGGSKAWRGHVQPWDPKELKLYYDGQGFMSLHITHSKAKFIYYDVSGNVLHRSSLSKRSAHL

SEQ ID NO: 106783 - DNA, 1305 bp, Arabidopsis thaliana
  misc_feature (1)..(1305): Ceres Seq. ID no. 13620442
  misc_feature (1)..(1305): Ortholog of  Ceres SEQ ID NO 12611392 as cited in SEQ ID NO 56826
  misc_feature (1)..(1305): Ortholog of  Ceres SEQ ID NO 13660872 as cited in SEQ ID NO 60830
  misc_feature (1)..(1305): Ortholog of  Ceres SEQ ID NO 12616221 as cited in SEQ ID NO 63291
atggcaattgtatcctccacaacaagcatcattcccatgagtaaccaagtcaacaataacgaaaaaggtatagaagacaatgatcatagaggcggccaagagagtcatgtccaaaatgaagatgaagctgatgatcatgatcatgacatggtcatgcccggatttagattccatcctaccgaagaagaactcatagagttttaccttcgccgaaaagttgaaggcaaacgctttaatgtagaactcatcactttcctcgatctttatcgctatgatccttgggaacttcctgctatggcggcgataggagagaaagagtggtacttctatgtgccaagagatcggaaatatagaaatggagatagaccgaaccgagtaacgacttcaggatattggaaagccaccggagctgataggatgatcagatcggagacttctcggcctatcggattaaagaaaaccctagttttctactctggtaaagcccctaaaggcactcgtactagttggatcatgaacgagtatcgtcttccgcaccatgaaaccgagaagtaccaaaaggctgaaatatcattgtgccgagtgtacaaaaggccaggagtagaagatcatccatcggtaccacgttctctctccacaagacatcataaccataactcatcgacatcatcccgtttagccttaagacaacaacaacaccattcatcctcctctaatcattccgacaacaaccttaacaacaacaacaacatcaacaatctcgagaagctctccaccgaatattccggcgacggcagcacaacaacaacgaccacaaacagtaactctgacgttaccattgctctagccaatcaaaacatatatcgtccaatgccttacgacacaagcaacaacacattgatagtctctacgagaaatcatcaagacgatgatgaaactgccattgttgacgatcttcaaagactagttaactaccaaatatcagatggagcgacaacgctaatgcctcaaactcaagcggcgttagctatgaacatgattcctgcaggaacgattccaaacaatgctttgtgggatatgtggaatccaatagtaccagatggaaacagagatcactatactaatattccttttaagtaatttaattagatcatgattattatccatgacaataattattaatgctgctttgccatattttcatactccttatatattgttatggcgatagacaatgattgattactgcgagtttatgtaatggaactgattctcaacatatatagtcaattaagtagttttttt

SEQ ID NO: 106784 - protein, 379 aa, Arabidopsis thaliana
  peptide (1)..(379): Ceres Seq. ID no. 13620443
MAIVSSTTSIIPMSNQVNNNEKGIEDNDHRGGQESHVQNEDEADDHDHDMVMPGFRFHPTEEELIEFYLRRKVEGKRFNVELITFLDLYRYDPWELPAMAAIGEKEWYFYVPRDRKYRNGDRPNRVTTSGYWKATGADRMIRSETSRPIGLKKTLVFYSGKAPKGTRTSWIMNEYRLPHHETEKYQKAEISLCRVYKRPGVEDHPSVPRSLSTRHHNHNSSTSSRLALRQQQHHSSSSNHSDNNLNNNNNINNLEKLSTEYSGDGSTTTTTTNSNSDVTIALANQNIYRPMPYDTSNNTLIVSTRNHQDDDETAIVDDLQRLVNYQISDGATTLMPQTQAALAMNMIPAGTIPNNALWDMWNPIVPDGNRDHYTNIPFK

SEQ ID NO: 106785 - protein, 367 aa, Arabidopsis thaliana
  peptide (1)..(367): Ceres Seq. ID no. 13620444
MSNQVNNNEKGIEDNDHRGGQESHVQNEDEADDHDHDMVMPGFRFHPTEEELIEFYLRRKVEGKRFNVELITFLDLYRYDPWELPAMAAIGEKEWYFYVPRDRKYRNGDRPNRVTTSGYWKATGADRMIRSETSRPIGLKKTLVFYSGKAPKGTRTSWIMNEYRLPHHETEKYQKAEISLCRVYKRPGVEDHPSVPRSLSTRHHNHNSSTSSRLALRQQQHHSSSSNHSDNNLNNNNNINNLEKLSTEYSGDGSTTTTTTNSNSDVTIALANQNIYRPMPYDTSNNTLIVSTRNHQDDDETAIVDDLQRLVNYQISDGATTLMPQTQAALAMNMIPAGTIPNNALWDMWNPIVPDGNRDHYTNIPFK

SEQ ID NO: 106786 - protein, 330 aa, Arabidopsis thaliana
  peptide (1)..(330): Ceres Seq. ID no. 13620445
MVMPGFRFHPTEEELIEFYLRRKVEGKRFNVELITFLDLYRYDPWELPAMAAIGEKEWYFYVPRDRKYRNGDRPNRVTTSGYWKATGADRMIRSETSRPIGLKKTLVFYSGKAPKGTRTSWIMNEYRLPHHETEKYQKAEISLCRVYKRPGVEDHPSVPRSLSTRHHNHNSSTSSRLALRQQQHHSSSSNHSDNNLNNNNNINNLEKLSTEYSGDGSTTTTTTNSNSDVTIALANQNIYRPMPYDTSNNTLIVSTRNHQDDDETAIVDDLQRLVNYQISDGATTLMPQTQAALAMNMIPAGTIPNNALWDMWNPIVPDGNRDHYTNIPFK

SEQ ID NO: 106787 - DNA, 2107 bp, Arabidopsis thaliana
  misc_feature (1)..(2107): Ceres Seq. ID no. 13620453
  misc_feature (1)..(2107): Ortholog of  Ceres SEQ ID NO 13657677 as cited in SEQ ID NO 66119
gtctgaccctaaaatttctctctgtttttctcagccgttctgtctaaaaccaccgacggcgacttcaaatagacgtcggaatttgtcgccaccggagaattgttacatgtgaatcccgttttataaagatgatgtatgtatctgctcgatccggttctgcgaagcgaagcatctcaagtctacctcatctctctcagagatttaaacaaacagagaatgagattgttcaaatgtttagtgttccgaatcatgaggaatctgagaagcctcaagagaagtggaaattatctagaaaggatccgtcagtgcggatgttggatgagagattcattaggatagtgaaaatcttcaaatggggacctgatgctgagaaagctcttgaggtgcttaaactgaaagttgatcatcgattagttcgttcgattcttgagatagacgttgagataaatgtcaagattcagtttttcaaatgggctggtaaaagaagaaactttcagcatgattgctccacttacatgaccttaatacgctgccttgaagaagctaggctttatggtgaaatgtatagaacgatacaagaagtggtccgtaacacatatgttagcgttagtccagcagtactctctgagcttgtgaaagcattggggcgagctaagatggttagtaaagctttatcggttttttatcaggcaaaaggacgcaagtgtaaacccacttcgagcacttacaactcggtgattctaatgttgatgcaagaaggacagcacgagaaagtccatgaggtttatactgagatgtgtaacgaaggtgactgttttccagacacgattacttactctgcgcttatatcctcgtatgaaaaactaggtcgtaatgattctgcgataaggttgtttgatgaaatgaaggataactgtatgcagcctacagagaaaatatacaccacgttgttgggaatttactttaaggtgggtaaagttgagaaagctttagatcttttcgaggagatgaaacgagcaggttgttcaccaacagtttatacgtacacggaactgataaagggacttggcaaagctgggagggtagatgaagcatatggcttctataaagacatgcttagagatggattgactcctgatgttgtgttcttaaacaatctgatgaacattttaggcaaagtgggtcgagtggaggagttgacaaatgtcttcagtgagatgggaatgtggagatgtacacccactgttgtctcatacaataccgtgattaaagctctgtttgagtcaaaagcacatgtttcggaagtaagctcttggtttgataagatgaaagcagacagtgtttcccctagtgaattcacttactcaatccttatagatggttattgtaaaacgaatagagtagagaaagctctgttgctgcttgaggagatggatgagaaaggttttccaccttgtcctgcagcgtattgcagcctcataaacgctcttggaaaggcgaaaagatatgaagcagcgaatgagctatttaaggaactaaaagaaaacttcggcaatgtaagttctcgagtatacgctgtgatgatcaaacattttgggaaatgcgggaagctcagcgaagctgtagatctcttcaatgagatgaagaaccaaggaagtggtcccgatgtttatgcctacaacgccctcatgtcaggaatggtaaaggctggtatgatcaacgaagctaattccttgcttagaaagatggaagaaaacggttgcagggccgatataaactcgcataatatcatcctcaatggatttgctagaacaggtgtgccgagacgggctatagaaatgtttgaaactataaagcattctggtattaagcctgatggtgtcacttataatactcttcttggatgctttgcacatgctggaatgtttgaggaggctgcaagaatgatgagagagatgaaagataaaggctttgagtatgatgccatcacttactcatctatacttgacgctgttggcaatgtggatcatgaaaaagatgatgtttcatctttctaagatttgatttatctaatatgaataacaaaaagaaaaaaaagtagaagctg

SEQ ID NO: 106788 - protein, 642 aa, Arabidopsis thaliana
  peptide (1)..(642): Ceres Seq. ID no. 13620454
MMYVSARSGSAKRSISSLPHLSQRFKQTENEIVQMFSVPNHEESEKPQEKWKLSRKDPSVRMLDERFIRIVKIFKWGPDAEKALEVLKLKVDHRLVRSILEIDVEINVKIQFFKWAGKRRNFQHDCSTYMTLIRCLEEARLYGEMYRTIQEVVRNTYVSVSPAVLSELVKALGRAKMVSKALSVFYQAKGRKCKPTSSTYNSVILMLMQEGQHEKVHEVYTEMCNEGDCFPDTITYSALISSYEKLGRNDSAIRLFDEMKDNCMQPTEKIYTTLLGIYFKVGKVEKALDLFEEMKRAGCSPTVYTYTELIKGLGKAGRVDEAYGFYKDMLRDGLTPDVVFLNNLMNILGKVGRVEELTNVFSEMGMWRCTPTVVSYNTVIKALFESKAHVSEVSSWFDKMKADSVSPSEFTYSILIDGYCKTNRVEKALLLLEEMDEKGFPPCPAAYCSLINALGKAKRYEAANELFKELKENFGNVSSRVYAVMIKHFGKCGKLSEAVDLFNEMKNQGSGPDVYAYNALMSGMVKAGMINEANSLLRKMEENGCRADINSHNIILNGFARTGVPRRAIEMFETIKHSGIKPDGVTYNTLLGCFAHAGMFEEAARMMREMKDKGFEYDAITYSSILDAVGNVDHEKDDVSSF

SEQ ID NO: 106789 - protein, 641 aa, Arabidopsis thaliana
  peptide (1)..(641): Ceres Seq. ID no. 13620455
MYVSARSGSAKRSISSLPHLSQRFKQTENEIVQMFSVPNHEESEKPQEKWKLSRKDPSVRMLDERFIRIVKIFKWGPDAEKALEVLKLKVDHRLVRSILEIDVEINVKIQFFKWAGKRRNFQHDCSTYMTLIRCLEEARLYGEMYRTIQEVVRNTYVSVSPAVLSELVKALGRAKMVSKALSVFYQAKGRKCKPTSSTYNSVILMLMQEGQHEKVHEVYTEMCNEGDCFPDTITYSALISSYEKLGRNDSAIRLFDEMKDNCMQPTEKIYTTLLGIYFKVGKVEKALDLFEEMKRAGCSPTVYTYTELIKGLGKAGRVDEAYGFYKDMLRDGLTPDVVFLNNLMNILGKVGRVEELTNVFSEMGMWRCTPTVVSYNTVIKALFESKAHVSEVSSWFDKMKADSVSPSEFTYSILIDGYCKTNRVEKALLLLEEMDEKGFPPCPAAYCSLINALGKAKRYEAANELFKELKENFGNVSSRVYAVMIKHFGKCGKLSEAVDLFNEMKNQGSGPDVYAYNALMSGMVKAGMINEANSLLRKMEENGCRADINSHNIILNGFARTGVPRRAIEMFETIKHSGIKPDGVTYNTLLGCFAHAGMFEEAARMMREMKDKGFEYDAITYSSILDAVGNVDHEKDDVSSF

SEQ ID NO: 106790 - protein, 608 aa, Arabidopsis thaliana
  peptide (1)..(608): Ceres Seq. ID no. 13620456
MFSVPNHEESEKPQEKWKLSRKDPSVRMLDERFIRIVKIFKWGPDAEKALEVLKLKVDHRLVRSILEIDVEINVKIQFFKWAGKRRNFQHDCSTYMTLIRCLEEARLYGEMYRTIQEVVRNTYVSVSPAVLSELVKALGRAKMVSKALSVFYQAKGRKCKPTSSTYNSVILMLMQEGQHEKVHEVYTEMCNEGDCFPDTITYSALISSYEKLGRNDSAIRLFDEMKDNCMQPTEKIYTTLLGIYFKVGKVEKALDLFEEMKRAGCSPTVYTYTELIKGLGKAGRVDEAYGFYKDMLRDGLTPDVVFLNNLMNILGKVGRVEELTNVFSEMGMWRCTPTVVSYNTVIKALFESKAHVSEVSSWFDKMKADSVSPSEFTYSILIDGYCKTNRVEKALLLLEEMDEKGFPPCPAAYCSLINALGKAKRYEAANELFKELKENFGNVSSRVYAVMIKHFGKCGKLSEAVDLFNEMKNQGSGPDVYAYNALMSGMVKAGMINEANSLLRKMEENGCRADINSHNIILNGFARTGVPRRAIEMFETIKHSGIKPDGVTYNTLLGCFAHAGMFEEAARMMREMKDKGFEYDAITYSSILDAVGNVDHEKDDVSSF

SEQ ID NO: 106791 - DNA, 1570 bp, Arabidopsis thaliana
  misc_feature (1)..(1570): Ceres Seq. ID no. 13620461
  misc_feature (1)..(1570): Ortholog of  Ceres SEQ ID NO 13598313 as cited in SEQ ID NO 68293
atctctatctaaaaatcttctttgaatttgtgtatacacaaatcttattcaacgaatcatttatcaccaaaaggttctctcttttttgtttgtttctgtcttgtgtgaatgactcgtcggtgttcgcattgtagcaacaatgggcacaattcacgcacgtgtccaacgcgtggtggtggcacgtgcggtggaagtggcggaggaggaggaggtggtggtggaggagggtctggttcctcctccgccgtgaagttatttggtgtgaggttaacggatggctcgattattaaaaagagtgcgagtatgggtaatctctcggcattggctgttgcggcggcggcggcaacgcaccaccgtttatctccgtcgtctcctctggcgacgtcaaatcttaatgattcgccgttatcggatcatgcccgatactctaatttgcatcataatgaagggtatttatctgatgatcctgctcatggttctgggtctagtcaccgtcgtggtgagaggaagagaggtgttccttggactgaagaggaacatagactattcttagtcggtcttcagaaactcgggaaaggagattggcgcggtatttcgagaaactatgtaacgtcaagaactcctacacaagtggctagtcatgctcaaaagtattttattcgacatactagttcaagccgcaggaaaagacggtctagcctcttcgacatggttacagatgagatggtaaccgattcatcgccaacacaggaagagcagaccttaaacggttcctctccaagcaaggaacctgaaaagaaaagctaccttccttcacttgagctctcactcaataataccacagaagctgaagaggtcgtagccacggcgccacgacaggaaaaatctcaagaagctatagaaccatcaaatggtgtttcaccaatgctagtcccgggtggcttctttcctccttgttttccagtgacttacacgatttggctccctgcgtcacttcacggaacagaacatgccttaaacgctgagacttcttctcagcagcatcaggtcctaaaaccaaaacctggatttgctaaagaacgtgtgaacatggacgagttggtcggtatgtctcagcttagcataggaatggcgacaagacacgaaaccgaaacttccccttccccgctatctttgagactagagccctcaaggccatcagcgtttcactcgaatggctcggttaatggtgcagatttgagtaaaggcaacagcgcgattcaggctatctaaaaaatctttgttattgtgttaaagaatgaagaaggaagaccctgaccggattaaaccagaggatgttcctggtttaggacgaaacaaaccaagccataagccattagagagaacaattacttacaaaggaaaaaaaaacagagcaaactgtaacaaagacttaccaaacagtcaaaaacacatttctcagcatcacgtcatacttacataagataagcgtaacttacaattttacccttcatttttcatgtttaaggcaaattatttattatctagagactaaacaataaagaatgtt

SEQ ID NO: 106792 - protein, 387 aa, Arabidopsis thaliana
  peptide (1)..(387): Ceres Seq. ID no. 13620462
MTRRCSHCSNNGHNSRTCPTRGGGTCGGSGGGGGGGGGGGSGSSSAVKLFGVRLTDGSIIKKSASMGNLSALAVAAAAATHHRLSPSSPLATSNLNDSPLSDHARYSNLHHNEGYLSDDPAHGSGSSHRRGERKRGVPWTEEEHRLFLVGLQKLGKGDWRGISRNYVTSRTPTQVASHAQKYFIRHTSSSRRKRRSSLFDMVTDEMVTDSSPTQEEQTLNGSSPSKEPEKKSYLPSLELSLNNTTEAEEVVATAPRQEKSQEAIEPSNGVSPMLVPGGFFPPCFPVTYTIWLPASLHGTEHALNAETSSQQHQVLKPKPGFAKERVNMDELVGMSQLSIGMATRHETETSPSPLSLRLEPSRPSAFHSNGSVNGADLSKGNSAIQAI

SEQ ID NO: 106793 - protein, 322 aa, Arabidopsis thaliana
  peptide (1)..(322): Ceres Seq. ID no. 13620463
MGNLSALAVAAAAATHHRLSPSSPLATSNLNDSPLSDHARYSNLHHNEGYLSDDPAHGSGSSHRRGERKRGVPWTEEEHRLFLVGLQKLGKGDWRGISRNYVTSRTPTQVASHAQKYFIRHTSSSRRKRRSSLFDMVTDEMVTDSSPTQEEQTLNGSSPSKEPEKKSYLPSLELSLNNTTEAEEVVATAPRQEKSQEAIEPSNGVSPMLVPGGFFPPCFPVTYTIWLPASLHGTEHALNAETSSQQHQVLKPKPGFAKERVNMDELVGMSQLSIGMATRHETETSPSPLSLRLEPSRPSAFHSNGSVNGADLSKGNSAIQAI

SEQ ID NO: 106794 - DNA, 1456 bp, Arabidopsis thaliana
  misc_feature (1)..(1456): Ceres Seq. ID no. 13620464
  misc_feature (1)..(1456): Ortholog of  Ceres SEQ ID NO 13593955 as cited in SEQ ID NO 54278
  misc_feature (1)..(1456): Ortholog of  Ceres SEQ ID NO 14314092 as cited in SEQ ID NO 62788
  misc_feature (1)..(1456): Ortholog of  Ceres SEQ ID NO 13597380 as cited in SEQ ID NO 64054
  misc_feature (1)..(1456): Ortholog of  Ceres SEQ ID NO 12625474 as cited in SEQ ID NO 64169
  misc_feature (1)..(1456): Ortholog of  Ceres SEQ ID NO 13597502 as cited in SEQ ID NO 64681
aaatttatttaataaagtttacctataatatcaaattatgcaaaacacaggctggttcagttttttccacgaatcaaaaatggttggagaaatattgaataagagagagagagagagagagagagatagagtttcagagttgacacaacattgaagtaaactaaactcctaacctctttatctatgtgtatatataaaactcaaaagtacatataatcttcaccattcacacatagtcacataccaaagcaaaaacatggatcgttgcacgtcgtcgtttttgcttctcacattggtctctaccttgtccattctccaaatctcctttgctcaacttgttccagcaatcatgacattcggtgactctgtagttgatgtcggcaacaacaactatcttccgacccttttcagagctgattatcctccttatggccgtgatttcgctaaccacaaagccaccggtcgtttctgcaacggcaaattagccactgatataactgctgagactttaggcttcactaagtacccaccagcttatctaagtcctgaagcttctggtaagaatcttctcattggtgctaatttcgcttctgcagcttcaggttatgatgacaaagctgctcttctcaatcacgcgatcccgttgtatcagcaagtagagtatttcaaggaatacaagagcaagctaataaaaattgcaggaagcaaaaaagctgattcgatcataaagggagcaatctgtctcttaagtgcaggaagcagtgattttgttcaaaactactatgtgaatcctctgctttacaaagtttacactgttgatgcatacggatctttccttatcgataacttctctacatttatcaagcaagtgtatgcggttggagcaaggaagatcggtgtgacatctctgcctccaacaggatgtcttcccgctgcaagaacccttttcggtttccatgaaaaaggctgtgtttcaagactcaacacagatgctcaaaactttaacaagaagcttaacgctgctgcttcaaagcttcagaagcaatattccgatcttaagattgttgtcttcgacatctactctccactttatgatcttgttcagaacccttccaaatccggattcacggaagcaaccaaaggatgttgtggaacaggaacagtcgagacaacttcactcttgtgcaacccgaaatcgtttgggacatgctccaatgctactcagtatgtgttctgggacagtgtgcatccttctgaagctgccaatgagattcttgccactgccctaattggacagggcttttctctcctcggttgatctcacgtatttttcttatattctcttttcaaatcgctgtttctatcacacattgagtcatacatttgtttttctttgaattatgtatcaaagcatcactgttttactaaaaatgtattgaaacttattacaagtact

SEQ ID NO: 106795 - protein, 353 aa, Arabidopsis thaliana
  peptide (1)..(353): Ceres Seq. ID no. 13620465
MDRCTSSFLLLTLVSTLSILQISFAQLVPAIMTFGDSVVDVGNNNYLPTLFRADYPPYGRDFANHKATGRFCNGKLATDITAETLGFTKYPPAYLSPEASGKNLLIGANFASAASGYDDKAALLNHAIPLYQQVEYFKEYKSKLIKIAGSKKADSIIKGAICLLSAGSSDFVQNYYVNPLLYKVYTVDAYGSFLIDNFSTFIKQVYAVGARKIGVTSLPPTGCLPAARTLFGFHEKGCVSRLNTDAQNFNKKLNAAASKLQKQYSDLKIVVFDIYSPLYDLVQNPSKSGFTEATKGCCGTGTVETTSLLCNPKSFGTCSNATQYVFWDSVHPSEAANEILATALIGQGFSLLG

SEQ ID NO: 106796 - protein, 322 aa, Arabidopsis thaliana; identical to SEQ ID NO: 21577
  peptide (1)..(322): Ceres Seq. ID no. 13620466

SEQ ID NO: 106797 - DNA, 1460 bp, Arabidopsis thaliana
  misc_feature (1)..(1460): Ceres Seq. ID no. 13620474
  misc_feature (1)..(1460): Ortholog of  Ceres SEQ ID NO 15179290 as cited in SEQ ID NO 0
agaagctttaattgtgaagtgatttggtgggttaatggcgcttgcaaacatatctctgcgtttcaagtttccacctttacaatcttcttcttcttcttcttcctcgttcaatgctactttaatcaataccagaaaactctcttcaatcgtttgctcgaaaccctcctctaatgacggcggcaaagtggctaatgacgatggtggcgcaaagccgcggaagaagttgtcggagcaatcgtcatgggaagttaaagattcagaagggaaggattatctctataggcttggcgcggaatcggataatgttaacatagccgttggggcacgaagcggcatgatcgatgatgtattcattggagacttccttggaaaagattctgatattgtgtttgattaccgtcagaaggcgacgaggtcctttgaacatcttcaaggagattattacattgctccatcgtttctggataaagttgcggtccacattgtgaagaactaccttgctccttctctaaatataaaaatcccattgattttaggtatatggggaggtaaaggacaaggcaaaacatttcagactgaacttatattcaaaacaatgggagttgaaccagttataatgtctgcaggagagttggaatctgatagagctggtgaaccggggagactcatacgtgaccgctatcgaacagcttcacaagtcattcagaatcaaggaaagatgagtgttctcatgatcaatgatattgatgctggccttggtagatttggggaaacgcaaatgacagtaaacaaccagatagttgttggtaccctgatgaatcttgcggataatcctacaagggtaagtgtaggacaagaatggagagaagctgacatggtaaacagagttcctctaattgtcacagggaacgatttctctacactgtatgctccactgatccgtgaaggaagaatggagaagttctactggcagccaactcgtgaagatatcgtaaacattgttagcagaatgtacgagaaagatggtatatcgcggaaagatgttataagcattgtagataagtttccaaatcaagcacttgacttctatggagctttgaggtcacgcacatatgataggtctatcctcaagtgggtagatgaagctggaggaatggagactctagggaaagttcttctcagacgtaaaaagacccaagaggttcctcaattcactgcccctgagcaaacggtggaagcattgctggaatcagggtactcactcataaatgaacagaaacttattatggaaacaaagctttccaaggagtacatgaagaacatggacgattgataccaaacaaacatcaatttttttcattcttaaagtgactttcgaggaacactcagctgaatcctgataagttgttacaaaagcttaaaaagattaaccgaatcactctatagagtttgtttatacg

SEQ ID NO: 106798 - protein, 432 aa, Arabidopsis thaliana
  peptide (1)..(432): Ceres Seq. ID no. 13620475
MALANISLRFKFPPLQSSSSSSSSFNATLINTRKLSSIVCSKPSSNDGGKVANDDGGAKPRKKLSEQSSWEVKDSEGKDYLYRLGAESDNVNIAVGARSGMIDDVFIGDFLGKDSDIVFDYRQKATRSFEHLQGDYYIAPSFLDKVAVHIVKNYLAPSLNIKIPLILGIWGGKGQGKTFQTELIFKTMGVEPVIMSAGELESDRAGEPGRLIRDRYRTASQVIQNQGKMSVLMINDIDAGLGRFGETQMTVNNQIVVGTLMNLADNPTRVSVGQEWREADMVNRVPLIVTGNDFSTLYAPLIREGRMEKFYWQPTREDIVNIVSRMYEKDGISRKDVISIVDKFPNQALDFYGALRSRTYDRSILKWVDEAGGMETLGKVLLRRKKTQEVPQFTAPEQTVEALLESGYSLINEQKLIMETKLSKEYMKNMDD

SEQ ID NO: 106799 - protein, 332 aa, Arabidopsis thaliana
  peptide (1)..(332): Ceres Seq. ID no. 13620476
MIDDVFIGDFLGKDSDIVFDYRQKATRSFEHLQGDYYIAPSFLDKVAVHIVKNYLAPSLNIKIPLILGIWGGKGQGKTFQTELIFKTMGVEPVIMSAGELESDRAGEPGRLIRDRYRTASQVIQNQGKMSVLMINDIDAGLGRFGETQMTVNNQIVVGTLMNLADNPTRVSVGQEWREADMVNRVPLIVTGNDFSTLYAPLIREGRMEKFYWQPTREDIVNIVSRMYEKDGISRKDVISIVDKFPNQALDFYGALRSRTYDRSILKWVDEAGGMETLGKVLLRRKKTQEVPQFTAPEQTVEALLESGYSLINEQKLIMETKLSKEYMKNMDD

SEQ ID NO: 106800 - protein, 245 aa, Arabidopsis thaliana
  peptide (1)..(245): Ceres Seq. ID no. 13620477
MGVEPVIMSAGELESDRAGEPGRLIRDRYRTASQVIQNQGKMSVLMINDIDAGLGRFGETQMTVNNQIVVGTLMNLADNPTRVSVGQEWREADMVNRVPLIVTGNDFSTLYAPLIREGRMEKFYWQPTREDIVNIVSRMYEKDGISRKDVISIVDKFPNQALDFYGALRSRTYDRSILKWVDEAGGMETLGKVLLRRKKTQEVPQFTAPEQTVEALLESGYSLINEQKLIMETKLSKEYMKNMDD

SEQ ID NO: 106801 - DNA, 1546 bp, Arabidopsis thaliana
  misc_feature (1)..(1546): Ceres Seq. ID no. 13620482
  misc_feature (1)..(1546): Ortholog of  Ceres SEQ ID NO 13663419 as cited in SEQ ID NO 66561
aatcagaatctgaaatacgaaatggcaaacaagtatttttcctctgttctgaagtcgttgcttctgcttcttcaccttgtattcttgagtaagcaacatgttgactctgcctcaatcgtcaagttccttcctggttttgaaggcccccttccctttgagctcgaaaccgggtatattggtattggtgaggaagaggaagtgcaactgttctactacttcatcaagtctgagaggaacccaaaagaagaccctcttattctctggctaactggaggacctggctgctcttccatctctggccttctttttgagaatgggcctctaactatgaagcttgacgtttacaatggaactctcccttctttggtctctactacatattcttggacaaagacttcgagcatgatattcttggatcagcctgttggaactggcttttcctattcaagaactcaacaatttaataaacctagtgattcaggagaagccaaacggatccatgagtttcttcaaaagtggctaggcaagcatcaagagttttcctccaaccctttctatgttgccggagattcttattccggtttggttgttcccgctaccgttcaagaaatctcaaaaggaaactatgaatgctgcaatcctccaataaaccttcagggctatgtgcttggtaatccgttaacagactatgcaattgatagtaacagccgcattccatttgcccatggaatggcactgatatctgatgaactctacgagtcgttgaagaaaacctgtaaaggagaatatacaaatgttcatccacgtaacacacaatgcttgaaattcattgaagaatttaataagtgtacaaacagaatactccaacaacttatactagatccgttgtgcgaaactgaaactccagattgctatatttatcggtatttgctaactacctactgggccaatgacgcgactgtgcgcgaagctcttcaaatcaataaggagagtataggggaatgggtacgatgttatcgcactattccttacgataatgacattaaaagtagcatgccttaccatgtgaataacagcatcagtggttatcgttctctcatctacagtggtgatcatgatttggaagtaccttaccttggaactcaagcttggataagatctctcaactattcaattattgatgactggaggccatggatgatcaaaaatcaaatcgctgggtacacaaggacttatgccaacaaaatgacatttgctactataaaaggaggtgggcacacaatagagtttaaaccagaggaagcctctatcatgtttcaaagatggatcaatggccaacctctctaaaagaggggagtacctgccttaacgtataaaggaaaagaaaatacgattctagtaacacatccaaatatatataagaacccttggccttataaatgaatagaatttaaactcataatttgtaagcaacatgtgtgttgcttttccacaatcttggtatagttgcatttcacctttttttttttcagcaagcttgttttct

SEQ ID NO: 106802 - protein, 448 aa, Arabidopsis thaliana
  peptide (1)..(448): Ceres Seq. ID no. 15219358
NQNLKYEMANKYFSSVLKSLLLLLHLVFLSKQHVDSASIVKFLPGFEGPLPFELETGYIGIGEEEEVQLFYYFIKSERNPKEDPLILWLTGGPGCSSISGLLFENGPLTMKLDVYNGTLPSLVSTTYSWTKTSSMIFLDQPVGTGFSYSRTQQFNKPSDSGEAKRIHEFLQKWLGKHQEFSSNPFYVAGDSYSGLVVPATVQEISKGNYECCNPPINLQGYVLGNPLTDYAIDSNSRIPFAHGMALISDELYESLKKTCKGEYTNVHPRNTQCLKFIEEFNKCTNRILQQLILDPLCETETPDCYIYRYLLTTYWANDATVREALQINKESIGEWVRCYRTIPYDNDIKSSMPYHVNNSISGYRSLIYSGDHDLEVPYLGTQAWIRSLNYSIIDDWRPWMIKNQIAGYTRTYANKMTFATIKGGGHTIEFKPEEASIMFQRWINGQPL

SEQ ID NO: 106803 - protein, 441 aa, Arabidopsis thaliana
  peptide (1)..(441): Ceres Seq. ID no. 15219359
MANKYFSSVLKSLLLLLHLVFLSKQHVDSASIVKFLPGFEGPLPFELETGYIGIGEEEEVQLFYYFIKSERNPKEDPLILWLTGGPGCSSISGLLFENGPLTMKLDVYNGTLPSLVSTTYSWTKTSSMIFLDQPVGTGFSYSRTQQFNKPSDSGEAKRIHEFLQKWLGKHQEFSSNPFYVAGDSYSGLVVPATVQEISKGNYECCNPPINLQGYVLGNPLTDYAIDSNSRIPFAHGMALISDELYESLKKTCKGEYTNVHPRNTQCLKFIEEFNKCTNRILQQLILDPLCETETPDCYIYRYLLTTYWANDATVREALQINKESIGEWVRCYRTIPYDNDIKSSMPYHVNNSISGYRSLIYSGDHDLEVPYLGTQAWIRSLNYSIIDDWRPWMIKNQIAGYTRTYANKMTFATIKGGGHTIEFKPEEASIMFQRWINGQPL

SEQ ID NO: 106804 - protein, 339 aa, Arabidopsis thaliana
  peptide (1)..(339): Ceres Seq. ID no. 15219360
MKLDVYNGTLPSLVSTTYSWTKTSSMIFLDQPVGTGFSYSRTQQFNKPSDSGEAKRIHEFLQKWLGKHQEFSSNPFYVAGDSYSGLVVPATVQEISKGNYECCNPPINLQGYVLGNPLTDYAIDSNSRIPFAHGMALISDELYESLKKTCKGEYTNVHPRNTQCLKFIEEFNKCTNRILQQLILDPLCETETPDCYIYRYLLTTYWANDATVREALQINKESIGEWVRCYRTIPYDNDIKSSMPYHVNNSISGYRSLIYSGDHDLEVPYLGTQAWIRSLNYSIIDDWRPWMIKNQIAGYTRTYANKMTFATIKGGGHTIEFKPEEASIMFQRWINGQPL

SEQ ID NO: 106805 - DNA, 1722 bp, Arabidopsis thaliana
  misc_feature (1)..(1722): Ceres Seq. ID no. 13620491
  misc_feature (1)..(1722): Ortholog of  Ceres SEQ ID NO 12582229 as cited in SEQ ID NO 58499
tggagaaacgcgacaaaaccaatcgtcctcttccgatagccacaaaacaaaaatcagacaagaagaaagaagaacgtttcttctaacagatagagattacaatcaaattgactcttaatttctcaattccgtatctctcatttcatcttcttcttcttctcctttacttaaggatctctggtttctctttctctcctctgtcttatcttctccaaagttacgctttttttcaatgaaaacattttcttgattcctgatttcaaatttcacaatctggatttcgtgtttcgaattcactttgaagaaaaagtttctcaatttcgcctgaaaacccacatgggattggaactaaacactagactgacaagaagaagaagagtaatcatcatcgagtgtttattacgattatgtccttaacgaaatcttcagaatcagttttcactgaagaagaagaagaagattcctttagcggtcgatacacgttatggatcaaagaagcattagaggagcttccacacaatttcacaatcaccgacccgtttatttcgggtcacccgattgttttcgcgagcttagggtttttgaaaatgactggctattcacgagaagaagtgatcggaagaaacggtaaagtttttcaaggacctaagactaatcgaagatcgatcatggagattcgtgaagcgattcgtgaagagagatcagtgcaagtgagcttgttgaattatcgtaaatctgggtctccgttttggatgttgtttcatatgtgtcctgtttttgggaaagatgatggtaaagtcaccaattttgtggcggttcaggtcccgatttcgggacgagaacatcatcggaagaagttgagaaatgtcggagatttgtcgtcggatacttctccgacatttggttcttgtcgaagagaggtttgttttggtaatttcgtgtgtcaggatcgagctttaccagtggaatgtgatgatgatgaacaaggattagaggattgggaacagtgtgaagcgagtgagtccgagaagctgaaagctacggaagctattaacaatgtgttatctatcttagtgcattacagcgagttgagtggtagattagtctgcggaaagcggtactgcttgcgaggagtagattgtctaagctcgtcgttagttatttctctcggtagaatcaaacaaagtttcgtattaaccaatccatgcttaccagacatgcctatcatttatgcgagtgatgcctttttgacactgaccggttacaagagacaggaagtgttgggacaaaactgtagatttctgagtggggttgatactgattcctcagtactatacgagatgaaggaatgcatcttaaagggacaatcatgcacagtgcaaatactaaattacagtaacagaaaagataagagctcattttggaatcttcttcacatctcaccagttcgtaatgcttcaggcaagacagcatattttgtgggtgttcaagtagaagcaagttgtagaaatactgaaattaaagagctgagaccagagacgagacaactgagtgttgtcggtgcggttagagttgcggttagaagctcattgatggtgacatgctaatatacgccagaaagaaaatgcgtcgacttagagaagagtctaaagtgaattggacatacatctttactatatgtataatcatttgacatactacattaatataagtctttattct

SEQ ID NO: 106806 - protein, 399 aa, Arabidopsis thaliana
  peptide (1)..(399): Ceres Seq. ID no. 13620492
MSLTKSSESVFTEEEEEDSFSGRYTLWIKEALEELPHNFTITDPFISGHPIVFASLGFLKMTGYSREEVIGRNGKVFQGPKTNRRSIMEIREAIREERSVQVSLLNYRKSGSPFWMLFHMCPVFGKDDGKVTNFVAVQVPISGREHHRKKLRNVGDLSSDTSPTFGSCRREVCFGNFVCQDRALPVECDDDEQGLEDWEQCEASESEKLKATEAINNVLSILVHYSELSGRLVCGKRYCLRGVDCLSSSLVISLGRIKQSFVLTNPCLPDMPIIYASDAFLTLTGYKRQEVLGQNCRFLSGVDTDSSVLYEMKECILKGQSCTVQILNYSNRKDKSSFWNLLHISPVRNASGKTAYFVGVQVEASCRNTEIKELRPETRQLSVVGAVRVAVRSSLMVTC

SEQ ID NO: 106807 - protein, 339 aa, Arabidopsis thaliana
  peptide (1)..(339): Ceres Seq. ID no. 13620493
MTGYSREEVIGRNGKVFQGPKTNRRSIMEIREAIREERSVQVSLLNYRKSGSPFWMLFHMCPVFGKDDGKVTNFVAVQVPISGREHHRKKLRNVGDLSSDTSPTFGSCRREVCFGNFVCQDRALPVECDDDEQGLEDWEQCEASESEKLKATEAINNVLSILVHYSELSGRLVCGKRYCLRGVDCLSSSLVISLGRIKQSFVLTNPCLPDMPIIYASDAFLTLTGYKRQEVLGQNCRFLSGVDTDSSVLYEMKECILKGQSCTVQILNYSNRKDKSSFWNLLHISPVRNASGKTAYFVGVQVEASCRNTEIKELRPETRQLSVVGAVRVAVRSSLMVTC

SEQ ID NO: 106808 - protein, 312 aa, Arabidopsis thaliana
  peptide (1)..(312): Ceres Seq. ID no. 13620494
MEIREAIREERSVQVSLLNYRKSGSPFWMLFHMCPVFGKDDGKVTNFVAVQVPISGREHHRKKLRNVGDLSSDTSPTFGSCRREVCFGNFVCQDRALPVECDDDEQGLEDWEQCEASESEKLKATEAINNVLSILVHYSELSGRLVCGKRYCLRGVDCLSSSLVISLGRIKQSFVLTNPCLPDMPIIYASDAFLTLTGYKRQEVLGQNCRFLSGVDTDSSVLYEMKECILKGQSCTVQILNYSNRKDKSSFWNLLHISPVRNASGKTAYFVGVQVEASCRNTEIKELRPETRQLSVVGAVRVAVRSSLMVTC

SEQ ID NO: 106809 - DNA, 1541 bp, Arabidopsis thaliana
  misc_feature (1)..(1541): Ceres Seq. ID no. 13620499
  misc_feature (1)..(1541): Ortholog of  Ceres SEQ ID NO 15180156 as cited in SEQ ID NO 0
atggtgagctagagatcttcgcttcagtgtttaaggattagataatgttaccggagagaagaagcacggtgttttcttcttcttcttcatatctgaatccatctggtcacaatgataattcttttttacttcttcggagaggcaaaaagtttggtcgtattgtgaaattgaagctttcacatttctttttgttctttgtgtcactctttttcttctcttgcatgttctctggccataaactactctttcatggttctgagttcttacctcattttgagcaaaacccttacatgaacagtcatatgttggtttcatcggagattgatataggattaaacaaatccaacatcgaaagaccacctggaagcaagaagagaaccaagcatttaccttgtgaagttccacttgctgaatctgctgatcgcatacttgagcctcaggattatttgaatttcactcggttttcgttaggctttgtagagactgagacatatgataaccctaggtttggagggcatcaaacactcagtgaaagagagagatcttactctgcagtaaatcagacaattcactgtggttttgtcaaaggaactggatttgatttgagcgaaaaggatagggcctatatgaagaactgtgtagtctctgtgtcttcttgcatttttggaagctctgattttctaaggagacctgcaaccaaaaagattagtgagttttcgaagcgaaatgtttgctttgtgatgtttgttgatgagcaaacgctatcgaaactggctagtgaagggcatgttcctgacaagcaaggatttgttggtttgtggaaaactgtagtagtgagcaatttgccttataatgatatgcgaaagactggcaaggttccgaaatttctgtcacaccgcctttttccttcttctaggtattcaatttggctagatagtaagatgagactcactacagatcctatgctgatcattgacttcttcttatggagaacaaaatcagaattcgctatctccaaccattatgaccggcattgtgtgtgggatgaagtgttacagaacaaacggctgaataagtacaaccattcggccattgatgaacagtttatgttttaccgatcagatggtctcaagaaatttgatccttcagatcctaattctcctcttccaagttatgtaccggaaggttcttttattgtaagggctcatacaccaatgtcaaacctcttcacttgcctttggttcaatgaagttgatcggtttacctcacgagatcagttgagttttgcatacacataccttaaacttcagagactgaattcggatagacccttgcgcctaaacatgttcaaggattgtgagcgtcgagcattaactaagctcttccaccatcgcgtagattcatcgcctccttcacctcctacttgattgattaagtatagatagtgttcttatgtttctacaatttttgtacttttctcctctttatacttttagtctaactttgaaggagatgaaacatggaagaggaacctaattgac

SEQ ID NO: 106810 - protein, 460 aa, Arabidopsis thaliana
  peptide (1)..(460): Ceres Seq. ID no. 13620500
MLPERRSTVFSSSSSYLNPSGHNDNSFLLLRRGKKFGRIVKLKLSHFFLFFVSLFFFSCMFSGHKLLFHGSEFLPHFEQNPYMNSHMLVSSEIDIGLNKSNIERPPGSKKRTKHLPCEVPLAESADRILEPQDYLNFTRFSLGFVETETYDNPRFGGHQTLSERERSYSAVNQTIHCGFVKGTGFDLSEKDRAYMKNCVVSVSSCIFGSSDFLRRPATKKISEFSKRNVCFVMFVDEQTLSKLASEGHVPDKQGFVGLWKTVVVSNLPYNDMRKTGKVPKFLSHRLFPSSRYSIWLDSKMRLTTDPMLIIDFFLWRTKSEFAISNHYDRHCVWDEVLQNKRLNKYNHSAIDEQFMFYRSDGLKKFDPSDPNSPLPSYVPEGSFIVRAHTPMSNLFTCLWFNEVDRFTSRDQLSFAYTYLKLQRLNSDRPLRLNMFKDCERRALTKLFHHRVDSSPPSPPT

SEQ ID NO: 106811 - protein, 401 aa, Arabidopsis thaliana
  peptide (1)..(401): Ceres Seq. ID no. 13620501
MFSGHKLLFHGSEFLPHFEQNPYMNSHMLVSSEIDIGLNKSNIERPPGSKKRTKHLPCEVPLAESADRILEPQDYLNFTRFSLGFVETETYDNPRFGGHQTLSERERSYSAVNQTIHCGFVKGTGFDLSEKDRAYMKNCVVSVSSCIFGSSDFLRRPATKKISEFSKRNVCFVMFVDEQTLSKLASEGHVPDKQGFVGLWKTVVVSNLPYNDMRKTGKVPKFLSHRLFPSSRYSIWLDSKMRLTTDPMLIIDFFLWRTKSEFAISNHYDRHCVWDEVLQNKRLNKYNHSAIDEQFMFYRSDGLKKFDPSDPNSPLPSYVPEGSFIVRAHTPMSNLFTCLWFNEVDRFTSRDQLSFAYTYLKLQRLNSDRPLRLNMFKDCERRALTKLFHHRVDSSPPSPPT

SEQ ID NO: 106812 - protein, 378 aa, Arabidopsis thaliana
  peptide (1)..(378): Ceres Seq. ID no. 13620502
MNSHMLVSSEIDIGLNKSNIERPPGSKKRTKHLPCEVPLAESADRILEPQDYLNFTRFSLGFVETETYDNPRFGGHQTLSERERSYSAVNQTIHCGFVKGTGFDLSEKDRAYMKNCVVSVSSCIFGSSDFLRRPATKKISEFSKRNVCFVMFVDEQTLSKLASEGHVPDKQGFVGLWKTVVVSNLPYNDMRKTGKVPKFLSHRLFPSSRYSIWLDSKMRLTTDPMLIIDFFLWRTKSEFAISNHYDRHCVWDEVLQNKRLNKYNHSAIDEQFMFYRSDGLKKFDPSDPNSPLPSYVPEGSFIVRAHTPMSNLFTCLWFNEVDRFTSRDQLSFAYTYLKLQRLNSDRPLRLNMFKDCERRALTKLFHHRVDSSPPSPPT

SEQ ID NO: 106813 - DNA, 2171 bp, Arabidopsis thaliana
  misc_feature (1)..(2171): Ceres Seq. ID no. 13620515
  misc_feature (1)..(2171): Ortholog of  Ceres SEQ ID NO 12586556 as cited in SEQ ID NO 64667
  misc_feature (1)..(2171): Ortholog of  Ceres SEQ ID NO 13660894 as cited in SEQ ID NO 67475
tggttttccatagttttagtggagacgatgaagtcagtaatgtcaaagatcaaactttttagaccagtcgtcacgttacgttgttcttacagctccacagatcaaactcttcttcttagcgaatttaccagactctgttaccagagagaccttcccagagctatgaaagcaatggattcattgcaaagtcatggtctttgggcagactctgcaacttattctgagcttatcaagtgttgtatatctaatagagctgttcatgaagggaatctcatttgtcgtcatttatacttcaatggtcatcgaccaatgatgtttctggttaatgttctgatcaatatgtatgtaaaattcaatcttttgaatgatgctcaccaactgttcgatcaaatgcctcaaaggaatgttatttcttggactacgatgatttctgcttattctaagtgtaagattcatcaaaaggctttggagcttttggttttgatgttgagagataatgtgaggcctaatgtgtatacttactcttctgttttgagatcttgcaatggtatgtctgatgttagaatgcttcattgtgggattattaaggaggggttggagtctgatgtttttgttaggagtgctttgattgatgtgtttgctaaactgggtgagccggaggatgctctttcggttttcgatgaaatggttacaggtgatgcgattgtttggaactcgatcattggtgggtttgctcagaatagtagaagcgatgtagctttggagctttttaagaggatgaagagagctggtttcattgcggagcaggctacgttgactagcgtattgagggcttgtactggtttggctctgttggagcttgggatgcaagctcatgttcatatcgtgaaatatgaccaagacttgatactcaacaacgcactcgtggacatgtattgcaagtgtgggagtttggaggatgctctccgtgtgttcaaccagatgaaggagagagatgtgattacatggagcactatgatttcagggttggcacagaatggttatagccaggaggcactgaagttgtttgagcgtatgaaatcttctgggacgaagccaaactacattacgattgtcggggttctctttgcttgcagccacgcagggctcctggaagatggttggtactacttcagatcaatgaagaaactttatggaatcgatccagtgagggaacattatggttgcatgattgatctgcttggaaaagctggaaagctcgacgatgcagtgaagctgttaaatgaaatggagtgtgagccagatgctgtgacatggagaactttgcttggtgcttgtagggttcaaagaaacatggtgctagcggagtatgcagctaaaaaggtcatagcactcgatcccgaggatgcaggaacttacacactattgtctaacatatacgcaaactctcagaaatgggacagtgttgaagaaattcggacacgaatgagagacagaggaatcaagaaagaacctggatgcagctggatcgaagtaaacaaacagattcatgcttttataattggagacaattctcacccacagatagttgaagtcagtaagaagctgaaccaattgatccatagactcactggtattggctatgttcctgaaacaaactttgtgctacaagatcttgaaggtgaacaaatggaagattcacttagacatcacagtgagaaactggctttagcctttggcttgatgacattacctattgagaaagtcattaggataagaaagaatctgagaatatgtggggattgtcatgtgttttgcaagctcgcatcgaagcttgaaatccgcagtatcgttatacgagatccgatccgttaccatcatttccaggatggcaaatgttcttgtggtgactactggtaacaatcagatgactttagattactatgaaacagagtataagatggtttagaagattgtttctctgcaagttttcttcatcaaattttttgattagtgaatcatttttgcttatgaagaagctcattgatttgccaaattttcctgataggattttgtaacatttgcaaaattgaatatgtatgataaaattggtcattggagtatggagactcactaatttagtaatttgtgataaaaaagagtttcttcag

SEQ ID NO: 106814 - protein, 639 aa, Arabidopsis thaliana
  peptide (1)..(639): Ceres Seq. ID no. 13620516
WFSIVLVETMKSVMSKIKLFRPVVTLRCSYSSTDQTLLLSEFTRLCYQRDLPRAMKAMDSLQSHGLWADSATYSELIKCCISNRAVHEGNLICRHLYFNGHRPMMFLVNVLINMYVKFNLLNDAHQLFDQMPQRNVISWTTMISAYSKCKIHQKALELLVLMLRDNVRPNVYTYSSVLRSCNGMSDVRMLHCGIIKEGLESDVFVRSALIDVFAKLGEPEDALSVFDEMVTGDAIVWNSIIGGFAQNSRSDVALELFKRMKRAGFIAEQATLTSVLRACTGLALLELGMQAHVHIVKYDQDLILNNALVDMYCKCGSLEDALRVFNQMKERDVITWSTMISGLAQNGYSQEALKLFERMKSSGTKPNYITIVGVLFACSHAGLLEDGWYYFRSMKKLYGIDPVREHYGCMIDLLGKAGKLDDAVKLLNEMECEPDAVTWRTLLGACRVQRNMVLAEYAAKKVIALDPEDAGTYTLLSNIYANSQKWDSVEEIRTRMRDRGIKKEPGCSWIEVNKQIHAFIIGDNSHPQIVEVSKKLNQLIHRLTGIGYVPETNFVLQDLEGEQMEDSLRHHSEKLALAFGLMTLPIEKVIRIRKNLRICGDCHVFCKLASKLEIRSIVIRDPIRYHHFQDGKCSCGDYW

SEQ ID NO: 106815 - protein, 630 aa, Arabidopsis thaliana
  peptide (1)..(630): Ceres Seq. ID no. 13620517
MKSVMSKIKLFRPVVTLRCSYSSTDQTLLLSEFTRLCYQRDLPRAMKAMDSLQSHGLWADSATYSELIKCCISNRAVHEGNLICRHLYFNGHRPMMFLVNVLINMYVKFNLLNDAHQLFDQMPQRNVISWTTMISAYSKCKIHQKALELLVLMLRDNVRPNVYTYSSVLRSCNGMSDVRMLHCGIIKEGLESDVFVRSALIDVFAKLGEPEDALSVFDEMVTGDAIVWNSIIGGFAQNSRSDVALELFKRMKRAGFIAEQATLTSVLRACTGLALLELGMQAHVHIVKYDQDLILNNALVDMYCKCGSLEDALRVFNQMKERDVITWSTMISGLAQNGYSQEALKLFERMKSSGTKPNYITIVGVLFACSHAGLLEDGWYYFRSMKKLYGIDPVREHYGCMIDLLGKAGKLDDAVKLLNEMECEPDAVTWRTLLGACRVQRNMVLAEYAAKKVIALDPEDAGTYTLLSNIYANSQKWDSVEEIRTRMRDRGIKKEPGCSWIEVNKQIHAFIIGDNSHPQIVEVSKKLNQLIHRLTGIGYVPETNFVLQDLEGEQMEDSLRHHSEKLALAFGLMTLPIEKVIRIRKNLRICGDCHVFCKLASKLEIRSIVIRDPIRYHHFQDGKCSCGDYW

SEQ ID NO: 106816 - protein, 626 aa, Arabidopsis thaliana
  peptide (1)..(626): Ceres Seq. ID no. 13620518
MSKIKLFRPVVTLRCSYSSTDQTLLLSEFTRLCYQRDLPRAMKAMDSLQSHGLWADSATYSELIKCCISNRAVHEGNLICRHLYFNGHRPMMFLVNVLINMYVKFNLLNDAHQLFDQMPQRNVISWTTMISAYSKCKIHQKALELLVLMLRDNVRPNVYTYSSVLRSCNGMSDVRMLHCGIIKEGLESDVFVRSALIDVFAKLGEPEDALSVFDEMVTGDAIVWNSIIGGFAQNSRSDVALELFKRMKRAGFIAEQATLTSVLRACTGLALLELGMQAHVHIVKYDQDLILNNALVDMYCKCGSLEDALRVFNQMKERDVITWSTMISGLAQNGYSQEALKLFERMKSSGTKPNYITIVGVLFACSHAGLLEDGWYYFRSMKKLYGIDPVREHYGCMIDLLGKAGKLDDAVKLLNEMECEPDAVTWRTLLGACRVQRNMVLAEYAAKKVIALDPEDAGTYTLLSNIYANSQKWDSVEEIRTRMRDRGIKKEPGCSWIEVNKQIHAFIIGDNSHPQIVEVSKKLNQLIHRLTGIGYVPETNFVLQDLEGEQMEDSLRHHSEKLALAFGLMTLPIEKVIRIRKNLRICGDCHVFCKLASKLEIRSIVIRDPIRYHHFQDGKCSCGDYW

SEQ ID NO: 106817 - DNA, 1271 bp, Arabidopsis thaliana
  misc_feature (1)..(1271): Ceres Seq. ID no. 13620539
  misc_feature (1)..(1271): Ortholog of  Ceres SEQ ID NO 13656783 as cited in SEQ ID NO 69218
ctgtttcagtttggtaattaggttatcttataaagctaatccttctctcacactgacaatcgtcgttatcaaggtgatttctttctctgcgtcaaacatcgcttaccctcttgattgattcctccaatcttcttcgtgtggtttcacaggattgaaatgagttcgatctctggattggtggaagatgaaatcagttcgtttttcgaatcgtctccacctctgaagaacaaggaagagatcgtagccaatcttaatcagttcattgagctgaattcttcgtgtcaaggagggatgaggaggattgtatgtgtgacttcaggtggaactacagttccattggagcaacgatgtgtaagatacattgataatttcagctctggaaatagaggtgctgcttctactgagaatttcgtcaaggctggatatgctgtgatatttctctataggaggggaacttgtcaaccgtattgccggtatcttcctgatgatccattccttgaatgttttgagtttccagatgccaaaaacattcaagttcatgggtcacattcaggagctgtgaagatggctgttatggaccagcaagctgcagttgcagaaggtcgcttgcttaaactcccattctcaaccatatatgaatatctccagatgttgcggttgattgctacgatattgaaagatgtcggtccatgttcgatgttttatcttgctgctgctgtatctgacttctatgtgccatggttaagcatggcaagaacagagcacaaaatagaatcaggatctggtcctttggacataagactagctcaagtccctaaaatgctttcaatcttgagatcaaattgggctccaaaggctttctgcatatcattcaagcttgagacagactcaaagattttgctagagaaagctacaaaggctttacaaaaatacaaagtgcacgcagttgtagcaaatgaactattaacgcgtaaggaggaagttgtggttgtttcaagtagcggtaatgttgtggtgagacgtgatagcaataagccggaatctatcgtagaagataatctcattcgtctcctcgtagatcgacattcaacatacatcaaagaatctctcacttgatccccaaattcttctacgtcaagaaaagttccaagtgttcgatgtgggatacgtgtaattgtgtatgagtgatgacttggaccataaattactcaaataattttcacactttcttatgtttttgacatgttgggaatatatgaatcctagaaatc

SEQ ID NO: 106818 - protein, 319 aa, Arabidopsis thaliana
  peptide (1)..(319): Ceres Seq. ID no. 13620540
MSSISGLVEDEISSFFESSPPLKNKEEIVANLNQFIELNSSCQGGMRRIVCVTSGGTTVPLEQRCVRYIDNFSSGNRGAASTENFVKAGYAVIFLYRRGTCQPYCRYLPDDPFLECFEFPDAKNIQVHGSHSGAVKMAVMDQQAAVAEGRLLKLPFSTIYEYLQMLRLIATILKDVGPCSMFYLAAAVSDFYVPWLSMARTEHKIESGSGPLDIRLAQVPKMLSILRSNWAPKAFCISFKLETDSKILLEKATKALQKYKVHAVVANELLTRKEEVVVVSSSGNVVVRRDSNKPESIVEDNLIRLLVDRHSTYIKESLT

SEQ ID NO: 106819 - protein, 274 aa, Arabidopsis thaliana
  peptide (1)..(274): Ceres Seq. ID no. 13620541
MRRIVCVTSGGTTVPLEQRCVRYIDNFSSGNRGAASTENFVKAGYAVIFLYRRGTCQPYCRYLPDDPFLECFEFPDAKNIQVHGSHSGAVKMAVMDQQAAVAEGRLLKLPFSTIYEYLQMLRLIATILKDVGPCSMFYLAAAVSDFYVPWLSMARTEHKIESGSGPLDIRLAQVPKMLSILRSNWAPKAFCISFKLETDSKILLEKATKALQKYKVHAVVANELLTRKEEVVVVSSSGNVVVRRDSNKPESIVEDNLIRLLVDRHSTYIKESLT

SEQ ID NO: 106820 - protein, 183 aa, Arabidopsis thaliana
  peptide (1)..(183): Ceres Seq. ID no. 13620542
MAVMDQQAAVAEGRLLKLPFSTIYEYLQMLRLIATILKDVGPCSMFYLAAAVSDFYVPWLSMARTEHKIESGSGPLDIRLAQVPKMLSILRSNWAPKAFCISFKLETDSKILLEKATKALQKYKVHAVVANELLTRKEEVVVVSSSGNVVVRRDSNKPESIVEDNLIRLLVDRHSTYIKESLT

SEQ ID NO: 106821 - DNA, 1484 bp, Arabidopsis thaliana
  misc_feature (1)..(1484): Ceres Seq. ID no. 13620555
  misc_feature (1)..(1484): Ortholog of  Ceres SEQ ID NO 13594128 as cited in SEQ ID NO 58608
  misc_feature (1)..(1484): Ortholog of  Ceres SEQ ID NO 14309682 as cited in SEQ ID NO 58908
  misc_feature (1)..(1484): Ortholog of  Ceres SEQ ID NO 12624849 as cited in SEQ ID NO 62773
aaaaagattcgatttttgactgcaaaaaagagaatttctaaaagcaaatcggagagcttcggcgatggcgttatcacgactttcttcacgatccaacactttcctaaagccggcgattaccgccttgccctcctccatccgccgtcatgtttccacagactcatcaccgatcacaatcgaaaccgccgtccctttcacatcgcatctatgtgaatcaccgtcacgctccgtcgagacttcatcggaggagatcttagcctttttccgtgacatggctcggatgaggaggatggagatcgcagcagattctctttacaaggcgaagctgatccgtgggttctgtcatttgtacgatggtcaagaggctttagcggtgggaatggaagcggcgattaccaaaaaagatgcgattatcacatcgtatcgtgatcactgtactttcattggtcgtggtgggaagcttgttgatgctttctctgagcttatggggagaaaaactggttgttctcatggtaaaggaggatctatgcatttctataagaaagatgcttccttttatggtggacatgggattgttggtgctcagattccattgggatgtggtttggcttttgctcagaagtataataaggatgaggctgtgacttttgctttgtatggtgatggtgctgcgaatcagggacagttgtttgaggccttgaacatttcggctttgtgggatttgcctgcgattcttgtttgcgagaataaccattatggaatgggaacggctacatggaggtcggctaagtctccggcttatttcaagcgtggagattatgttcctggcttgaaggtggatggtatggatgcactggctgtgaaacaggcgtgcaagtttgccaaggagcatgctctcaagaatggtcctattatccttgagatggacacttacagataccacggtcactctatgtctgacccaggaagcacttaccgtactcgtgatgaaatctctggcgtgagacaggtgcgtgatccaattgaaagggtgcgaaagttgctcttaactcatgacatagctaccgaaaaagagcttaaggacatggagaaagagataaggaaagaagtagatgacgccgtagctcaggccaaggagagcccgataccagatgcatctgagctattcacaaacatgtacgtgaaagactgcggagttgagtcgtttggagcagacagaaaagaactcaaagtaacacttccatagaatcttgcttcccaaggagatgattggttcaataaatcagaaggcaaggctacacaaatctttttaacttgctaccaaaaatatttctggttttttttttttgtattttcatttcaagtgtaaagccattgcttcaccagtttgccaacttttgtttcccacacttcaatttgacaccaagcaaaagaagcttcggatatcactctgtgagataaagttagagaaataagcagagagt

SEQ ID NO: 106822 - protein, 393 aa, Arabidopsis thaliana; identical to SEQ ID NO: 37473
  peptide (1)..(393): Ceres Seq. ID no. 13620556

SEQ ID NO: 106823 - protein, 324 aa, Arabidopsis thaliana; identical to SEQ ID NO: 37474
  peptide (1)..(324): Ceres Seq. ID no. 13620557

SEQ ID NO: 106824 - protein, 321 aa, Arabidopsis thaliana; identical to SEQ ID NO: 37475
  peptide (1)..(321): Ceres Seq. ID no. 13620558

SEQ ID NO: 106825 - DNA, 1420 bp, Arabidopsis thaliana
  misc_feature (1)..(1420): Ceres Seq. ID no. 13620559
  misc_feature (1)..(1420): Ortholog of  Ceres SEQ ID NO 13663942 as cited in SEQ ID NO 67573
atcgagaaacactaaactgctataatcattacctctcttcgatttctcaaaccctatctggctctctacccatatgcttcagatccgcattaaaaaagatctgctatccgcagtcatctgttcataggaaaagatctggctttacttttagagattatctcagatccagccttttacccaattgaagacgttgaatcaatgagactccccgtcaccgtcaaagccactaagccgtcgtttctcgtcatttggatccgatactcctccgccgcgtcgtcgccgacagtctccttgaatccaagtggacgattacagcaaactctcgcaggatctgtggaagtgaaaggaaaatctctgcactccggtaagttctcgacggtgaagctaaatccggagatcgccggagctggtaggttcttcgagtttcgatccagattcatccctgcgtcgattgaatttgctcaggaatcgcctctttgcacgacgctgttgaaagatgagctcaaaatccgaaccgttgagcatttgttatcagctcttgaggcgaagggagttgataattgcaggattcaaatcgagagcgaaagttccgatgatcgagaagtcgaggtccctatttttgatggatcagctaaagaatgggtcgatgcgatacaaggagttggcataaacgcggctcaaaaccatgatggtgaaagtgtagagaagatggtcgcacatgtgaacaagcctgtgtatgtttgcaagaacgatacttttgttgctgcatttccggctctagagactcggatcacttgtggtatcgacttcccacaggtgcctgctataggctgccaatggttttcttggagacctatccatgagtcttcttttgcaaaggatatcgcatcatcaagaaccttctgtgtctatgaagaggtggagcgtatgcgtgaagcagggctcattaaaggaggttctctggataacgccatagtttcgctgagcatggatggatgaatcctcctctgcggtttgatgatgaagcatgtcgacataagattcttgacctaatcggtgacctctcccttgtttcacggggcggaaatggaggactccccgtggctcacatagtcgcatataaggcgggtcatgcactgcacactgacttagcacgtcaccttaccatggactgaagagtatgtgctcgttgtcaaccatatcccgcaaaagccttgatcgtttctgtttctttttggattcgttatccaaagatggtaccaatgtgggatttttgtttgttcaatggaagatcattactcttgtgaatacagtaaaatttgtaacattaaactattttaggtactaatcatagggacattttaaccgatcaaactgttccaaaaccaaattgaattgaaacttaagttgtagttcaaag

SEQ ID NO: 106826 - protein, 266 aa, Arabidopsis thaliana
  peptide (1)..(266): Ceres Seq. ID no. 13620560
MRLPVTVKATKPSFLVIWIRYSSAASSPTVSLNPSGRLQQTLAGSVEVKGKSLHSGKFSTVKLNPEIAGAGRFFEFRSRFIPASIEFAQESPLCTTLLKDELKIRTVEHLLSALEAKGVDNCRIQIESESSDDREVEVPIFDGSAKEWVDAIQGVGINAAQNHDGESVEKMVAHVNKPVYVCKNDTFVAAFPALETRITCGIDFPQVPAIGCQWFSWRPIHESSFAKDIASSRTFCVYEEVERMREAGLIKGGSLDNAIVSLSMDG

SEQ ID NO: 106827 - DNA, 1773 bp, Arabidopsis thaliana
  misc_feature (1)..(1773): Ceres Seq. ID no. 13620576
  misc_feature (1)..(1773): Ortholog of  Ceres SEQ ID NO 13600220 as cited in SEQ ID NO 0
acttgcactcctctttttctttctttctttcttgttggtctctcttacttctttcttattcatctaaaacaatttcgatccatttacacataaatatatgtaactggccgtagaagaaacacattgaaggaagagatggctcataggagattaatcatgacgatgacaaagatgatgatgatggtgaccatgatgatgatgatggataaaacatgcatatgtgcggacatttccagaggcagttttccaaagggctttgtctttggaactgcttcttcggcttttcagcatgaaggagcggtgaaggcagaaggcagaggtcctacgatatgggacacattttcccacacttttggtaaaatcaccgattttagcaatgctgatgtcgctgttgatcagtatcatcgttacgaggaagatgtacaacttatgaagaatatgggaatggacgcttacagattttccatttcttggacccgcatctttccaaatggtgttggacatataaatgaagccggaatcgatcactacaacaaactcataaatgctttacttgctaaagggatcgagccgtacgtgacactgtaccactgggatcttccacaagcacttcatgatcgatacctcggttggctaaacccacaaatcataaatgattttgcagcgtatgcggaggtttgtttccagagatttggagatagagtgaagcactggatcacgttcaacgagccacacacgttcgcgatacaaggctatgatgttggcctacaagctccaggccgttgcactattctttttaagctcacttgtcgcgaaggaaactcatcgaccgagccttacattgttggtcacaatgttattttaactcacgccacagtatccgatatctataggaaaaagtataaggcaaagcaaggaggttcgttagggattgcgtttgatgtaatgtggtttgaaccagagtcgaacaagacagaggacattgaagctgcacaaagagctcaagactttcaacttggctggtttttggatccgttgatgtttggggattacccaagctcgatgagaagcagagtcggaagcagattaccggtgtttacaggatctcaatcttctctggtgaagggttctttagattttgtagggattaatcactacacaacgtactacgcaaggaacaatgccaccaatctcattggcactcttctacacgacgccgtttctgattctggaaccgtcactctaccgtttaagggtttaagcacgattggagatagggcaagttcgatatggttgtacatagtgcctagagggatgagaagcttgatgaattacattaaacatagatatggaaaccctccagtcttcatcactgaaaatggaatggacgacccaaacagcattctgatctcaagaaaagacgctctcaaagatgcaaagaggatcaaataccatcatgattacctttctagcttacaagcttcgataaaagaggatggatgtaatgtcaaagggtacttcgtatggtcgctattggacaattgggaatgggcagcaggttatagttcaagatttggtctctacttcgttgattacagagacaacctcaagagatatcctaaagactctgttcattggttcacttctttcttaaactccacttcttgatttttccttcccattttattggtttagcgtaatgtatacaaaagtttatgattagttatggatttcggtttagataaatatatttaaatcaagatatgttgatat

SEQ ID NO: 106828 - protein, 510 aa, Arabidopsis thaliana
  peptide (1)..(510): Ceres Seq. ID no. 13620577
MAHRRLIMTMTKMMMMVTMMMMMDKTCICADISRGSFPKGFVFGTASSAFQHEGAVKAEGRGPTIWDTFSHTFGKITDFSNADVAVDQYHRYEEDVQLMKNMGMDAYRFSISWTRIFPNGVGHINEAGIDHYNKLINALLAKGIEPYVTLYHWDLPQALHDRYLGWLNPQIINDFAAYAEVCFQRFGDRVKHWITFNEPHTFAIQGYDVGLQAPGRCTILFKLTCREGNSSTEPYIVGHNVILTHATVSDIYRKKYKAKQGGSLGIAFDVMWFEPESNKTEDIEAAQRAQDFQLGWFLDPLMFGDYPSSMRSRVGSRLPVFTGSQSSLVKGSLDFVGINHYTTYYARNNATNLIGTLLHDAVSDSGTVTLPFKGLSTIGDRASSIWLYIVPRGMRSLMNYIKHRYGNPPVFITENGMDDPNSILISRKDALKDAKRIKYHHDYLSSLQASIKEDGCNVKGYFVWSLLDNWEWAAGYSSRFGLYFVDYRDNLKRYPKDSVHWFTSFLNSTS

SEQ ID NO: 106829 - protein, 503 aa, Arabidopsis thaliana
  peptide (1)..(503): Ceres Seq. ID no. 13620578
MTMTKMMMMVTMMMMMDKTCICADISRGSFPKGFVFGTASSAFQHEGAVKAEGRGPTIWDTFSHTFGKITDFSNADVAVDQYHRYEEDVQLMKNMGMDAYRFSISWTRIFPNGVGHINEAGIDHYNKLINALLAKGIEPYVTLYHWDLPQALHDRYLGWLNPQIINDFAAYAEVCFQRFGDRVKHWITFNEPHTFAIQGYDVGLQAPGRCTILFKLTCREGNSSTEPYIVGHNVILTHATVSDIYRKKYKAKQGGSLGIAFDVMWFEPESNKTEDIEAAQRAQDFQLGWFLDPLMFGDYPSSMRSRVGSRLPVFTGSQSSLVKGSLDFVGINHYTTYYARNNATNLIGTLLHDAVSDSGTVTLPFKGLSTIGDRASSIWLYIVPRGMRSLMNYIKHRYGNPPVFITENGMDDPNSILISRKDALKDAKRIKYHHDYLSSLQASIKEDGCNVKGYFVWSLLDNWEWAAGYSSRFGLYFVDYRDNLKRYPKDSVHWFTSFLNSTS

SEQ ID NO: 106830 - protein, 501 aa, Arabidopsis thaliana
  peptide (1)..(501): Ceres Seq. ID no. 13620579
MTKMMMMVTMMMMMDKTCICADISRGSFPKGFVFGTASSAFQHEGAVKAEGRGPTIWDTFSHTFGKITDFSNADVAVDQYHRYEEDVQLMKNMGMDAYRFSISWTRIFPNGVGHINEAGIDHYNKLINALLAKGIEPYVTLYHWDLPQALHDRYLGWLNPQIINDFAAYAEVCFQRFGDRVKHWITFNEPHTFAIQGYDVGLQAPGRCTILFKLTCREGNSSTEPYIVGHNVILTHATVSDIYRKKYKAKQGGSLGIAFDVMWFEPESNKTEDIEAAQRAQDFQLGWFLDPLMFGDYPSSMRSRVGSRLPVFTGSQSSLVKGSLDFVGINHYTTYYARNNATNLIGTLLHDAVSDSGTVTLPFKGLSTIGDRASSIWLYIVPRGMRSLMNYIKHRYGNPPVFITENGMDDPNSILISRKDALKDAKRIKYHHDYLSSLQASIKEDGCNVKGYFVWSLLDNWEWAAGYSSRFGLYFVDYRDNLKRYPKDSVHWFTSFLNSTS

SEQ ID NO: 106831 - DNA, 1153 bp, Arabidopsis thaliana
  misc_feature (1)..(1153): Ceres Seq. ID no. 13620580
  misc_feature (1)..(1153): Ortholog of  Ceres SEQ ID NO 14306066 as cited in SEQ ID NO 57378
gattattttatttatctcaccaaggaaaacaaaacacaaaacaaacaaacaaacaaacccataaatcaagatctctgttttcagacagattattatcggaacaaaatgtcatcatcaggatccgacaaagagagagagacttttgtctatatggctaagctctccgaacaagccgagcgatacgacgagatggtggagacgatgaagaaagtggcgagggttaatagcgagctgactgtggaagagaggaatctgttgtcggttggttacaagaacgtgatcggagcaagaagagcttcgtggaggataatgtcgtccatcgagcagaaagaagagtctaaaggcaatgaatcaaacgtgaaacaaatcaagggttatcgccaaaaggtagaagatgagctcgctaacatttgccaagacattctcaccatcattgatcagcatctcatccctcacgctacctcaggggaagctaccgtcttctactacaagatgaaaggagattattaccgttacttggctgagtttaagaccgagcaagagaggaaggaagctgctgaacagtctctcaaaggctatgaggctgcaacacaagctgcaagcactgagcttccttcgacccatccaattcgtcttggccttgctcttaacttctctgttttctactatgagatcatgaactctcctgaaagagcttgccatttggctaagcaagccttcgatgaggcgattgcagagttagatactctaagtgaggagtcgtacaaggacagcactttgatcatgcagctcctgagagacaacctcaccctctggacttctgatcttcctgaagatggaggagaagacaacatcaagactgaagaatccaagcaagaacaggccaagcctgccgatgccactgagaactgatcaaagggcttggaagttgaatgagatttagattcgatgtccagaagggggaggcaaattcctttaaattccatagcttggtttcatcaggaagatgagatcagagacaattgaattcaatcctatattgtttcttttttgtattacttttcgtcttctttattttgttctcaattttcatgtcatcaagtattttatgttacgcaattttattatgatttgatcagcatatgcttttgct

SEQ ID NO: 106832 - protein, 303 aa, Arabidopsis thaliana
  peptide (1)..(303): Ceres Seq. ID no. 13620581
DYFIYLTKENKTQNKQTNKPINQDLCFQTDYYRNKMSSSGSDKERETFVYMAKLSEQAERYDEMVETMKKVARVNSELTVEERNLLSVGYKNVIGARRASWRIMSSIEQKEESKGNESNVKQIKGYRQKVEDELANICQDILTIIDQHLIPHATSGEATVFYYKMKGDYYRYLAEFKTEQERKEAAEQSLKGYEAATQAASTELPSTHPIRLGLALNFSVFYYEIMNSPERACHLAKQAFDEAIAELDTLSEESYKDSTLIMQLLRDNLTLWTSDLPEDGGEDNIKTEESKQEQAKPADATEN

SEQ ID NO: 106833 - protein, 268 aa, Arabidopsis thaliana; identical to SEQ ID NO: 42414
  peptide (1)..(268): Ceres Seq. ID no. 13620582

SEQ ID NO: 106834 - protein, 253 aa, Arabidopsis thaliana; identical to SEQ ID NO: 42415
  peptide (1)..(253): Ceres Seq. ID no. 13620583

SEQ ID NO: 106835 - DNA, 1393 bp, Arabidopsis thaliana
  misc_feature (1)..(1393): Ceres Seq. ID no. 13620591
  misc_feature (1)..(1393): Ortholog of  Ceres SEQ ID NO 13654928 as cited in SEQ ID NO 62546
aagatgaaaagtaatacccttcctctcttgccctttttgctggtctgggtgaaacatagaaaagtttctcttgctcaagttaatgataaaaggttgttgtaggatttgttgctctggctctggtggtaggtctatgaaatcaacccatatcgtgaatggactgcaacatggtatcttcgtcccagtgggattgggagcatttgatcatgtccaatccgtcaaggactgaagatgacagcaaacagctacctactgagtgggaaattgaaaaaggtgaaggaattgaatctatagttccacatttctcaggccttgagagagtcagtagtggctctgccaccagcttctggcacactgctgtatcgaaaagctcacagtcgacctctatcaactcatcatctcccgaagccaaacgatgcaagcttgcatcagaaagttcccctggagattcttgcagcaacatagactttgtccaggtgaaggctcccacagctctcgaggtatccgttgcctcagctgaatcagatctttgtttaaaactaggaaagcggacatactctgaagaatactggggtagaaacaataatgaaatttcagcggtttctatgaagttgttaactccatctgttgtcgctgggaaatccaaattgtgtggtcagagcatgccagtcccgcgttgccaaattgatggctgtgaactggatctctcatctgctaagggttatcatcgtaagcacaaagtctgcgaaaagcattcaaagtgcccaaaagttagcgtgagtggcctggaacgtcggttctgccaacagtgtagcaggttccatgctgtctctgaatttgatgagaagaaacgaagctgccgaaaacgtctttctcatcataatgcgaggcgtcgtaagccacaaggagtattttcaatgaatcccgagagggtgtatgatcgaagacagcatacaaatatgttgtggaatggggtgtcccttaacgcgagatctgaagaaatgtatgaatggggtaataacacttatgatacaaagcctagacaaacggaaaaaagctttactctgagcttccagagaggtaatggctctgaggaccagctggttgctagtagcagccgtatgttctctacatctcaaacctcaggtgggttcccagcaggaaagtccaagtttcaacttcatggcgaagatgtgggagaatactcaggagtcctccatgaatctcaagatatccaccgtgctctctctcttctgtcaacctcttcggatcccctggcccaaccacatgtgcagccattttctctactctgttcatatgatgttgtaccaaaatagatgagtaagtaatgtgtaatttgtaaacctgttactcagttggtggatacttttcc

SEQ ID NO: 106836 - protein, 393 aa, Arabidopsis thaliana; identical to SEQ ID NO: 24209
  peptide (1)..(393): Ceres Seq. ID no. 13620592

SEQ ID NO: 106837 - protein, 389 aa, Arabidopsis thaliana; identical to SEQ ID NO: 24210
  peptide (1)..(389): Ceres Seq. ID no. 13620593

SEQ ID NO: 106838 - protein, 376 aa, Arabidopsis thaliana; identical to SEQ ID NO: 24211
  peptide (1)..(376): Ceres Seq. ID no. 13620594

SEQ ID NO: 106839 - DNA, 904 bp, Arabidopsis thaliana
  misc_feature (1)..(904): Ceres Seq. ID no. 13620595
  misc_feature (1)..(904): Ortholog of  Ceres SEQ ID NO 12611884 as cited in SEQ ID NO 51018
  misc_feature (1)..(904): Ortholog of  Ceres SEQ ID NO 12609093 as cited in SEQ ID NO 52008
  misc_feature (1)..(904): Ortholog of  Ceres SEQ ID NO 12609839 as cited in SEQ ID NO 52022
  misc_feature (1)..(904): Ortholog of  Ceres SEQ ID NO 13638885 as cited in SEQ ID NO 55803
  misc_feature (1)..(904): Ortholog of  Ceres SEQ ID NO 12615635 as cited in SEQ ID NO 63133
  misc_feature (1)..(904): Ortholog of  Ceres SEQ ID NO 12586351 as cited in SEQ ID NO 64028
  misc_feature (1)..(904): Ortholog of  Ceres SEQ ID NO 13584899 as cited in SEQ ID NO 64830
  misc_feature (1)..(904): Ortholog of  Ceres SEQ ID NO 13654441 as cited in SEQ ID NO 67814
  misc_feature (1)..(904): Ortholog of  Ceres SEQ ID NO 12585194 as cited in SEQ ID NO 68878
  misc_feature (1)..(904): Ortholog of  Ceres SEQ ID NO 12589186 as cited in SEQ ID NO 0
  misc_feature (1)..(904): Ortholog of  Ceres SEQ ID NO 12635608 as cited in SEQ ID NO 0
aaaacaaacaactctttaactatcatcagatcaataaaaaccagaagaagtcatggctcagaacgatacagtgaagctgataggttcttggtctagcccttattcccttagggcacgtgtggctctacacttgaaatctgtcaagtacgagtacttagacgaacctgatgttcttaaagaaaagagtgaactccttctcaaatctaaccccatccacaagaaagtccctgtcctcctccatggtgacctctccatctctgagtccctcaacgttgttcaatacgtcgacgaggcttggccctccgttccttcaatccttccttctgatgcctatgatcgcgcatctgctcggttttgggctcagtacatcgatgacaagtgttttgcggcggtggatgcggtggtcggagcaaaagacgacgaagggaaaatggcggcggtgggaaagctgatggagtgtttggcgatacttgaagaaacgtttcagaagagcagcaaaggattagggttctttggaggagagaccatcggctaccttgacattgcttgttcggctcttttaggtccgatctctgtgatcgaggcgttttccggcgtcaagtttctccggcaagagacaacacctgggttgatcaaatgggccgagaggtttagggcccatgaagctgttaagccctacatgccaaccgtcgaagaggtcgttgcattcgcaaagcaaaagttcaatgttcagtgatgcgttttttgcttttaaaagcaaaagcaatgttgttgaatacgaataaaatgatgtttgttgtctttgagaaactttaaatttgtctgtgttttgtgccaaaacttctgattaattggtttttggtctttgtgcgttactattatcaattttattcttattatttgc

SEQ ID NO: 106840 - protein, 227 aa, Arabidopsis thaliana
  peptide (1)..(227): Ceres Seq. ID no. 13620596
MAQNDTVKLIGSWSSPYSLRARVALHLKSVKYEYLDEPDVLKEKSELLLKSNPIHKKVPVLLHGDLSISESLNVVQYVDEAWPSVPSILPSDAYDRASARFWAQYIDDKCFAAVDAVVGAKDDEGKMAAVGKLMECLAILEETFQKSSKGLGFFGGETIGYLDIACSALLGPISVIEAFSGVKFLRQETTPGLIKWAERFRAHEAVKPYMPTVEEVVAFAKQKFNVQ

SEQ ID NO: 106841 - DNA, 1446 bp, Arabidopsis thaliana
  misc_feature (1)..(1446): Ceres Seq. ID no. 13650727
  misc_feature (1)..(1446): Ortholog of  Ceres SEQ ID NO 13656435 as cited in SEQ ID NO 65853
gtggcatcttaatcaaattcttcttcgccttcactttcaattgtctctccaatatcctcaccagatctgaaaccggcaccggcgacgtgtttccgaggttaaacactctcaattgcgccggacctctcttcttccctccactccctgtactcttctccgccgtatctagcgccgctaaacatcccttcactatatcgtctatgtaagtgaaatccctagccaccgttccgtgattcgccgattcgaatatcgaaatcgatttgccttttagaatatctttagtgaagaagaaatacgccatgtctggtcttccccaaggtccatacacggtgaaaaatcttaatccggttagagataatccatagatgtggttgtaggtatgtgcgatctcttcgccggcttttttagtggcggcgtataaactcgccggttgatctgttttatctttctccgagaacggaactttggtgttgagtccgtagacggagctagacgaagcccagactatagcaggttgtggattcacagatttgcagatctcgaggagattgacgaatccggcgatgttgctatgaacgtacgagctagggttttccattgcgtaccgtacaccagcttgagctgctaaatgcataacgtgtgtgaaggagacgatcttgaatagcttacggagtaattcgacgtcgtttatgtctccttctacgatgaagatcccacttctctcgagtaaagctcgtcttgctcgtttcagagatggatcgtagtaatcgttgaagttgtcgaggccgattacgccgtctccgcggcgttttaatgcggcggagacgtgtgttccgacgaaaccagctgctccggttactaaaactgtgattccgttgtttgttgaggttcggattcgagctgaggatctgagacgtttttcccaagctggtcctccgtaggtgttggttcggagtgaacggcgagatggatcggacggtgaagaagggttaatggacggtggagatcggaggaagagtagagagatgagacagaggaggaagaaggagaaaaatgcaaactttgtgagagaagattggaatctgagacgatgcaagtaggaagatttctccatcttgaatttgcctgggcttgaagaacatggggattgaagattttagagatccaaatcatagggaaaatatgaagaagaagaagaagaagaagaagaagaagaagaagaagaagaagaagaagagagtcaaaaaaattactgtaaaaatttgttgactcttctaaagatttgttgtcgagtcttgaaatttgattggtgagatactaatactccaagattttcgggaagccactcgtcccaaaagttttgaatttgaaccaaagttttaaacttttgttaatagatttgttgcggatagttgctaaatacaaaaatggactctaaatttgaat

SEQ ID NO: 106842 - protein, 67 aa, Arabidopsis thaliana; identical to SEQ ID NO: 250
  peptide (1)..(67): Ceres Seq. ID no. 13650728

SEQ ID NO: 106843 - protein, 42 aa, Arabidopsis thaliana
  peptide (1)..(42): Ceres Seq. ID no. 13650729
MGIEDFRDPNHRENMKKKKKKKKKKKKKKKKKRVKKITVKIC

SEQ ID NO: 106844 - protein, 35 aa, Arabidopsis thaliana; identical to SEQ ID NO: 69360
  peptide (1)..(35): Ceres Seq. ID no. 13650730

SEQ ID NO: 106845 - DNA, 645 bp, Arabidopsis thaliana
  misc_feature (1)..(645): Ceres Seq. ID no. 13620618
  misc_feature (1)..(645): Ortholog of  Ceres SEQ ID NO 14305939 as cited in SEQ ID NO 0
tgatttctaaattacaaacggcttctcnagctagctcttttttctaaaactttcacaaagaacgatctcttaatttgtggctgacatagcttggttcttaataaagaagttgtggaaatgggaagcctcaagtacttaggagttgctttctttgttttagttgtttttgacgtctgtttagcagctagatcaccaaaagctcttggtagagggtccggttcaggttctggatatggttcaggctctgggggaggtaacggtggtgggggaggtggtggtggcggagggggaggcggcggaggaggtggtggtggagatggatcaggttcagggagtggttacgggtcagggtatgggtccggtagtggttatggaggaggaaacaacggtggtggcggtggaggtgggggcagaggtggtggaggaggaggcggaaatggaggttccggaaacgggtcaggttatggaagcggctctggatatggaagtggtgctggtagaggtggtggtgggggaggcggcggtggaggaggaggaggtggtggtggaggtagccgcggaaatggatccggctatggaagtggatatggtgaagggtatggaagcggatacggtggtggagataattacggtgactcaccctaa

SEQ ID NO: 106846 - protein, 175 aa, Arabidopsis thaliana
  peptide (1)..(175): Ceres Seq. ID no. 13620619
MGSLKYLGVAFFVLVVFDVCLAARSPKALGRGSGSGSGYGSGSGGGNGGGGGGGGGGGGGGGGGGGDGSGSGSGYGSGYGSGSGYGGGNNGGGGGGGGRGGGGGGGNGGSGNGSGYGSGSGYGSGAGRGGGGGGGGGGGGGGGGGSRGNGSGYGSGYGEGYGSGYGGGDNYGDSP

SEQ ID NO: 106847 - protein, 137 aa, Arabidopsis thaliana
  peptide (1)..(137): Ceres Seq. ID no. 13620620
MVQALGEVTVVGEVVVAEGEAAEEVVVEMDQVQGVVTGQGMGPVVVMEEETTVVAVEVGAEVVEEEAEMEVPETGQVMEAALDMEVVLVEVVVGEAAVEEEEVVVEVAAEMDPAMEVDMVKGMEADTVVEIITVTHP

SEQ ID NO: 106848 - protein, 109 aa, Arabidopsis thaliana
  peptide (1)..(109): Ceres Seq. ID no. 13620621
MDQVQGVVTGQGMGPVVVMEEETTVVAVEVGAEVVEEEAEMEVPETGQVMEAALDMEVVLVEVVVGEAAVEEEEVVVEVAAEMDPAMEVDMVKGMEADTVVEIITVTHP

SEQ ID NO: 106849 - DNA, 2837 bp, Arabidopsis thaliana
  misc_feature (1)..(2837): Ceres Seq. ID no. 13620637
  misc_feature (1)..(2837): Ortholog of  Ceres SEQ ID NO 12586556 as cited in SEQ ID NO 64667
  misc_feature (1)..(2837): Ortholog of  Ceres SEQ ID NO 13660894 as cited in SEQ ID NO 67475
aatggcgatatgcagactagagtgtcatcacctttcatctctagagctctttcgtcgtcatctaacctcaatgagcttcgtcgaattcacgcccttgtgatctctcttggtcttgacagctccgacttcttctccggtaagcttatcgacaagtactctcactttcgtgaacccgcctcttccctctctgttttccgacgagtttctccggccaaaaatgtttacctctggaattcaatcatcagagctttttctaagaatggtttgttccctgaagccctcgagttttacgggaaactccgggaatccaaggtttctcctgataagtacacgtttccttcggttatcaaagcctgcgcgggattgttcgatgcggagatgggagatttggtttatgaacagatattggatatgggttttgaatcggatttatttgtaggtaatgcacttgtggatatgtattcgagaatgggattgttaactagagcacgacaagtgttcgacgaaatgcctgtgagagatctcgtgtcctggaacagtttgatttctgggtatagttcccatggttactatgaggaagctttggaaatttatcatgagttgaagaattcgtggattgtaccagattccttcacggtttcaagtgttttgcctgcatttgggaatttgctggttgtcaaacaaggacagggacttcatggttttgctctgaagtcaggtgttaattccgttgtggtggttaacaatggactagttgcaatgtacttgaaatttcgcagaccaacggatgcaagacgagtttttgatgagatggatgttcgagattctgttagttacaatactatgatctgcggatatctcaagttagagatggttgaagaatccgtgaggatgtttttggaaaacttggatcagttcaagcctgatctcttaacagttagttctgttctccgtgcctgcggacacttacgggacttgagcttggcaaagtacatttacaactatatgttgaaagctggatttgttcttgaatctactgttagaaacattctaattgacgtgtatgcaaagtgtggtgacatgatcaccgcaagagatgttttcaacagcatggaatgcaaggatactgtttcgtggaactcgataatcagtggatatatacaaagcggagatcttatggaagccatgaaactcttcaagatgatgatgatcatggaagagcaggcggatcacatcacttatttgatgcttatatctgtctccacacgtctagcagacttgaaatttgggaaagggctacactcaaatgggataaaatctggaatttgtatcgatctttctgttagtaatgctttgattgatatgtatgcgaagtgcggggaagtaggagattccttgaagatattcagtagtatgggaactggggatacggtaacatggaacacggttatttcagcatgtgttcgttttggggatttcgcaaccggtttgcaggtaactactcaaatgaggaagagcgaagtggtgcctgatatggctactttcttagttacattgcctatgtgtgcttcacttgctgcaaaacgactaggcaaggagatccattgttgtctgttgaggtttggatatgaatcagagttgcaaatagggaatgcactaattgaaatgtactcaaaatgtggttgtttggagaattcgtctagagtctttgaacgtatgagtagaagagatgttgtgacatggacaggaatgatctatgcatatggaatgtatggcgaaggtgagaaagctcttgaaacttttgcggatatggaaaaatccggtattgttcccgatagtgttgtcttcattgccatcatatatgcttgcagccactctggtttggtagacgaaggcttggcttgctttgagaagatgaaaactcactacaaaattgacccgatgattgaacattatgcttgtgtggtcgatttgctgtcccggtcacagaagatttcaaaagccgaagaatttatccaagcaatgccgataaaaccagatgcaagcatatgggcatctgtgctaagagcttgtcgaacaagtggggacatggagactgctgaaagagtatctaggaggatcattgaactgaacccggatgatccaggttactcgattctagcatcaaacgcatatgcagccttgagaaaatgggacaaagtgagtctaatccgcaaatccttgaaagataaacacatcacgaagaatcctggatatagctggatcgaagtcggtaaaaacgttcacgtgttcagctcaggagatgattcagctcctcagtcagaagccatctacaagtcactggagatactttacagtctgatggctaaagaaggctacattcccgatccaagggaagtgtcacagaatctagaggaagaagaagagaagagacgtttaatctgtgggcacagcgagagacttgctattgcgtttggactgttgaacacagaaccagggactccattgcaggtgatgaagaaccttcgtgtttgtggtgactgtcatgaagtcacgaagctgatatcgaagattgtgggacgtgagatattagtgcgggatgctaatcgattccatctcttcaaagacggcacttgtagctgcaaagatcggtggtgaatagtttatttgatgtaatttagagcatggatttgcgaaaattagactgaaaatatacaaagaaaatagtagaagaagagaacgattacgaaatatcttgaacaagctctgaaaattttccatggccctcaataatgctgtgagaattgaaaagtgatttattatcatccaaaatcatg

SEQ ID NO: 106850 - protein, 885 aa, Arabidopsis thaliana
  peptide (1)..(885): Ceres Seq. ID no. 13620638
NGDMQTRVSSPFISRALSSSSNLNELRRIHALVISLGLDSSDFFSGKLIDKYSHFREPASSLSVFRRVSPAKNVYLWNSIIRAFSKNGLFPEALEFYGKLRESKVSPDKYTFPSVIKACAGLFDAEMGDLVYEQILDMGFESDLFVGNALVDMYSRMGLLTRARQVFDEMPVRDLVSWNSLISGYSSHGYYEEALEIYHELKNSWIVPDSFTVSSVLPAFGNLLVVKQGQGLHGFALKSGVNSVVVVNNGLVAMYLKFRRPTDARRVFDEMDVRDSVSYNTMICGYLKLEMVEESVRMFLENLDQFKPDLLTVSSVLRACGHLRDLSLAKYIYNYMLKAGFVLESTVRNILIDVYAKCGDMITARDVFNSMECKDTVSWNSIISGYIQSGDLMEAMKLFKMMMIMEEQADHITYLMLISVSTRLADLKFGKGLHSNGIKSGICIDLSVSNALIDMYAKCGEVGDSLKIFSSMGTGDTVTWNTVISACVRFGDFATGLQVTTQMRKSEVVPDMATFLVTLPMCASLAAKRLGKEIHCCLLRFGYESELQIGNALIEMYSKCGCLENSSRVFERMSRRDVVTWTGMIYAYGMYGEGEKALETFADMEKSGIVPDSVVFIAIIYACSHSGLVDEGLACFEKMKTHYKIDPMIEHYACVVDLLSRSQKISKAEEFIQAMPIKPDASIWASVLRACRTSGDMETAERVSRRIIELNPDDPGYSILASNAYAALRKWDKVSLIRKSLKDKHITKNPGYSWIEVGKNVHVFSSGDDSAPQSEAIYKSLEILYSLMAKEGYIPDPREVSQNLEEEEEKRRLICGHSERLAIAFGLLNTEPGTPLQVMKNLRVCGDCHEVTKLISKIVGREILVRDANRFHLFKDGTCSCKDRW

SEQ ID NO: 106851 - protein, 882 aa, Arabidopsis thaliana
  peptide (1)..(882): Ceres Seq. ID no. 13620639
MQTRVSSPFISRALSSSSNLNELRRIHALVISLGLDSSDFFSGKLIDKYSHFREPASSLSVFRRVSPAKNVYLWNSIIRAFSKNGLFPEALEFYGKLRESKVSPDKYTFPSVIKACAGLFDAEMGDLVYEQILDMGFESDLFVGNALVDMYSRMGLLTRARQVFDEMPVRDLVSWNSLISGYSSHGYYEEALEIYHELKNSWIVPDSFTVSSVLPAFGNLLVVKQGQGLHGFALKSGVNSVVVVNNGLVAMYLKFRRPTDARRVFDEMDVRDSVSYNTMICGYLKLEMVEESVRMFLENLDQFKPDLLTVSSVLRACGHLRDLSLAKYIYNYMLKAGFVLESTVRNILIDVYAKCGDMITARDVFNSMECKDTVSWNSIISGYIQSGDLMEAMKLFKMMMIMEEQADHITYLMLISVSTRLADLKFGKGLHSNGIKSGICIDLSVSNALIDMYAKCGEVGDSLKIFSSMGTGDTVTWNTVISACVRFGDFATGLQVTTQMRKSEVVPDMATFLVTLPMCASLAAKRLGKEIHCCLLRFGYESELQIGNALIEMYSKCGCLENSSRVFERMSRRDVVTWTGMIYAYGMYGEGEKALETFADMEKSGIVPDSVVFIAIIYACSHSGLVDEGLACFEKMKTHYKIDPMIEHYACVVDLLSRSQKISKAEEFIQAMPIKPDASIWASVLRACRTSGDMETAERVSRRIIELNPDDPGYSILASNAYAALRKWDKVSLIRKSLKDKHITKNPGYSWIEVGKNVHVFSSGDDSAPQSEAIYKSLEILYSLMAKEGYIPDPREVSQNLEEEEEKRRLICGHSERLAIAFGLLNTEPGTPLQVMKNLRVCGDCHEVTKLISKIVGREILVRDANRFHLFKDGTCSCKDRW

SEQ ID NO: 106852 - protein, 759 aa, Arabidopsis thaliana
  peptide (1)..(759): Ceres Seq. ID no. 13620640
MGDLVYEQILDMGFESDLFVGNALVDMYSRMGLLTRARQVFDEMPVRDLVSWNSLISGYSSHGYYEEALEIYHELKNSWIVPDSFTVSSVLPAFGNLLVVKQGQGLHGFALKSGVNSVVVVNNGLVAMYLKFRRPTDARRVFDEMDVRDSVSYNTMICGYLKLEMVEESVRMFLENLDQFKPDLLTVSSVLRACGHLRDLSLAKYIYNYMLKAGFVLESTVRNILIDVYAKCGDMITARDVFNSMECKDTVSWNSIISGYIQSGDLMEAMKLFKMMMIMEEQADHITYLMLISVSTRLADLKFGKGLHSNGIKSGICIDLSVSNALIDMYAKCGEVGDSLKIFSSMGTGDTVTWNTVISACVRFGDFATGLQVTTQMRKSEVVPDMATFLVTLPMCASLAAKRLGKEIHCCLLRFGYESELQIGNALIEMYSKCGCLENSSRVFERMSRRDVVTWTGMIYAYGMYGEGEKALETFADMEKSGIVPDSVVFIAIIYACSHSGLVDEGLACFEKMKTHYKIDPMIEHYACVVDLLSRSQKISKAEEFIQAMPIKPDASIWASVLRACRTSGDMETAERVSRRIIELNPDDPGYSILASNAYAALRKWDKVSLIRKSLKDKHITKNPGYSWIEVGKNVHVFSSGDDSAPQSEAIYKSLEILYSLMAKEGYIPDPREVSQNLEEEEEKRRLICGHSERLAIAFGLLNTEPGTPLQVMKNLRVCGDCHEVTKLISKIVGREILVRDANRFHLFKDGTCSCKDRW

SEQ ID NO: 106853 - DNA, 1483 bp, Arabidopsis thaliana
  misc_feature (1)..(1483): Ceres Seq. ID no. 13620652
  misc_feature (1)..(1483): Ortholog of  Ceres SEQ ID NO 13599568 as cited in SEQ ID NO 509
  misc_feature (1)..(1483): Ortholog of  Ceres SEQ ID NO 13638595 as cited in SEQ ID NO 52050
  misc_feature (1)..(1483): Ortholog of  Ceres SEQ ID NO 13594748 as cited in SEQ ID NO 52114
  misc_feature (1)..(1483): Ortholog of  Ceres SEQ ID NO 12616101 as cited in SEQ ID NO 63367
  misc_feature (1)..(1483): Ortholog of  Ceres SEQ ID NO 12583993 as cited in SEQ ID NO 68098
  misc_feature (1)..(1483): Ortholog of  Ceres SEQ ID NO 13654535 as cited in SEQ ID NO 68227
cttaacctgaagaacgaagaaccgtctctaaaactccgacgaacgaaaaatgaagtcattagcttcgccgccgtgtctccgcctgataccgacggcacaccgtcagctcaattcgcgtcaatcttcctccgcctgttatatacacggtggctcttctgtgaacaaatccaataatctctcattctcctcatccacatccggatttgcgtcaccactagctgtagagaaggaattacgctcttcattcgtacagacggctgctgttcgccatgttacggggtctcttatcagaggcgaaggtcttagattcgccatcgtggtagctcgtttcaatgaggttgtgactaagttgcttttggaaggagcgattgagactttcaagaagtattcagtcagagaagaagacattgaagttatttgggttcctggcagctttgaaattggtgttgttgcacaaaatcttgggaaatcgggaaaatttcatgctgttttatgtatcggcgctgtgataagaggagataccacacattatgatgctgttgccaactctgctgcgtctggagtactttctgctagcataaattcaggcgttccatgcatatttggtgtactgacttgcgaggacatggatcaggctctgaatcgatctggtggcaaagccggcaataagggagctgaaactgctttgaccacgttctcgagaaccggcttaatccacaaaaaggggggaaaaaaacacacgaacatttctgtttgagagaaaaaaattaatggaaggtcttttgcagtttctattagccaaaatcattttgttggctttagcatcttcgtttgtatattgttacgacccatctcctcttcaagactactgtgttgccaccaacgaaactaatggagtttatgtaaatggagagttctgcaaagatccaaaacgtgtaacaaccaatgatttttatacttccggcctaaacgtccccggaaacaccatcatcgggcccggcgctagaaacaccgtcgtggatgtcgaaagactgcctggtctcaacactcttggggtcgacattgcccgctatgactttgccccgggcggtctagacccacctcacacacacccgcgtggcagccagatcttcttagtcatgaagggcaagcttttcgttggttttgtgtcgtcaaatgaatacaactacacgctcttcaccaaagttctttatccgggagatgtatttgtgtttcccaaaggtttgatacattttcatgcgaatattggggagacaaatgccgttgtgatttctgcgggtgggagccaagaccccggtaggatcataataggtgatgcggttttcggatcaaaacctttgattgatcccaaggttttggctaaagcttttgcgttggactacaacaaagtgaaatatcttcaggcagtgttttcttgatgacatactagcttaagagaataatgataaaatatagttatgcg

SEQ ID NO: 106854 - protein, 235 aa, Arabidopsis thaliana
  peptide (1)..(235): Ceres Seq. ID no. 13620653
MKSLASPPCLRLIPTAHRQLNSRQSSSACYIHGGSSVNKSNNLSFSSSTSGFASPLAVEKELRSSFVQTAAVRHVTGSLIRGEGLRFAIVVARFNEVVTKLLLEGAIETFKKYSVREEDIEVIWVPGSFEIGVVAQNLGKSGKFHAVLCIGAVIRGDTTHYDAVANSAASGVLSASINSGVPCIFGVLTCEDMDQALNRSGGKAGNKGAETALTTFSRTGLIHKKGGKKHTNISV

SEQ ID NO: 106855 - protein, 222 aa, Arabidopsis thaliana
  peptide (1)..(222): Ceres Seq. ID no. 13620654
MEGLLQFLLAKIILLALASSFVYCYDPSPLQDYCVATNETNGVYVNGEFCKDPKRVTTNDFYTSGLNVPGNTIIGPGARNTVVDVERLPGLNTLGVDIARYDFAPGGLDPPHTHPRGSQIFLVMKGKLFVGFVSSNEYNYTLFTKVLYPGDVFVFPKGLIHFHANIGETNAVVISAGGSQDPGRIIIGDAVFGSKPLIDPKVLAKAFALDYNKVKYLQAVFS

SEQ ID NO: 106856 - DNA, 825 bp, Arabidopsis thaliana
  misc_feature (1)..(825): Ceres Seq. ID no. 13620655
  misc_feature (1)..(825): Ortholog of  Ceres SEQ ID NO 15172903 as cited in SEQ ID NO 51839
  misc_feature (1)..(825): Ortholog of  Ceres SEQ ID NO 15177108 as cited in SEQ ID NO 52015
  misc_feature (1)..(825): Ortholog of  Ceres SEQ ID NO 13638595 as cited in SEQ ID NO 52050
  misc_feature (1)..(825): Ortholog of  Ceres SEQ ID NO 13594748 as cited in SEQ ID NO 52114
  misc_feature (1)..(825): Ortholog of  Ceres SEQ ID NO 15173596 as cited in SEQ ID NO 63267
  misc_feature (1)..(825): Ortholog of  Ceres SEQ ID NO 12583993 as cited in SEQ ID NO 68098
  misc_feature (1)..(825): Ortholog of  Ceres SEQ ID NO 13654535 as cited in SEQ ID NO 68227
agaaaaaaatatatgatggaagtgcttcttcgcttgcttgtaactcaagttatcttattggctttagcaacttcatttgtatcttgttacgatccaaatcctcttcaagacttttgtgttgccgccagcgaaactaatagagttttcgtgaatggcaaattctgtaaagatccaaaatcagtaacggccaatgatttctcttattcgggactcaacatcgcccgaaacaccaccaacttcctcggttctaatgtcacaaccgtagatgtcaacaaaatccctggcctcaacaccctcggagtctccctcgctcgcttagactttgctcagggaggtcaaaacccaccgcacatacatccacgcgccactgaaatactcgtagtcaccaaaggaaaactcctggttgggtttgtgtcttcgaaccaagacaacaatagactgttctacaaggttcttaaacgaggagacgtttttgtgtttcccattggtttgatacattttcaaatgaacgttcggaggacaagggcggtcgcgtttgctgggtttgggagccagaatcctggtaccattaggattgcagacgcggtttttggatcgaacccttcgattcctcaagaggtgttggctaaagcttttcaattagacgttaaattggttagatttctccacatagtgtttggtccgccattatggtagtaagttttaagattgatgataaaatttgtgagttaatcacatgatatacatacatgtatttaaatcccaaacttataaatttgtattttttatttgttttctaaatgaatgtaaaattagttcaaccct

SEQ ID NO: 106857 - protein, 231 aa, Arabidopsis thaliana
  peptide (1)..(231): Ceres Seq. ID no. 13620656
RKKYMMEVLLRLLVTQVILLALATSFVSCYDPNPLQDFCVAASETNRVFVNGKFCKDPKSVTANDFSYSGLNIARNTTNFLGSNVTTVDVNKIPGLNTLGVSLARLDFAQGGQNPPHIHPRATEILVVTKGKLLVGFVSSNQDNNRLFYKVLKRGDVFVFPIGLIHFQMNVRRTRAVAFAGFGSQNPGTIRIADAVFGSNPSIPQEVLAKAFQLDVKLVRFLHIVFGPPLW

SEQ ID NO: 106858 - protein, 227 aa, Arabidopsis thaliana
  peptide (1)..(227): Ceres Seq. ID no. 13620657
MMEVLLRLLVTQVILLALATSFVSCYDPNPLQDFCVAASETNRVFVNGKFCKDPKSVTANDFSYSGLNIARNTTNFLGSNVTTVDVNKIPGLNTLGVSLARLDFAQGGQNPPHIHPRATEILVVTKGKLLVGFVSSNQDNNRLFYKVLKRGDVFVFPIGLIHFQMNVRRTRAVAFAGFGSQNPGTIRIADAVFGSNPSIPQEVLAKAFQLDVKLVRFLHIVFGPPLW

SEQ ID NO: 106859 - protein, 226 aa, Arabidopsis thaliana
  peptide (1)..(226): Ceres Seq. ID no. 13620658
MEVLLRLLVTQVILLALATSFVSCYDPNPLQDFCVAASETNRVFVNGKFCKDPKSVTANDFSYSGLNIARNTTNFLGSNVTTVDVNKIPGLNTLGVSLARLDFAQGGQNPPHIHPRATEILVVTKGKLLVGFVSSNQDNNRLFYKVLKRGDVFVFPIGLIHFQMNVRRTRAVAFAGFGSQNPGTIRIADAVFGSNPSIPQEVLAKAFQLDVKLVRFLHIVFGPPLW

SEQ ID NO: 106860 - DNA, 1438 bp, Arabidopsis thaliana
  misc_feature (1)..(1438): Ceres Seq. ID no. 13620680
  misc_feature (1)..(1438): Ortholog of  Ceres SEQ ID NO 15171297 as cited in SEQ ID NO 51458
aaacacaacataaaacgtacttcttcttcaaaacgcgaaaccacactgtaagttacgtacaccaccacctatcctcaccattcatcatcgacacgtggctggtttaactcaaatcaacgctgaatccaaatacccatttccatttttaaccgtggttggattgttttgagagttgaaggaagaagatgacgtctgacggagcaacgtcgacgtcagctgcagctgcagcagcagcgatggcgacgaggaggaaaccgtcgtggagagagagggagaacaatcggagaagagagcggcggagaagagctgttgcggcgaagatttatactggtcttagagctcaaggtaactacaatcttccaaaacattgtgacaacaatgaggttcttaaggctctttgttctgaagctggttgggttgttgaagaagacggaactacttatcgcaagggacacaagcctctacctggtgacatggctggatcatcttctcgagcaactccttactcttcccataaccaaagtcctctttcttccacttttgatagccccatcttatcttaccaagtcagtccttcctcttcttcattcccgagtccttctcgagttggtgatccacacaatatctccacaatcttccctttcctcaggaatggtggtattccttcatcgcttcctccacttagaatctcaaacagtgctcctgtcactccaccagtgtcatccccaacttctagaaaccccaaaccattgcctacttgggaatcttttaccaaacaatccatgtccatggctgctaaacagtcaatgacttctttgaactacccgttttatgcggtgtctgcacctgccagtcctactcatcatcgccagttccatgctccggctactatacctgaatgtgatgagtctgactcttccactgttgattctggtcattggataagctttcaaaagtttgcacaacaacagccattctctgcctctatggtgccaacctcgcctaccttcaatctcgtgaaacctgcaccacagcaattgtctccaaacacagcagcaatccaagagattggtcaaagctccgagtttaagtttgagaacagccaagttaagccatgggaaggggagaggatccatgatgtggctatggaggatctagagctcacgcttggaaatggtaaagctcatagttgagatgaagtatacatgaacctgttatgtcatgtcggaaggaaggattggagaatgagaattagtgtgttgttcattcagttcatggttttggttcttgttctagaatcgatattcattgtaccagtgagtttgtttcacaacgcattatttgtagatagaatgtttaagatgtatgtttctattatcattccttttaggtcttgaaaacattacaaatatattacatgattaagtggcttgaaatg

SEQ ID NO: 106861 - protein, 335 aa, Arabidopsis thaliana; identical to SEQ ID NO: 21341
  peptide (1)..(335): Ceres Seq. ID no. 13620681

SEQ ID NO: 106862 - protein, 318 aa, Arabidopsis thaliana; identical to SEQ ID NO: 21342
  peptide (1)..(318): Ceres Seq. ID no. 13620682

SEQ ID NO: 106863 - protein, 239 aa, Arabidopsis thaliana; identical to SEQ ID NO: 21343
  peptide (1)..(239): Ceres Seq. ID no. 13620683

SEQ ID NO: 106864 - DNA, 887 bp, Arabidopsis thaliana
  misc_feature (1)..(887): Ceres Seq. ID no. 13620691
  misc_feature (1)..(887): Ortholog of  Ceres SEQ ID NO 12611141 as cited in SEQ ID NO 55992
aattcgtcgagaaccgaaaaatcgaaaatcaatgggaactccagaatcatcgagagagccatgtccggatcggatcctagatgatgtcggaggtgcgtttgcgatgggtgctgttggtggatcagcgtatcacctcataagaggaatctacaactctcccggcggagctcgtctctccggcggcgttcaagctttgagaatgagcgggccgagaagcggaggaagcttctccgtgtggggtggtctttactcaaccttcgattgtgcgttggtgtacgcaagacaaaaggaagatccatggaactcgatcttatctggtgcagccactggaggattcctctcgttgcgtcaaggcttaggcgcgtctgctagatcggctttagtcggaggtgtgttgttggctatgatagaaggagttggtatcatgttaaacaaagttcagagtactgcgcataacgagcagttcatggaggatcatgcagctacttctttaccatatggtatgggtcagatatctggtcagtccgtaccggtaccggagacttcttcttcttcttctggttcggtatcttggtttgggagtttgtttaagaagaagaaagaaacagaggatcatcattcagagagcagaactcacattttggagagctttgatgctcctcctgtgcctacttatgagtttaagtgatggaattattgaggtctgaattttacttttaatgttaagagcttagtaactagaattatatattctgcaataagttttatataataatattatgaattagagactattgtcaatttggattgatataataccgtctggttttatgtataatttaccaattgttacaacatgattagcgtgaaggttaacttcttgtgat

SEQ ID NO: 106865 - protein, 228 aa, Arabidopsis thaliana
  peptide (1)..(228): Ceres Seq. ID no. 13620692
IRREPKNRKSMGTPESSREPCPDRILDDVGGAFAMGAVGGSAYHLIRGIYNSPGGARLSGGVQALRMSGPRSGGSFSVWGGLYSTFDCALVYARQKEDPWNSILSGAATGGFLSLRQGLGASARSALVGGVLLAMIEGVGIMLNKVQSTAHNEQFMEDHAATSLPYGMGQISGQSVPVPETSSSSSGSVSWFGSLFKKKKETEDHHSESRTHILESFDAPPVPTYEFK

SEQ ID NO: 106866 - protein, 218 aa, Arabidopsis thaliana
  peptide (1)..(218): Ceres Seq. ID no. 13620693
MGTPESSREPCPDRILDDVGGAFAMGAVGGSAYHLIRGIYNSPGGARLSGGVQALRMSGPRSGGSFSVWGGLYSTFDCALVYARQKEDPWNSILSGAATGGFLSLRQGLGASARSALVGGVLLAMIEGVGIMLNKVQSTAHNEQFMEDHAATSLPYGMGQISGQSVPVPETSSSSSGSVSWFGSLFKKKKETEDHHSESRTHILESFDAPPVPTYEFK

SEQ ID NO: 106867 - protein, 194 aa, Arabidopsis thaliana
  peptide (1)..(194): Ceres Seq. ID no. 13620694
MGAVGGSAYHLIRGIYNSPGGARLSGGVQALRMSGPRSGGSFSVWGGLYSTFDCALVYARQKEDPWNSILSGAATGGFLSLRQGLGASARSALVGGVLLAMIEGVGIMLNKVQSTAHNEQFMEDHAATSLPYGMGQISGQSVPVPETSSSSSGSVSWFGSLFKKKKETEDHHSESRTHILESFDAPPVPTYEFK

SEQ ID NO: 106868 - DNA, 2745 bp, Arabidopsis thaliana
  misc_feature (1)..(2745): Ceres Seq. ID no. 13620713
  misc_feature (1)..(2745): Ortholog of  Ceres SEQ ID NO 15174591 as cited in SEQ ID NO 53383
acagagcagaaaaagcttacactcatatcactgagctgctttggcttcgccaatcgccattgttgtttcgaaatataattactgcttctcaaaacccttttgttggtttttgttttcgttgtcgatcattgcttcaatctctttcctttcgatctgaatcatctgatctctgatcttcttcgagatctcactaataggattttgagattgagttttgtccacagaatcacgaggttttgttgatttggtgtaccgtaattggcaattacgagttagttatggatttggcgttcagtgactaatggtctttcctgatttggaatattcttgaagttttgggtaatgattcaatgtgaaacaaatgttgcctatacatgagaataaatggcttgattaggtaaatgttagttggagttttaggtaaatgagaagccttttagggacagaaagaggagttggttgttgtatagtgtagagatttgcttacaataaaagctcttgttttgaacctgggaccatgaaggttgcctcagttattggtcttagaccaaggatcagtggtttacttttcttaaccctcggtgttattgctctcattaccattttagtaccaaattcagattcttcttctacaacttcaactacgcgagtaccgccaagcaacatttatagtaactatgggagggttaaggaacaagcagctgttgattatctagatctaaggtttttctccttaggggttaatcggttaaaagagtttcctttatgtggtaaagaaagagacaattatgttccttgttataacgtaacagagagtgatcggaattgtgagtttgcaagagaagaggaaagatgtctagttcgtcctccaagggattataagataccacttagatggcctgttggtagagatatcatatggactgggaatgtgaagattactaaagatcagtttctttcatcaggaactatgactaaaaggctaatgttgcttgaagagaatcaaattacgtttcactcggatgatggcttgatctttgatggggttaaagattacgcttttcaaattgctgagatgattggattaggaagcgatactgagtttcctcaagctggtatacggactgtgttggacatcggttgcggatttggtagctttggtgcacatctagtgtctttgaacgtgatgcctatatgtatagcagagtatgagacaagtggaagccaagtccaattagctctagagagaggccttcctgcaatgattggaaatttcttttcgaaacagcttccatatccagctttatcatttgacatggtccactgtgctcaatgtgggattacttgggatataaaagatgcaatgctacttttagaagtggatcgtgttctcaagcctgggggttattttgttttgacctctcctacaagcaaagcacagggaaattctcctgatactaagaaaacaagtatctcaacacgagtggatgagttatctaagaaaatctgctggagtctctcaggtcagcaagatgagacgtttctttggcagaaaacagcagacccaaattgctactcatctcgctcgcaagcttctatacctgtttgcaaagatgatgatagtgttccatattaccatcctcttgttccatgtataagtggaaccaagagtaaacgctggattcctattcagaataggtctagagcttcaggaacaagtttgtctgagcttgaaattcatggtattaaacctgaagaattcgatgaggatatacaagtatggagatcagcccttaaaaactattggtccttgcttacacctttgattttctcagaccacccaaaaagacctggcgatgaagatcctgtcccacctttttacatgatacgcaatgctatggacatgaatgctcgttatgggaatctgaatcaggccttacttaaccaagggaaatcagtttgggtgatgaatgttgtcccagtcaaagcacgtaatactcttcctataatacttgatcgaggttttaccggcgctctacatgactggtgtgaaccattccctacctatcctcgaacatatgacatgcttcatgccaatgaacttctcacacatcttagctcagaacggtgcagcctaatggacttgttcttggaaatggaccggattctccgccctgagggatgggttgtgctaagtgataagcttggagtgatagagatggcgcgtacacttgctgctcgtgtacgctgggaagcaagagtcatcgatattcaagacggtagtgaccaacggctccttgtttgtcaaaaaccattattaaaaaaataactcaaaagaaaagaagcaaaattagcaaactgtcaacgagtttgcttctctgcaccatcgacactaagtacagtttttttaataggtaatctctctctctctctctttctctttctcttttctctgagctttgaaaacttaaagaacacacaaatatcttaatctttatacattgagggtatctctgcgtaattcattagattgaatcagagtttcactttagtttacagatccaagtactgatgcttgcagattctggagagaaatcaagacgatgaaaatgggagacttctgcgactttcttagcagtgcaacggttattcaaattacgacattctttacattttttctgtttgcaaacaagaattgttctcagttttattttttgttcgtttcgtaattattcattaagaatc

SEQ ID NO: 106869 - protein, 603 aa, Arabidopsis thaliana
  peptide (1)..(603): Ceres Seq. ID no. 13620714
MKVASVIGLRPRISGLLFLTLGVIALITILVPNSDSSSTTSTTRVPPSNIYSNYGRVKEQAAVDYLDLRFFSLGVNRLKEFPLCGKERDNYVPCYNVTESDRNCEFAREEERCLVRPPRDYKIPLRWPVGRDIIWTGNVKITKDQFLSSGTMTKRLMLLEENQITFHSDDGLIFDGVKDYAFQIAEMIGLGSDTEFPQAGIRTVLDIGCGFGSFGAHLVSLNVMPICIAEYETSGSQVQLALERGLPAMIGNFFSKQLPYPALSFDMVHCAQCGITWDIKDAMLLLEVDRVLKPGGYFVLTSPTSKAQGNSPDTKKTSISTRVDELSKKICWSLSGQQDETFLWQKTADPNCYSSRSQASIPVCKDDDSVPYYHPLVPCISGTKSKRWIPIQNRSRASGTSLSELEIHGIKPEEFDEDIQVWRSALKNYWSLLTPLIFSDHPKRPGDEDPVPPFYMIRNAMDMNARYGNLNQALLNQGKSVWVMNVVPVKARNTLPIILDRGFTGALHDWCEPFPTYPRTYDMLHANELLTHLSSERCSLMDLFLEMDRILRPEGWVVLSDKLGVIEMARTLAARVRWEARVIDIQDGSDQRLLVCQKPLLKK

SEQ ID NO: 106870 - protein, 452 aa, Arabidopsis thaliana
  peptide (1)..(452): Ceres Seq. ID no. 13620715
MTKRLMLLEENQITFHSDDGLIFDGVKDYAFQIAEMIGLGSDTEFPQAGIRTVLDIGCGFGSFGAHLVSLNVMPICIAEYETSGSQVQLALERGLPAMIGNFFSKQLPYPALSFDMVHCAQCGITWDIKDAMLLLEVDRVLKPGGYFVLTSPTSKAQGNSPDTKKTSISTRVDELSKKICWSLSGQQDETFLWQKTADPNCYSSRSQASIPVCKDDDSVPYYHPLVPCISGTKSKRWIPIQNRSRASGTSLSELEIHGIKPEEFDEDIQVWRSALKNYWSLLTPLIFSDHPKRPGDEDPVPPFYMIRNAMDMNARYGNLNQALLNQGKSVWVMNVVPVKARNTLPIILDRGFTGALHDWCEPFPTYPRTYDMLHANELLTHLSSERCSLMDLFLEMDRILRPEGWVVLSDKLGVIEMARTLAARVRWEARVIDIQDGSDQRLLVCQKPLLKK

SEQ ID NO: 106871 - protein, 447 aa, Arabidopsis thaliana
  peptide (1)..(447): Ceres Seq. ID no. 13620716
MLLEENQITFHSDDGLIFDGVKDYAFQIAEMIGLGSDTEFPQAGIRTVLDIGCGFGSFGAHLVSLNVMPICIAEYETSGSQVQLALERGLPAMIGNFFSKQLPYPALSFDMVHCAQCGITWDIKDAMLLLEVDRVLKPGGYFVLTSPTSKAQGNSPDTKKTSISTRVDELSKKICWSLSGQQDETFLWQKTADPNCYSSRSQASIPVCKDDDSVPYYHPLVPCISGTKSKRWIPIQNRSRASGTSLSELEIHGIKPEEFDEDIQVWRSALKNYWSLLTPLIFSDHPKRPGDEDPVPPFYMIRNAMDMNARYGNLNQALLNQGKSVWVMNVVPVKARNTLPIILDRGFTGALHDWCEPFPTYPRTYDMLHANELLTHLSSERCSLMDLFLEMDRILRPEGWVVLSDKLGVIEMARTLAARVRWEARVIDIQDGSDQRLLVCQKPLLKK

SEQ ID NO: 106872 - DNA, 2012 bp, Arabidopsis thaliana
  misc_feature (1)..(2012): Ceres Seq. ID no. 13620721
  misc_feature (1)..(2012): Ortholog of  Ceres SEQ ID NO 13654605 as cited in SEQ ID NO 68732
atggaggggtttaagctatacaagacgaagaagataggtcgacgcaaacacgatgtcgttttgaaatctattcacactgttctctcttatcaacagattcagaaattagcacccgactcgggctccgtttcaatgttggccgcgacgcctgctcatggactcaggtacgtggtggtgcccacacgctcatggcttcataggtttcgatgctgctcgtcttctctcgctcctctctccccttctgaattctcgggcggtaataaagcccagaagaagctcaacgacgagaacaacaccaacgtaagcaatgagaaaacggcgccgtattatccgaaacgaggagaaacagtggagcttgtgtgcgagagtttaggattcaaaggcaaaggaatctgtaaagttgatggaactggctacgtcgttatgtgtgaccgagctcttcccggcgaacgttttcttggccgtgtcactcgccgcaaaggcagctatgctgaagtgacaaaaatgaagacaatatctccacataaggacttagtagaagctccatgtgagtatgcatcttactgtggtggttgcaaaactcagaatctctcttatgaagctcagcttagagctaaagaagagcaagttcatgagcttatcagacatgttggaaggttttctgataacaatcctggccttgagattgtcttgaagcctattgttgcttgcgatattcaattccattatcggaataagatggagttttcatttggtccacaaagatggcttccgattgaaatgttaaacgagagacaagatggtcctaagaactttgcattggggctccatgcacctggattttttgataaggttttaaatgttgataagtgcttattacagagcgagccaggaaacttggttcttgctgctgtccaagattgctggagagatcctgaattaagtctttcaccatatgattgtcgttcacatgttgggtttcttaaacatttgatgctgagaactggaaggaatgtggagactggttcactagaacttatggtcaattttgtgacatcgtcttataagccagagctgttgaaacccctggttgataggatttcatcaattcctcaagtggtaagcattatgaataatgtaaattcttcggtaggaaacacatccgttggcgaaaaggaatatactctttatgggaaggatacaatcacagaggtcttaagagggcttacatttcaaatttcagccaactctttctttcagactaacactcatcaggctgaagttttatataagcttattgaggaatctgctggacttaaaggagatggctcagaagtcgtgctcgatcttttctgtggaactggtaccataggccttacacttgccagaagggcgaaacacgtgtatggttatgaagtagtaccacaagcaataacagatgcacacaagaatgcccaaataaacggcatagagaatgcaacattcatccaaggggatctaaacaaaataggagaagattttgggaacaatttccctaagcctgatatcgttatttctgatcccaatcgacctggtatgcacatgaagttgatcaagtttctgctaaagcttaaatctccacggatcatttatgtttcctgtaatcctgcaacctgcgccagggatctcgattacctctgtcacggcgtggaggagaagaatctaaaaggttgctacaaactgatgagtgttcagccagtggatatgttccctcacactcctcacatcgaatgtgtctgcttgttagagcttgcttgagctctattgtcaccatggctgcttcatttggtctctaatcagatgagagacaaatgaaaacagagatttttttagattgagggagttttggttttccattagagttaagtatctgtaatctttttcatcgagttctttaatagcattcatagacaagaatgtaaacgttttttaaaaagttaaaatcccaccaaggcaagtggtctttaagagtt

SEQ ID NO: 106873 - protein, 598 aa, Arabidopsis thaliana
  peptide (1)..(598): Ceres Seq. ID no. 13620722
MEGFKLYKTKKIGRRKHDVVLKSIHTVLSYQQIQKLAPDSGSVSMLAATPAHGLRYVVVPTRSWLHRFRCCSSSLAPLSPSEFSGGNKAQKKLNDENNTNVSNEKTAPYYPKRGETVELVCESLGFKGKGICKVDGTGYVVMCDRALPGERFLGRVTRRKGSYAEVTKMKTISPHKDLVEAPCEYASYCGGCKTQNLSYEAQLRAKEEQVHELIRHVGRFSDNNPGLEIVLKPIVACDIQFHYRNKMEFSFGPQRWLPIEMLNERQDGPKNFALGLHAPGFFDKVLNVDKCLLQSEPGNLVLAAVQDCWRDPELSLSPYDCRSHVGFLKHLMLRTGRNVETGSLELMVNFVTSSYKPELLKPLVDRISSIPQVVSIMNNVNSSVGNTSVGEKEYTLYGKDTITEVLRGLTFQISANSFFQTNTHQAEVLYKLIEESAGLKGDGSEVVLDLFCGTGTIGLTLARRAKHVYGYEVVPQAITDAHKNAQINGIENATFIQGDLNKIGEDFGNNFPKPDIVISDPNRPGMHMKLIKFLLKLKSPRIIYVSCNPATCARDLDYLCHGVEEKNLKGCYKLMSVQPVDMFPHTPHIECVCLLELA

SEQ ID NO: 106874 - protein, 554 aa, Arabidopsis thaliana; identical to SEQ ID NO: 72338
  peptide (1)..(554): Ceres Seq. ID no. 13620723

SEQ ID NO: 106875 - protein, 457 aa, Arabidopsis thaliana; identical to SEQ ID NO: 72339
  peptide (1)..(457): Ceres Seq. ID no. 13620724

SEQ ID NO: 106876 - DNA, 1598 bp, Arabidopsis thaliana
  misc_feature (1)..(1598): Ceres Seq. ID no. 13620729
  misc_feature (1)..(1598): Ortholog of  Ceres SEQ ID NO 13657170 as cited in SEQ ID NO 65651
  misc_feature (1)..(1598): Ortholog of  Ceres SEQ ID NO 12586854 as cited in SEQ ID NO 69102
atcaaagagattgtgaaaatactaagattagaaaataatttgagaaaacatcagaaaaaaaatggcggaactgttgttggtggaaactccaatcccacagcaaaagcactacgaatccaaaccattcccggcggtgatatcaccaccgtctgcttcgattccaattcctgctctgtctctcccactattcactcaaactatcaaaactcagaaacactatctcgattctctcttgcacgaatccggagcagtgctattcagaggttttccggtgaattccgccgatgatttcaacgacgtcgttgaagctttcggtttcgatgagcttccttacgtcggaggcgctgctcctcgcactagcgtcgtcggtcgtgtcttcactgctaatgaatctcctcctgatcagaagattccttttcaccacgagatggctcaggttcgtgagtttccatcaaagttgttcttttactgtgagattgagcctaagtgtggtggagagactccaattgtgttgagtcatgttgtgtatgagagaatgaaagataaacatccagagtttgttcagagattagaggaacatggtttgctttatgttagggttttaggtgaagatgatgatccttcatctcccattggacgtggttggaaatctacattcttaacccatgacaagaaccttgctgagcaaagggcggttgatttgggaatgaaactggaatggacagaggatggtggagccaagacggtaatgggtccgattccggctatcaaatatgacgagtcgagaaaccgtaaagtatggtttaacagcatggtagctgcttatacgggatgggaggataagcggaatgatccaagaaaggctgtgacttttggggatggaaagcctttacctgcggatatagtccatgattgtcttaggattcttgaagaggaatgtgttgctgttccgtggcagagaggagatgttttgcttatagataactgggcggttcttcattctcgaagaccgtttgatcctcctcgtcgagttcttgcatcactctgcaaatagattatgttgtctttcatgcataaatcaaagctttggatttcgaatttagaggcaacaacaacactgtacatattttggatacatatatgtgggtacatagtaacccatttccttattctaaacatgtcttaactacactgcagcagaaactatacaacataagaagaaaccaaagacaaactcgtcgtccttcttttattgtccgcgggattgaagcttttgctttaagatcttgcaaagaaactcgactcagagctcctcgtgtagctttgaggacttagatggtttcaggcctggtttgaggaattcagaaagccattttgcggattctttctccatacgagtcaagttgttcttgaagtctatgtagtaaactccgaacctagctgtgtacccgtcttgccactcgaagttgtccattaaagaccacaagaaatacgatgtaacattcaccttgtcttcactgcaagatacaaaaaattgaatctaaatggaaaaaaacatttgtacttaaaagatcaaagcttacaacaaagtgaggaac

SEQ ID NO: 106877 - protein, 330 aa, Arabidopsis thaliana
  peptide (1)..(330): Ceres Seq. ID no. 13620730
MAELLLVETPIPQQKHYESKPFPAVISPPSASIPIPALSLPLFTQTIKTQKHYLDSLLHESGAVLFRGFPVNSADDFNDVVEAFGFDELPYVGGAAPRTSVVGRVFTANESPPDQKIPFHHEMAQVREFPSKLFFYCEIEPKCGGETPIVLSHVVYERMKDKHPEFVQRLEEHGLLYVRVLGEDDDPSSPIGRGWKSTFLTHDKNLAEQRAVDLGMKLEWTEDGGAKTVMGPIPAIKYDESRNRKVWFNSMVAAYTGWEDKRNDPRKAVTFGDGKPLPADIVHDCLRILEEECVAVPWQRGDVLLIDNWAVLHSRRPFDPPRRVLASLCK

SEQ ID NO: 106878 - protein, 208 aa, Arabidopsis thaliana
  peptide (1)..(208): Ceres Seq. ID no. 13620731
MAQVREFPSKLFFYCEIEPKCGGETPIVLSHVVYERMKDKHPEFVQRLEEHGLLYVRVLGEDDDPSSPIGRGWKSTFLTHDKNLAEQRAVDLGMKLEWTEDGGAKTVMGPIPAIKYDESRNRKVWFNSMVAAYTGWEDKRNDPRKAVTFGDGKPLPADIVHDCLRILEEECVAVPWQRGDVLLIDNWAVLHSRRPFDPPRRVLASLCK

SEQ ID NO: 106879 - protein, 172 aa, Arabidopsis thaliana; identical to SEQ ID NO: 43625
  peptide (1)..(172): Ceres Seq. ID no. 13620732

SEQ ID NO: 106880 - DNA, 1147 bp, Arabidopsis thaliana
  misc_feature (1)..(1147): Ceres Seq. ID no. 13620741
  misc_feature (1)..(1147): Ortholog of  Ceres SEQ ID NO 14314550 as cited in SEQ ID NO 52321
catctcttcttgaagctgctttcttcctcaaattcttttttttccagattcttctcctttcttcttccttcttccttatttcgatttcgaattttgaattttctcaatggctcaatcgtgtcttaaaattgttcgaatcaacaatctaaggaacagagtgaatcgtcggattttgattctccgacgattcacacggttgttatggagtagaatcgttgcttgtactcctggcaaatctcggagatatctcttgctttctcgcgctcttccgtctccgactgtttctcgtccttctccttctccgatccccgccgtcgatgtcgtcgtcggtggtggtggtggtggtggtgagtttgttcgtcgttcgtcggttgtttacgataatgataacagtcatcggagatcggattctgatttggtttctttgaagattagtctcttaggagatccagaaatcggaaaaactagcttcctggcgaaatatgttggagaagagaaagaagtagaaatgagagaattggagaaaggtataaattgtacggacaagacgttatacatgggaggtgctcgcatttcatatagtatctgggaattagaagctgagagatcacgagatcaaatccctgtggcttgcaaggactctgttgccattctctttatgtttgatttaaccagtcgttgcacgcttaatagtgtcattagctggtatcaacaagctaggaagtctaatcagacggcgataccagttatggtaggaaccaagtttgatgagtttattcagcttcctattgatctgcaatggacaattgctagccaggcgagaacatatgcgaaggctttaaacgcgacgctcttcttctcgagtgcttcatacaacataaacgtgaataagatctttaagtttgtgacggcgaagctcttcgacttaccatggacggtggagcgcaatctcacaatcggagaaccaatcatcgacttctagaatatgtatttgtatataatataaaagaagcgaatcctgaagaatgcgttttttttttttttttttaattcaccgctaaagcttgtcgccgtgggactgatcggactagtcgaatttaagcgaaatggagagatgaagcggcggagatttcgcccgcttttctcc

SEQ ID NO: 106881 - protein, 291 aa, Arabidopsis thaliana; identical to SEQ ID NO: 21663
  peptide (1)..(291): Ceres Seq. ID no. 13620742

SEQ ID NO: 106882 - protein, 157 aa, Arabidopsis thaliana; identical to SEQ ID NO: 21664
  peptide (1)..(157): Ceres Seq. ID no. 13620743

SEQ ID NO: 106883 - DNA, 890 bp, Arabidopsis thaliana
  misc_feature (1)..(890): Ceres Seq. ID no. 13620744
  misc_feature (1)..(890): Ortholog of  Ceres SEQ ID NO 15178924 as cited in SEQ ID NO 1050
  misc_feature (1)..(890): Ortholog of  Ceres SEQ ID NO 13661768 as cited in SEQ ID NO 61427
attttaaaacaccccacttggaaacacaaataaataaaaataaattcaaaacaatgtattcttcatcatctgtatcaaaacgcttcgttctagtccctattgtggtcgtggtgaccacacaactcctcctggtacgtaacgtttcttcactaaaccttaccaattcgtatcttcaccacaaatgcgtagtcaatcaagggaaatacaagccaggaagcaagtacgagaaatccctcgatgatatcatccaaagcttttcgaataaagataaagattcgtatggttttcgtaccggttacagcatgaaggcctacggtaaagaacctgatatggtctccatcacctaccagtgccgtatcgactctcgtgggcccaagtgccagtcctgcgttgtcacggccggttatgagcttcttcgtaagagatgtccgagatataaagaggcaataatatggtacgaccaatgtcttgtggagttttcttcgttagatacttctgggcagatcaattacgacgacaacttctgtatgcctagcgcgaagaacctgatcggcaattcaatctctcttgaagaaaggttgcatctcctcaacaatcttacaaagatagccgtcacgaaaatagataaaaacatagaaggtataaaaaaaccagtactgtatgcggcgggggagaagagactcgggacgaaaagtctatacggaatggtgcaatgttcggctgacttatctgttcagggttgtaatgagtgtatgttatattatatagtgcattttcaagagtgctgggaaaataaacaaggagtaagagttttgagtagaagctgtaactttaggtatgagctttacccttttattaaccctaagggtccttattatacaaagttctaa

SEQ ID NO: 106884 - protein, 295 aa, Arabidopsis thaliana
  peptide (1)..(295): Ceres Seq. ID no. 13620745
FKTPHLETQINKNKFKTMYSSSSVSKRFVLVPIVVVVTTQLLLVRNVSSLNLTNSYLHHKCVVNQGKYKPGSKYEKSLDDIIQSFSNKDKDSYGFRTGYSMKAYGKEPDMVSITYQCRIDSRGPKCQSCVVTAGYELLRKRCPRYKEAIIWYDQCLVEFSSLDTSGQINYDDNFCMPSAKNLIGNSISLEERLHLLNNLTKIAVTKIDKNIEGIKKPVLYAAGEKRLGTKSLYGMVQCSADLSVQGCNECMLYYIVHFQECWENKQGVRVLSRSCNFRYELYPFINPKGPYYTKF

SEQ ID NO: 106885 - protein, 278 aa, Arabidopsis thaliana
  peptide (1)..(278): Ceres Seq. ID no. 13620746
MYSSSSVSKRFVLVPIVVVVTTQLLLVRNVSSLNLTNSYLHHKCVVNQGKYKPGSKYEKSLDDIIQSFSNKDKDSYGFRTGYSMKAYGKEPDMVSITYQCRIDSRGPKCQSCVVTAGYELLRKRCPRYKEAIIWYDQCLVEFSSLDTSGQINYDDNFCMPSAKNLIGNSISLEERLHLLNNLTKIAVTKIDKNIEGIKKPVLYAAGEKRLGTKSLYGMVQCSADLSVQGCNECMLYYIVHFQECWENKQGVRVLSRSCNFRYELYPFINPKGPYYTKF

SEQ ID NO: 106886 - protein, 195 aa, Arabidopsis thaliana
  peptide (1)..(195): Ceres Seq. ID no. 13620747
MKAYGKEPDMVSITYQCRIDSRGPKCQSCVVTAGYELLRKRCPRYKEAIIWYDQCLVEFSSLDTSGQINYDDNFCMPSAKNLIGNSISLEERLHLLNNLTKIAVTKIDKNIEGIKKPVLYAAGEKRLGTKSLYGMVQCSADLSVQGCNECMLYYIVHFQECWENKQGVRVLSRSCNFRYELYPFINPKGPYYTKF

SEQ ID NO: 106887 - DNA, 925 bp, Arabidopsis thaliana
  misc_feature (1)..(925): Ceres Seq. ID no. 13620748
  misc_feature (1)..(925): Ortholog of  Ceres SEQ ID NO 14311773 as cited in SEQ ID NO 59245
  misc_feature (1)..(925): Ortholog of  Ceres SEQ ID NO 15225880 as cited in SEQ ID NO 0
aaaaacggaacataacataacaaaacagagagatgagtcaagaagaacaaccaaagcggccacaagagccagtcacttacggtgacgtttttgaagtctccggtgaactcgctgataagcctatagcgccggaggatgcaaacatgatgcaagcagcggagacacgtgtgtttggccacactcagaaaggcggtgcagcggcagtcatgcagtctgcagccactgctaataaacgcggtggctttgtccatccaggtgacacaactgatctcgccgctgaacgaggcgtcacagtggcgcaaactgacgtccctggtgcacgtgtcacaacagaattcgtcggtggacaggtcgttggacaatacgtcgagcctaggccagtggcgactgcggcagctatggaagcagaagttgtgggtttgagtttacaaagtgcaataacgattggagaagcattggaagcgactgtgcaaaccgctggaaacaaaccggtggatcaaagcgacgcagcagcgattcaagcggcagaggttagagcttgtggcactaatgtgattgctcctggtggaatcgccgcttctgctcaatcagcagcaaatcacaacgctaccatagaccgtgatgaggataaaatcaagctcattgatgttttggcgggtgcgaccgggaagttagccgcagataaagctgtgaccaggcaggacgcagagggagtggtgagcgctgagctgaggaacaatcctaatttgtctactcaccctggtggtgtagcggcttctattactgccgccgctaggcttaacgagagagctgatatatgaaaaatcctgcgagagggagatgttttggttctgttgttcaaaaaagttcagtcataatgtaaaaaaatggtcactttccggttataaagttgaaatctttctct

SEQ ID NO: 106888 - protein, 262 aa, Arabidopsis thaliana
  peptide (1)..(262): Ceres Seq. ID no. 13620749
MSQEEQPKRPQEPVTYGDVFEVSGELADKPIAPEDANMMQAAETRVFGHTQKGGAAAVMQSAATANKRGGFVHPGDTTDLAAERGVTVAQTDVPGARVTTEFVGGQVVGQYVEPRPVATAAAMEAEVVGLSLQSAITIGEALEATVQTAGNKPVDQSDAAAIQAAEVRACGTNVIAPGGIAASAQSAANHNATIDRDEDKIKLIDVLAGATGKLAADKAVTRQDAEGVVSAELRNNPNLSTHPGGVAASITAAARLNERADI

SEQ ID NO: 106889 - protein, 225 aa, Arabidopsis thaliana
  peptide (1)..(225): Ceres Seq. ID no. 13620750
MMQAAETRVFGHTQKGGAAAVMQSAATANKRGGFVHPGDTTDLAAERGVTVAQTDVPGARVTTEFVGGQVVGQYVEPRPVATAAAMEAEVVGLSLQSAITIGEALEATVQTAGNKPVDQSDAAAIQAAEVRACGTNVIAPGGIAASAQSAANHNATIDRDEDKIKLIDVLAGATGKLAADKAVTRQDAEGVVSAELRNNPNLSTHPGGVAASITAAARLNERADI

SEQ ID NO: 106890 - protein, 224 aa, Arabidopsis thaliana
  peptide (1)..(224): Ceres Seq. ID no. 13620751
MQAAETRVFGHTQKGGAAAVMQSAATANKRGGFVHPGDTTDLAAERGVTVAQTDVPGARVTTEFVGGQVVGQYVEPRPVATAAAMEAEVVGLSLQSAITIGEALEATVQTAGNKPVDQSDAAAIQAAEVRACGTNVIAPGGIAASAQSAANHNATIDRDEDKIKLIDVLAGATGKLAADKAVTRQDAEGVVSAELRNNPNLSTHPGGVAASITAAARLNERADI

SEQ ID NO: 106891 - DNA, 2411 bp, Arabidopsis thaliana
  misc_feature (1)..(2411): Ceres Seq. ID no. 13620770
  misc_feature (1)..(2411): Ortholog of  Ceres SEQ ID NO 13594037 as cited in SEQ ID NO 55666
  misc_feature (1)..(2411): Ortholog of  Ceres SEQ ID NO 13657707 as cited in SEQ ID NO 66407
acactcccaaggaggctacgtaaccttcgacggaggagtccataaaactcacattctcatttttttctcaaaagaacaacgaacagctcttatatttttttacaataattcttcagagctgtttaagttcaacaacaatttgattaagagaaaaccacataaatattaattagtgtaacgaaaaacacaaaacaaatatgtcgtacggatacgacgatgaatccaagaggaagaggaggtacattgttatcaccatctcctctgttcttttgatctcgatggtggttgcggttaccgttggtgtcagcctcaataagcatgacggtgactctaaaggtaaagcagaggtaaatgcttccgtcaaggccgtcaaggatgtttgtgcaccaactgattacagaaagacttgtgaagacactctgattaagaacgggaagaacacaaccgacccgatggagttggttaagactgcgtttaatgttacgatgaagcagatcacggacgcagctaagaagtcgcagacgattatggagcttcagaaggattcaaggactaggatggcgcttgatcaatgcaaggagcttatggattacgcgttggacgaactaagtaactctttcgaggagcttggaaaatttgagttccacctgctcgacgaggctttgatcaatctgaggatttggcttagcgcagcgatcagccacgaggagacttgtcttgaagggtttcaaggaacacaagggaatgctggagagacaatgaagaaagcgttgaagactgcaatcgagttgacccacaacgggctagcgatcatcagcgaaatgtcgaattttgttggccaaatgcagattccggggctgaacagtcgtcgacttttggctgaaggattcccttcgtgggtagaccagcgtgggcgtaaactcctacaagctgctgccgcatattccgatgtgaagcctgatattgtggtggcacaggacgggagcggtcaatacaagacgatcaatgaagcgttgcagtttgtccccaagaagaggaacacaactttcgtggttcacattaaggctggactctacaaggagtatgttcaggtgaacaagaccatgtcgcatcttgtgttcatcggtgatggtcccgacaaaactatcatttccggcaacaaaaattacaaggatggtatcaccacctaccgtaccgccactgtcgccattgttggaaactacttcattgccaagaacattgggttcgaaaacaccgctggggcaataaaacatcaagcggttgcagttagggttcaatcagatgagtccatatttttcaactgtagattcgatggctaccaagacacgctctacactcactcccaccgtcagttcttccgtgattgtaccatttcaggcaccattgatttcctctttggagatgcggctgctgtattccaaaactgtacgttgttggtgaggaagccactcccaaaccaagcatgccctatcacagcccacggtcgaaaagacccaagggaatccactggatttgtgttccaagggtgcaccattgccggtgaaccagattacttggctgtcaaggaaaccagcaaagcctatctcggtaggccatggaaggaatattcaaggactatcatcatgaacactttcatcccagattttgttcagcctcaaggatggcaaccatggctcggggacttcggcctcaagacattgttctactctgaggtccaaaacacaggaccgggatccgcccttgcaaaccgggttacttgggctggaatcaagacattgagcgaagaagatatcctcaagttcacaccggctcagtacatccaaggtgacgactggattccaggcaaaggtgttccgtacactacaggccttttggctgggaacccggccgctgcaaccaccaccccaagcgtctcagctgctgctccaggtttctccaccttcacggatacaagtggcgctgactcaattgctccaacagcttccccagcagcttccccggaaagttcaattagcatggcttacacggggacagcttctccggaaagttcgattaaggtgtcttcttcaacggagacggcttccccggaaagttcatttacggaggcttcaacggcttccccagaaagttcaattatggtggcttcaacggagagctctggttcgtttttttcaatgtttacctaaaagattgattaagatggcataaaatgtgttttttctttactctaattcaagcaaaacctgaaaggaacaaaaatatttgcacaaccttgaggacttcaggattattggtattccaaattgttgacattaatgtttagctttgtaaactcatgtttaatatatcagtatattaaaatgctgtttataaatctattattattaact

SEQ ID NO: 106892 - protein, 669 aa, Arabidopsis thaliana
  peptide (1)..(669): Ceres Seq. ID no. 13620771
MSYGYDDESKRKRRYIVITISSVLLISMVVAVTVGVSLNKHDGDSKGKAEVNASVKAVKDVCAPTDYRKTCEDTLIKNGKNTTDPMELVKTAFNVTMKQITDAAKKSQTIMELQKDSRTRMALDQCKELMDYALDELSNSFEELGKFEFHLLDEALINLRIWLSAAISHEETCLEGFQGTQGNAGETMKKALKTAIELTHNGLAIISEMSNFVGQMQIPGLNSRRLLAEGFPSWVDQRGRKLLQAAAAYSDVKPDIVVAQDGSGQYKTINEALQFVPKKRNTTFVVHIKAGLYKEYVQVNKTMSHLVFIGDGPDKTIISGNKNYKDGITTYRTATVAIVGNYFIAKNIGFENTAGAIKHQAVAVRVQSDESIFFNCRFDGYQDTLYTHSHRQFFRDCTISGTIDFLFGDAAAVFQNCTLLVRKPLPNQACPITAHGRKDPRESTGFVFQGCTIAGEPDYLAVKETSKAYLGRPWKEYSRTIIMNTFIPDFVQPQGWQPWLGDFGLKTLFYSEVQNTGPGSALANRVTWAGIKTLSEEDILKFTPAQYIQGDDWIPGKGVPYTTGLLAGNPAAATTTPSVSAAAPGFSTFTDTSGADSIAPTASPAASPESSISMAYTGTASPESSIKVSSSTETASPESSFTEASTASPESSIMVASTESSGSFFSMFT

SEQ ID NO: 106893 - protein, 642 aa, Arabidopsis thaliana
  peptide (1)..(642): Ceres Seq. ID no. 13620772
MVVAVTVGVSLNKHDGDSKGKAEVNASVKAVKDVCAPTDYRKTCEDTLIKNGKNTTDPMELVKTAFNVTMKQITDAAKKSQTIMELQKDSRTRMALDQCKELMDYALDELSNSFEELGKFEFHLLDEALINLRIWLSAAISHEETCLEGFQGTQGNAGETMKKALKTAIELTHNGLAIISEMSNFVGQMQIPGLNSRRLLAEGFPSWVDQRGRKLLQAAAAYSDVKPDIVVAQDGSGQYKTINEALQFVPKKRNTTFVVHIKAGLYKEYVQVNKTMSHLVFIGDGPDKTIISGNKNYKDGITTYRTATVAIVGNYFIAKNIGFENTAGAIKHQAVAVRVQSDESIFFNCRFDGYQDTLYTHSHRQFFRDCTISGTIDFLFGDAAAVFQNCTLLVRKPLPNQACPITAHGRKDPRESTGFVFQGCTIAGEPDYLAVKETSKAYLGRPWKEYSRTIIMNTFIPDFVQPQGWQPWLGDFGLKTLFYSEVQNTGPGSALANRVTWAGIKTLSEEDILKFTPAQYIQGDDWIPGKGVPYTTGLLAGNPAAATTTPSVSAAAPGFSTFTDTSGADSIAPTASPAASPESSISMAYTGTASPESSIKVSSSTETASPESSFTEASTASPESSIMVASTESSGSFFSMFT

SEQ ID NO: 106894 - protein, 584 aa, Arabidopsis thaliana
  peptide (1)..(584): Ceres Seq. ID no. 13620773
MELVKTAFNVTMKQITDAAKKSQTIMELQKDSRTRMALDQCKELMDYALDELSNSFEELGKFEFHLLDEALINLRIWLSAAISHEETCLEGFQGTQGNAGETMKKALKTAIELTHNGLAIISEMSNFVGQMQIPGLNSRRLLAEGFPSWVDQRGRKLLQAAAAYSDVKPDIVVAQDGSGQYKTINEALQFVPKKRNTTFVVHIKAGLYKEYVQVNKTMSHLVFIGDGPDKTIISGNKNYKDGITTYRTATVAIVGNYFIAKNIGFENTAGAIKHQAVAVRVQSDESIFFNCRFDGYQDTLYTHSHRQFFRDCTISGTIDFLFGDAAAVFQNCTLLVRKPLPNQACPITAHGRKDPRESTGFVFQGCTIAGEPDYLAVKETSKAYLGRPWKEYSRTIIMNTFIPDFVQPQGWQPWLGDFGLKTLFYSEVQNTGPGSALANRVTWAGIKTLSEEDILKFTPAQYIQGDDWIPGKGVPYTTGLLAGNPAAATTTPSVSAAAPGFSTFTDTSGADSIAPTASPAASPESSISMAYTGTASPESSIKVSSSTETASPESSFTEASTASPESSIMVASTESSGSFFSMFT

SEQ ID NO: 106895 - DNA, 1229 bp, Arabidopsis thaliana
  misc_feature (1)..(1229): Ceres Seq. ID no. 13620793
  misc_feature (1)..(1229): Ortholog of  Ceres SEQ ID NO 13594298 as cited in SEQ ID NO 57803
  misc_feature (1)..(1229): Ortholog of  Ceres SEQ ID NO 13503476 as cited in SEQ ID NO 61978
  misc_feature (1)..(1229): Ortholog of  Ceres SEQ ID NO 12578438 as cited in SEQ ID NO 62201
  misc_feature (1)..(1229): Ortholog of  Ceres SEQ ID NO 12617675 as cited in SEQ ID NO 64656
gtataggacacaatttactttaaacacttttcatgcaatacaatatgtatatatactaatcaatgatcgttatatatgtccatcgtactcaacctcaaacatcttaaataatgactctaataaatcgctcaaaaccatttgtacttctcgtaggcttctcaattatctcaagtttgctattatgggtctcacaagcttccgttgtttcatcaggagattttaacaaagacttctttgtgacatggtctcctacccacgttaacacctccaatgatggtcgatcaagaacccttaaactcgatcaagaatctggagcttctttttcttccattcagacgttcttgttcggccaaatagatatgaagatcaaacttatccgtggaagttctcaaggaaccgtggttgcttattatatgtcctcagatcagcctaaccgggatgagattgactttgagttcctcggaaacgttaatgggcagccttacattctccagacaaatgtctatgccgagggacttgataaccgcgaagaaaggatccatctctggttcgacccagccaaggactttcacacttactctatcttgtggaacattcaccaaattgtatttatggtggatcagattccgataaggttgtatagaaaccatggggagaaaggcgtagcctacccaaggttgcaacctatgagtgtacaggcgagtctatggaacggtgagagctgggctacgcgcggtggacatgacaagattgattggtcaaagggtccatttgtggcttcctttggggattacaagatagacgcttgtatttggataggcaatacaagtttttgtaatggagagagcactgaaaactggtggaacaagaatgagttcagttctttgacaagagtgcaaaagagatggtttaaatgggtgagaaaatatcacttgatttatgattattgccaagattatggaaggttcaataacaagctaccgaaggaatgttctcttcctaaatattgaatttgctcaaatcttgggttcacctccttttctattagccaataacattatgccatgttagactgaatttaaataaaaataattaagtaaaactaaatcagaaaaaccaaaaatggaaagaaaattcttgtatgtatttaacgtaccttaacgtcaaggttgacatcttctcctctttttttattatttaatgtaactattttaatatgagcaaatttg

SEQ ID NO: 106896 - protein, 299 aa, Arabidopsis thaliana
  peptide (1)..(299): Ceres Seq. ID no. 13620794
MTLINRSKPFVLLVGFSIISSLLLWVSQASVVSSGDFNKDFFVTWSPTHVNTSNDGRSRTLKLDQESGASFSSIQTFLFGQIDMKIKLIRGSSQGTVVAYYMSSDQPNRDEIDFEFLGNVNGQPYILQTNVYAEGLDNREERIHLWFDPAKDFHTYSILWNIHQIVFMVDQIPIRLYRNHGEKGVAYPRLQPMSVQASLWNGESWATRGGHDKIDWSKGPFVASFGDYKIDACIWIGNTSFCNGESTENWWNKNEFSSLTRVQKRWFKWVRKYHLIYDYCQDYGRFNNKLPKECSLPKY

SEQ ID NO: 106897 - protein, 216 aa, Arabidopsis thaliana
  peptide (1)..(216): Ceres Seq. ID no. 13620795
MKIKLIRGSSQGTVVAYYMSSDQPNRDEIDFEFLGNVNGQPYILQTNVYAEGLDNREERIHLWFDPAKDFHTYSILWNIHQIVFMVDQIPIRLYRNHGEKGVAYPRLQPMSVQASLWNGESWATRGGHDKIDWSKGPFVASFGDYKIDACIWIGNTSFCNGESTENWWNKNEFSSLTRVQKRWFKWVRKYHLIYDYCQDYGRFNNKLPKECSLPKY

SEQ ID NO: 106898 - protein, 198 aa, Arabidopsis thaliana
  peptide (1)..(198): Ceres Seq. ID no. 13620796
MSSDQPNRDEIDFEFLGNVNGQPYILQTNVYAEGLDNREERIHLWFDPAKDFHTYSILWNIHQIVFMVDQIPIRLYRNHGEKGVAYPRLQPMSVQASLWNGESWATRGGHDKIDWSKGPFVASFGDYKIDACIWIGNTSFCNGESTENWWNKNEFSSLTRVQKRWFKWVRKYHLIYDYCQDYGRFNNKLPKECSLPKY

SEQ ID NO: 106899 - DNA, 1246 bp, Arabidopsis thaliana
  misc_feature (1)..(1246): Ceres Seq. ID no. 13620805
  misc_feature (1)..(1246): Ortholog of  Ceres SEQ ID NO 15178042 as cited in SEQ ID NO 54787
  misc_feature (1)..(1246): Ortholog of  Ceres SEQ ID NO 13596585 as cited in SEQ ID NO 62424
  misc_feature (1)..(1246): Ortholog of  Ceres SEQ ID NO 13597899 as cited in SEQ ID NO 64374
ccaaatttcttcttcttctccggcgaagaaatcgaaaagtcattaccctaagagtcccagagtcgtcagaaggaacagcttttgaaatggacggtgtcacctaccaaagattcccaacggtgaagatccgtgagcttaaagatgactacgccaagttcgagcttcgtgaaaccgacgtttcaatggccaacgctctccgtcgcgtaatgatctccgaagtccccaccatggcaatccatctcgtcaaaatcgaggttaattcctctgttctcaacgacgagttcattgctcaacgacttagtctcatccctctcactagcgagcgtgctatgagcatgcggttctgtcaagattgtgaagattgtaatggagatgaacattgcgagttctgctctgttgagtttccccttagtgctaagtgtgttactgaccaaaccctagatgttactagtagggatctctacagtgctgatcctactgttactcctgttgatttcactagtaactcatctacttctgattcaagcgagcacaagggaattatcattgcgaaactacgcaggggacaagagttgaagcttaaagcattagctaggaaaggaattgggaaagatcatgcgaaatggtctcctgcagctactgttacgtatatgtatgagcctgacattattatcaatgaagagatgatgaacactttgacagatgaggaaaaaattgacttgattgagagcagtcctaccaaagtgtttggcattgacccagtcaccggacaggttgtggtggttgatcctgaagcatacacttacgatgaagaagtgatcaagaaagctgaagcaatggggaaaccgggactcattgagatccatccgaaacatgatagttttgtattcactgttgagtccacaggtgcattgaaggcttctcagctggtactaaatgccattgatatcctgaagcagaagcttgatgcaatccgtctctcagataacactgtagaagccgatgatcagtttggtgaactcggtgcccatatgcgtgaaggatgaaatcgtagctctttttttacctgtttgatcagggtttaagtttcttctagaccagactaatatattaaccgtagcggcactgccttgtttgatagcaacatgtaaagtggcagtcttgtctttgttcccgacctctgactgatccttgtgttcctgaaccttgttatgttgggttatttttagtcgttgaactctctcgt

SEQ ID NO: 106900 - protein, 347 aa, Arabidopsis thaliana
  peptide (1)..(347): Ceres Seq. ID no. 13620806
KFLLLLRRRNRKVITLRVPESSEGTAFEMDGVTYQRFPTVKIRELKDDYAKFELRETDVSMANALRRVMISEVPTMAIHLVKIEVNSSVLNDEFIAQRLSLIPLTSERAMSMRFCQDCEDCNGDEHCEFCSVEFPLSAKCVTDQTLDVTSRDLYSADPTVTPVDFTSNSSTSDSSEHKGIIIAKLRRGQELKLKALARKGIGKDHAKWSPAATVTYMYEPDIIINEEMMNTLTDEEKIDLIESSPTKVFGIDPVTGQVVVVDPEAYTYDEEVIKKAEAMGKPGLIEIHPKHDSFVFTVESTGALKASQLVLNAIDILKQKLDAIRLSDNTVEADDQFGELGAHMREG

SEQ ID NO: 106901 - protein, 319 aa, Arabidopsis thaliana
  peptide (1)..(319): Ceres Seq. ID no. 13620807
MDGVTYQRFPTVKIRELKDDYAKFELRETDVSMANALRRVMISEVPTMAIHLVKIEVNSSVLNDEFIAQRLSLIPLTSERAMSMRFCQDCEDCNGDEHCEFCSVEFPLSAKCVTDQTLDVTSRDLYSADPTVTPVDFTSNSSTSDSSEHKGIIIAKLRRGQELKLKALARKGIGKDHAKWSPAATVTYMYEPDIIINEEMMNTLTDEEKIDLIESSPTKVFGIDPVTGQVVVVDPEAYTYDEEVIKKAEAMGKPGLIEIHPKHDSFVFTVESTGALKASQLVLNAIDILKQKLDAIRLSDNTVEADDQFGELGAHMREG

SEQ ID NO: 106902 - protein, 287 aa, Arabidopsis thaliana
  peptide (1)..(287): Ceres Seq. ID no. 13620808
MANALRRVMISEVPTMAIHLVKIEVNSSVLNDEFIAQRLSLIPLTSERAMSMRFCQDCEDCNGDEHCEFCSVEFPLSAKCVTDQTLDVTSRDLYSADPTVTPVDFTSNSSTSDSSEHKGIIIAKLRRGQELKLKALARKGIGKDHAKWSPAATVTYMYEPDIIINEEMMNTLTDEEKIDLIESSPTKVFGIDPVTGQVVVVDPEAYTYDEEVIKKAEAMGKPGLIEIHPKHDSFVFTVESTGALKASQLVLNAIDILKQKLDAIRLSDNTVEADDQFGELGAHMREG

SEQ ID NO: 106903 - DNA, 1323 bp, Arabidopsis thaliana
  misc_feature (1)..(1323): Ceres Seq. ID no. 13620834
  misc_feature (1)..(1323): Ortholog of  Ceres SEQ ID NO 14313893 as cited in SEQ ID NO 54646
  misc_feature (1)..(1323): Ortholog of  Ceres SEQ ID NO 13656797 as cited in SEQ ID NO 65756
  misc_feature (1)..(1323): Ortholog of  Ceres SEQ ID NO 13658498 as cited in SEQ ID NO 66557
  misc_feature (1)..(1323): Ortholog of  Ceres SEQ ID NO 15227053 as cited in SEQ ID NO 0
aagtgacgatggtcggtggtgatgaatctatctcaccgtgtcggttcgagattccacacggcgagcctcgaggcttcgtcttcagctaataatcccttcgccgagggttccggcgagatgtctccgggaccatcaatcccgctccgccgagctgctctatttctagctgccatctccatctcctgcttcgtcctttacagagccgctgattccttgtctttctcccctcccattttcgatctctcttcttatctggataatgaggaacctaagctagaagatgttctgagtaaagctgcaacgagagacaggacagttgttttgacaactttgaatgcagcatgggcagctccaggatctgttattgatctcttctttgagagttttagaattggggaagaaactagtcaaatcttggatcatttggtgattgttgcattggatgctaaggcttattcgcgttgcttagaactgcataagcattgtttcagtcttgttacggaaggagttgatttttccagagaagcttattttatgactcggtcttacttgaagatgatgtggagaaggattgatctcctaaggtctgttctcgagatgggatacaattttgttttcacggatgctgatgtgatgtggttcaggaacccgtttccacggttttacatgtatgcagatttccagattgcttgcgatcattacctcggaagatcaaacgacctacataatagaccaaacggagggtttaactttgtgcggtccaacaatcgaactatacttttctacaaatactggtatgcttcaagactcagattcccgggatatcatgatcaggatgtgcttaactttctcaaggcagaaccttttgttttccggattgggttaaagatgagattcttgaacactgcttatttcggcggtttatgtgagcctagcagagatctgaacttggttcgtacaatgcatgccaattgctgctacggtatggagagtaagcttcatgatctcagaatcatgcttcaagattggaaagatttcatgtctttaccacttcatctaaaacaatcttctggtttctcctggaaagtccctcagaattgcagtcttgattctcttcgacgctatgatgaatctgtggaggatgatgaagagagtgatccaccaggagaatctcaagactgaaaagtgtgacactttttgtacatgagattcttgatgatttttctagaaagaaagagaaaatcgaatttttgaaggggtaaaaaaaacacgaacacacggcttttttggtgataattttgaaatctcaatggaaattagttt

SEQ ID NO: 106904 - protein, 386 aa, Arabidopsis thaliana
  peptide (1)..(386): Ceres Seq. ID no. 13620835
MNLSHRVGSRFHTASLEASSSANNPFAEGSGEMSPGPSIPLRRAALFLAAISISCFVLYRAADSLSFSPPIFDLSSYLDNEEPKLEDVLSKAATRDRTVVLTTLNAAWAAPGSVIDLFFESFRIGEETSQILDHLVIVALDAKAYSRCLELHKHCFSLVTEGVDFSREAYFMTRSYLKMMWRRIDLLRSVLEMGYNFVFTDADVMWFRNPFPRFYMYADFQIACDHYLGRSNDLHNRPNGGFNFVRSNNRTILFYKYWYASRLRFPGYHDQDVLNFLKAEPFVFRIGLKMRFLNTAYFGGLCEPSRDLNLVRTMHANCCYGMESKLHDLRIMLQDWKDFMSLPLHLKQSSGFSWKVPQNCSLDSLRRYDESVEDDEESDPPGESQD

SEQ ID NO: 106905 - protein, 354 aa, Arabidopsis thaliana
  peptide (1)..(354): Ceres Seq. ID no. 13620836
MSPGPSIPLRRAALFLAAISISCFVLYRAADSLSFSPPIFDLSSYLDNEEPKLEDVLSKAATRDRTVVLTTLNAAWAAPGSVIDLFFESFRIGEETSQILDHLVIVALDAKAYSRCLELHKHCFSLVTEGVDFSREAYFMTRSYLKMMWRRIDLLRSVLEMGYNFVFTDADVMWFRNPFPRFYMYADFQIACDHYLGRSNDLHNRPNGGFNFVRSNNRTILFYKYWYASRLRFPGYHDQDVLNFLKAEPFVFRIGLKMRFLNTAYFGGLCEPSRDLNLVRTMHANCCYGMESKLHDLRIMLQDWKDFMSLPLHLKQSSGFSWKVPQNCSLDSLRRYDESVEDDEESDPPGESQD

SEQ ID NO: 106906 - protein, 215 aa, Arabidopsis thaliana
  peptide (1)..(215): Ceres Seq. ID no. 13620837
MTRSYLKMMWRRIDLLRSVLEMGYNFVFTDADVMWFRNPFPRFYMYADFQIACDHYLGRSNDLHNRPNGGFNFVRSNNRTILFYKYWYASRLRFPGYHDQDVLNFLKAEPFVFRIGLKMRFLNTAYFGGLCEPSRDLNLVRTMHANCCYGMESKLHDLRIMLQDWKDFMSLPLHLKQSSGFSWKVPQNCSLDSLRRYDESVEDDEESDPPGESQD

SEQ ID NO: 106907 - DNA, 1129 bp, Arabidopsis thaliana
  misc_feature (1)..(1129): Ceres Seq. ID no. 13620842
  misc_feature (1)..(1129): Ortholog of  Ceres SEQ ID NO 12609041 as cited in SEQ ID NO 51310
  misc_feature (1)..(1129): Ortholog of  Ceres SEQ ID NO 13594966 as cited in SEQ ID NO 56152
  misc_feature (1)..(1129): Ortholog of  Ceres SEQ ID NO 14312224 as cited in SEQ ID NO 57255
  misc_feature (1)..(1129): Ortholog of  Ceres SEQ ID NO 12582457 as cited in SEQ ID NO 57530
  misc_feature (1)..(1129): Ortholog of  Ceres SEQ ID NO 13655804 as cited in SEQ ID NO 64881
aacgctttttgtcttatctcaaatcttttgttcactcaccccatcataacttcataactcctatccaatctttgcttataactattatcaaacaattcttaacttcgatctctaacctgcaaaaacattcattacactcttcagatcctccttccctttagccgccaaagcaaaaccgtcatcgatctctcttcttttatacagtcaaaaattagattcagattcttcaagaactctgtttttctagtagcatggtgtgtttggtctcccgtacgggtcgtcaatcccaaagatacaacaagggacggcgtcaagtcgtcgggtgtattccatacagactcaagatttcgagtgatggcacaattagcgacgaatttgaggttcttgttatttcatcacaaaagggtcacgctctgatgttcccaaagggtggttgggagcttgatgaatctgtagaagaagctgcgtcaagagaatctctagaagaagctggagttgttggaaacgttgagagacaacttggaaaatgggatttcttaagcaaaagcaaaggaacattctatgaaggattcatgttcccaatgcttgtgaaagaagagcttgagctttggcctgaacaacatcttcgtcaaagaatttggatgaaagttgatgaagcaagagacgcttgtagagattggtggatgaaggaagcgttagatgttttggtccaaaggctttctttactatcattgaagcctatggaagaagacgagaaccttccactgatctctatctactgatcaaaaaaaaaacaatcagacgtgttcttgatcactttgtatataacatcttacgcctgcctttccatgaagagtctactctactgctgcaggaaaagtatgtacagtgaaactttaggtgtgaacttggccgagatttgtttggatttcggtttggtttaacaaaaaggttttgtaattgttgtcatgatgtatccgcaactgcttaggatgggaggaagaagacagaagcaaagagtgcaaacaaaaaactgtacaataacgtttcctctctttgcatctctcctcatcttcaaatgaatctatgatctaaatgaaactaataaagagaatttacagaaaatcac

SEQ ID NO: 106908 - protein, 176 aa, Arabidopsis thaliana
  peptide (1)..(176): Ceres Seq. ID no. 13620843
MVCLVSRTGRQSQRYNKGRRQVVGCIPYRLKISSDGTISDEFEVLVISSQKGHALMFPKGGWELDESVEEAASRESLEEAGVVGNVERQLGKWDFLSKSKGTFYEGFMFPMLVKEELELWPEQHLRQRIWMKVDEARDACRDWWMKEALDVLVQRLSLLSLKPMEEDENLPLISIY

SEQ ID NO: 106909 - protein, 121 aa, Arabidopsis thaliana
  peptide (1)..(121): Ceres Seq. ID no. 13620844
MFPKGGWELDESVEEAASRESLEEAGVVGNVERQLGKWDFLSKSKGTFYEGFMFPMLVKEELELWPEQHLRQRIWMKVDEARDACRDWWMKEALDVLVQRLSLLSLKPMEEDENLPLISIY

SEQ ID NO: 106910 - DNA, 750 bp, Arabidopsis thaliana
  misc_feature (1)..(750): Ceres Seq. ID no. 13620845
  misc_feature (1)..(750): Ortholog of  Ceres SEQ ID NO 13655108 as cited in SEQ ID NO 62996
attgctttctatttaaaaacctctttatttttctctccatggaagctcaacttcatgccaagcctcatgctcaaggagaatggtccacaggcttctgtgattgcttctctgactgccgaaactgttgtatcacattatgttgtccatgtatcacatttggccaagtcgctgagattgtagatcgaggatccaaatcgtgttgtgcggctggagcattatacatgttgatagacttaataacaagttgtgggcgtatgtacgcgtgtttctatagtggaaagatgagagctcaatacaatattaaaggagatggttgtactgattgccttaaacatttttgctgtaacctctgtgctttgacccaacaataccgtgaactcaagcaccgcggtttcgatatgagccttggatgggcagggaacgcagagaaacaacaaaatcaaggtggagtggcgatgggtgctccagccttccaaggcggcatgacccgctaagattgatttctctatgtgatcatcatttgtcttatgtgtaataaaaacgaggtttaatcctctgtcgtgtgtgtatgtgttgtgtaatcttctgtttgtttttgaaagtttgaacatgagtatttctttaatgtatatcccaatgtaatggatcacaattgttacgagtgttaaattacaacgtcgataaagttacaccaaaacaatacttacgtcctttttatggatgttaggttatttggtcgttctattcgtc

SEQ ID NO: 106911 - protein, 163 aa, Arabidopsis thaliana
  peptide (1)..(163): Ceres Seq. ID no. 13620846
CFLFKNLFIFLSMEAQLHAKPHAQGEWSTGFCDCFSDCRNCCITLCCPCITFGQVAEIVDRGSKSCCAAGALYMLIDLITSCGRMYACFYSGKMRAQYNIKGDGCTDCLKHFCCNLCALTQQYRELKHRGFDMSLGWAGNAEKQQNQGGVAMGAPAFQGGMTR

SEQ ID NO: 106912 - protein, 151 aa, Arabidopsis thaliana
  peptide (1)..(151): Ceres Seq. ID no. 13620847
MEAQLHAKPHAQGEWSTGFCDCFSDCRNCCITLCCPCITFGQVAEIVDRGSKSCCAAGALYMLIDLITSCGRMYACFYSGKMRAQYNIKGDGCTDCLKHFCCNLCALTQQYRELKHRGFDMSLGWAGNAEKQQNQGGVAMGAPAFQGGMTR

SEQ ID NO: 106913 - protein, 90 aa, Arabidopsis thaliana
  peptide (1)..(90): Ceres Seq. ID no. 13620848
MLIDLITSCGRMYACFYSGKMRAQYNIKGDGCTDCLKHFCCNLCALTQQYRELKHRGFDMSLGWAGNAEKQQNQGGVAMGAPAFQGGMTR

SEQ ID NO: 106914 - DNA, 1622 bp, Arabidopsis thaliana
  misc_feature (1)..(1622): Ceres Seq. ID no. 13620865
  misc_feature (1)..(1622): Ortholog of  Ceres SEQ ID NO 14311535 as cited in SEQ ID NO 51559
  misc_feature (1)..(1622): Ortholog of  Ceres SEQ ID NO 15176200 as cited in SEQ ID NO 55188
aggtgcattactagctaagacagcttggttgagagatagagacgaaaatggaagcggcgatgaacaaccacgatggagactgctgcaagagcgggccgggttatgcgacacccctcctcgcgatgtctggtccacgagaaaaactcatctatgttgctgccatatacactggaaccgggcaagcgaagccagattacttagctactgtggatgtggaaccgagttcatccacatactcgagtgttatccacagattaccaatgccttaccttgaagatgaacttcatcactcaggctggaactcatgtagctcttgctatggtgattcttcttgcgagagacgttatctcatcttgccttctcttctgtctggtcgtatttacgtgatcgatacgaaaacaaacccgagggaaccatctttgcacaaattcgtggaccctgcagaggttttggagaagacggggttggcttatccgcatcagcctcattgcttagcttccggagacgttcttgtgtcttgtcttggagacgaagatggaaacgcagaaggcagtgggtttctcttacttgattccgagtttaacatcaaaggaaggtgggagaaggatggaaacagtcctttgtatgggtatgatttctggtaccaacctcggcataagacgatgatcagtacctcatggggagccccggccgcgtttaccaaaggatttgacctcaaagacgtctctgatggcttatatggaaagcatctacatgtctatagctggccccaaggagaattgaaacagattcttgaccttggtgataccggacttttacccttagaggtaagattcttgcatgagccggataaagctacgggatttgcagggtgtgcgttgtcgagtactttagtaagatttttcaagaacgatgatgaaacatggagccacgaggtggctatatcagttgaacctctgaaagttgaaaactggattctcccagaaatgccagggcttatcaccgactttctaatctcacttgacgaccgattcctctattgttccaactggcttcatggagatattcgtcagtacaacatcgaggacccgaaaacccctgttttaactggtcaaatacatgtaggcgggctagtccaaaagggaagtcttgtcttggccttaggagaagaaggaaaagcatttcagtttgatgtccctaagatcaagggtcagcgtctaagaggaggtcctcagatgtttcagctgagcctagatgggaagcgattgtacgtgacgaactcgctgtttagtgtttgggacagacagttttacccggaacttgtggagaaagggtcacacatgttgcagatagatgttgatacagataaaggtggtctctccataaaccctaacttcttcgtcgactttgggaccgaaccggatggtccttcgctcgctcacgagatgagatatccgggtggcgactgcacctcagatatctgggtttagttttttcgctaaatcaaggatttctatggaaatcggaacagaattcagaattgtgttgagtgtgatcaatctaataatgggtaatgtcacatgtgtgagtgtgatcaatctaataaatgttgattacttgct

SEQ ID NO: 106915 - protein, 480 aa, Arabidopsis thaliana
  peptide (1)..(480): Ceres Seq. ID no. 13620866
MEAAMNNHDGDCCKSGPGYATPLLAMSGPREKLIYVAAIYTGTGQAKPDYLATVDVEPSSSTYSSVIHRLPMPYLEDELHHSGWNSCSSCYGDSSCERRYLILPSLLSGRIYVIDTKTNPREPSLHKFVDPAEVLEKTGLAYPHQPHCLASGDVLVSCLGDEDGNAEGSGFLLLDSEFNIKGRWEKDGNSPLYGYDFWYQPRHKTMISTSWGAPAAFTKGFDLKDVSDGLYGKHLHVYSWPQGELKQILDLGDTGLLPLEVRFLHEPDKATGFAGCALSSTLVRFFKNDDETWSHEVAISVEPLKVENWILPEMPGLITDFLISLDDRFLYCSNWLHGDIRQYNIEDPKTPVLTGQIHVGGLVQKGSLVLALGEEGKAFQFDVPKIKGQRLRGGPQMFQLSLDGKRLYVTNSLFSVWDRQFYPELVEKGSHMLQIDVDTDKGGLSINPNFFVDFGTEPDGPSLAHEMRYPGGDCTSDIWV

SEQ ID NO: 106916 - protein, 476 aa, Arabidopsis thaliana
  peptide (1)..(476): Ceres Seq. ID no. 13620867
MNNHDGDCCKSGPGYATPLLAMSGPREKLIYVAAIYTGTGQAKPDYLATVDVEPSSSTYSSVIHRLPMPYLEDELHHSGWNSCSSCYGDSSCERRYLILPSLLSGRIYVIDTKTNPREPSLHKFVDPAEVLEKTGLAYPHQPHCLASGDVLVSCLGDEDGNAEGSGFLLLDSEFNIKGRWEKDGNSPLYGYDFWYQPRHKTMISTSWGAPAAFTKGFDLKDVSDGLYGKHLHVYSWPQGELKQILDLGDTGLLPLEVRFLHEPDKATGFAGCALSSTLVRFFKNDDETWSHEVAISVEPLKVENWILPEMPGLITDFLISLDDRFLYCSNWLHGDIRQYNIEDPKTPVLTGQIHVGGLVQKGSLVLALGEEGKAFQFDVPKIKGQRLRGGPQMFQLSLDGKRLYVTNSLFSVWDRQFYPELVEKGSHMLQIDVDTDKGGLSINPNFFVDFGTEPDGPSLAHEMRYPGGDCTSDIWV

SEQ ID NO: 106917 - protein, 455 aa, Arabidopsis thaliana
  peptide (1)..(455): Ceres Seq. ID no. 13620868
MSGPREKLIYVAAIYTGTGQAKPDYLATVDVEPSSSTYSSVIHRLPMPYLEDELHHSGWNSCSSCYGDSSCERRYLILPSLLSGRIYVIDTKTNPREPSLHKFVDPAEVLEKTGLAYPHQPHCLASGDVLVSCLGDEDGNAEGSGFLLLDSEFNIKGRWEKDGNSPLYGYDFWYQPRHKTMISTSWGAPAAFTKGFDLKDVSDGLYGKHLHVYSWPQGELKQILDLGDTGLLPLEVRFLHEPDKATGFAGCALSSTLVRFFKNDDETWSHEVAISVEPLKVENWILPEMPGLITDFLISLDDRFLYCSNWLHGDIRQYNIEDPKTPVLTGQIHVGGLVQKGSLVLALGEEGKAFQFDVPKIKGQRLRGGPQMFQLSLDGKRLYVTNSLFSVWDRQFYPELVEKGSHMLQIDVDTDKGGLSINPNFFVDFGTEPDGPSLAHEMRYPGGDCTSDIWV

SEQ ID NO: 106918 - DNA, 1008 bp, Arabidopsis thaliana
  misc_feature (1)..(1008): Ceres Seq. ID no. 13620873
  misc_feature (1)..(1008): Ortholog of  Ceres SEQ ID NO 14307589 as cited in SEQ ID NO 20466
  misc_feature (1)..(1008): Ortholog of  Ceres SEQ ID NO 12611159 as cited in SEQ ID NO 59821
  misc_feature (1)..(1008): Ortholog of  Ceres SEQ ID NO 13584238 as cited in SEQ ID NO 64216
  misc_feature (1)..(1008): Ortholog of  Ceres SEQ ID NO 13661001 as cited in SEQ ID NO 67531
gagaagtaaaattttctattgcagagagaaagagagttagagaaagagagagagagagagagagagagagagatgaaacttgtgcaagaagaataccgtaaaggaccgtggacagaacaggaggacatcctcttggtcaactttgtccacttgttcggagatcgaagatgggattttgtagcgaaagtttcaggtttaaacagaacaggaaagagttgcaggttaaggtgggttaattacctgcatcctggtctcaaacgtggtaagatgactccacaagaagagcgtttagtccttgagcttcacgccaaatggggaaacaggtggtcaaaaattgcccggaaattaccggggagaacagataatgagataaagaactactggaggactcatatgaggaagaaggctcaagagaagaagcgacctatgtctcctacttcctcatcttcaaactgttgctcatcatctatgaccactactactagtcaagacactggaggctccaacgggaaaatgaatcaagaatgcgaagacgggtactactccatggatgacatatggagagagattgatcagtctggagcaaacgttattaaaccggtaaaagacaactactactcagagcaaagctgttacttgaatttccctcctctggcttctccaacatgggaaagttccttggaatctatatggaacatggatgcagatgaaagtaagatgtcttcttttgctattgatcagtttcctctaagttttgaacatggtagtggtcgcctttagtctaggatttgattcatttggaatgtttatatgtgcagcatatatatgttatcaaacgacgactgtagtagtttcctatgacttacatcaaaaatcaccacccactgtactaatctcataagtagtcatcatcttatgcctttgtttagtttgtagagtgagtgaaaagatgtgtaatacaagtcagaactctatttccaaaataaatagacttttgaagtttctgtg

SEQ ID NO: 106919 - protein, 235 aa, Arabidopsis thaliana
  peptide (1)..(235): Ceres Seq. ID no. 13620874
MKLVQEEYRKGPWTEQEDILLVNFVHLFGDRRWDFVAKVSGLNRTGKSCRLRWVNYLHPGLKRGKMTPQEERLVLELHAKWGNRWSKIARKLPGRTDNEIKNYWRTHMRKKAQEKKRPMSPTSSSSNCCSSSMTTTTSQDTGGSNGKMNQECEDGYYSMDDIWREIDQSGANVIKPVKDNYYSEQSCYLNFPPLASPTWESSLESIWNMDADESKMSSFAIDQFPLSFEHGSGRL

SEQ ID NO: 106920 - protein, 170 aa, Arabidopsis thaliana
  peptide (1)..(170): Ceres Seq. ID no. 13620875
MTPQEERLVLELHAKWGNRWSKIARKLPGRTDNEIKNYWRTHMRKKAQEKKRPMSPTSSSSNCCSSSMTTTTSQDTGGSNGKMNQECEDGYYSMDDIWREIDQSGANVIKPVKDNYYSEQSCYLNFPPLASPTWESSLESIWNMDADESKMSSFAIDQFPLSFEHGSGRL

SEQ ID NO: 106921 - protein, 128 aa, Arabidopsis thaliana
  peptide (1)..(128): Ceres Seq. ID no. 13620876
MRKKAQEKKRPMSPTSSSSNCCSSSMTTTTSQDTGGSNGKMNQECEDGYYSMDDIWREIDQSGANVIKPVKDNYYSEQSCYLNFPPLASPTWESSLESIWNMDADESKMSSFAIDQFPLSFEHGSGRL

SEQ ID NO: 106922 - DNA, 2587 bp, Arabidopsis thaliana
  misc_feature (1)..(2587): Ceres Seq. ID no. 13620877
  misc_feature (1)..(2587): Ortholog of  Ceres SEQ ID NO 15176095 as cited in SEQ ID NO 59699
ttaccttttttttcgaattagataacagttgaaggaagagatagagttctggctgaaatcactcaacaaactttaaaagtaattaagttgagactgagactgagcgtgattcgatctatttagcaaatatagcgagagagggagatttatggagaactagtattttgtatatgagtatgacgagaagatattcgagtactcaatactcaaacaaaatgagcctccaaagtttatcatctcttcttctcctcgtcactctctttttctctcctgcttttgctcttaaaaagtcctacatagtgtacttgggatctcacgcccatcttcctcaaatctcttctgcccatctcgatggtgttgctcactcacatcgcacttttctcgcctctttcgttggaagccatgagaatgcaaaagaagccatcttttactcatacaagagacatatcaatggcttcgccgcaattcttgacgaaaatgaagctgcagaaatcgccaagcatcctgatgtagtctctgtattccccaacaaaggaagaaaacttcataccactcattcatggaatttcatgctccttgcgaaaaatggtgttgttcacaagtcctctctttggaataaagcaggatacggagaggatacaatcatcgctaacttagacacaggtgtgtggcctgagtcaaaaagcttcagcgatgaagggtatggagctgttccagctaggtggaaaggtagatgccacaaggatgttccttgcaacaggaagctcatcggtgctagatacttcaacaaaggttacttagcttacacaggccttccttctaacgcctcctatgaaacctgtcgtgaccacgatggtcacggtagccacactctttccaccgcggctggtaactttgttcccggagccaatgtgtttggtatcgggaatggaacagccagtggtggttctcctaaagctagagtcgcggcttacaaggtgtgctggccccctgtggatggcgcggagtgctttgatgctgatattttggcagcgattgaggctgccatcgaagacggcgtggatgttctctcggcttcagtgggaggagatgctggagattacatgagcgatggtatagccattggatccttccacgccgtcaaaaacggggtgacggttgtgtgctctgctggaaattcaggtcctaagtctggcactgtctcaaacgttgcaccatgggttattacagtcggtgctagctccatggatcgggagtttcaagcttttgttgagctcaaaaacggccaaagcttcaagggaacaagcctctcaaagcctttgcctgaagaaaagatgtatagcctcatcagtgctgcagatgctaatgtagccaatggaaatgtgacagatgcattgctatgcaagaaaggtagcctagacccgaagaaggtgaaagggaagatcttggtgtgtctgagaggagacaacgcacgtgtggacaagggaatgcaagcggctgctgctggagctgcgggaatggttctatgcaacgacaaggcgagtggaaacgaaatcatctcagacgctcatgttcttcctgcttcacaaattgactacaaagatggtgaaactttgttttcttacctaagttccacaaaagatcccaaaggttacatcaaagcacctaccgctacgctgaacacaaagcctgctcctttcatggcctctttctcttccagaggaccaaacaccatcacaccagggatcctcaagcccgacatcactgcacccggtgtcaacatcatagccgccttcacggaagccacgggccctacagacttagactctgacaatcgaagaactcctttcaacaccgaatcaggaacttccatgtcctgtcctcacatctccggtgtcgttggtcttttgaaaacacttcaccctcattggagtcctgcagctatccgctcagccatcatgacaacttcaagaaccagaaacaacagacgtaagcccatggttgatgaatccttcaagaaagcaaatcccttcagctacggttcaggccatgtccaacccaataaagccgcccatcctggtcttgtctatgatctcaccacaggagactacttggacttcctctgcgccgttggctacaacaacaccgtggttcaactctttgccgaggacccacagtacacgtgtcgccaaggagccaatcttctcgacttcaactacccttcaatcactgtcccaaacctcacgggctctatcaccgtcacccgaaaactcaaaaacgttggaccacctgctacctacaacgctcgtttccgagagccacttggagttcgcgtctccgtggagccaaaacagctcacgttcaacaaaactggtgaagtgaagatatttcagatgactcttcgtcccttgccagtgacgccttcaggctacgtttttggagagctgacgtggactgattcacatcattacgttaggagtcccatcgtcgtccaactttcaagctagcctcattcttcattctacttcatcgttctcacttttcttctatgaatcattttatatgtttggataatattttaatgttc

SEQ ID NO: 106923 - protein, 778 aa, Arabidopsis thaliana
  peptide (1)..(778): Ceres Seq. ID no. 13620878
MSMTRRYSSTQYSNKMSLQSLSSLLLLVTLFFSPAFALKKSYIVYLGSHAHLPQISSAHLDGVAHSHRTFLASFVGSHENAKEAIFYSYKRHINGFAAILDENEAAEIAKHPDVVSVFPNKGRKLHTTHSWNFMLLAKNGVVHKSSLWNKAGYGEDTIIANLDTGVWPESKSFSDEGYGAVPARWKGRCHKDVPCNRKLIGARYFNKGYLAYTGLPSNASYETCRDHDGHGSHTLSTAAGNFVPGANVFGIGNGTASGGSPKARVAAYKVCWPPVDGAECFDADILAAIEAAIEDGVDVLSASVGGDAGDYMSDGIAIGSFHAVKNGVTVVCSAGNSGPKSGTVSNVAPWVITVGASSMDREFQAFVELKNGQSFKGTSLSKPLPEEKMYSLISAADANVANGNVTDALLCKKGSLDPKKVKGKILVCLRGDNARVDKGMQAAAAGAAGMVLCNDKASGNEIISDAHVLPASQIDYKDGETLFSYLSSTKDPKGYIKAPTATLNTKPAPFMASFSSRGPNTITPGILKPDITAPGVNIIAAFTEATGPTDLDSDNRRTPFNTESGTSMSCPHISGVVGLLKTLHPHWSPAAIRSAIMTTSRTRNNRRKPMVDESFKKANPFSYGSGHVQPNKAAHPGLVYDLTTGDYLDFLCAVGYNNTVVQLFAEDPQYTCRQGANLLDFNYPSITVPNLTGSITVTRKLKNVGPPATYNARFREPLGVRVSVEPKQLTFNKTGEVKIFQMTLRPLPVTPSGYVFGELTWTDSHHYVRSPIVVQLSS

SEQ ID NO: 106924 - protein, 776 aa, Arabidopsis thaliana
  peptide (1)..(776): Ceres Seq. ID no. 13620879
MTRRYSSTQYSNKMSLQSLSSLLLLVTLFFSPAFALKKSYIVYLGSHAHLPQISSAHLDGVAHSHRTFLASFVGSHENAKEAIFYSYKRHINGFAAILDENEAAEIAKHPDVVSVFPNKGRKLHTTHSWNFMLLAKNGVVHKSSLWNKAGYGEDTIIANLDTGVWPESKSFSDEGYGAVPARWKGRCHKDVPCNRKLIGARYFNKGYLAYTGLPSNASYETCRDHDGHGSHTLSTAAGNFVPGANVFGIGNGTASGGSPKARVAAYKVCWPPVDGAECFDADILAAIEAAIEDGVDVLSASVGGDAGDYMSDGIAIGSFHAVKNGVTVVCSAGNSGPKSGTVSNVAPWVITVGASSMDREFQAFVELKNGQSFKGTSLSKPLPEEKMYSLISAADANVANGNVTDALLCKKGSLDPKKVKGKILVCLRGDNARVDKGMQAAAAGAAGMVLCNDKASGNEIISDAHVLPASQIDYKDGETLFSYLSSTKDPKGYIKAPTATLNTKPAPFMASFSSRGPNTITPGILKPDITAPGVNIIAAFTEATGPTDLDSDNRRTPFNTESGTSMSCPHISGVVGLLKTLHPHWSPAAIRSAIMTTSRTRNNRRKPMVDESFKKANPFSYGSGHVQPNKAAHPGLVYDLTTGDYLDFLCAVGYNNTVVQLFAEDPQYTCRQGANLLDFNYPSITVPNLTGSITVTRKLKNVGPPATYNARFREPLGVRVSVEPKQLTFNKTGEVKIFQMTLRPLPVTPSGYVFGELTWTDSHHYVRSPIVVQLSS

SEQ ID NO: 106925 - protein, 763 aa, Arabidopsis thaliana
  peptide (1)..(763): Ceres Seq. ID no. 13620880
MSLQSLSSLLLLVTLFFSPAFALKKSYIVYLGSHAHLPQISSAHLDGVAHSHRTFLASFVGSHENAKEAIFYSYKRHINGFAAILDENEAAEIAKHPDVVSVFPNKGRKLHTTHSWNFMLLAKNGVVHKSSLWNKAGYGEDTIIANLDTGVWPESKSFSDEGYGAVPARWKGRCHKDVPCNRKLIGARYFNKGYLAYTGLPSNASYETCRDHDGHGSHTLSTAAGNFVPGANVFGIGNGTASGGSPKARVAAYKVCWPPVDGAECFDADILAAIEAAIEDGVDVLSASVGGDAGDYMSDGIAIGSFHAVKNGVTVVCSAGNSGPKSGTVSNVAPWVITVGASSMDREFQAFVELKNGQSFKGTSLSKPLPEEKMYSLISAADANVANGNVTDALLCKKGSLDPKKVKGKILVCLRGDNARVDKGMQAAAAGAAGMVLCNDKASGNEIISDAHVLPASQIDYKDGETLFSYLSSTKDPKGYIKAPTATLNTKPAPFMASFSSRGPNTITPGILKPDITAPGVNIIAAFTEATGPTDLDSDNRRTPFNTESGTSMSCPHISGVVGLLKTLHPHWSPAAIRSAIMTTSRTRNNRRKPMVDESFKKANPFSYGSGHVQPNKAAHPGLVYDLTTGDYLDFLCAVGYNNTVVQLFAEDPQYTCRQGANLLDFNYPSITVPNLTGSITVTRKLKNVGPPATYNARFREPLGVRVSVEPKQLTFNKTGEVKIFQMTLRPLPVTPSGYVFGELTWTDSHHYVRSPIVVQLSS

SEQ ID NO: 106926 - DNA, 1151 bp, Arabidopsis thaliana
  misc_feature (1)..(1151): Ceres Seq. ID no. 13620887
  misc_feature (1)..(1151): Ortholog of  Ceres SEQ ID NO 14308600 as cited in SEQ ID NO 60485
  misc_feature (1)..(1151): Ortholog of  Ceres SEQ ID NO 13584797 as cited in SEQ ID NO 69087
agttggcaccacaatctctgctgctcgagtcgcgcgactgtcttccccagggagagagagatccgaatctcgtttcaattctcgatctcttcctctcgatttcgaagaatcttcgtggctatttcttttctattttcactgtgcaatcgaaatcaacaataatttttacgagattacgtttttcactaccgcatagctctccattggatcctcgaagcatagctctctccattgtagaccctgcttcccgagtccttcatatcctctgttttttcttcataaatcaatacgccagctcaattccatggcgcctagatggaaatggaaaggagctgaagcaaaagctcttgcagaacctatttcaaaatcagtctcagagctccagctctctctagccgaaacagagtcctcgggaaccctctcaagttgcaatgtgcttctagcggttgagccagagcaagctgagcttcttgaccgttgttgttttggcagactcgttctatcggcagagaaaatcaagaaatggattcagttatcttttgaagaagctttctttttgcattacaatctcaaatgcatcaaaatctcacttcaaggtcgttgcttggagaatgaagtagacacatggctctacatgaaatcaaaaagaccaaactttccaatgtttttcaaagcttattcacatttacgatcgaagaactgggttttgagatcagggttgcaatacggtgtggattttgtggcataccgtcaccatccatctcttgtccactctgaatactcggttttagttcagtctggtgacagtgatcggttaagagtgtggtcagatatccattgtgctgttaggttaagcggaagtgttgcgaaaacgttgttgactctctacgttaatggtaacttcaaaggagaggatgtgaatctacttgtatgtttggagaacttcacagtggaagaacaaacgataagtagatggagcccagaactcagtcgtgaagatcaatccacaaattcaaaacaacatgttcccaacgtgagtaatttgaacactctttgaggaaccattctcggtaactcatgtctggtttgaatttttcatatcaactttaaattaatttctactctatataaagatgagtagcatttctttc

SEQ ID NO: 106927 - protein, 250 aa, Arabidopsis thaliana
  peptide (1)..(250): Ceres Seq. ID no. 13620888
MAPRWKWKGAEAKALAEPISKSVSELQLSLAETESSGTLSSCNVLLAVEPEQAELLDRCCFGRLVLSAEKIKKWIQLSFEEAFFLHYNLKCIKISLQGRCLENEVDTWLYMKSKRPNFPMFFKAYSHLRSKNWVLRSGLQYGVDFVAYRHHPSLVHSEYSVLVQSGDSDRLRVWSDIHCAVRLSGSVAKTLLTLYVNGNFKGEDVNLLVCLENFTVEEQTISRWSPELSREDQSTNSKQHVPNVSNLNTL

SEQ ID NO: 106928 - protein, 140 aa, Arabidopsis thaliana
  peptide (1)..(140): Ceres Seq. ID no. 13620889
MKSKRPNFPMFFKAYSHLRSKNWVLRSGLQYGVDFVAYRHHPSLVHSEYSVLVQSGDSDRLRVWSDIHCAVRLSGSVAKTLLTLYVNGNFKGEDVNLLVCLENFTVEEQTISRWSPELSREDQSTNSKQHVPNVSNLNTL

SEQ ID NO: 106929 - protein, 131 aa, Arabidopsis thaliana
  peptide (1)..(131): Ceres Seq. ID no. 13620890
MFFKAYSHLRSKNWVLRSGLQYGVDFVAYRHHPSLVHSEYSVLVQSGDSDRLRVWSDIHCAVRLSGSVAKTLLTLYVNGNFKGEDVNLLVCLENFTVEEQTISRWSPELSREDQSTNSKQHVPNVSNLNTL

SEQ ID NO: 106930 - DNA, 915 bp, Arabidopsis thaliana
  misc_feature (1)..(915): Ceres Seq. ID no. 13620903
  misc_feature (1)..(915): Ortholog of  Ceres SEQ ID NO 12558659 as cited in SEQ ID NO 20727
  misc_feature (1)..(915): Ortholog of  Ceres SEQ ID NO 15175034 as cited in SEQ ID NO 62432
  misc_feature (1)..(915): Ortholog of  Ceres SEQ ID NO 12619999 as cited in SEQ ID NO 66123
  misc_feature (1)..(915): Ortholog of  Ceres SEQ ID NO 13656436 as cited in SEQ ID NO 69154
gaaactctctcttctttttttgttcttcttctcattggttgatcgatacgcgctaaatttctagaaatctcagatccataaaattttccgaggagagattctctaatcagagaacctcacaatggccgcatatagagccgacgacgagtacgattacctcttcaaagttgtgttaattggagactccggcgttggaaaatccaacctcctttctcgattcacgcgcaacgagttcagtctcgaatctaaatccacgatcggtgtagaattcgccactcgtagcatccatgtcgatgataagatcgtcaaagctcagatttgggataccgctggccaagaaagatatcgagcaatcacaagtgcatattacagaggagctgtaggagcgttgcttgtgtacgatgtcacaagacatgtgacgtttgagaacgttgaaagatggttaaaggagcttcgagatcatacagatgccaatatcgtcatcatgttcgttgggaacaaagcggatctccgtcacctacgagctgtttcgactgaagacgctaaggctttcgctgagagagagaacactttcttcatggagacatcagctctcgaatcgatgaacgtcgagaatgctttcactgaagtactttctcagatttaccgtgtggttagccggaaagcgttggatataggagacgacccggctgctcttcccaaaggacagaccatcaatgtcggatcgaaagacgatgtctctgcggtgaaaaaggttggttgctgctcaaattgatggtacgttcgactttcaagaatcggtctcacggtcgatcttgttcatttcttttttgttgttatatgtgaagatcttgttcatttatttgtataatcacacaccttaaaccatattgaataccactgcgtttccatatc

SEQ ID NO: 106931 - protein, 217 aa, Arabidopsis thaliana
  peptide (1)..(217): Ceres Seq. ID no. 13620904
MAAYRADDEYDYLFKVVLIGDSGVGKSNLLSRFTRNEFSLESKSTIGVEFATRSIHVDDKIVKAQIWDTAGQERYRAITSAYYRGAVGALLVYDVTRHVTFENVERWLKELRDHTDANIVIMFVGNKADLRHLRAVSTEDAKAFAERENTFFMETSALESMNVENAFTEVLSQIYRVVSRKALDIGDDPAALPKGQTINVGSKDDVSAVKKVGCCSN

SEQ ID NO: 106932 - DNA, 2413 bp, Arabidopsis thaliana
  misc_feature (1)..(2413): Ceres Seq. ID no. 13620905
  misc_feature (1)..(2413): Ortholog of  Ceres SEQ ID NO 13584744 as cited in SEQ ID NO 69137
aaacacacacaaccacaatgtagtctatttgttcctacccttaaaagtctctgttggcttttcaaaacctggtccattgagtcattgactcagagagttagaactaaaaagtctttatatttacacatatacgcagatttaatctctacatctttgcttcagtaaaatgggttctctttcttgttcaataatccatctggttcttattctgcaactacaaacatttttcgttttttctcaaaacatcagaaacggctctgttcctgtcggagaatctctcaccgcttcagagtcccaacaaatctctagttcatggcgttcaccttccggtgactttgctttcgggttccgcaagatccaaccaaacgacggtttcactctctccatttggttcgacaagatttctgacaagaccatcgtgtggcacgcacaagccgtcaacacaaccaccggtcttgtccctaatggttcgaaggttacattaactgcagatggcggtctggttatcgctgaccctcgaggtcaggagctgtggagagcgttgagtggtggctctgtttctcgagggcgatttactgacgacggaaacttcgttcttttcagagatgggtcagaagattctgacgaggttctatggtcgagctttgaaaatcccaccgacactctgttacctaatcagaatatagaagttggaaggaatctgtcatcacgtaggacagagacgagcttcaaaaaaggaagattcagcctacgtctagaggatgacggaaatcttcagcttcactctctcaacgccgagactgcctcagaatcagacatatactctcagtactacgaaagtaataccaacgatccaaacaaccccgggattcaattagttttcaaccagtcaggggaaatatatgttcttcaaaggaacaattcaagattcgtcgtcaaagatagagatccggatttttctatcgccgcgccgttctacatttcgacgggccccgatgatgcacttgggaatatggcttgtgggtataataatatatgtagtttaggaaacaacaagaggccaaaatgtgagtgtcctgagaggtttgtgttaaaggatccgagcaatgagtatggtgattgtttgccagattttgagatgcagacttgtagaccagagaaccaaaccgcaaactcagatgtgaatctttacgagttcattactttagagaagacgaattggccgtttggggattatgagagttatgccaactatgatgaagaaagatgtaaagcttcttgtcttagcgattgtttatgtgctgcggttatttttggaacaaatcgggatctaaaatgttggaagaagaagtttcccttgtctcacggtgaaagatctccacgtggtgatagtgatacattcattaaggttcgaaaccgctccatcgcggatgttccagttaccggaaacagagcgaaaaaacttgactgggtctttacatatggagagcttgcagaggctacaagagatttcacggaagagcttggaagaggagcctttggtatagtttacaaaggatatttagaagttgccggtggttctgaagttaccgtggctgtgaagaaactagatcgtcttgatttagataacgaaaaagagttcaagaatgaggttaaagtgataggtcagattcaccacaagaacctagtgaggctcattggcttctgcaacgaaggacagagccagatgatcgtctatgagtttttaccacaagggacgctagccaattttctcttcaggcgtccgaggccgagctgggaagatagaaagaatattgcggtggccattgctcgtggaatcttgtatctacatgaagagtgcagcgagcagatcatacactgtgacataaaaccgcagaacatactcctagatgagtattacactcctcggatctcggattttggtctagcaaagcttttgttgatgaaccaaacgtatacgctcactaacatccgtggaacaaaagggtatgtggcccctgaatggttcaggaatagccccattacatccaaagtagatgtttatagctatggagtaatgcttttagaaatcgtgtgctgcaagaaagccgtcgaccttgaggataacgtgattctcatcaattgggcttacgattgttttcgacaaggaaggttggaagatctgactgaggacgattcagaggcaatgaatgacatggaaactgtggagagatatgtgaaaatagcgatatggtgtatacaagaagagcatgggatgagacctaacatgagaaatgttacacagatgcttgaaggtgtgattcaagtttttgatcctccaaatccgtctccttatagcactttcacttggtctgatgaatctttgtctagtgatccagtgtcacttgtttga

SEQ ID NO: 106933 - protein, 748 aa, Arabidopsis thaliana
  peptide (1)..(748): Ceres Seq. ID no. 13620906
MGSLSCSIIHLVLILQLQTFFVFSQNIRNGSVPVGESLTASESQQISSSWRSPSGDFAFGFRKIQPNDGFTLSIWFDKISDKTIVWHAQAVNTTTGLVPNGSKVTLTADGGLVIADPRGQELWRALSGGSVSRGRFTDDGNFVLFRDGSEDSDEVLWSSFENPTDTLLPNQNIEVGRNLSSRRTETSFKKGRFSLRLEDDGNLQLHSLNAETASESDIYSQYYESNTNDPNNPGIQLVFNQSGEIYVLQRNNSRFVVKDRDPDFSIAAPFYISTGPDDALGNMACGYNNICSLGNNKRPKCECPERFVLKDPSNEYGDCLPDFEMQTCRPENQTANSDVNLYEFITLEKTNWPFGDYESYANYDEERCKASCLSDCLCAAVIFGTNRDLKCWKKKFPLSHGERSPRGDSDTFIKVRNRSIADVPVTGNRAKKLDWVFTYGELAEATRDFTEELGRGAFGIVYKGYLEVAGGSEVTVAVKKLDRLDLDNEKEFKNEVKVIGQIHHKNLVRLIGFCNEGQSQMIVYEFLPQGTLANFLFRRPRPSWEDRKNIAVAIARGILYLHEECSEQIIHCDIKPQNILLDEYYTPRISDFGLAKLLLMNQTYTLTNIRGTKGYVAPEWFRNSPITSKVDVYSYGVMLLEIVCCKKAVDLEDNVILINWAYDCFRQGRLEDLTEDDSEAMNDMETVERYVKIAIWCIQEEHGMRPNMRNVTQMLEGVIQVFDPPNPSPYSTFTWSDESLSSDPVSLV

SEQ ID NO: 106934 - protein, 466 aa, Arabidopsis thaliana
  peptide (1)..(466): Ceres Seq. ID no. 13620907
MACGYNNICSLGNNKRPKCECPERFVLKDPSNEYGDCLPDFEMQTCRPENQTANSDVNLYEFITLEKTNWPFGDYESYANYDEERCKASCLSDCLCAAVIFGTNRDLKCWKKKFPLSHGERSPRGDSDTFIKVRNRSIADVPVTGNRAKKLDWVFTYGELAEATRDFTEELGRGAFGIVYKGYLEVAGGSEVTVAVKKLDRLDLDNEKEFKNEVKVIGQIHHKNLVRLIGFCNEGQSQMIVYEFLPQGTLANFLFRRPRPSWEDRKNIAVAIARGILYLHEECSEQIIHCDIKPQNILLDEYYTPRISDFGLAKLLLMNQTYTLTNIRGTKGYVAPEWFRNSPITSKVDVYSYGVMLLEIVCCKKAVDLEDNVILINWAYDCFRQGRLEDLTEDDSEAMNDMETVERYVKIAIWCIQEEHGMRPNMRNVTQMLEGVIQVFDPPNPSPYSTFTWSDESLSSDPVSLV

SEQ ID NO: 106935 - protein, 424 aa, Arabidopsis thaliana
  peptide (1)..(424): Ceres Seq. ID no. 13620908
MQTCRPENQTANSDVNLYEFITLEKTNWPFGDYESYANYDEERCKASCLSDCLCAAVIFGTNRDLKCWKKKFPLSHGERSPRGDSDTFIKVRNRSIADVPVTGNRAKKLDWVFTYGELAEATRDFTEELGRGAFGIVYKGYLEVAGGSEVTVAVKKLDRLDLDNEKEFKNEVKVIGQIHHKNLVRLIGFCNEGQSQMIVYEFLPQGTLANFLFRRPRPSWEDRKNIAVAIARGILYLHEECSEQIIHCDIKPQNILLDEYYTPRISDFGLAKLLLMNQTYTLTNIRGTKGYVAPEWFRNSPITSKVDVYSYGVMLLEIVCCKKAVDLEDNVILINWAYDCFRQGRLEDLTEDDSEAMNDMETVERYVKIAIWCIQEEHGMRPNMRNVTQMLEGVIQVFDPPNPSPYSTFTWSDESLSSDPVSLV

SEQ ID NO: 106936 - DNA, 1652 bp, Arabidopsis thaliana
  misc_feature (1)..(1652): Ceres Seq. ID no. 13620909
  misc_feature (1)..(1652): Ortholog of  Ceres SEQ ID NO 14314620 as cited in SEQ ID NO 56872
  misc_feature (1)..(1652): Ortholog of  Ceres SEQ ID NO 15178460 as cited in SEQ ID NO 66107
agatctctctttgtccttctctctccctcagatcactatggcacagcaggaagctagtccttcccctggtgctgaggttgttggtcgtgcctttgtggagcaatactatcatattcttcaccaatctcccggtttagttcatcggttttatcaagattcgagctttttaacccgacctgatgttaccggtgctgtgactactgtcacaactatgcaagcgatcaacgacaagattctgtcgttgaaatatgaagactacacggctgagatagaaactgctgatgctcaggagtctcatgagagaggtgttattgtgctggttacaggacgcttaaccgggaacgataatgttaggaagaagtttagtcaatcttttttcttggctccacaagacaaaggatactttgtcttaaacgacgtgtttcgattccttgaggagaaagaggtgactgcacaagcccgctctgtccccatcaatggaaccactagggatgttcaggctcctattgaaccagaacgtgttgttgttagtcacgagcccgaggtagaacccgagccagttgcttctatcgaggaagaagatcttgacaatgtggcggaagtgtatgatccttctgataaagatgaaggagttgttgttgacgttgagcctattgaacctcccactcaaataagtcataatgaaatcttatcagtgcctcaaggagatgctcctaagcattcttatgcttcaatcctcaagcagatgaaaagcagtccagcaccaacaacacacgttgctagaaacaagccaagaccagctccagtcaaccagaagctgaccgcgcctcctgctgagcctgcagcaagacccgaggcttcagctcatgagaatgttccgaatagtagccatgttgatgtggaagatgatggtcattcgatttatgttcgaaatttgccgtttgactccacaccaacacaacttgaagaggtgttcaagaactttggtgcaatcaagcatgaggggattcaagtcagaagcaacaagcaaggtttctgttttggttttgtggaatttgaaacatctagcggaaagcaaagtgccctcgaggcctcaccagttacaattggagatcgtcaagctgttgtagaggagaagaaaacaaatagtcgaggaggaggcaacaatggaggtagcaggggaaggtacttttccggaagaggaagtttccgaaatgaaagcttcaaaggaggacgcggtggtgggggaagaggaggctatggaagaggaggaggtgagttttctggtagaccaaagagctcaaacccacgaaatggaggagaaggttaccaaagggttcctcaaaacggaggaggtggaagaggaggccgcggagaaggaggtcgtggtggagctcgaggtggtggttcatcttgactttgcttttaacgctcctctacaagagagtagttttaatttttgttttgcgtctttctttttgcctactacttgagttgatgtggtattggcttttttgtcggtctagtttttcaatattcttgctttttttcctctcttttttgtttttcatctttcaatctttctttggggtaatgtactcttcataaacaaacattcaatttcataaggaatccattatagagttgtgttc

SEQ ID NO: 106937 - protein, 471 aa, Arabidopsis thaliana
  peptide (1)..(471): Ceres Seq. ID no. 13620910
DLSLSFSLPQITMAQQEASPSPGAEVVGRAFVEQYYHILHQSPGLVHRFYQDSSFLTRPDVTGAVTTVTTMQAINDKILSLKYEDYTAEIETADAQESHERGVIVLVTGRLTGNDNVRKKFSQSFFLAPQDKGYFVLNDVFRFLEEKEVTAQARSVPINGTTRDVQAPIEPERVVVSHEPEVEPEPVASIEEEDLDNVAEVYDPSDKDEGVVVDVEPIEPPTQISHNEILSVPQGDAPKHSYASILKQMKSSPAPTTHVARNKPRPAPVNQKLTAPPAEPAARPEASAHENVPNSSHVDVEDDGHSIYVRNLPFDSTPTQLEEVFKNFGAIKHEGIQVRSNKQGFCFGFVEFETSSGKQSALEASPVTIGDRQAVVEEKKTNSRGGGNNGGSRGRYFSGRGSFRNESFKGGRGGGGRGGYGRGGGEFSGRPKSSNPRNGGEGYQRVPQNGGGGRGGRGEGGRGGARGGGSS

SEQ ID NO: 106938 - protein, 459 aa, Arabidopsis thaliana
  peptide (1)..(459): Ceres Seq. ID no. 13620911
MAQQEASPSPGAEVVGRAFVEQYYHILHQSPGLVHRFYQDSSFLTRPDVTGAVTTVTTMQAINDKILSLKYEDYTAEIETADAQESHERGVIVLVTGRLTGNDNVRKKFSQSFFLAPQDKGYFVLNDVFRFLEEKEVTAQARSVPINGTTRDVQAPIEPERVVVSHEPEVEPEPVASIEEEDLDNVAEVYDPSDKDEGVVVDVEPIEPPTQISHNEILSVPQGDAPKHSYASILKQMKSSPAPTTHVARNKPRPAPVNQKLTAPPAEPAARPEASAHENVPNSSHVDVEDDGHSIYVRNLPFDSTPTQLEEVFKNFGAIKHEGIQVRSNKQGFCFGFVEFETSSGKQSALEASPVTIGDRQAVVEEKKTNSRGGGNNGGSRGRYFSGRGSFRNESFKGGRGGGGRGGYGRGGGEFSGRPKSSNPRNGGEGYQRVPQNGGGGRGGRGEGGRGGARGGGSS

SEQ ID NO: 106939 - protein, 401 aa, Arabidopsis thaliana
  peptide (1)..(401): Ceres Seq. ID no. 13620912
MQAINDKILSLKYEDYTAEIETADAQESHERGVIVLVTGRLTGNDNVRKKFSQSFFLAPQDKGYFVLNDVFRFLEEKEVTAQARSVPINGTTRDVQAPIEPERVVVSHEPEVEPEPVASIEEEDLDNVAEVYDPSDKDEGVVVDVEPIEPPTQISHNEILSVPQGDAPKHSYASILKQMKSSPAPTTHVARNKPRPAPVNQKLTAPPAEPAARPEASAHENVPNSSHVDVEDDGHSIYVRNLPFDSTPTQLEEVFKNFGAIKHEGIQVRSNKQGFCFGFVEFETSSGKQSALEASPVTIGDRQAVVEEKKTNSRGGGNNGGSRGRYFSGRGSFRNESFKGGRGGGGRGGYGRGGGEFSGRPKSSNPRNGGEGYQRVPQNGGGGRGGRGEGGRGGARGGGSS

SEQ ID NO: 106940 - DNA, 2800 bp, Arabidopsis thaliana
  misc_feature (1)..(2800): Ceres Seq. ID no. 13620917
  misc_feature (1)..(2800): Ortholog of  Ceres SEQ ID NO 13654989 as cited in SEQ ID NO 63117
  misc_feature (1)..(2800): Ortholog of  Ceres SEQ ID NO 13584744 as cited in SEQ ID NO 69137
actaaaccaaaccaaacttagggttcttctttgttctctgcttcaacagaactacaggattaaacaatggaagagaaaaaagtagtaagagcgttaagcgaacacctatcactacctcctccaccatctccttctgtagcggtagccatcaacgggaagaagaagagcaaatacgtcgttttttgggctcttgagaagtttatacctgaaggtttcactgatttcaaattgctctatgttcgtcctcctgtctcttacatccctaccccaatggggattgcggtagcggtatcagagcttagagaggatgtagtatcagcttacaaacaagaactggattggagcgcaaacgagatgcttcgtccttacaagaaaatgtttgaaaggagaaaggtgcaagtagaggttttgttgctggattcacttgagcctgcagccgcgatagcggaagagattgctggaactggagtcacaaaactggtaataggaatgtctctccgcggattcttttcaagaaagatcgatatgtcttctttgatcgcaacagctgttccgagattctgcactgtctatgtgatctcgaaggggaaactagcttccgtgcgtccttctgagtcagacgctagcggaagcataagattcgagagaagcagttccacaagtggctccactgatagtcctagactccctcctgagtaccaagactttctctccgctgtttcggaagcacaatcccgagtctctcctttttctcctgctctgaaacattcgatgggaagcaacgcagtggctcagatggatacgagttcgagcgggacggaccaagaggaagtatctacggggagagggatggagattgtccatagcggtattgaaggaaagaagaataaggatgagagctttagcgcttcgttcccaatgggtacagaggcttacaactcgatgagctggacgtctaaatggagagatcacgaggataggagagagatgaggagctcttcttcgagtaacaaccacgatctagtcaatatggactggggtgccgtggttcctgagaactattcttgggtttctcatactgcctctcacatgtctgatggactcctcagtgtccattctattaccgataatcaggtgaatctgaactttgagatagagaaactgagagcggagctgaagcatgttcaggagatgtatgccatggctcaaaccgagactgttggtgcttcaaaaaagctgactgagctaaaccagaggcggttcgaggaatccgagaagcttgtggaactgaaggaaaaagaagaagtagcaaaagatacagcttcaaaggagaagcaaaggtacgaagaggcgatgaaggaagcagagaaggttaaagaactcatgatgaaagaggctttacatagaagagaagctgagttcaaagcagagcgcgatgctagagagaaagataagctccaggcttctctcgtctctcccggggtccaataccaacattatacctgggaggaaatcgcagccgcaacttctgacttcgcagaaaatctcaagattggaatcggagcctatggatcagtctacaaatgtaatctacatcacacgaccggtgctgtcaaggtccttcacgctggagaaactcagctctcgaaacagtttgatcaagagcttgagatcttaagcaaaattcgacatcctcacttagtcctcctactaggggcgtgtcccgaacgcggctgccttgtctacgagtacatggacaacggaagcttagatgaccggttgatgctagtcaacgacacaccaccgatcccttggtttgagcgtttcaggatcgctttagaagtcgcttcagcgcttgtattcctccacaaatccaagcctagaccaatcattcaccgtgacctcaaaccaggaaacatcttgcttgaccacaacttcgtcagcaaactcggcgatgttggtctctcaacaatggttaaccaagacgatgtttcatctagaactatcttcaagcaaaccagtcccgtgggcacgctctgttacattgaccctgagtatcagcgaaccgggattatctcacctaaatcggatgtgtactccctcggagttgtgattctgcagctaataaccgcgaaacccgccatagcgattactcatatggtggaagaagctatcggagacgatgctgaatttatggcaatcttggataagaaagctgggtcttggcccatcagtgatactcgtgagttagccgctttgggactgtgttgtacagaaatgagacgcagagacagaccggatcttaaagatcaaatcatcccggctttggaacggctcaggaaagtcgccgacaaagctcaaaacttgctttcgagaactccgtctggtcctccatctcatttcatttgcccacttttgaagggagtaatgaacgagccgtgcgtggctgcggatgggtacacgtacgatcgggaagctatagaggaatggctgagacagaaagatacatcaccggtgacgaatcttccattgcctaacaagaaccttattgctaattacactctttactcagcaatcatggagtggaaatctaataaacggtagagagaaacagattccagaaaaattacaatcggttctatcaatgtgtttactctaatatgttttttttttgtgtgtttttctctgttccgaggattcctcatttgtctgatgacatgcacaattacaacaatatatatagagagaaatgtctttcgatataagtttattttgtttctattggtaaaaatgtaacttt

SEQ ID NO: 106941 - protein, 845 aa, Arabidopsis thaliana
  peptide (1)..(845): Ceres Seq. ID no. 13620918
MEEKKVVRALSEHLSLPPPPSPSVAVAINGKKKSKYVVFWALEKFIPEGFTDFKLLYVRPPVSYIPTPMGIAVAVSELREDVVSAYKQELDWSANEMLRPYKKMFERRKVQVEVLLLDSLEPAAAIAEEIAGTGVTKLVIGMSLRGFFSRKIDMSSLIATAVPRFCTVYVISKGKLASVRPSESDASGSIRFERSSSTSGSTDSPRLPPEYQDFLSAVSEAQSRVSPFSPALKHSMGSNAVAQMDTSSSGTDQEEVSTGRGMEIVHSGIEGKKNKDESFSASFPMGTEAYNSMSWTSKWRDHEDRREMRSSSSSNNHDLVNMDWGAVVPENYSWVSHTASHMSDGLLSVHSITDNQVNLNFEIEKLRAELKHVQEMYAMAQTETVGASKKLTELNQRRFEESEKLVELKEKEEVAKDTASKEKQRYEEAMKEAEKVKELMMKEALHRREAEFKAERDAREKDKLQASLVSPGVQYQHYTWEEIAAATSDFAENLKIGIGAYGSVYKCNLHHTTGAVKVLHAGETQLSKQFDQELEILSKIRHPHLVLLLGACPERGCLVYEYMDNGSLDDRLMLVNDTPPIPWFERFRIALEVASALVFLHKSKPRPIIHRDLKPGNILLDHNFVSKLGDVGLSTMVNQDDVSSRTIFKQTSPVGTLCYIDPEYQRTGIISPKSDVYSLGVVILQLITAKPAIAITHMVEEAIGDDAEFMAILDKKAGSWPISDTRELAALGLCCTEMRRRDRPDLKDQIIPALERLRKVADKAQNLLSRTPSGPPSHFICPLLKGVMNEPCVAADGYTYDREAIEEWLRQKDTSPVTNLPLPNKNLIANYTLYSAIMEWKSNKR

SEQ ID NO: 106942 - protein, 777 aa, Arabidopsis thaliana
  peptide (1)..(777): Ceres Seq. ID no. 13620919
MGIAVAVSELREDVVSAYKQELDWSANEMLRPYKKMFERRKVQVEVLLLDSLEPAAAIAEEIAGTGVTKLVIGMSLRGFFSRKIDMSSLIATAVPRFCTVYVISKGKLASVRPSESDASGSIRFERSSSTSGSTDSPRLPPEYQDFLSAVSEAQSRVSPFSPALKHSMGSNAVAQMDTSSSGTDQEEVSTGRGMEIVHSGIEGKKNKDESFSASFPMGTEAYNSMSWTSKWRDHEDRREMRSSSSSNNHDLVNMDWGAVVPENYSWVSHTASHMSDGLLSVHSITDNQVNLNFEIEKLRAELKHVQEMYAMAQTETVGASKKLTELNQRRFEESEKLVELKEKEEVAKDTASKEKQRYEEAMKEAEKVKELMMKEALHRREAEFKAERDAREKDKLQASLVSPGVQYQHYTWEEIAAATSDFAENLKIGIGAYGSVYKCNLHHTTGAVKVLHAGETQLSKQFDQELEILSKIRHPHLVLLLGACPERGCLVYEYMDNGSLDDRLMLVNDTPPIPWFERFRIALEVASALVFLHKSKPRPIIHRDLKPGNILLDHNFVSKLGDVGLSTMVNQDDVSSRTIFKQTSPVGTLCYIDPEYQRTGIISPKSDVYSLGVVILQLITAKPAIAITHMVEEAIGDDAEFMAILDKKAGSWPISDTRELAALGLCCTEMRRRDRPDLKDQIIPALERLRKVADKAQNLLSRTPSGPPSHFICPLLKGVMNEPCVAADGYTYDREAIEEWLRQKDTSPVTNLPLPNKNLIANYTLYSAIMEWKSNKR

SEQ ID NO: 106943 - protein, 749 aa, Arabidopsis thaliana
  peptide (1)..(749): Ceres Seq. ID no. 13620920
MLRPYKKMFERRKVQVEVLLLDSLEPAAAIAEEIAGTGVTKLVIGMSLRGFFSRKIDMSSLIATAVPRFCTVYVISKGKLASVRPSESDASGSIRFERSSSTSGSTDSPRLPPEYQDFLSAVSEAQSRVSPFSPALKHSMGSNAVAQMDTSSSGTDQEEVSTGRGMEIVHSGIEGKKNKDESFSASFPMGTEAYNSMSWTSKWRDHEDRREMRSSSSSNNHDLVNMDWGAVVPENYSWVSHTASHMSDGLLSVHSITDNQVNLNFEIEKLRAELKHVQEMYAMAQTETVGASKKLTELNQRRFEESEKLVELKEKEEVAKDTASKEKQRYEEAMKEAEKVKELMMKEALHRREAEFKAERDAREKDKLQASLVSPGVQYQHYTWEEIAAATSDFAENLKIGIGAYGSVYKCNLHHTTGAVKVLHAGETQLSKQFDQELEILSKIRHPHLVLLLGACPERGCLVYEYMDNGSLDDRLMLVNDTPPIPWFERFRIALEVASALVFLHKSKPRPIIHRDLKPGNILLDHNFVSKLGDVGLSTMVNQDDVSSRTIFKQTSPVGTLCYIDPEYQRTGIISPKSDVYSLGVVILQLITAKPAIAITHMVEEAIGDDAEFMAILDKKAGSWPISDTRELAALGLCCTEMRRRDRPDLKDQIIPALERLRKVADKAQNLLSRTPSGPPSHFICPLLKGVMNEPCVAADGYTYDREAIEEWLRQKDTSPVTNLPLPNKNLIANYTLYSAIMEWKSNKR

SEQ ID NO: 106944 - DNA, 1945 bp, Arabidopsis thaliana
  misc_feature (1)..(1945): Ceres Seq. ID no. 13620921
  misc_feature (1)..(1945): Ortholog of  Ceres SEQ ID NO 15171438 as cited in SEQ ID NO 51665
  misc_feature (1)..(1945): Ortholog of  Ceres SEQ ID NO 15170804 as cited in SEQ ID NO 52653
  misc_feature (1)..(1945): Ortholog of  Ceres SEQ ID NO 15170203 as cited in SEQ ID NO 53291
atacatttcaatatttcttaccaaatacataaatttttctctccaaatcccaagaaataaaatttcgaatttcttccctcaaaaaaatctccacacgtcaaggaaattaaaaccccataaattccttgccaataaaaccttccaactactcaagttaattttctgtagtgtataatcttgaaaatatggtaatagctacagaaaccaccagtagtagtcatcaccggagactcactttcgcctccttcttaaactccgatcccgccgctgacgaagaagaacagagtcatggtgttgatgatatcatcaatcccagtagtagcaacaaaaacatcaacaaggatgtccatcataattaccgacaaagtcaaagcaatgcttcgacaactagcggtgagtcgtctcctaatcaagttctatcgccatggaaccaaacctactctccgtactacaccgacacaacaaacactccatcgatgtctccctcaccgtggaaccaaacttactctccgtactacaagtctccttggatctaccagacccgaaacattgatgatgataccgacaacggtttgatcggtacaatcgtgagacaagacggtcatgtctactcgttggctgcttctggagatcttttattcactggatccgattccaagaacattcgtgtttggaaagatctcaaggatcacacaggctttaaatcaaccagtggattagttaaagcgattgtgataaccggagataaccggattttcaccggtcatcaagacggtaaaattcgggtctggagaggttctaaaagaagaaccggaggttattcacgaatcggaagcttgccgacgttgaaagagtttttgacgaaatcagtgaatccaaagaactacgtcgaggttcgtcgtcggaaaaatgttctcaagattcgtcattacgacgccgtttcgtgtcttagcttgaacgaagagctcggtttactctactccggttcgtgggacaagactctcaaagtttggagattatctgattcaaaatgtcttgaatcgattcaagctcacgacgacgcgatcaacacggtggctgctggtttcgacgatttgctattcaccggatccgccgacggaactttgaaagtgtggaaacgtgagcttcaaggcaaagggacgaagcattttcttgttaatgtgttgatgaagcaagagaacgctgtaacggcgttagcggttaatataacggcggctgttgtttactgtggttcttctgacggtaccgttaatttctgggaaggacagaagtatctctctcacggtggaactctccgcggccatcgtttggcggtgctctgccttgccgccgccggaagtctggttttaagcggcggagcggataagaacatttgcgtgtggaggagaaacggtgatggtagccactcgtgtctctcggtattgatggaccacgtgggacctgtcaagtgtttgacggcggtggaagatgacggcgaaggccacagagagaaaggagatcagaaatggatagtgtacagtgggagcttggacaaatcggttaaagtgtggcgcgtgacggagtcggcgtctacggttattggctgagatatgcttgaggagaagtgtacacgcgccgccgccgccttaagcgcgtggtgaatggtgatgcggactatgaaacagaagaatgttccgcggcccatgtgatccctgccgttgttgtcaaggcaagtttttatggccggctaaaagaagcatttcatacaaccaatagggaactgccatgtcgtgaaagtatctaactgatttagaaagttcttctagtttattcgatcttctttgtaaagagtaactgcacatatttgagttacgttttagacaatattgtttcattgtattaaatcattttatttatatcttattttatggaattttaatactct

SEQ ID NO: 106945 - protein, 473 aa, Arabidopsis thaliana
  peptide (1)..(473): Ceres Seq. ID no. 13620922
MVIATETTSSSHHRRLTFASFLNSDPAADEEEQSHGVDDIINPSSSNKNINKDVHHNYRQSQSNASTTSGESSPNQVLSPWNQTYSPYYTDTTNTPSMSPSPWNQTYSPYYKSPWIYQTRNIDDDTDNGLIGTIVRQDGHVYSLAASGDLLFTGSDSKNIRVWKDLKDHTGFKSTSGLVKAIVITGDNRIFTGHQDGKIRVWRGSKRRTGGYSRIGSLPTLKEFLTKSVNPKNYVEVRRRKNVLKIRHYDAVSCLSLNEELGLLYSGSWDKTLKVWRLSDSKCLESIQAHDDAINTVAAGFDDLLFTGSADGTLKVWKRELQGKGTKHFLVNVLMKQENAVTALAVNITAAVVYCGSSDGTVNFWEGQKYLSHGGTLRGHRLAVLCLAAAGSLVLSGGADKNICVWRRNGDGSHSCLSVLMDHVGPVKCLTAVEDDGEGHREKGDQKWIVYSGSLDKSVKVWRVTESASTVIG

SEQ ID NO: 106946 - protein, 376 aa, Arabidopsis thaliana
  peptide (1)..(376): Ceres Seq. ID no. 13620923
MSPSPWNQTYSPYYKSPWIYQTRNIDDDTDNGLIGTIVRQDGHVYSLAASGDLLFTGSDSKNIRVWKDLKDHTGFKSTSGLVKAIVITGDNRIFTGHQDGKIRVWRGSKRRTGGYSRIGSLPTLKEFLTKSVNPKNYVEVRRRKNVLKIRHYDAVSCLSLNEELGLLYSGSWDKTLKVWRLSDSKCLESIQAHDDAINTVAAGFDDLLFTGSADGTLKVWKRELQGKGTKHFLVNVLMKQENAVTALAVNITAAVVYCGSSDGTVNFWEGQKYLSHGGTLRGHRLAVLCLAAAGSLVLSGGADKNICVWRRNGDGSHSCLSVLMDHVGPVKCLTAVEDDGEGHREKGDQKWIVYSGSLDKSVKVWRVTESASTVIG

SEQ ID NO: 106947 - DNA, 1173 bp, Arabidopsis thaliana
  misc_feature (1)..(1173): Ceres Seq. ID no. 13620934
  misc_feature (1)..(1173): Ortholog of  Ceres SEQ ID NO 13502952 as cited in SEQ ID NO 62271
  misc_feature (1)..(1173): Ortholog of  Ceres SEQ ID NO 13502973 as cited in SEQ ID NO 68052
  misc_feature (1)..(1173): Ortholog of  Ceres SEQ ID NO 13596000 as cited in SEQ ID NO 68188
aactgtttgcagaaatctcactgaaactagagagaaaaccaaatggcggctactccaatcagagttatagtctcagctcttgtgatcctctcggtattactactttcctcgtctctgggagtcgccacagagacagaaattgagcggaacgagacagaggtgcggctgatgtacgagcaatggcttgtggagaatcgaaagaactataatggtcttggagagaaagagagacgattcaagatcttcaaagacaacttgaagtttgtcgatgaacacaattctgttccggatcggacttttgaagtagggttgaccaggttcgctgatctaacaaatgaagagtttagagcgatttatttaaggaagaagatggaaagaactaaagattcggtgaaaactgagagatatttgtacaaagaaggagatgttttgcctgatgaagtagattggagagcgaatggcgcagttgtttcagtcaaagatcaaggaaactgtggaagttgttgggcgttttctgcggttggagcagtggaagggatcaaccagatcactaccggagagttgatatctttgtcggagcaagaactcgttgactgtgacagaggttttgtcaacgctggatgtgatggaggtatcatgaactatgcttttgagttcattatgaaaaatggtggtattgagacagatcaagattacccttataacgccaacgatcttggcttgtgcaatgcagataagaacaatactcgtgttgttacaattgatggttatgaagatgttcctagagacgatgagaagtctttgaaaaaggctgttgctcatcaacctgttagtgttgctattgaagctagtagccaagctttccagctttacaaatccggtgtgatgacaggaacatgtggaatatctttggaccatggtgtagtagtggttggatatggatccacaagtggtgaagattattggatcattcgcaattcatgggggttgaattggggagatagcggttacgttaagctccaacgtaacatcgatgatccatttgggaaatgtggtatagcaatgatgccttcttacccgaccaaatcatcattcccatcgtcatttgatttgttgtctgagatttgatttgatcttcctgtaaatgattaataactaaatattttttattac

SEQ ID NO: 106948 - protein, 361 aa, Arabidopsis thaliana
  peptide (1)..(361): Ceres Seq. ID no. 13620935
MAATPIRVIVSALVILSVLLLSSSLGVATETEIERNETEVRLMYEQWLVENRKNYNGLGEKERRFKIFKDNLKFVDEHNSVPDRTFEVGLTRFADLTNEEFRAIYLRKKMERTKDSVKTERYLYKEGDVLPDEVDWRANGAVVSVKDQGNCGSCWAFSAVGAVEGINQITTGELISLSEQELVDCDRGFVNAGCDGGIMNYAFEFIMKNGGIETDQDYPYNANDLGLCNADKNNTRVVTIDGYEDVPRDDEKSLKKAVAHQPVSVAIEASSQAFQLYKSGVMTGTCGISLDHGVVVVGYGSTSGEDYWIIRNSWGLNWGDSGYVKLQRNIDDPFGKCGIAMMPSYPTKSSFPSSFDLLSEI

SEQ ID NO: 106949 - protein, 319 aa, Arabidopsis thaliana
  peptide (1)..(319): Ceres Seq. ID no. 13620936
MYEQWLVENRKNYNGLGEKERRFKIFKDNLKFVDEHNSVPDRTFEVGLTRFADLTNEEFRAIYLRKKMERTKDSVKTERYLYKEGDVLPDEVDWRANGAVVSVKDQGNCGSCWAFSAVGAVEGINQITTGELISLSEQELVDCDRGFVNAGCDGGIMNYAFEFIMKNGGIETDQDYPYNANDLGLCNADKNNTRVVTIDGYEDVPRDDEKSLKKAVAHQPVSVAIEASSQAFQLYKSGVMTGTCGISLDHGVVVVGYGSTSGEDYWIIRNSWGLNWGDSGYVKLQRNIDDPFGKCGIAMMPSYPTKSSFPSSFDLLSEI

SEQ ID NO: 106950 - protein, 252 aa, Arabidopsis thaliana
  peptide (1)..(252): Ceres Seq. ID no. 13620937
MERTKDSVKTERYLYKEGDVLPDEVDWRANGAVVSVKDQGNCGSCWAFSAVGAVEGINQITTGELISLSEQELVDCDRGFVNAGCDGGIMNYAFEFIMKNGGIETDQDYPYNANDLGLCNADKNNTRVVTIDGYEDVPRDDEKSLKKAVAHQPVSVAIEASSQAFQLYKSGVMTGTCGISLDHGVVVVGYGSTSGEDYWIIRNSWGLNWGDSGYVKLQRNIDDPFGKCGIAMMPSYPTKSSFPSSFDLLSEI

SEQ ID NO: 106951 - DNA, 1838 bp, Arabidopsis thaliana
  misc_feature (1)..(1838): Ceres Seq. ID no. 13620943
  misc_feature (1)..(1838): Ortholog of  Ceres SEQ ID NO 13502874 as cited in SEQ ID NO 66298
  misc_feature (1)..(1838): Ortholog of  Ceres SEQ ID NO 12614124 as cited in SEQ ID NO 68392
gtagttatactttctattaatggactgttgattatgtttcatctgcctcttcacttaaagaaacaatggtagtcatacttcacatacgttatacagtatactctgagatgtgttaatactctgttttatcttaccttttacactttgagcaacaattgcagcaatgttgaccgttgactctcaacactgtttcagtttcatactcctctgcttcttctcactcctctgttactctctcttgttcaagaaactaaaggactcacatgttggccgtgatttgcttcagagccctccatctcttccgatcataggccatcttcatcatctcctctcttctctagcacacaaatctttgcagcaactctcatccaagtatggacctctcctacatctcagcatcttcaacttccctgtagtcctcgtctcctcggcctctgtggcttacgagatcttcaaggctcatgacttgaacatctcgtctcgcgacaatcctccaatcaatgagtccctcttggtcggttcttctgtgttcgtcggcgccccctatggagattattggaagttcatgaagaagctcttggttacaaagctgctgggaccacaggcactcgagcggtcaagaagcatccgtgcagatgagctagagcggttttacagaagcttgctcgataaggcgatgaagaaggagagtgttgagattggtaaggaagcaacgaagctaagtatcaacagcatatgcaggatgagcatggggaggagtttttcagaagagagtggtgaggctgagagagttagaggtttggttaccgagttagatggcttgacgaagaaggttttgttggtaaacatattgcgctggccgcttgagaagctcagaatctctctgttcaaaaaagagataatgtatgtttcgaacagctttgatgagctgctggagaggattattgtggaacgtgaaaagaaaccgaatgaacatcagggtacatacttgatggacgtgttgttggaagcttatgaagacgaaaaagcagagcataagatcactaggaaccatatcaagtcgttgttcgtggagcttttacttggaggcactgatacctcggcgcaaacaatacagtggacaatggccgagctcatcaacaaccgtaacgttcttaagagattgagagaagaaattgattcggttgtaggagaaacaaggttgattcaagaaaaggatctaccaaagctaccttatttacaatctgtagtcaaagaagggctaagattgcacccgccattgcctctcatggtaaggacgttccaaagaagttgtgagatgaaagggttctacatagcggaaaagacaacacttgtagttaatgcttatgctgtgatgagagatcctactacttgggaagatcctgatgagtttaagccagagaggtttctaaggcaagaggaggagagaagagcactgaagcacattgcttttggaagtggaaggagaggctgtccaggatcaaacctagctactattttcataggaactgcaattggaacaatggtgcagtgttttgacttgagcatcaaaggagacaaggtcaaaatggatgaggttggaggactcaacttgaccatggctcatccccttgagtgcattcttgttcctcgaacccaacctttcatttctaaccagcagattccaagtttgtaatttccatgaatcctaattattgtttttattattgtaattccaacctttcatgaccaaacggttcaagtttggtttttattttattttcacggtttacaatacgaaaccgtaattattgtggtctactgttggatttgtcctg

SEQ ID NO: 106952 - protein, 510 aa, Arabidopsis thaliana
  peptide (1)..(510): Ceres Seq. ID no. 13620944
MLTVDSQHCFSFILLCFFSLLCYSLLFKKLKDSHVGRDLLQSPPSLPIIGHLHHLLSSLAHKSLQQLSSKYGPLLHLSIFNFPVVLVSSASVAYEIFKAHDLNISSRDNPPINESLLVGSSVFVGAPYGDYWKFMKKLLVTKLLGPQALERSRSIRADELERFYRSLLDKAMKKESVEIGKEATKLSINSICRMSMGRSFSEESGEAERVRGLVTELDGLTKKVLLVNILRWPLEKLRISLFKKEIMYVSNSFDELLERIIVEREKKPNEHQGTYLMDVLLEAYEDEKAEHKITRNHIKSLFVELLLGGTDTSAQTIQWTMAELINNRNVLKRLREEIDSVVGETRLIQEKDLPKLPYLQSVVKEGLRLHPPLPLMVRTFQRSCEMKGFYIAEKTTLVVNAYAVMRDPTTWEDPDEFKPERFLRQEEERRALKHIAFGSGRRGCPGSNLATIFIGTAIGTMVQCFDLSIKGDKVKMDEVGGLNLTMAHPLECILVPRTQPFISNQQIPSL

SEQ ID NO: 106953 - protein, 376 aa, Arabidopsis thaliana
  peptide (1)..(376): Ceres Seq. ID no. 13620945
MKKLLVTKLLGPQALERSRSIRADELERFYRSLLDKAMKKESVEIGKEATKLSINSICRMSMGRSFSEESGEAERVRGLVTELDGLTKKVLLVNILRWPLEKLRISLFKKEIMYVSNSFDELLERIIVEREKKPNEHQGTYLMDVLLEAYEDEKAEHKITRNHIKSLFVELLLGGTDTSAQTIQWTMAELINNRNVLKRLREEIDSVVGETRLIQEKDLPKLPYLQSVVKEGLRLHPPLPLMVRTFQRSCEMKGFYIAEKTTLVVNAYAVMRDPTTWEDPDEFKPERFLRQEEERRALKHIAFGSGRRGCPGSNLATIFIGTAIGTMVQCFDLSIKGDKVKMDEVGGLNLTMAHPLECILVPRTQPFISNQQIPSL

SEQ ID NO: 106954 - protein, 339 aa, Arabidopsis thaliana
  peptide (1)..(339): Ceres Seq. ID no. 13620946
MKKESVEIGKEATKLSINSICRMSMGRSFSEESGEAERVRGLVTELDGLTKKVLLVNILRWPLEKLRISLFKKEIMYVSNSFDELLERIIVEREKKPNEHQGTYLMDVLLEAYEDEKAEHKITRNHIKSLFVELLLGGTDTSAQTIQWTMAELINNRNVLKRLREEIDSVVGETRLIQEKDLPKLPYLQSVVKEGLRLHPPLPLMVRTFQRSCEMKGFYIAEKTTLVVNAYAVMRDPTTWEDPDEFKPERFLRQEEERRALKHIAFGSGRRGCPGSNLATIFIGTAIGTMVQCFDLSIKGDKVKMDEVGGLNLTMAHPLECILVPRTQPFISNQQIPSL

SEQ ID NO: 106955 - DNA, 969 bp, Arabidopsis thaliana
  misc_feature (1)..(969): Ceres Seq. ID no. 13620947
  misc_feature (1)..(969): Ortholog of  Ceres SEQ ID NO 12608801 as cited in SEQ ID NO 50884
  misc_feature (1)..(969): Ortholog of  Ceres SEQ ID NO 12635796 as cited in SEQ ID NO 0
acgagaatcatctgcttaaaatccaatcgcatcgactcagtcttcttcttcttcttcacctacctttctctctctctctcgtggtccattcgctattctatacttcttgtcggcgccggagagagtgagatgacttggtcggttttcagatccataaatactccaacactcgacctctccaccgcacttcgctccactcgtaccccattggtcgctgctggtgtcggctgcgcaacattcgctggtgtttctctcttcagaatgtcttctagatctcctcctttcgcttccctctctgtctctgcttcttctgtgaagaaggaagttgtgtctactgagaaagcaccagctgctttgggaccttactctcaggccattaaagccaataatctggtttttctttcaggtgttcttggacttatacctgagactggaaagtttgtttcggagagcgtcgaagatcagactgagcaggtactcaaaaacatgggggagatattgaaagctagtggtgctgattattcctcggtggtgaagacaacaatcatgttggctgatttggctgacttcaagacagtgaacgagatatatgccaaatacttcccagctccttctccagcacgatcgacgtatcaagttgcagctttgcctctaaacgccaagatcgagattgaatgtattgcaacactctagaacactcaaatcaatctctacgaagggtattttggtccggaagatgtcaaaacaaataagagaaacaatggtttttggggcttaacccatatttaacctacttttcattttgctgcactacgaaaaatgttgcggattatcaaccattaggttggttacaaatcaaaagcctctaatcaagaataagttatttagtgtcttgtccaccctcatttgctgttgacgtatatgtattgattgtatacattattttatttgagtgaaaaccattatgct

SEQ ID NO: 106956 - protein, 230 aa, Arabidopsis thaliana; identical to SEQ ID NO: 34771
  peptide (1)..(230): Ceres Seq. ID no. 13620948

SEQ ID NO: 106957 - protein, 187 aa, Arabidopsis thaliana; identical to SEQ ID NO: 34772
  peptide (1)..(187): Ceres Seq. ID no. 13620949

SEQ ID NO: 106958 - protein, 143 aa, Arabidopsis thaliana; identical to SEQ ID NO: 34773
  peptide (1)..(143): Ceres Seq. ID no. 13620950

SEQ ID NO: 106959 - DNA, 1700 bp, Arabidopsis thaliana
  misc_feature (1)..(1700): Ceres Seq. ID no. 13620963
  misc_feature (1)..(1700): Ortholog of  Ceres SEQ ID NO 15172274 as cited in SEQ ID NO 59703
atgtaaccacaatctgagaagacacaacaaattaagatccaacatcaatacacacacacatatatatatatatatatatatagtgagaaaaaaagaagctatgggagatcatcatgatttcatcaactcaggaagctggtggaaagtatcttcttcttcttcaccatcttcttcttcttccatgagagcaagctctattgaatctggtggttctgctgttttccatgataagcttcatcatcattctttagctactgatcaccatcttcagatgattggtttaggactttcttcacaatcacctgttgatcaatggaaccaatctctcttacgaggagatagtaaagcggagacaagctttggtgtgatgcttcaagagaatctcaatttagatgccacttcaaacgcaaacgctaacacaacgtcatccacatcttcttaccagctgcaagaatctgattcctctcaccatcatcaagctttgtggcgagatccacaaagcgatttcaaaccgcagattttaacgagtggtggtaatcgcgggtttttcttagatcatcagttcagtcctcatggtagctcaagtaccgacagtagcacagtaacatgtcaaggtttcgctgttgacaactcgtcaaacgccatgtacgcagcaacaacaacaactcctaattcatcttccggtatgtttcatcatcagcaagcaggtggttttggctcttctgatcaacaaccgtcgaggaatcatcaacagtcatctcttggctattctcagtttggatcatccaccggaaactatgatcaaatggcgtcagcgttaccatcgacttggtttttaagatcttctccgccgccaaaaccacacagtcctttgagattctctaataacgcaacgttttggaaccccgcggctgcgggaaacgccggtgctcctcctcctcatgacgcgtcttctaactttttcccggcgttacaaccgccgcagattcatccgcagagttttgacgaacaaccaaagaatatatcggagattagagattcaagtagcaacgaagtaaagagaggaggaaacgatcatcagccggcggcgaaaagagctaagagcgaagcagcgtctccgtcaccagctttcaagaggaaagagaaaatgggggacagaatcgctgcgctccaacaattggtttcacctttcggaaagactgatgcagcctcagtgctctctgaagccattgaatacattaagttcttacaccaacaagtttctgctctgagcaacccatacatgaaaagtggagcttctttacaacatcaacagagtgatcattccacagagctagaagtatcagaagaaccagatcttagaagtcgaggtttatgcttagtgccagtttcaagcacatttccagtgacacacgatactacagtagatttctggactcctacatttggtgggacttttagatagatatatagacggaaaatcgtatattagatgtcgggtaacgtacgtatcttttttaacttataatatatacgttgattgctgataagaatcaccgcatttttaaacgaagaggagataagttaatggacaagtgaaacgtgttgtccatttatacttcttattcatagaactaaaaaataatgtgtaattgaagaaccatgcatagatatataagagctattgagatttgacatgt

SEQ ID NO: 106960 - protein, 487 aa, Arabidopsis thaliana
  peptide (1)..(487): Ceres Seq. ID no. 13620964
CNHNLRRHNKLRSNINTHTHIYIYIYIVRKKEAMGDHHDFINSGSWWKVSSSSSPSSSSSMRASSIESGGSAVFHDKLHHHSLATDHHLQMIGLGLSSQSPVDQWNQSLLRGDSKAETSFGVMLQENLNLDATSNANANTTSSTSSYQLQESDSSHHHQALWRDPQSDFKPQILTSGGNRGFFLDHQFSPHGSSSTDSSTVTCQGFAVDNSSNAMYAATTTTPNSSSGMFHHQQAGGFGSSDQQPSRNHQQSSLGYSQFGSSTGNYDQMASALPSTWFLRSSPPPKPHSPLRFSNNATFWNPAAAGNAGAPPPHDASSNFFPALQPPQIHPQSFDEQPKNISEIRDSSSNEVKRGGNDHQPAAKRAKSEAASPSPAFKRKEKMGDRIAALQQLVSPFGKTDAASVLSEAIEYIKFLHQQVSALSNPYMKSGASLQHQQSDHSTELEVSEEPDLRSRGLCLVPVSSTFPVTHDTTVDFWTPTFGGTFR

SEQ ID NO: 106961 - protein, 454 aa, Arabidopsis thaliana
  peptide (1)..(454): Ceres Seq. ID no. 13620965
MGDHHDFINSGSWWKVSSSSSPSSSSSMRASSIESGGSAVFHDKLHHHSLATDHHLQMIGLGLSSQSPVDQWNQSLLRGDSKAETSFGVMLQENLNLDATSNANANTTSSTSSYQLQESDSSHHHQALWRDPQSDFKPQILTSGGNRGFFLDHQFSPHGSSSTDSSTVTCQGFAVDNSSNAMYAATTTTPNSSSGMFHHQQAGGFGSSDQQPSRNHQQSSLGYSQFGSSTGNYDQMASALPSTWFLRSSPPPKPHSPLRFSNNATFWNPAAAGNAGAPPPHDASSNFFPALQPPQIHPQSFDEQPKNISEIRDSSSNEVKRGGNDHQPAAKRAKSEAASPSPAFKRKEKMGDRIAALQQLVSPFGKTDAASVLSEAIEYIKFLHQQVSALSNPYMKSGASLQHQQSDHSTELEVSEEPDLRSRGLCLVPVSSTFPVTHDTTVDFWTPTFGGTFR

SEQ ID NO: 106962 - protein, 427 aa, Arabidopsis thaliana
  peptide (1)..(427): Ceres Seq. ID no. 13620966
MRASSIESGGSAVFHDKLHHHSLATDHHLQMIGLGLSSQSPVDQWNQSLLRGDSKAETSFGVMLQENLNLDATSNANANTTSSTSSYQLQESDSSHHHQALWRDPQSDFKPQILTSGGNRGFFLDHQFSPHGSSSTDSSTVTCQGFAVDNSSNAMYAATTTTPNSSSGMFHHQQAGGFGSSDQQPSRNHQQSSLGYSQFGSSTGNYDQMASALPSTWFLRSSPPPKPHSPLRFSNNATFWNPAAAGNAGAPPPHDASSNFFPALQPPQIHPQSFDEQPKNISEIRDSSSNEVKRGGNDHQPAAKRAKSEAASPSPAFKRKEKMGDRIAALQQLVSPFGKTDAASVLSEAIEYIKFLHQQVSALSNPYMKSGASLQHQQSDHSTELEVSEEPDLRSRGLCLVPVSSTFPVTHDTTVDFWTPTFGGTFR

SEQ ID NO: 106963 - DNA, 911 bp, Arabidopsis thaliana
  misc_feature (1)..(911): Ceres Seq. ID no. 13620967
  misc_feature (1)..(911): Ortholog of  Ceres SEQ ID NO 14306110 as cited in SEQ ID NO 1363
gttatataatgacaccataaccatttcttctcttcacaatctttacaagaatatctctcttctacagtaaacaaaaaatggcaatgaatggtttgtccaagatggctgtagccgccgcaactgctcttctcctagttctgaccattgtcccgggcgcagtagctgtgacttacactattgaatggaccactggtgtggactactcaggttgggctaccggaaagactttcagggttggtgacattctagagttcaagtatggttcttcccacacggtggatgtggttgacaaagccggatatgatggctgcgacgcctcctcctcgactgagaaccattccgatggagacaccaaaatcgatcttaagactgtaggaataaactatttcatctgttctacacctggtcactgcagaaccaatggcggcatgaagctagccgttaatgtcgtagccggttctgccggacctccggccactcccacgccaccttcttcaactccgggaactcctaccacaccggaatcacctccgtctggcggatcacccacacccaccacacccacacctggtgcaggttcaacttctcctcctcctccaccaaaggcaagtggtgcgtctaagggagtgatgagttacgttttggtgggagtctcgatggttttgggttatggtttgtggatgtaattggtttagagagccagggtggagtcagtgcttttgcctttttaaattattttggtttttggttgtaagagaatttgggtttgtgtgccacgtcagaagctcttcattattcgtaggatttttattatctcggcatttgattatcgttatcatcatcatcatcacattcacttattctcttgttgtaataaattatactattaattttcattttcgttcatgtgg

SEQ ID NO: 106964 - protein, 202 aa, Arabidopsis thaliana; identical to SEQ ID NO: 30996
  peptide (1)..(202): Ceres Seq. ID no. 13620968

SEQ ID NO: 106965 - protein, 200 aa, Arabidopsis thaliana; identical to SEQ ID NO: 30997
  peptide (1)..(200): Ceres Seq. ID no. 13620969

SEQ ID NO: 106966 - protein, 194 aa, Arabidopsis thaliana; identical to SEQ ID NO: 30998
  peptide (1)..(194): Ceres Seq. ID no. 13620970

SEQ ID NO: 106967 - DNA, 766 bp, Arabidopsis thaliana
  misc_feature (1)..(766): Ceres Seq. ID no. 13621000
  misc_feature (1)..(766): Ortholog of  Ceres SEQ ID NO 13595613 as cited in SEQ ID NO 59866
agacaaagtaaggaggccagacagcagacccgtctctctccgtctccatctccgccatgaccagctcttccgctccttcacgcaaggctttaagcaagatcgcgtgtaataggttgcagaaagagctttctgagtggcaattgaatccccccactggatttcgtcacaaagtcactgataatcttcaaaaatggacaatagatgttaccggagctccagggacactttacgctaatgagacttatcagcttcaggttgaatttcctgaacattaccctatggaagcaccccaggtagtgtttgtttctccggcaccttcacatccacatatatacagcaatggacatatttgtttagatattctatatgactcatggtcaccagcaatgacagtgaattcagtctgcatcagcattctttcgatgctatcaagttcacccgcaaagcaacgccctgcggataacgatcgttatgtgaagaactgtaagaatgggaggtctcctaaggagacgaggtggtggttccatgacgacaaggtttgatgcacgaccaagattaaagagaagccttaatatgttaatgatgacatttaaaaatgtcaaaacctaactttttgtctcactcttactatggaatatgtcaagtgaagagctctgaattacataagagaacactgagagcgggaatctatatttcgtactgaacatgtccacaaaaagatcaattaatgctaaacaataagttgtcattaatgccaatagttatt

SEQ ID NO: 106968 - protein, 161 aa, Arabidopsis thaliana
  peptide (1)..(161): Ceres Seq. ID no. 13621001
MTSSSAPSRKALSKIACNRLQKELSEWQLNPPTGFRHKVTDNLQKWTIDVTGAPGTLYANETYQLQVEFPEHYPMEAPQVVFVSPAPSHPHIYSNGHICLDILYDSWSPAMTVNSVCISILSMLSSSPAKQRPADNDRYVKNCKNGRSPKETRWWFHDDKV

SEQ ID NO: 106969 - protein, 87 aa, Arabidopsis thaliana; identical to SEQ ID NO: 76963
  peptide (1)..(87): Ceres Seq. ID no. 13621002

SEQ ID NO: 106970 - DNA, 1481 bp, Arabidopsis thaliana
  misc_feature (1)..(1481): Ceres Seq. ID no. 13621007
  misc_feature (1)..(1481): Ortholog of  Ceres SEQ ID NO 15177414 as cited in SEQ ID NO 57242
  misc_feature (1)..(1481): Ortholog of  Ceres SEQ ID NO 13594151 as cited in SEQ ID NO 58886
atccgatctctcaatcctctcaaatctcaaactctctcttcccatcactctctcgctctctcttcaatctcatctcaatcatgacagagcaagagatctgcgtgagggttacaagagcggcggcgaaacgaaaagcttcgacggcgatgggtattgacggagatcgggtcaacaagaagagagttgttctcggtgagcttctaaacgtctccaatgtcaatctcttggctaatctcaatcagaagaaagaaacccagaagccaaaaaggaatcttaaacctcctccggcgaaacagattaagtcagctccggtggctattattgacctagaatcaaaatctgacattgattctcgatctgatgatcctcaaatgtgtggaccttatgttgctgatatctatgagtatcttcgtcaacttgaggtgaagccaaagcagagacctttaccagattacatagagaaagttcagaaagatgtaacaccaagtatgagaggtgttttggttgattggttagtggaagttgctgaagagtataaacttggatctgaaacactttatctcactgtctcacatattgatagattcttgtctttaaagactgttaacaagcaaaagctacagcttgttggagtttctgctatgcttattgcttcgaagtatgaagagataagtcctcctaaagtggatgatttttgttacattacggataatacgttttcgaaacaagatgttgtgaagatggaagctgatatacttcttgctcttcagtttgagttgggaagaccaacgattaatacttttatgagacggtttactagagttgcacaagacgatttcaaagttccacatttgcagctagagcctctttgttgctatttgtcagaattgagtatattagattataagactgtgaagtttgtgccgtctctgttggctgcttctgctgtttttctcgctcggttcatcatccgtccgaaacaacatccttggaaccaaatgttagaagagtacacaaagtacaaagcggctgatctacaagtgtgtgttggaatcatacatgacttgtatttgagcagaagaggaggtgctttacaagctgttagagagaaatataagcaccataagttccaatgcgttgcgaccatgcctgtttcaccagagctgccggttaccttttgggaggatgttaccatttgatctgaggttatgctatcttaagcaaatgttacggagctggattaccgaatcttgtttcaaatagtataatggacacagatcttcaagtgaagctagaagagtaagaaatatagaagtgaaggcaggagcaaataagtctgcgttatgtgaagatgtgtgatgtattattgaaatctcttcttttttatttacaaaattttagtgtgaaattcggaataatataattttatacaattatgcaatatgatataagtatttatgtgacatgatcttattttgttt

SEQ ID NO: 106971 - protein, 398 aa, Arabidopsis thaliana
  peptide (1)..(398): Ceres Seq. ID no. 13621008
PISQSSQISNSLFPSLSRSLFNLISIMTEQEICVRVTRAAAKRKASTAMGIDGDRVNKKRVVLGELLNVSNVNLLANLNQKKETQKPKRNLKPPPAKQIKSAPVAIIDLESKSDIDSRSDDPQMCGPYVADIYEYLRQLEVKPKQRPLPDYIEKVQKDVTPSMRGVLVDWLVEVAEEYKLGSETLYLTVSHIDRFLSLKTVNKQKLQLVGVSAMLIASKYEEISPPKVDDFCYITDNTFSKQDVVKMEADILLALQFELGRPTINTFMRRFTRVAQDDFKVPHLQLEPLCCYLSELSILDYKTVKFVPSLLAASAVFLARFIIRPKQHPWNQMLEEYTKYKAADLQVCVGIIHDLYLSRRGGALQAVREKYKHHKFQCVATMPVSPELPVTFWEDVTI

SEQ ID NO: 106972 - protein, 372 aa, Arabidopsis thaliana; identical to SEQ ID NO: 41537
  peptide (1)..(372): Ceres Seq. ID no. 13621009

SEQ ID NO: 106973 - protein, 350 aa, Arabidopsis thaliana; identical to SEQ ID NO: 41538
  peptide (1)..(350): Ceres Seq. ID no. 13621010

SEQ ID NO: 106974 - DNA, 1742 bp, Arabidopsis thaliana
  misc_feature (1)..(1742): Ceres Seq. ID no. 13621015
  misc_feature (1)..(1742): Ortholog of  Ceres SEQ ID NO 13600220 as cited in SEQ ID NO 0
atcaccaaaagaagcacatcaataaagaaaatacaaaccatggcaattccaaaagctcactactctttagctgttcttgtccttctctttgtcgtcgtttcgagtagccaaaaggtttgcaatccagaatgcaaggccaaagaacccttccactgcgataatactcatgcattcaaccgtacgggatttcccagaaatttcacttttggtgcagctacttcggcttatcaaattgaaggtgcagcacatagagcacttaatggatgggactatttcacgcatagatatccagaaaaagtaccggatcgtagttcaggagatcttgcttgtgattcgtatgatctttataaggatgatgtcaaactactaaaaagaatgaatgttcaagcttacagactctcgatagcatggtcaagggtcttaccaaagggaagactgactgggggagtggacgagaatgggataacatactacaacaatctcattaacgagttgaaagcaaatggcatagaaccatatgttactatatttcattgggatgttccccaaactttagaagacgaatatggaggtttcttaagcacacgtatagtggaggactacacaaactacgctgagcttctattccaaagattcggagacagggtcaaattttggatcactttaaatcagcctttctctcttgcaaccaaaggctatggagatggatcgtatccaccaggacggtgcaccggctgtgaacttggaggagattctggagttgaaccttatacagttgcacataaccaacttctagctcatgcaaaaactgtatctttatacagaaaaagatatcagaaatttcaaggtggtaagataggaacaaccttgatcgggagatggttcgccccgctaaatgaatttagcgaactcgacaaggctgctgcaaaacgagcattcgacttttttgttggatggttcttggatccattggtgtacggaaaatatccaacgataatgagagagatggtaggagatagattgccagaattcactcctgagcaatcagctttagttaaaggatcacttgattttctagggttgaactattatgttacacaatatgcaactgacgcacctcctccgacacaacttaatgcaataacggatgcacgagttactcttggattttatcgcaatggagttcctattggtgttgctcctagcttcgtctactatcctccaggattccgtcagattctaaactacatcaaagacaactacaaaaatccacttacctacatcaccgaaaacggagttgctgatcttgatcttggaaacgtaacgcttgcaactgctcttgccgataatggacggattcaaaaccattgcagccatctctcttgtcttaaatgcgctatgaaggatggatgcaacgtagcaggatattttgcatggtcattgatggacaattacgaattcggaaatggttacaccctccggtttggtatgaattgggtcaatttcactaatcctgctgatcgaaaagaaaaagcttctggaaaatggttctctaagttcctcgcaaaataagttgaagccctagatttataaatccaaacctcgaatgtaataacaattgtactgtatgtattttaagaccttatgtgttttgtatatgatgttaataatgttgtaataatcggatcctaatttcgtgcacagttcataaataaataaaaatgtatacaatgtttgtaatt

SEQ ID NO: 106975 - protein, 523 aa, Arabidopsis thaliana
  peptide (1)..(523): Ceres Seq. ID no. 13621016
ITKRSTSIKKIQTMAIPKAHYSLAVLVLLFVVVSSSQKVCNPECKAKEPFHCDNTHAFNRTGFPRNFTFGAATSAYQIEGAAHRALNGWDYFTHRYPEKVPDRSSGDLACDSYDLYKDDVKLLKRMNVQAYRLSIAWSRVLPKGRLTGGVDENGITYYNNLINELKANGIEPYVTIFHWDVPQTLEDEYGGFLSTRIVEDYTNYAELLFQRFGDRVKFWITLNQPFSLATKGYGDGSYPPGRCTGCELGGDSGVEPYTVAHNQLLAHAKTVSLYRKRYQKFQGGKIGTTLIGRWFAPLNEFSELDKAAAKRAFDFFVGWFLDPLVYGKYPTIMREMVGDRLPEFTPEQSALVKGSLDFLGLNYYVTQYATDAPPPTQLNAITDARVTLGFYRNGVPIGVAPSFVYYPPGFRQILNYIKDNYKNPLTYITENGVADLDLGNVTLATALADNGRIQNHCSHLSCLKCAMKDGCNVAGYFAWSLMDNYEFGNGYTLRFGMNWVNFTNPADRKEKASGKWFSKFLAK

SEQ ID NO: 106976 - protein, 510 aa, Arabidopsis thaliana
  peptide (1)..(510): Ceres Seq. ID no. 13621017
MAIPKAHYSLAVLVLLFVVVSSSQKVCNPECKAKEPFHCDNTHAFNRTGFPRNFTFGAATSAYQIEGAAHRALNGWDYFTHRYPEKVPDRSSGDLACDSYDLYKDDVKLLKRMNVQAYRLSIAWSRVLPKGRLTGGVDENGITYYNNLINELKANGIEPYVTIFHWDVPQTLEDEYGGFLSTRIVEDYTNYAELLFQRFGDRVKFWITLNQPFSLATKGYGDGSYPPGRCTGCELGGDSGVEPYTVAHNQLLAHAKTVSLYRKRYQKFQGGKIGTTLIGRWFAPLNEFSELDKAAAKRAFDFFVGWFLDPLVYGKYPTIMREMVGDRLPEFTPEQSALVKGSLDFLGLNYYVTQYATDAPPPTQLNAITDARVTLGFYRNGVPIGVAPSFVYYPPGFRQILNYIKDNYKNPLTYITENGVADLDLGNVTLATALADNGRIQNHCSHLSCLKCAMKDGCNVAGYFAWSLMDNYEFGNGYTLRFGMNWVNFTNPADRKEKASGKWFSKFLAK

SEQ ID NO: 106977 - protein, 398 aa, Arabidopsis thaliana
  peptide (1)..(398): Ceres Seq. ID no. 13621018
MNVQAYRLSIAWSRVLPKGRLTGGVDENGITYYNNLINELKANGIEPYVTIFHWDVPQTLEDEYGGFLSTRIVEDYTNYAELLFQRFGDRVKFWITLNQPFSLATKGYGDGSYPPGRCTGCELGGDSGVEPYTVAHNQLLAHAKTVSLYRKRYQKFQGGKIGTTLIGRWFAPLNEFSELDKAAAKRAFDFFVGWFLDPLVYGKYPTIMREMVGDRLPEFTPEQSALVKGSLDFLGLNYYVTQYATDAPPPTQLNAITDARVTLGFYRNGVPIGVAPSFVYYPPGFRQILNYIKDNYKNPLTYITENGVADLDLGNVTLATALADNGRIQNHCSHLSCLKCAMKDGCNVAGYFAWSLMDNYEFGNGYTLRFGMNWVNFTNPADRKEKASGKWFSKFLAK

SEQ ID NO: 106978 - DNA, 1563 bp, Arabidopsis thaliana
  misc_feature (1)..(1563): Ceres Seq. ID no. 13621019
  misc_feature (1)..(1563): Ortholog of  Ceres SEQ ID NO 14316553 as cited in SEQ ID NO 20761
  misc_feature (1)..(1563): Ortholog of  Ceres SEQ ID NO 13502573 as cited in SEQ ID NO 60342
ggttctaatcaatctcactccaatttctgcaaaaatcaaaccttttttttatattcatttcacatctctgtttttcctcagattcctcaaacattacagatcttcaggttttctatttataagcagaacttgttctgttcttgtgtgaagctttcactggttttggaaattggtgaatgtgattaatgggtagcagtgagatggaaaaatcaggtaaagagaaagaacctaagactacaccgccttcgacttcttcatctgctcctgctactgttgtttcacaggaaccttcttctgctgtgagtgctggagtggctgttactcaagattggtctggcttccaggcttattctcctatgccgcctcatggttatgtagcatcaagtcctcaacctcatccttatatgtggggcgttcagcatatgatgccgccttatggaacaccgcctcatccgtatgttacgatgtatcctccaggtggcatgtatgctcatccttcattacctccggggtcttatccatatagtccctatgcaatgccttctcctaatggaatggctgaagcttctggtaatactggaagtgttattgagggtgatggtaaaccatctgatgggaaggaaaaattgccaatcaaaagatcaaaaggaagcttgggaagtttgaatatgattataggaaagaacaatgaagctggaaaaaactcaggagcatcagctaatggagcttgttctaaaagtgctgagagcggttctgatggatcaagtgacggaagtgatgcaaattcacaaaacgactctggctctagacacaacgggaaggatggtgaaacagcttcagagagtggtggttctgctcatggaccaccccgtaatggaagtaatctaccagtgaaccagaccgtcgctatcatgccagtgtcggctacaggtgttccaggcccaccaacaaatctaaatatcggaatggattattggagcggtcatgggaatgtttctggagcagttcctggagttgtagtagatggttcccaatcacagccatggttacaggatgagagagagattaagcgacagagacggaagcaatccaatagggaatctgctcgtagatccaggttgcgtaaacaggcggagtgtgatgagctagcacaacgagcagaggttttgaatggagagaactcaagtcttagagcagaaattaacaagcttaaaagccaatatgaagagcttcttgctgaaaatagctctctcaagaataagttctcgtcagccccgtcactggaaggtggagacttggacaagaacgagcaagaaccacagagaagtacacgtcaggatgttgcgtagacggctcgtggttccttccacaactcagcttgactcaagaacagcagctaacagatatatgtaattttaggaaccagatttggtgtgatttctttagtgtttaaataggaggaagcatgaaaaaaaaaaatagtctcttctttaacaaactgtgtatatcttttcttcagattttggacttttttgtctctcaataaaatgaactcggaactct

SEQ ID NO: 106979 - protein, 387 aa, Arabidopsis thaliana
  peptide (1)..(387): Ceres Seq. ID no. 13621020
MGSSEMEKSGKEKEPKTTPPSTSSSAPATVVSQEPSSAVSAGVAVTQDWSGFQAYSPMPPHGYVASSPQPHPYMWGVQHMMPPYGTPPHPYVTMYPPGGMYAHPSLPPGSYPYSPYAMPSPNGMAEASGNTGSVIEGDGKPSDGKEKLPIKRSKGSLGSLNMIIGKNNEAGKNSGASANGACSKSAESGSDGSSDGSDANSQNDSGSRHNGKDGETASESGGSAHGPPRNGSNLPVNQTVAIMPVSATGVPGPPTNLNIGMDYWSGHGNVSGAVPGVVVDGSQSQPWLQDEREIKRQRRKQSNRESARRSRLRKQAECDELAQRAEVLNGENSSLRAEINKLKSQYEELLAENSSLKNKFSSAPSLEGGDLDKNEQEPQRSTRQDVA

SEQ ID NO: 106980 - protein, 382 aa, Arabidopsis thaliana
  peptide (1)..(382): Ceres Seq. ID no. 13621021
MEKSGKEKEPKTTPPSTSSSAPATVVSQEPSSAVSAGVAVTQDWSGFQAYSPMPPHGYVASSPQPHPYMWGVQHMMPPYGTPPHPYVTMYPPGGMYAHPSLPPGSYPYSPYAMPSPNGMAEASGNTGSVIEGDGKPSDGKEKLPIKRSKGSLGSLNMIIGKNNEAGKNSGASANGACSKSAESGSDGSSDGSDANSQNDSGSRHNGKDGETASESGGSAHGPPRNGSNLPVNQTVAIMPVSATGVPGPPTNLNIGMDYWSGHGNVSGAVPGVVVDGSQSQPWLQDEREIKRQRRKQSNRESARRSRLRKQAECDELAQRAEVLNGENSSLRAEINKLKSQYEELLAENSSLKNKFSSAPSLEGGDLDKNEQEPQRSTRQDVA

SEQ ID NO: 106981 - protein, 330 aa, Arabidopsis thaliana
  peptide (1)..(330): Ceres Seq. ID no. 13621022
MPPHGYVASSPQPHPYMWGVQHMMPPYGTPPHPYVTMYPPGGMYAHPSLPPGSYPYSPYAMPSPNGMAEASGNTGSVIEGDGKPSDGKEKLPIKRSKGSLGSLNMIIGKNNEAGKNSGASANGACSKSAESGSDGSSDGSDANSQNDSGSRHNGKDGETASESGGSAHGPPRNGSNLPVNQTVAIMPVSATGVPGPPTNLNIGMDYWSGHGNVSGAVPGVVVDGSQSQPWLQDEREIKRQRRKQSNRESARRSRLRKQAECDELAQRAEVLNGENSSLRAEINKLKSQYEELLAENSSLKNKFSSAPSLEGGDLDKNEQEPQRSTRQDVA

SEQ ID NO: 106982 - DNA, 1600 bp, Arabidopsis thaliana
  misc_feature (1)..(1600): Ceres Seq. ID no. 13621023
  misc_feature (1)..(1600): Ortholog of  Ceres SEQ ID NO 14315455 as cited in SEQ ID NO 56988
  misc_feature (1)..(1600): Ortholog of  Ceres SEQ ID NO 13596921 as cited in SEQ ID NO 62368
  misc_feature (1)..(1600): Ortholog of  Ceres SEQ ID NO 13600673 as cited in SEQ ID NO 0
atggatgtgagcaaagtaaccacaagcgacggcggaggagattcaatggagactaagccatctcctcaacctcagcctgcggcgattctaagttcaaacgcgcctcctccgtttctgagcaagacctatgatatggttgatgatcacaatacagattcgattgtctcttggagtgctaataacaacagttttatcgtttggaaaccaccggagttcgctcgcgatcttcttcctaagaactttaagcataataatttctccagcttcgttagacagcttaatacctatggtttcaggaaggttgacccagatagatgggaatttgcgaatgaaggttttttaagaggtcagaagcacttgctacaatcaataactaggcgaaaacctgcccatggacagggacagggacatcagcgatctcagcactcgaatggacagaactcatctgttagcgcatgtgttgaagttggcaaatttggtctcgaagaagaagttgaaaggcttaaaagagataagaacgtccttatgcaagaactcgtcagattaagacagcagcaacagtccactgataaccaacttcaaacgatggttcagcgtctccagggcatggagaatcggcaacaacaattaatgtcattccttgcaaaggcagtacaaagccctcattttctatctcaattcttacagcagcagaatcagcaaaacgagagtaataggcgcatcagtgataccagtaagaagcggagattcaagcgagacggcattgtccgtaataatgattctgctactcctgatggacagatagtgaagtatcaacctccaatgcacgagcaagccaaagcaatgtttaaacagcttatgaagatggaaccttacaaaaccggcgatgatggtttccttctaggtaatggtacgtctactaccgagggaacagagatggagacttcatcaaaccaagtatcgggtataactcttaaggaaatgcctacagcttctgagatacagtcatcatcaccaattgaaacaactcctgaaaatgtttcggcagcatcagaagcaaccgagaactgtattccttcacctgatgatctaactcttcccgacttcactcatatgctaccggaaaataattcagagaagcctccagagagtttcatggaaccaaacctgggaggttctagtccattactagatccagatctgttgatcgatgattctttgtccttcgacattgacgactttccaatggattctgatatagaccctgttgattacggtttactcgaacgcttactcatgtcaagcccggttccagataatatggattcaacaccagtggacaatgaaacagagcaggaacaaaatggatgggacaaaactaagcatatggataatctgactcaacagatgggtctcctctctcctgaaaccttagatctctcaaggcaaaatccttgattttgggagtttttaaagtcttttgaggtaacacagtccctgagagcagcatattcatttttcatacgctgatcttttatttcttctttcttgtatcaaagtggtttaacattactgcttcatacaactctcaattttacac

SEQ ID NO: 106983 - protein, 485 aa, Arabidopsis thaliana
  peptide (1)..(485): Ceres Seq. ID no. 13621024
MDVSKVTTSDGGGDSMETKPSPQPQPAAILSSNAPPPFLSKTYDMVDDHNTDSIVSWSANNNSFIVWKPPEFARDLLPKNFKHNNFSSFVRQLNTYGFRKVDPDRWEFANEGFLRGQKHLLQSITRRKPAHGQGQGHQRSQHSNGQNSSVSACVEVGKFGLEEEVERLKRDKNVLMQELVRLRQQQQSTDNQLQTMVQRLQGMENRQQQLMSFLAKAVQSPHFLSQFLQQQNQQNESNRRISDTSKKRRFKRDGIVRNNDSATPDGQIVKYQPPMHEQAKAMFKQLMKMEPYKTGDDGFLLGNGTSTTEGTEMETSSNQVSGITLKEMPTASEIQSSSPIETTPENVSAASEATENCIPSPDDLTLPDFTHMLPENNSEKPPESFMEPNLGGSSPLLDPDLLIDDSLSFDIDDFPMDSDIDPVDYGLLERLLMSSPVPDNMDSTPVDNETEQEQNGWDKTKHMDNLTQQMGLLSPETLDLSRQNP

SEQ ID NO: 106984 - protein, 470 aa, Arabidopsis thaliana
  peptide (1)..(470): Ceres Seq. ID no. 13621025
METKPSPQPQPAAILSSNAPPPFLSKTYDMVDDHNTDSIVSWSANNNSFIVWKPPEFARDLLPKNFKHNNFSSFVRQLNTYGFRKVDPDRWEFANEGFLRGQKHLLQSITRRKPAHGQGQGHQRSQHSNGQNSSVSACVEVGKFGLEEEVERLKRDKNVLMQELVRLRQQQQSTDNQLQTMVQRLQGMENRQQQLMSFLAKAVQSPHFLSQFLQQQNQQNESNRRISDTSKKRRFKRDGIVRNNDSATPDGQIVKYQPPMHEQAKAMFKQLMKMEPYKTGDDGFLLGNGTSTTEGTEMETSSNQVSGITLKEMPTASEIQSSSPIETTPENVSAASEATENCIPSPDDLTLPDFTHMLPENNSEKPPESFMEPNLGGSSPLLDPDLLIDDSLSFDIDDFPMDSDIDPVDYGLLERLLMSSPVPDNMDSTPVDNETEQEQNGWDKTKHMDNLTQQMGLLSPETLDLSRQNP

SEQ ID NO: 106985 - protein, 441 aa, Arabidopsis thaliana
  peptide (1)..(441): Ceres Seq. ID no. 13621026
MVDDHNTDSIVSWSANNNSFIVWKPPEFARDLLPKNFKHNNFSSFVRQLNTYGFRKVDPDRWEFANEGFLRGQKHLLQSITRRKPAHGQGQGHQRSQHSNGQNSSVSACVEVGKFGLEEEVERLKRDKNVLMQELVRLRQQQQSTDNQLQTMVQRLQGMENRQQQLMSFLAKAVQSPHFLSQFLQQQNQQNESNRRISDTSKKRRFKRDGIVRNNDSATPDGQIVKYQPPMHEQAKAMFKQLMKMEPYKTGDDGFLLGNGTSTTEGTEMETSSNQVSGITLKEMPTASEIQSSSPIETTPENVSAASEATENCIPSPDDLTLPDFTHMLPENNSEKPPESFMEPNLGGSSPLLDPDLLIDDSLSFDIDDFPMDSDIDPVDYGLLERLLMSSPVPDNMDSTPVDNETEQEQNGWDKTKHMDNLTQQMGLLSPETLDLSRQNP

SEQ ID NO: 106986 - DNA, 2107 bp, Arabidopsis thaliana
  misc_feature (1)..(2107): Ceres Seq. ID no. 13621031
  misc_feature (1)..(2107): Ortholog of  Ceres SEQ ID NO 12586556 as cited in SEQ ID NO 64667
  misc_feature (1)..(2107): Ortholog of  Ceres SEQ ID NO 14316045 as cited in SEQ ID NO 66810
  misc_feature (1)..(2107): Ortholog of  Ceres SEQ ID NO 13660894 as cited in SEQ ID NO 67475
atggggacacgtgtaacacaattctcttacctccacgcgccgtcgtcacacatggcggagcagttactgaatcaattcatctccgcagtgatatcaaagtcgagacatttgaatcatttgaagcaagttcagtcctttatgatagtttctggactaagtcattcacatttcctctgttttaagcttcttcgtttttgtacgcttcgtctctgtaatctctcttacgctcgctttatctttgatcgtttctctttccccaatacgcatctttacgctgccgttttaactgcttactcttcttctcttcctcttcatgcttcttcagctttctccttctttcgtctcatggttaatcgttctgttcctcggcctaatcactttatctacccacttgttcttaagtctacaccatatctctcctctgctttttcaactcctttggtgcatacccatttgtttaaatctgggtttcatctctatgtcgttgttcaaactgctcttcttcactcctacgcttcctctgtttctcatataactcttgcaagacaactgttcgacgaaatgtctgagagaaatgttgtttcttggactgctatgctttctgggtatgctaggtctggtgatatctctaatgctgttgctctttttgaagatatgcctgagcgtgatgttccttcctggaatgcgattcttgctgcttgtactcagaatggtctttttcttgaagcggtttctctgtttagaaggatgattaatgagcctagcattcgtcctaatgaggtaactgtagtttgtgtcctctctgcgtgtgctcaaactggtacgcttcagctggctaaagggattcatgcctttgcttaccgtcgtgatctttcttctgatgtgtttgtttcgaattctttagttgacttgtatggaaaatgtggtaacttggaggaagcaagctctgtttttaagatggcatccaagaaaagtttaacagcttggaattctatgatcaattgctttgcactccatggtagaagtgaagaagccatagctgtgtttgaagaaatgatgaagttgaacattaacgatatcaaaccagatcacattactttcatcggtcttctcaatgcgtgtactcatggaggtttggtatcaaaaggccgaggttatttcgatctgatgacaaacagattcggtattgagccaaggattgagcattatggctgtctaatagatcttttaggcagggcaggtcggtttgatgaagctttagaagttatgtccacgatgaagatgaaagcggatgaggctatttggggatcactgcttaatgcttgtaagatacatggccatctggatttggctgaagttgctgtaaaaaacctggttgctttaaatcctaataatggaggttatgtcgctatgatggcaaatttatatggagagatgggtaattgggaagaggcacgtagagctagaaagatgatcaagcaccaaaatgcttataaaccaccaggctggagtcggattgagatcgataacgaggtccatcagttctactctcttgacaaatcacatccggagactgaggagatatacatgatacttgacagtctgatctctttctgacacttttggaaggtcctagtttctctatatgacttgacacagctgcactctgctttataacagcgagcttcgtgcgaaattgttggtttgcaatatgtatggcttcagagaaaagcaggcattttcttcattgatctacacaggttacatactttgtttctgatacacaaatgctggtacggtaattttgttgtactgtaagaagaggaactagtacgtgataagccagcaaacaacatgttgcttgattagaaagtaagtcttgccattcctttctaacatgctatcacgtggtttctttctgtgattccagcaaaaaacttttagtttacaggtccatggacaatcaaacattcgagaagaggaagtctcttacgccaagcattagtactatttaattatgatcttttagttttctaacactttcctcatgtatctttattgagaatgatcaataaacaaggcacgcaatatagagactttgttacag

SEQ ID NO: 106987 - protein, 538 aa, Arabidopsis thaliana
  peptide (1)..(538): Ceres Seq. ID no. 13621032
MGTRVTQFSYLHAPSSHMAEQLLNQFISAVISKSRHLNHLKQVQSFMIVSGLSHSHFLCFKLLRFCTLRLCNLSYARFIFDRFSFPNTHLYAAVLTAYSSSLPLHASSAFSFFRLMVNRSVPRPNHFIYPLVLKSTPYLSSAFSTPLVHTHLFKSGFHLYVVVQTALLHSYASSVSHITLARQLFDEMSERNVVSWTAMLSGYARSGDISNAVALFEDMPERDVPSWNAILAACTQNGLFLEAVSLFRRMINEPSIRPNEVTVVCVLSACAQTGTLQLAKGIHAFAYRRDLSSDVFVSNSLVDLYGKCGNLEEASSVFKMASKKSLTAWNSMINCFALHGRSEEAIAVFEEMMKLNINDIKPDHITFIGLLNACTHGGLVSKGRGYFDLMTNRFGIEPRIEHYGCLIDLLGRAGRFDEALEVMSTMKMKADEAIWGSLLNACKIHGHLDLAEVAVKNLVALNPNNGGYVAMMANLYGEMGNWEEARRARKMIKHQNAYKPPGWSRIEIDNEVHQFYSLDKSHPETEEIYMILDSLISF

SEQ ID NO: 106988 - protein, 521 aa, Arabidopsis thaliana; identical to SEQ ID NO: 72164
  peptide (1)..(521): Ceres Seq. ID no. 13621033

SEQ ID NO: 106989 - protein, 492 aa, Arabidopsis thaliana; identical to SEQ ID NO: 72165
  peptide (1)..(492): Ceres Seq. ID no. 13621034

SEQ ID NO: 106990 - DNA, 742 bp, Arabidopsis thaliana
  misc_feature (1)..(742): Ceres Seq. ID no. 13621035
  misc_feature (1)..(742): Ortholog of  Ceres SEQ ID NO 12556792 as cited in SEQ ID NO 37
  misc_feature (1)..(742): Ortholog of  Ceres SEQ ID NO 15179171 as cited in SEQ ID NO 0
aaactcaaaaggcggaggtgagtactggtgagagtgtgagtgaaaaaacaaaaaaaacaattcaactgcaaaaatgagttccggaatcggaagtttagtgaaggtcatctttaagaacttcgatgtcatcgctggacctgtgattagcttggtttatcctctatatgcatcagtgagggcaatagagtcgaggagtcatggagacgacaagcaatggttgacgtattgggctctctattcacttatcaaactctttgagctcacttttttcagactcctcgaatggatcccattatatccatacgcaaagctagccctaactagttggttggtcttaccgggcatgaacggtgctgcttatctctacgagcactatgtgcgttcattccttttaagcccacatactgttaacgtatggtacgtgccagccaagaaggatgacgacttgggagcaaccgctggcaaatttactccagtaaatgattccggtgcgcctcaggaaaagattgtgagctcggtggatacatcagcaaaatatgttggtcattcggcttttgatgacgcctatatctactaggctagtagctagtaaactacttccggctagttgtagctgagcatcctgatcttagtgtatcgaaatacttgttttctcctctttttctttgttttcgggttttatgaagtttgttgttactgctaaggaattttaatatcaaaataaatgttaattgagtgagtt

SEQ ID NO: 106991 - protein, 167 aa, Arabidopsis thaliana
  peptide (1)..(167): Ceres Seq. ID no. 13621036
MSSGIGSLVKVIFKNFDVIAGPVISLVYPLYASVRAIESRSHGDDKQWLTYWALYSLIKLFELTFFRLLEWIPLYPYAKLALTSWLVLPGMNGAAYLYEHYVRSFLLSPHTVNVWYVPAKKDDDLGATAGKFTPVNDSGAPQEKIVSSVDTSAKYVGHSAFDDAYIY

SEQ ID NO: 106992 - DNA, 869 bp, Arabidopsis thaliana
  misc_feature (1)..(869): Ceres Seq. ID no. 13621052
  misc_feature (1)..(869): Ortholog of  Ceres SEQ ID NO 14305963 as cited in SEQ ID NO 52290
  misc_feature (1)..(869): Ortholog of  Ceres SEQ ID NO 14307492 as cited in SEQ ID NO 59504
  misc_feature (1)..(869): Ortholog of  Ceres SEQ ID NO 13597255 as cited in SEQ ID NO 63874
atctcctttaaaattctctgttcttttgtattcctaatctttaacaatttaagaagaaatggattcgaattcatggatcaattgtccccctgtgttttcatcatcgccttcttcacgccgttaccaatctcgatcagatttgtatttgggagatgttgaaggagaagacgatttgaaagctgagtttatgtgtcctttttgtgcagatgagtttgatattgttggtctttgttgtcatattgatgtgaatcatcctgttgaagctaagaatggggtttgtcctgtctgcacaaagaaggtgggattggacattgttggccatataacaacgcaacacgggaacagattttacgtgcagcgaagaagaaggttgcgtaaaggtggatatagctctacctatcttactcttaaaaaagagcttcgagaagctaacttacagtctcttggagggtcttccactttcattccctcttccaatatagattctgatcctctactctcatcctttatgtttaaacccccttcggctatacctatcactgaaggagactcggtagcacaagtctcacctaaggacacctctaaaagcaaaatacaacaagaatcattctcaaacgaagatcaagagaaggcaaagaagagcaagtttgtgcggggcttgctttggtcaaccatgcttgaagacaagttctaatttatctagatatcttatattgtaatcaatgtatcaagaaatcatacattagtctcaatgtatgtagcagaggcttgtagcaagcataatggcatgctgagtatgttgtaatcggatgttcgtggggtatcttttatgtgcataatcagaagatatataagtactatttcactcc

SEQ ID NO: 106993 - protein, 211 aa, Arabidopsis thaliana
  peptide (1)..(211): Ceres Seq. ID no. 13621053
MDSNSWINCPPVFSSSPSSRRYQSRSDLYLGDVEGEDDLKAEFMCPFCADEFDIVGLCCHIDVNHPVEAKNGVCPVCTKKVGLDIVGHITTQHGNRFYVQRRRRLRKGGYSSTYLTLKKELREANLQSLGGSSTFIPSSNIDSDPLLSSFMFKPPSAIPITEGDSVAQVSPKDTSKSKIQQESFSNEDQEKAKKSKFVRGLLWSTMLEDKF

SEQ ID NO: 106994 - protein, 168 aa, Arabidopsis thaliana
  peptide (1)..(168): Ceres Seq. ID no. 13621054
MCPFCADEFDIVGLCCHIDVNHPVEAKNGVCPVCTKKVGLDIVGHITTQHGNRFYVQRRRRLRKGGYSSTYLTLKKELREANLQSLGGSSTFIPSSNIDSDPLLSSFMFKPPSAIPITEGDSVAQVSPKDTSKSKIQQESFSNEDQEKAKKSKFVRGLLWSTMLEDKF

SEQ ID NO: 106995 - DNA, 831 bp, Arabidopsis thaliana
  misc_feature (1)..(831): Ceres Seq. ID no. 13621055
  misc_feature (1)..(831): Ortholog of  Ceres SEQ ID NO 12581874 as cited in SEQ ID NO 55321
cttcttcttcttcttcttcttctttcccactcctactctttctccctcctctgctctctcatctacttcctctgtatattcttcgcacaaaattaagtttctaaatccagtttctgacaatggaaacaaaccatttatacactttgtctacacttgttgttatgctgctagtgtcagtgacaccgacagtgacatcaaaagacgaggttgtttcttgtacaatgtgttcttcatgcgacaatccatgtagtcctgtccaatcatctcctccgccaccttctcctccaccaccgtcaacccccacaaccgcatgtcctccccctccttctcctccaagctccggtggcggtagctcttactattaccctcctccttctcagtccggtggaggcagtaaataccctccaccatacggtggcggtggtcaaggttattactatcctccgccgtattcaggaaactatcctacgccgcctccgccgaatccgatcgtcccttatttcccgttttactatcatactccaccaccaggttctggctcagatcggtttatgagttcttactctattatttttgctctttttgctgtctttctctgtttagtgtgacggaaaatagtcggaaaattcgccgggaaaatgacgaagaaaaagtcgaaataatgtggcagatccgtagatctataaatctttagatttctttgatcatggaaactaaatgatgttggatcttttactttcttcgatctgttttaactttttcttttgttgttgacaatttgtatttaattgttcttgattattaacatattaattactcgttattcagatt

SEQ ID NO: 106996 - protein, 162 aa, Arabidopsis thaliana
  peptide (1)..(162): Ceres Seq. ID no. 13621056
METNHLYTLSTLVVMLLVSVTPTVTSKDEVVSCTMCSSCDNPCSPVQSSPPPPSPPPPSTPTTACPPPPSPPSSGGGSSYYYPPPSQSGGGSKYPPPYGGGGQGYYYPPPYSGNYPTPPPPNPIVPYFPFYYHTPPPGSGSDRFMSSYSIIFALFAVFLCLV

SEQ ID NO: 106997 - protein, 148 aa, Arabidopsis thaliana
  peptide (1)..(148): Ceres Seq. ID no. 13621057
MLLVSVTPTVTSKDEVVSCTMCSSCDNPCSPVQSSPPPPSPPPPSTPTTACPPPPSPPSSGGGSSYYYPPPSQSGGGSKYPPPYGGGGQGYYYPPPYSGNYPTPPPPNPIVPYFPFYYHTPPPGSGSDRFMSSYSIIFALFAVFLCLV

SEQ ID NO: 106998 - protein, 128 aa, Arabidopsis thaliana
  peptide (1)..(128): Ceres Seq. ID no. 13621058
MCSSCDNPCSPVQSSPPPPSPPPPSTPTTACPPPPSPPSSGGGSSYYYPPPSQSGGGSKYPPPYGGGGQGYYYPPPYSGNYPTPPPPNPIVPYFPFYYHTPPPGSGSDRFMSSYSIIFALFAVFLCLV

SEQ ID NO: 106999 - DNA, 1736 bp, Arabidopsis thaliana
  misc_feature (1)..(1736): Ceres Seq. ID no. 13621063
  misc_feature (1)..(1736): Ortholog of  Ceres SEQ ID NO 13582281 as cited in SEQ ID NO 51014
  misc_feature (1)..(1736): Ortholog of  Ceres SEQ ID NO 14315606 as cited in SEQ ID NO 53515
  misc_feature (1)..(1736): Ortholog of  Ceres SEQ ID NO 13597574 as cited in SEQ ID NO 64677
  misc_feature (1)..(1736): Ortholog of  Ceres SEQ ID NO 12617417 as cited in SEQ ID NO 65089
atgtccatgctttattgaagatgtgcagagaataacaaaaatggtcgacaagagagaagaagttatgcacgtagccatgtttccatggctagctatgggtcatctccttccttttcttcgtctctccaagttactagctcaaaagggtcacaagatctctttcatatcaacaccaagaaacatcgaaagacttcctaaattacaatcaaacctcgcctcctccatcaccttcgtctctttccctctccctcccatctcaggcttgcctccttcttcagaatcatccatggacgttccttacaacaagcaacagtctcttaaagccgcttttgatcttcttcagccaccgttgaaagagtttctccgacggtcttctccggattggatcatatacgactatgcttctcactggcttccttctattgcggccgagcttggaatctctaaggctttctttagtctctttaacgcagctactctctgtttcatgggaccgtcttcgtctttgattgaagaaattagatcaacgccggaagatttcacggtggtgccaccgtgggtcccgttcaagtcaaacatcgtgtttcgttatcatgaagttactagatacgttgagaagacagaggaagatgtaaccggagtctctgactcagttcggtttggttactcgattgacgaaagcgatgcggtttttgtccgtagctgtccggagtttgaaccggaatggtttggtttactaaaagacctgtaccgtaaaccggtatttccaatcgggtttttgcctccggttattgaagacgacgatgccgttgatactacatgggttcgtataaagaagtggctcgacaagcaacggcttaattcagttgtttacgtgtcacttggcaccgaagcgagtcttcgtcatgaggaagtaactgagctagctcttgggttagagaagtcagagacaccgttcttttgggtcctaaggaacgagccaaagattccagatgggttcaaaacacgagtcaagggacgtggaatggttcatgttggttgggttccacaagtgaaaatacttagtcacgagtcagtaggagggttcttgacacattgtggttggaactcagtggtggaagggttagggtttggtaaagttccaatcttttttccggtgttgaatgagcaaggacttaatacgaggttgttgcatgggaaaggacttggtgttgaggtttcaagagatgagagagatgggtcgtttgattctgactcggtcgctgactcgattaggttggtgatgattgatgatgctggcgaggagataagggctaaggctaaagtgatgaaggatttgtttgggaacatggatgagaatattcgttatgttgacgaacttgttaggtttatgagaagtaaaggatcatcatcatcatcatgatcttgttgttgctatgattttgacttgtccattacggctgccgtgggagaactcaatctttttttcctccaagtctcgttttattaatatttcacaataccatcatagtccatagacacgcaaggcacggcaatatatccacaaaagacacgttggcttacacatacatgacgagtgttctaaaaaccagtataaacgttaggaactcagatgtgaccgtttagaccgattataattgtataaatttcatttttttgtattttccaatgtcgaacgaagttttattttcatatacatagttataaatattcgt

SEQ ID NO: 107000 - protein, 473 aa, Arabidopsis thaliana
  peptide (1)..(473): Ceres Seq. ID no. 13621064
CPCFIEDVQRITKMVDKREEVMHVAMFPWLAMGHLLPFLRLSKLLAQKGHKISFISTPRNIERLPKLQSNLASSITFVSFPLPPISGLPPSSESSMDVPYNKQQSLKAAFDLLQPPLKEFLRRSSPDWIIYDYASHWLPSIAAELGISKAFFSLFNAATLCFMGPSSSLIEEIRSTPEDFTVVPPWVPFKSNIVFRYHEVTRYVEKTEEDVTGVSDSVRFGYSIDESDAVFVRSCPEFEPEWFGLLKDLYRKPVFPIGFLPPVIEDDDAVDTTWVRIKKWLDKQRLNSVVYVSLGTEASLRHEEVTELALGLEKSETPFFWVLRNEPKIPDGFKTRVKGRGMVHVGWVPQVKILSHESVGGFLTHCGWNSVVEGLGFGKVPIFFPVLNEQGLNTRLLHGKGLGVEVSRDERDGSFDSDSVADSIRLVMIDDAGEEIRAKAKVMKDLFGNMDENIRYVDELVRFMRSKGSSSSS

SEQ ID NO: 107001 - protein, 460 aa, Arabidopsis thaliana
  peptide (1)..(460): Ceres Seq. ID no. 13621065
MVDKREEVMHVAMFPWLAMGHLLPFLRLSKLLAQKGHKISFISTPRNIERLPKLQSNLASSITFVSFPLPPISGLPPSSESSMDVPYNKQQSLKAAFDLLQPPLKEFLRRSSPDWIIYDYASHWLPSIAAELGISKAFFSLFNAATLCFMGPSSSLIEEIRSTPEDFTVVPPWVPFKSNIVFRYHEVTRYVEKTEEDVTGVSDSVRFGYSIDESDAVFVRSCPEFEPEWFGLLKDLYRKPVFPIGFLPPVIEDDDAVDTTWVRIKKWLDKQRLNSVVYVSLGTEASLRHEEVTELALGLEKSETPFFWVLRNEPKIPDGFKTRVKGRGMVHVGWVPQVKILSHESVGGFLTHCGWNSVVEGLGFGKVPIFFPVLNEQGLNTRLLHGKGLGVEVSRDERDGSFDSDSVADSIRLVMIDDAGEEIRAKAKVMKDLFGNMDENIRYVDELVRFMRSKGSSSSS

SEQ ID NO: 107002 - protein, 452 aa, Arabidopsis thaliana
  peptide (1)..(452): Ceres Seq. ID no. 13621066
MHVAMFPWLAMGHLLPFLRLSKLLAQKGHKISFISTPRNIERLPKLQSNLASSITFVSFPLPPISGLPPSSESSMDVPYNKQQSLKAAFDLLQPPLKEFLRRSSPDWIIYDYASHWLPSIAAELGISKAFFSLFNAATLCFMGPSSSLIEEIRSTPEDFTVVPPWVPFKSNIVFRYHEVTRYVEKTEEDVTGVSDSVRFGYSIDESDAVFVRSCPEFEPEWFGLLKDLYRKPVFPIGFLPPVIEDDDAVDTTWVRIKKWLDKQRLNSVVYVSLGTEASLRHEEVTELALGLEKSETPFFWVLRNEPKIPDGFKTRVKGRGMVHVGWVPQVKILSHESVGGFLTHCGWNSVVEGLGFGKVPIFFPVLNEQGLNTRLLHGKGLGVEVSRDERDGSFDSDSVADSIRLVMIDDAGEEIRAKAKVMKDLFGNMDENIRYVDELVRFMRSKGSSSSS

SEQ ID NO: 107003 - DNA, 662 bp, Arabidopsis thaliana
  misc_feature (1)..(662): Ceres Seq. ID no. 13621069
  misc_feature (1)..(662): Ortholog of  Ceres SEQ ID NO 15179191 as cited in SEQ ID NO 0
atggtaattctcagcaacgtctcgttgttctcctgctgcaacatctctcagaaaccatctctcttttctccgtcttctcgtagttctcattgtcccattcgttgctcacagtcacaggaagggaaagaagtggttaccagtcctttgagaagtgtggtttggtcattaggagaagaggtttcaaagagaagtctatttgcacttgtctctgcttctctcttctttgttgatcctgctcttgcttttaagggtggaggtccctatggtcaaggagtcaccaggggacaggacttatctggcaaagatttcagtggccagactcttatcaggcaggacttcaaaacgtccatcctaaggcaagccaacttcaagggtgcaaagttgttaggtgctagcttctttgatgcagatctaacaggtgctgatttatcggaagctgatctccgaggtgcagatttctccttggcaaatgtaacaaaggtgaatctaacgaacgctaacttagaaggagcgactgttactggaaacacatcattcaagggatcaaacattacaggcgcaggtgaaaaaagaaaagaaaactttcataataacaataagcacatctctttattacctctgagcttcacataaagtttgatacgtttgtgtgtataaatttg

SEQ ID NO: 107004 - protein, 210 aa, Arabidopsis thaliana
  peptide (1)..(210): Ceres Seq. ID no. 13621070
MVILSNVSLFSCCNISQKPSLFSPSSRSSHCPIRCSQSQEGKEVVTSPLRSVVWSLGEEVSKRSLFALVSASLFFVDPALAFKGGGPYGQGVTRGQDLSGKDFSGQTLIRQDFKTSILRQANFKGAKLLGASFFDADLTGADLSEADLRGADFSLANVTKVNLTNANLEGATVTGNTSFKGSNITGAGEKRKENFHNNNKHISLLPLSFT

SEQ ID NO: 107005 - DNA, 956 bp, Arabidopsis thaliana
  misc_feature (1)..(956): Ceres Seq. ID no. 13621071
  misc_feature (1)..(956): Ortholog of  Ceres SEQ ID NO 14314068 as cited in SEQ ID NO 52242
  misc_feature (1)..(956): Ortholog of  Ceres SEQ ID NO 14314999 as cited in SEQ ID NO 52342
  misc_feature (1)..(956): Ortholog of  Ceres SEQ ID NO 15177057 as cited in SEQ ID NO 55817
  misc_feature (1)..(956): Ortholog of  Ceres SEQ ID NO 13585458 as cited in SEQ ID NO 60907
  misc_feature (1)..(956): Ortholog of  Ceres SEQ ID NO 13598678 as cited in SEQ ID NO 61508
  misc_feature (1)..(956): Ortholog of  Ceres SEQ ID NO 12625392 as cited in SEQ ID NO 63315
  misc_feature (1)..(956): Ortholog of  Ceres SEQ ID NO 13598319 as cited in SEQ ID NO 68758
  misc_feature (1)..(956): Ortholog of  Ceres SEQ ID NO 12589816 as cited in SEQ ID NO 0
aaattcacaaatacctttaaaagagtatagaaagcttggtttatacaaaacaaagtatatagctagatatatcaatggcatcatcacaaagatatttcgctctcctagctcttttcgcagtctcactaaaattttgttattgccaaaatgagactatagatgtagctggatcgggaaccgccggagttacttggtacggtgaaccattcggcgccggtagcaccggaggagcttgtgggtacggttccgcggtggctaatccaccactatacgcgatggtttcagccggaggtccttcgctgttcaacaatggaaaaggatgtggaacatgttatcaggttgtatgcatcggacatccagcgtgctcggggtcaccaataacggtgacgataaccgacgagtgccctggtggtccttgcgcctctgaaccagtccacattgatcttagcggcaaagccatgggtgccttagccaaacctggccaagccgatcaacttcgatccgctggtgttatacgtgtcaactacaaacgtgcggcatgtttatatcgaggaactaacatagtttttcgtatggacgctggagcaaatccgtactacatttcatttgttgttgagtatgaaaacggcgatggagatttgtccaatgttgaaattcaaccagccggcggaagtttcatctccatgcaagaaatgagatccgccgtatggaaggtcaactcaggcagtgccctaagaggaccattcaacattagacttacttctggtgaatctcataaagtaatcgtcgcttataatgttattccggcgaattggaaacctgacgaatcttaccgttcaattgttaacttttaggattttgtcatattgtatttcgacacatttcattgtgttctctagtcaaactttgaaagcttctgatatagtaatgaataataaaaatatatatgatttacc

SEQ ID NO: 107006 - protein, 259 aa, Arabidopsis thaliana
  peptide (1)..(259): Ceres Seq. ID no. 13621072
MASSQRYFALLALFAVSLKFCYCQNETIDVAGSGTAGVTWYGEPFGAGSTGGACGYGSAVANPPLYAMVSAGGPSLFNNGKGCGTCYQVVCIGHPACSGSPITVTITDECPGGPCASEPVHIDLSGKAMGALAKPGQADQLRSAGVIRVNYKRAACLYRGTNIVFRMDAGANPYYISFVVEYENGDGDLSNVEIQPAGGSFISMQEMRSAVWKVNSGSALRGPFNIRLTSGESHKVIVAYNVIPANWKPDESYRSIVNF

SEQ ID NO: 107007 - protein, 192 aa, Arabidopsis thaliana
  peptide (1)..(192): Ceres Seq. ID no. 13621073
MVSAGGPSLFNNGKGCGTCYQVVCIGHPACSGSPITVTITDECPGGPCASEPVHIDLSGKAMGALAKPGQADQLRSAGVIRVNYKRAACLYRGTNIVFRMDAGANPYYISFVVEYENGDGDLSNVEIQPAGGSFISMQEMRSAVWKVNSGSALRGPFNIRLTSGESHKVIVAYNVIPANWKPDESYRSIVNF

SEQ ID NO: 107008 - protein, 131 aa, Arabidopsis thaliana
  peptide (1)..(131): Ceres Seq. ID no. 13621074
MGALAKPGQADQLRSAGVIRVNYKRAACLYRGTNIVFRMDAGANPYYISFVVEYENGDGDLSNVEIQPAGGSFISMQEMRSAVWKVNSGSALRGPFNIRLTSGESHKVIVAYNVIPANWKPDESYRSIVNF

SEQ ID NO: 107009 - DNA, 1585 bp, Arabidopsis thaliana
  misc_feature (1)..(1585): Ceres Seq. ID no. 13621095
  misc_feature (1)..(1585): Ortholog of  Ceres SEQ ID NO 12612314 as cited in SEQ ID NO 51420
gagctcttggatcctgttattcaaaactggattgatttacatggtcaagttatggcgtaggaagatcatcgactggtttcatgtttaccaattctacaaagtcccagaattcaacgacaacgttcaagagaatcatctctaccaaaaagtctacatgtatctaaattccttaagctcgatcgagaattctgatttcacgaacctcttcaccgggaaaaagtccaacgaaatcatcctccggttagatcggaaccaagtcgttggcgacgagtttctcggcgctagagtttgttggattaacggagaagacgaagatggagcgaggaatttcgttttgaagattcgtaaagctgacaaacggagaattctcggttcttatctccagcatatacatacagtatctgatgagcttgaacagaggaacacagagcttaagcttttcatcaacgtcggaatcgatgatcatctgaataagaagaagaagaagaacggacggtggagatcgattccgtttgatcatccttgtaccttcgacaacatcgccatggaaacggatctgaagaacaaagtcaaatctgatctcgaatctttcctcaaaggtaaacagtattataatcgtctgggccgtgtttggaaacggagttatctcttatacggaccttccggtaccggaaaatcaagcttcgtcgcagcaatggcgaatttcttagattacgatgtttacgatatagatctctccaaagtagttgatgattcagatcttaagatgcttctgttacaaaccagaggcaaatcagtgatcgtgatcgaagatctagatcgacacctctcgacgaaatcaacggctgtgaatttatctgggattttgaatttcactgatagtattctcagctcttgcaccgccgatgaacggatcatggtgtttacgatgactgggaaagaacaaattgacccggctatgcttcgaccgggtcgggtcgacgtacacattcattttcccttatgtgatttcacggcgtttaaaacgctcgctaataactacttaggtgttaaagagcacaagcttttctctcaagttgaaggaatatttcaaaacggtgcgtctttgagtcccgccgagatcggagagttgatgatcgcgaatcgtaactcgccgactcgtgcattgaagcatgtcatcaatgctttgcagactgatggtgatcggagaggaactggacgacgtttgcttttagaaaatggttcgagaaagtcgacgtcggaggatgtttctgatgatatgagtggttcgctttgcggcggtggcggaggaagttcgccggcggtgaaggagtttaggaagttgtatgggttgttgagaattaaaagtagtagaaaatctggatcgttcgatgtggctcgagagatgagggacggctagtgattaaaaagtttttaaaagtcagcagccacgtgggttggttttattggttgagagagagtctggacaaaaagcgtagactagagaaagttgttactctgtttttattgtttttgggttttagttgatgtacagaagtttataagattttgcttttgagtcccc

SEQ ID NO: 107010 - protein, 472 aa, Arabidopsis thaliana
  peptide (1)..(472): Ceres Seq. ID no. 13621096
SSWILLFKTGLIYMVKLWRRKIIDWFHVYQFYKVPEFNDNVQENHLYQKVYMYLNSLSSIENSDFTNLFTGKKSNEIILRLDRNQVVGDEFLGARVCWINGEDEDGARNFVLKIRKADKRRILGSYLQHIHTVSDELEQRNTELKLFINVGIDDHLNKKKKKNGRWRSIPFDHPCTFDNIAMETDLKNKVKSDLESFLKGKQYYNRLGRVWKRSYLLYGPSGTGKSSFVAAMANFLDYDVYDIDLSKVVDDSDLKMLLLQTRGKSVIVIEDLDRHLSTKSTAVNLSGILNFTDSILSSCTADERIMVFTMTGKEQIDPAMLRPGRVDVHIHFPLCDFTAFKTLANNYLGVKEHKLFSQVEGIFQNGASLSPAEIGELMIANRNSPTRALKHVINALQTDGDRRGTGRRLLLENGSRKSTSEDVSDDMSGSLCGGGGGSSPAVKEFRKLYGLLRIKSSRKSGSFDVAREMRDG

SEQ ID NO: 107011 - protein, 459 aa, Arabidopsis thaliana
  peptide (1)..(459): Ceres Seq. ID no. 13621097
MVKLWRRKIIDWFHVYQFYKVPEFNDNVQENHLYQKVYMYLNSLSSIENSDFTNLFTGKKSNEIILRLDRNQVVGDEFLGARVCWINGEDEDGARNFVLKIRKADKRRILGSYLQHIHTVSDELEQRNTELKLFINVGIDDHLNKKKKKNGRWRSIPFDHPCTFDNIAMETDLKNKVKSDLESFLKGKQYYNRLGRVWKRSYLLYGPSGTGKSSFVAAMANFLDYDVYDIDLSKVVDDSDLKMLLLQTRGKSVIVIEDLDRHLSTKSTAVNLSGILNFTDSILSSCTADERIMVFTMTGKEQIDPAMLRPGRVDVHIHFPLCDFTAFKTLANNYLGVKEHKLFSQVEGIFQNGASLSPAEIGELMIANRNSPTRALKHVINALQTDGDRRGTGRRLLLENGSRKSTSEDVSDDMSGSLCGGGGGSSPAVKEFRKLYGLLRIKSSRKSGSFDVAREMRDG

SEQ ID NO: 107012 - protein, 421 aa, Arabidopsis thaliana
  peptide (1)..(421): Ceres Seq. ID no. 13621098
MYLNSLSSIENSDFTNLFTGKKSNEIILRLDRNQVVGDEFLGARVCWINGEDEDGARNFVLKIRKADKRRILGSYLQHIHTVSDELEQRNTELKLFINVGIDDHLNKKKKKNGRWRSIPFDHPCTFDNIAMETDLKNKVKSDLESFLKGKQYYNRLGRVWKRSYLLYGPSGTGKSSFVAAMANFLDYDVYDIDLSKVVDDSDLKMLLLQTRGKSVIVIEDLDRHLSTKSTAVNLSGILNFTDSILSSCTADERIMVFTMTGKEQIDPAMLRPGRVDVHIHFPLCDFTAFKTLANNYLGVKEHKLFSQVEGIFQNGASLSPAEIGELMIANRNSPTRALKHVINALQTDGDRRGTGRRLLLENGSRKSTSEDVSDDMSGSLCGGGGGSSPAVKEFRKLYGLLRIKSSRKSGSFDVAREMRDG

SEQ ID NO: 107013 - DNA, 1370 bp, Arabidopsis thaliana
  misc_feature (1)..(1370): Ceres Seq. ID no. 13621099
  misc_feature (1)..(1370): Ortholog of  Ceres SEQ ID NO 15176803 as cited in SEQ ID NO 52778
  misc_feature (1)..(1370): Ortholog of  Ceres SEQ ID NO 14302283 as cited in SEQ ID NO 68688
attcttcttctaaaaaatcttgacaactttttgtttttgttttctttctctgaattttttaaaagagagagagctatgtagctatgaaacagtaagagatatagatatagagagacagagaaagatgatgatcagtgaagttaggctaaacccactttctatttatgtataattaggtcaatcacatcaccaatctcctcctccaattctcctcctctccttccaaattctagggttttgcttgtatctcaccccctttctcaattccctagggaaactgtgaatttcatcaaattccattattttttggtcacacccttaaagagatctgagagttctaaagatgatgacagatttatctctcacgagagatgaagatgaagaagaagcaaagcccttagcagaagaagaaggagcgcgtgaagtagcagacagagagcacatgttcgacaaagttgtgactccaagtgatgtcggaaaactaaaccgacttgtgatcccaaagcaacacgcagagagattcttccctttagattcatcttcaaacgagaaaggtttgcttttaaacttcgaagatctcactggcaaatcttggaggttccgttactcttactggaacagtagtcaaagctatgtcatgactaaaggttggagcagattcgttaaagacaaaaagcttgacgccggagatattgtctctttccaaagatgtgtcggagattcaggaagagatagccgtttgtttattgattggaggagaagacctaaagtccctgaccatcctcatttcgccgccggagctatgttccctaggttttacagctttccttcgaccaattacagtctttataatcatcagcagcaacgtcatcatcacagtggtggtggttataattatcatcaaattccgagagaatttggttatggttacttcgttaggtcagtggatcagaggaacaatcctgcggctgcggtggctgatccgttggtgattgaatctgtgccggtgatgatgcacgggagagctaatcaggaacttgttggaacggccgggaagagactgaggctttttggagttgatatggaatgcggcgagagcggaatgaccaacagtacggaggaggaatcatcatcttccggtggaagtttgccacgtggaggcggtggtggtgcttcatcttcctctttctttcagctgagacttggaagcagcagtgaagatgatcacttcactaagaaaggaaagtcttcattgtcttttgatttggatcaataataatgatgatgatgaaattagttggtattttaagaaaaaaaacatacatatataattctatatatatgacaacataatgcattgatttcattat

SEQ ID NO: 107014 - protein, 310 aa, Arabidopsis thaliana
  peptide (1)..(310): Ceres Seq. ID no. 13621100
MMTDLSLTRDEDEEEAKPLAEEEGAREVADREHMFDKVVTPSDVGKLNRLVIPKQHAERFFPLDSSSNEKGLLLNFEDLTGKSWRFRYSYWNSSQSYVMTKGWSRFVKDKKLDAGDIVSFQRCVGDSGRDSRLFIDWRRRPKVPDHPHFAAGAMFPRFYSFPSTNYSLYNHQQQRHHHSGGGYNYHQIPREFGYGYFVRSVDQRNNPAAAVADPLVIESVPVMMHGRANQELVGTAGKRLRLFGVDMECGESGMTNSTEEESSSSGGSLPRGGGGGASSSSFFQLRLGSSSEDDHFTKKGKSSLSFDLDQ

SEQ ID NO: 107015 - protein, 309 aa, Arabidopsis thaliana
  peptide (1)..(309): Ceres Seq. ID no. 13621101
MTDLSLTRDEDEEEAKPLAEEEGAREVADREHMFDKVVTPSDVGKLNRLVIPKQHAERFFPLDSSSNEKGLLLNFEDLTGKSWRFRYSYWNSSQSYVMTKGWSRFVKDKKLDAGDIVSFQRCVGDSGRDSRLFIDWRRRPKVPDHPHFAAGAMFPRFYSFPSTNYSLYNHQQQRHHHSGGGYNYHQIPREFGYGYFVRSVDQRNNPAAAVADPLVIESVPVMMHGRANQELVGTAGKRLRLFGVDMECGESGMTNSTEEESSSSGGSLPRGGGGGASSSSFFQLRLGSSSEDDHFTKKGKSSLSFDLDQ

SEQ ID NO: 107016 - protein, 277 aa, Arabidopsis thaliana
  peptide (1)..(277): Ceres Seq. ID no. 13621102
MFDKVVTPSDVGKLNRLVIPKQHAERFFPLDSSSNEKGLLLNFEDLTGKSWRFRYSYWNSSQSYVMTKGWSRFVKDKKLDAGDIVSFQRCVGDSGRDSRLFIDWRRRPKVPDHPHFAAGAMFPRFYSFPSTNYSLYNHQQQRHHHSGGGYNYHQIPREFGYGYFVRSVDQRNNPAAAVADPLVIESVPVMMHGRANQELVGTAGKRLRLFGVDMECGESGMTNSTEEESSSSGGSLPRGGGGGASSSSFFQLRLGSSSEDDHFTKKGKSSLSFDLDQ

SEQ ID NO: 107017 - DNA, 692 bp, Arabidopsis thaliana
  misc_feature (1)..(692): Ceres Seq. ID no. 13621156
  misc_feature (1)..(692): Ortholog of  Ceres SEQ ID NO 13598935 as cited in SEQ ID NO 1239
  misc_feature (1)..(692): Ortholog of  Ceres SEQ ID NO 13598171 as cited in SEQ ID NO 61357
  misc_feature (1)..(692): Ortholog of  Ceres SEQ ID NO 13664149 as cited in SEQ ID NO 61490
aaactcattttactctcacaattacaaacactttgttacaatttagaccccaccagaaaaaagcgaaaatggcaaaagaggaatatgtatcaagaatgttggttatgttaataatgataatgccactggttgctcagggatcgagactgcatagttgggctaatcggcttgaggaaacagggaaggacaaggtaacaaaccttcagttctatttccatgacaccttgagcggcaagaatccaaccgcagttaaggtggctcagggcacagacaccgaaaaatccccgacgctgttcggcgctgtgttcatggtcgacgacgctctcaccgagaccgctgatccaaaatccaaactcgttggacgggcgcaaggcctttacggttcttcatgtaaagaagaagtaggtttgataatggccatgagcttctgtttcgaggacggtccttacaaggacagcaccataagcatgatcgggaagaactccgcgatgaacccaatccgagaaatgcctattgttggcggcacgggaatgttccggatggctcgtggctatgctattgcccggactaattggtttgatcccaaaaccggtgatgccatcgttggctataacgttaccattatgcactagaaaggctttgtatcatataatacggcgacgttttgcaatgtatacacgtaacatttcact

SEQ ID NO: 107018 - protein, 209 aa, Arabidopsis thaliana
  peptide (1)..(209): Ceres Seq. ID no. 13621157
THFTLTITNTLLQFRPHQKKAKMAKEEYVSRMLVMLIMIMPLVAQGSRLHSWANRLEETGKDKVTNLQFYFHDTLSGKNPTAVKVAQGTDTEKSPTLFGAVFMVDDALTETADPKSKLVGRAQGLYGSSCKEEVGLIMAMSFCFEDGPYKDSTISMIGKNSAMNPIREMPIVGGTGMFRMARGYAIARTNWFDPKTGDAIVGYNVTIMH

SEQ ID NO: 107019 - protein, 187 aa, Arabidopsis thaliana
  peptide (1)..(187): Ceres Seq. ID no. 13621158
MAKEEYVSRMLVMLIMIMPLVAQGSRLHSWANRLEETGKDKVTNLQFYFHDTLSGKNPTAVKVAQGTDTEKSPTLFGAVFMVDDALTETADPKSKLVGRAQGLYGSSCKEEVGLIMAMSFCFEDGPYKDSTISMIGKNSAMNPIREMPIVGGTGMFRMARGYAIARTNWFDPKTGDAIVGYNVTIMH

SEQ ID NO: 107020 - protein, 178 aa, Arabidopsis thaliana
  peptide (1)..(178): Ceres Seq. ID no. 13621159
MLVMLIMIMPLVAQGSRLHSWANRLEETGKDKVTNLQFYFHDTLSGKNPTAVKVAQGTDTEKSPTLFGAVFMVDDALTETADPKSKLVGRAQGLYGSSCKEEVGLIMAMSFCFEDGPYKDSTISMIGKNSAMNPIREMPIVGGTGMFRMARGYAIARTNWFDPKTGDAIVGYNVTIMH

SEQ ID NO: 107021 - DNA, 1201 bp, Arabidopsis thaliana
  misc_feature (1)..(1201): Ceres Seq. ID no. 13621160
  misc_feature (1)..(1201): Ortholog of  Ceres SEQ ID NO 14307265 as cited in SEQ ID NO 54298
aaagtttgcatctttacttgggttgtgtctggaatcaattacttcctaaaggttgccatttgttaacttactctgttagtctactaccaccaataactatgtttttcgatggataccattatcatggaacaacctttgagcagagttaccggtgttatccggcatcttttatcgacaagccacaacttgaaagtggtgacaagattataatgccaccatcagcccttgatcgtctagcctctttgcatattgactatccgatgctgtttgagcttcgtaatgctggaattgaacgtgttacacactgtggagtccttgagttcattgcagaagaaggcatgatttacatgccatattggatgatgcagaatctgctgctgcaagaaggagacattgtgagagttagaaatgtcactcttccaaagggaacttacgttaaactacagccccacacaacagacttcctggatatatccaacccgaaagccatcttggagactgctttgagaaattattcatgcctaactagtggggatagcattatggttccatacaacaataagaagtacttcatagatatagttgaaacaaagcctgctaacgcaatcagcatcatagaaacagactgtgaggttgatttcgcacctcccctcgattacaaggagcctgaacgtcccacagcaccttctgcagctaagggtccggcaaaagctgaggaggttgtggatgaacctgaaccaaagttcaaccctttcaccggatctggaagacggttagatgggagacctcttgcctatgagccagcgccagcctctagctcaaaaggcaaacaacctgttgtcgctaatggtaatggacagtcatctgtagcaagtagctcagagaaagctacacgagctcagggaaagcttgtatttggggctaacggaaaccgtgctccaaaagaagctgctccgaaagttggagctgcaaaagagacaaagaaagaggaacaagagaagaaagacgagcccaagtttcaagctttctctgggaagaagtattcattgaggggttgatcaactcacacaatgggtctactcagtctatttatgacctctcatgttgtgtactaaaaatacaaggaaaacaaataagtgaataaatctctggctcctcttgacgcggcttgttttctttatcagattcaatgcaactttct

SEQ ID NO: 107022 - protein, 351 aa, Arabidopsis thaliana
  peptide (1)..(351): Ceres Seq. ID no. 13621161
SLHLYLGCVWNQLLPKGCHLLTYSVSLLPPITMFFDGYHYHGTTFEQSYRCYPASFIDKPQLESGDKIIMPPSALDRLASLHIDYPMLFELRNAGIERVTHCGVLEFIAEEGMIYMPYWMMQNLLLQEGDIVRVRNVTLPKGTYVKLQPHTTDFLDISNPKAILETALRNYSCLTSGDSIMVPYNNKKYFIDIVETKPANAISIIETDCEVDFAPPLDYKEPERPTAPSAAKGPAKAEEVVDEPEPKFNPFTGSGRRLDGRPLAYEPAPASSSKGKQPVVANGNGQSSVASSSEKATRAQGKLVFGANGNRAPKEAAPKVGAAKETKKEEQEKKDEPKFQAFSGKKYSLRG

SEQ ID NO: 107023 - protein, 319 aa, Arabidopsis thaliana
  peptide (1)..(319): Ceres Seq. ID no. 13621162
MFFDGYHYHGTTFEQSYRCYPASFIDKPQLESGDKIIMPPSALDRLASLHIDYPMLFELRNAGIERVTHCGVLEFIAEEGMIYMPYWMMQNLLLQEGDIVRVRNVTLPKGTYVKLQPHTTDFLDISNPKAILETALRNYSCLTSGDSIMVPYNNKKYFIDIVETKPANAISIIETDCEVDFAPPLDYKEPERPTAPSAAKGPAKAEEVVDEPEPKFNPFTGSGRRLDGRPLAYEPAPASSSKGKQPVVANGNGQSSVASSSEKATRAQGKLVFGANGNRAPKEAAPKVGAAKETKKEEQEKKDEPKFQAFSGKKYSLRG

SEQ ID NO: 107024 - protein, 282 aa, Arabidopsis thaliana
  peptide (1)..(282): Ceres Seq. ID no. 13621163
MPPSALDRLASLHIDYPMLFELRNAGIERVTHCGVLEFIAEEGMIYMPYWMMQNLLLQEGDIVRVRNVTLPKGTYVKLQPHTTDFLDISNPKAILETALRNYSCLTSGDSIMVPYNNKKYFIDIVETKPANAISIIETDCEVDFAPPLDYKEPERPTAPSAAKGPAKAEEVVDEPEPKFNPFTGSGRRLDGRPLAYEPAPASSSKGKQPVVANGNGQSSVASSSEKATRAQGKLVFGANGNRAPKEAAPKVGAAKETKKEEQEKKDEPKFQAFSGKKYSLRG

SEQ ID NO: 107025 - DNA, 1959 bp, Arabidopsis thaliana
  misc_feature (1)..(1959): Ceres Seq. ID no. 13621187
  misc_feature (1)..(1959): Ortholog of  Ceres SEQ ID NO 14301836 as cited in SEQ ID NO 67386
ctctctcgtttctcaactaccgtctctctgcttcttctgttcccaaaaccggaaactttacttcgtggaattttcccttgtttctgaaatggaagacacaacatttaccaaagtgttcgttggaggattagcttgggaaacacacaaagtctctctcaggaattactttgaacagtttggtgacattgttgaagctgtcgttatcactgataaatctagtggtagatctaaaggctatggctttgttactttttgtgatccggaagcagctcagaaagcttgtgtagatccagctcctgttattgatggaagaagagctaattgtaatcttgctgcttttggtgttcagagatccaaaccttcttctcctattcatggacatgtaggaggaagaggcatgaaggtgactagccctttcaagacacactttgggaccgcggctactgctattccttccccacttccattctcccactacacacttccttacactaatccttttgggttctcttcatactcaatggattacaattaccccacgagctattacaatgtttatggaggggcaactgctcagcatccaatgtatggaagcggaccaatgactggtgtagcagcagcaccagcagcagggttctacccatatctccagtttgctgaaggaaatggacctgtcactggttatgctcccctccactaccccaaccacatgtttcactattctgctcccgggggaaactacccgcatcacaatggttcaccagtgtctcttgcaccttcaccagtcataccatcagtttgctttgcagttccacaggcttgaccatgaaggctcgtggttcatagttccatgatgctatgtaggggaccaattcatttaaatccttaaggcaaagctttgtttactactttcatccacatgcctctgaagtttcacaagacctgtggcctaaccatggttgcccttttccctttatgcttctaacccattagacaaagaagcccataatttggagtttgggcgtctttgcaagttctagttaagtctcacataggggtttaactaggaccatcttcatacacattactcatcttttcattttattcattgcattacctgctttctgaacgaaggtttcgttcaagatagcttgttcgagctgtagaagtaaacagttaccgtcttttgcacagtgcctcgcaaaggcaagcaattttgtagaaaaacttaaaaacttaggattggctgatcaacaagaaaggaaataaggatttcccgggaaaggcacaagaagtgaattgccaccacctggaagtgttgaagtagtgtgtgcaaaggtgtgcacactacttcacgctatatccattttaatgtgcagtcttaggattattagatctaggaccatgttgttacacattgtcttgtagtagaacgctagaacataaacttcctttgaggataaaggaattgctaacacatgtatattctcggtggctaagctttggagttatagccacacttgagctaacttagattaagatcatttttaagattcaaaatttagattgctcatcatatcttgaaccaaccccactaatggattgtggggttcttgcatttgcatgtatttttgcctcttgggagatattttggttccctttaggttcttctcataacaatcaaccaaaccagttgaccaaccatggttaggaatttcaggtgagaggtattcatcacctctttatctctcttttgtacttctttcctctatttcttcaagactaaaaactctctttttatgtaatttgttgttatatcttgtaagctgtgtgtttctgattctatgtaagaaaactaaaagctttcagtttccatcctcggtggttggaaaatgaaactgtgattgcaatattttactttgatctgatatataatcctcttgtatgaggttatgacaa

SEQ ID NO: 107026 - protein, 273 aa, Arabidopsis thaliana
  peptide (1)..(273): Ceres Seq. ID no. 13621188
SLVSQLPSLCFFCSQNRKLYFVEFSLVSEMEDTTFTKVFVGGLAWETHKVSLRNYFEQFGDIVEAVVITDKSSGRSKGYGFVTFCDPEAAQKACVDPAPVIDGRRANCNLAAFGVQRSKPSSPIHGHVGGRGMKVTSPFKTHFGTAATAIPSPLPFSHYTLPYTNPFGFSSYSMDYNYPTSYYNVYGGATAQHPMYGSGPMTGVAAAPAAGFYPYLQFAEGNGPVTGYAPLHYPNHMFHYSAPGGNYPHHNGSPVSLAPSPVIPSVCFAVPQA

SEQ ID NO: 107027 - protein, 244 aa, Arabidopsis thaliana
  peptide (1)..(244): Ceres Seq. ID no. 13621189
MEDTTFTKVFVGGLAWETHKVSLRNYFEQFGDIVEAVVITDKSSGRSKGYGFVTFCDPEAAQKACVDPAPVIDGRRANCNLAAFGVQRSKPSSPIHGHVGGRGMKVTSPFKTHFGTAATAIPSPLPFSHYTLPYTNPFGFSSYSMDYNYPTSYYNVYGGATAQHPMYGSGPMTGVAAAPAAGFYPYLQFAEGNGPVTGYAPLHYPNHMFHYSAPGGNYPHHNGSPVSLAPSPVIPSVCFAVPQA

SEQ ID NO: 107028 - protein, 141 aa, Arabidopsis thaliana
  peptide (1)..(141): Ceres Seq. ID no. 13621190
MKVTSPFKTHFGTAATAIPSPLPFSHYTLPYTNPFGFSSYSMDYNYPTSYYNVYGGATAQHPMYGSGPMTGVAAAPAAGFYPYLQFAEGNGPVTGYAPLHYPNHMFHYSAPGGNYPHHNGSPVSLAPSPVIPSVCFAVPQA

SEQ ID NO: 107029 - DNA, 2724 bp, Arabidopsis thaliana
  misc_feature (1)..(2724): Ceres Seq. ID no. 13621191
  misc_feature (1)..(2724): Ortholog of  Ceres SEQ ID NO 14316144 as cited in SEQ ID NO 52397
  misc_feature (2459)..(2459): n is a, c, t, g, unknown, or other
  misc_feature (2669)..(2669): n is a, c, t, g, unknown, or other
atgaattcactctccttcactctcttcatattttctgtcattacctttctacaatgtttaagttcaaccggagctgccacgtgtcatcctgatgacgaggcgggtcttttagctttcaaatccggtataacacaagatccttcgggcatgctcagctcttggaagaagggtacttcttgctgctcgtggaaaggtatcatttgctttaacagtgaccgcgtcaccatgcttgaactagtaggatttcccaaaaaacccgaacgttccctctccggcactctctcaccgtcgctagccaaactccagcacctaagcgtgattagcttaggaggtcatgtgaacatcactggatcttttcctaagttccttctccaattaccaaagctaaggtacgttgacatccaaaataaccgtctctccggtccacttccggctaacatcggcgtgctaagcttgttggaagaaatctttcttcaaggaaataagttcaccggtcccatcccgaactcgatatcgaatctaactcgattatcttatctcatttttggcggtaatctcctaaccgggactatacccttagggattgctaatctcaagctcatgcagaatctgcaactcggcgacaaccgcctctctggcaccatcccggatattttcgaatccatgaagttgctcaaatttctcgatctctccagcaacgaattctacgggaaacttcctctatcgattgctacactggcaccgacactcctggccctccaagtgagccagaacaatctctctggggcgatcccaaactatatatcaagattcaacaagcttgaaaagttagatctctccaagaaccggttctcgggggttgtgcctcaaggtttcgtcaatctcaccaatattaacaatcttgatctctctcacaatcttctaaccggtcaatttcctgacttgaccgtcaacactatcgaatatcttgatctctcttacaaccaatttcaactagaaacgattccacaatgggtgaccttgttgccgagcgtcttcttgttgaagctagcaaaatgcgggatcaagatgagcttagatgattggaagccagcggaaccgttgtactaccattacattgatttgtcgaaaaacgagatctcagggagtctagaaaggttcttgaacgagacgaggtatctgcttgagtttcgggcggcggagaacaaacttcgattcgatatggggaacctaacgtttccgaggacactaaaaactttggatctgtcaaggaacttggtatttggtaaggtgcctgtcacggtggctggtctacaaagactaaacttaagtcaaaaccatctttgtggagaacttcctacgacaaagttcccggctagcgccttcgccggtgctattatctttctccggtgttttcgttccaccggagctgccacgtgtgatcctgatgacgaagcgggtcttttaggtttcaaatcgggtataaccaaagatccttcgggcattctcagctcatggaagaaaggtactgactgctgcttttggagcggtgtcttttgcgtcaacaacgaccgcgtcacacaactaagtgtggatggagacttttctcttgacggaaactctccctccggcactatctcgccgatgctggccaaacttcaacacctcgagaggattcttctcacctctcttcgaaagattactggtccttttcctcaattcattttccgattaccaaagctaaattacataaacatccaaggttgccttctctctggtccccttccagccaacatcggcgagctaagtcaattgaaaactttagttatcgacggaaacatgttcacgggtcatattccaagttcgatagccaatttgactcggttaacttggcttaacctcggcaacaaccgcctctctggcaccattccaaacatatttaaatccatgaaagagctcaattctcttgatctctcccgcaacggatttttcgggagacttcctccgtcgattgcttcgcttgcaccaactctctattacctcgatctgagccagaacaatctctcggggacgatcccaaactatttatcaaggtttgaggcgctctccacattggtactctcgaagaataagtactcgggggtcgtgccaatgagtttcaccaatctgatcaacattaccaatcttgatctctcccacaatcttctaactggtccattccctgtattgaaaagcattaacggcattgaatctctggatttgtcgtacaacaagtttcacctgaaaacgattccaaaatggatgatatcgtcaccatccatctactcattgaagttggcaaaatgtgggctgaagataagcttagatgattggaagctagcagggacctactactatgattccatcgatctgtctgaaaacgagatctcagggagtccggctaagttcctcagccagangaagtatctgatggagttccgagcggcagggaacaaactccgattcgatttggggaagctgacgtttgtgaggactcttgaaaccttggatttgtcaaggaacttgatattcgggagagtgctggcaacatttgctggactgaagacaatgaacgtgagtcaaaaccatctttgcggaaaacttccggtgacaaagttcccggccagtgngtttgcgggtaacgactgtctttgtggctctccactttctccttgtaaagtgtag

SEQ ID NO: 107030 - protein, 907 aa, Arabidopsis thaliana
  peptide (1)..(907): Ceres Seq. ID no. 13621192
  misc_feature (820)..(820): Xaa is any aa, unknown or other
  misc_feature (890)..(890): Xaa is any aa, unknown or other
MNSLSFTLFIFSVITFLQCLSSTGAATCHPDDEAGLLAFKSGITQDPSGMLSSWKKGTSCCSWKGIICFNSDRVTMLELVGFPKKPERSLSGTLSPSLAKLQHLSVISLGGHVNITGSFPKFLLQLPKLRYVDIQNNRLSGPLPANIGVLSLLEEIFLQGNKFTGPIPNSISNLTRLSYLIFGGNLLTGTIPLGIANLKLMQNLQLGDNRLSGTIPDIFESMKLLKFLDLSSNEFYGKLPLSIATLAPTLLALQVSQNNLSGAIPNYISRFNKLEKLDLSKNRFSGVVPQGFVNLTNINNLDLSHNLLTGQFPDLTVNTIEYLDLSYNQFQLETIPQWVTLLPSVFLLKLAKCGIKMSLDDWKPAEPLYYHYIDLSKNEISGSLERFLNETRYLLEFRAAENKLRFDMGNLTFPRTLKTLDLSRNLVFGKVPVTVAGLQRLNLSQNHLCGELPTTKFPASAFAGAIIFLRCFRSTGAATCDPDDEAGLLGFKSGITKDPSGILSSWKKGTDCCFWSGVFCVNNDRVTQLSVDGDFSLDGNSPSGTISPMLAKLQHLERILLTSLRKITGPFPQFIFRLPKLNYINIQGCLLSGPLPANIGELSQLKTLVIDGNMFTGHIPSSIANLTRLTWLNLGNNRLSGTIPNIFKSMKELNSLDLSRNGFFGRLPPSIASLAPTLYYLDLSQNNLSGTIPNYLSRFEALSTLVLSKNKYSGVVPMSFTNLINITNLDLSHNLLTGPFPVLKSINGIESLDLSYNKFHLKTIPKWMISSPSIYSLKLAKCGLKISLDDWKLAGTYYYDSIDLSENEISGSPAKFLSQXKYLMEFRAAGNKLRFDLGKLTFVRTLETLDLSRNLIFGRVLATFAGLKTMNVSQNHLCGKLPVTKFPASXFAGNDCLCGSPLSPCKV

SEQ ID NO: 107031 - protein, 858 aa, Arabidopsis thaliana
  peptide (1)..(858): Ceres Seq. ID no. 13621193
  misc_feature (771)..(771): Xaa is any aa, unknown or other
  misc_feature (841)..(841): Xaa is any aa, unknown or other
MLSSWKKGTSCCSWKGIICFNSDRVTMLELVGFPKKPERSLSGTLSPSLAKLQHLSVISLGGHVNITGSFPKFLLQLPKLRYVDIQNNRLSGPLPANIGVLSLLEEIFLQGNKFTGPIPNSISNLTRLSYLIFGGNLLTGTIPLGIANLKLMQNLQLGDNRLSGTIPDIFESMKLLKFLDLSSNEFYGKLPLSIATLAPTLLALQVSQNNLSGAIPNYISRFNKLEKLDLSKNRFSGVVPQGFVNLTNINNLDLSHNLLTGQFPDLTVNTIEYLDLSYNQFQLETIPQWVTLLPSVFLLKLAKCGIKMSLDDWKPAEPLYYHYIDLSKNEISGSLERFLNETRYLLEFRAAENKLRFDMGNLTFPRTLKTLDLSRNLVFGKVPVTVAGLQRLNLSQNHLCGELPTTKFPASAFAGAIIFLRCFRSTGAATCDPDDEAGLLGFKSGITKDPSGILSSWKKGTDCCFWSGVFCVNNDRVTQLSVDGDFSLDGNSPSGTISPMLAKLQHLERILLTSLRKITGPFPQFIFRLPKLNYINIQGCLLSGPLPANIGELSQLKTLVIDGNMFTGHIPSSIANLTRLTWLNLGNNRLSGTIPNIFKSMKELNSLDLSRNGFFGRLPPSIASLAPTLYYLDLSQNNLSGTIPNYLSRFEALSTLVLSKNKYSGVVPMSFTNLINITNLDLSHNLLTGPFPVLKSINGIESLDLSYNKFHLKTIPKWMISSPSIYSLKLAKCGLKISLDDWKLAGTYYYDSIDLSENEISGSPAKFLSQXKYLMEFRAAGNKLRFDLGKLTFVRTLETLDLSRNLIFGRVLATFAGLKTMNVSQNHLCGKLPVTKFPASXFAGNDCLCGSPLSPCKV

SEQ ID NO: 107032 - protein, 832 aa, Arabidopsis thaliana
  peptide (1)..(832): Ceres Seq. ID no. 13621194
  misc_feature (745)..(745): Xaa is any aa, unknown or other
  misc_feature (815)..(815): Xaa is any aa, unknown or other
MLELVGFPKKPERSLSGTLSPSLAKLQHLSVISLGGHVNITGSFPKFLLQLPKLRYVDIQNNRLSGPLPANIGVLSLLEEIFLQGNKFTGPIPNSISNLTRLSYLIFGGNLLTGTIPLGIANLKLMQNLQLGDNRLSGTIPDIFESMKLLKFLDLSSNEFYGKLPLSIATLAPTLLALQVSQNNLSGAIPNYISRFNKLEKLDLSKNRFSGVVPQGFVNLTNINNLDLSHNLLTGQFPDLTVNTIEYLDLSYNQFQLETIPQWVTLLPSVFLLKLAKCGIKMSLDDWKPAEPLYYHYIDLSKNEISGSLERFLNETRYLLEFRAAENKLRFDMGNLTFPRTLKTLDLSRNLVFGKVPVTVAGLQRLNLSQNHLCGELPTTKFPASAFAGAIIFLRCFRSTGAATCDPDDEAGLLGFKSGITKDPSGILSSWKKGTDCCFWSGVFCVNNDRVTQLSVDGDFSLDGNSPSGTISPMLAKLQHLERILLTSLRKITGPFPQFIFRLPKLNYINIQGCLLSGPLPANIGELSQLKTLVIDGNMFTGHIPSSIANLTRLTWLNLGNNRLSGTIPNIFKSMKELNSLDLSRNGFFGRLPPSIASLAPTLYYLDLSQNNLSGTIPNYLSRFEALSTLVLSKNKYSGVVPMSFTNLINITNLDLSHNLLTGPFPVLKSINGIESLDLSYNKFHLKTIPKWMISSPSIYSLKLAKCGLKISLDDWKLAGTYYYDSIDLSENEISGSPAKFLSQXKYLMEFRAAGNKLRFDLGKLTFVRTLETLDLSRNLIFGRVLATFAGLKTMNVSQNHLCGKLPVTKFPASXFAGNDCLCGSPLSPCKV

SEQ ID NO: 107033 - DNA, 1609 bp, Arabidopsis thaliana
  misc_feature (1)..(1609): Ceres Seq. ID no. 13621209
  misc_feature (1)..(1609): Ortholog of  Ceres SEQ ID NO 13594349 as cited in SEQ ID NO 58161
  misc_feature (1)..(1609): Ortholog of  Ceres SEQ ID NO 13663419 as cited in SEQ ID NO 66561
atggtaaaacaacaagattggtccgtgactacttgtgttttgctattcttgtttttggcatcacaaatccattgtaggagcggaatacatgtttcaaaacgtttggaggggtcaaagcaaggagatggtaagtcaggtgatacgagcttcaatgtgcttcgtcgcgtgctttcgccaaaggagaaagatctaatcaagaagctccccggacaaccttccggcgttagttttagacagtatggcggttatgtgcccgtaaacgaaccatccagtcggtttttgtactattattttgtggaagccatcaaacccaatacatctactcctctggtcatctggttcaacggaggaccggcctgctcatctctaggtggggcatttctagagcttggtcccttccgcgtacatagcggcggcagaaaacttttccgcaatccttattcatggaacaacgaggcgaacgtgttgttcttagaatcgcctgtaacgacaggtttctcgtactcgagtaatccaattgatttggaggaattgggggagaaaggggacaaggcaacagcagaggataactacattttcttgatgaattggctagaaaggtttcccgaatataaaggaagagacatttacatcgccggtcagagttacgctggccactatgttccccaacttgctcagatcatcattcaccgtaacaagaaaaccttagtcaacctacgaggaattttgatcggtaatccatcacttctcacatcgatccaggatccatacggctacgaatttatgttaagtcatggtttgatgtcccaacaacaaatggacaattataatcaattctgcctaagagatgacttatatgataatgacaagtgcgcactttcggtaaaaacaatcgatgatgcaaaaaagcacttggacacttacaacatatacgctcctgtgtgtctaaactccacgttgagcaggatatccaagaaatgcaccacagttttggaggttgatccgtgcagtaaggactacttgaaggcttatcttaacagaaaaaaggttcaaaaagcgatacatgccaacaccaccaaattaccgtatgagtggacctcttgcaataacgaactgactgagaattggagcgaaaatgatagagacaccccgatgatacctatcctccacgagctgatgggcgagggtgtccgagtcatgatctacaatggagacgtggacctggagattccatttgcatctacattagccgtggtgaaggagatgaatctaacggttgtaaaggaatttcgtccctggtttacgggaggacagctgggagggttcacagaggattacaaagggaacttaacctttgtaactgtgaaaggagcaggtcatagtgttcctacggaccaacctatacatgctcttaatatctttaccagctttatccgtaacactccactccctcacacagcctgatttctaacttgtaccacctcgattgactgaacaatatacgttggtctataaacttaataagacactttggtccagttattgaatgatctaaagatggttatgatatgttttgtatatgtatataaaccaatttacaatgttgttt

SEQ ID NO: 107034 - protein, 487 aa, Arabidopsis thaliana
  peptide (1)..(487): Ceres Seq. ID no. 13621210
MVKQQDWSVTTCVLLFLFLASQIHCRSGIHVSKRLEGSKQGDGKSGDTSFNVLRRVLSPKEKDLIKKLPGQPSGVSFRQYGGYVPVNEPSSRFLYYYFVEAIKPNTSTPLVIWFNGGPACSSLGGAFLELGPFRVHSGGRKLFRNPYSWNNEANVLFLESPVTTGFSYSSNPIDLEELGEKGDKATAEDNYIFLMNWLERFPEYKGRDIYIAGQSYAGHYVPQLAQIIIHRNKKTLVNLRGILIGNPSLLTSIQDPYGYEFMLSHGLMSQQQMDNYNQFCLRDDLYDNDKCALSVKTIDDAKKHLDTYNIYAPVCLNSTLSRISKKCTTVLEVDPCSKDYLKAYLNRKKVQKAIHANTTKLPYEWTSCNNELTENWSENDRDTPMIPILHELMGEGVRVMIYNGDVDLEIPFASTLAVVKEMNLTVVKEFRPWFTGGQLGGFTEDYKGNLTFVTVKGAGHSVPTDQPIHALNIFTSFIRNTPLPHTA

SEQ ID NO: 107035 - protein, 293 aa, Arabidopsis thaliana
  peptide (1)..(293): Ceres Seq. ID no. 13621211
MNWLERFPEYKGRDIYIAGQSYAGHYVPQLAQIIIHRNKKTLVNLRGILIGNPSLLTSIQDPYGYEFMLSHGLMSQQQMDNYNQFCLRDDLYDNDKCALSVKTIDDAKKHLDTYNIYAPVCLNSTLSRISKKCTTVLEVDPCSKDYLKAYLNRKKVQKAIHANTTKLPYEWTSCNNELTENWSENDRDTPMIPILHELMGEGVRVMIYNGDVDLEIPFASTLAVVKEMNLTVVKEFRPWFTGGQLGGFTEDYKGNLTFVTVKGAGHSVPTDQPIHALNIFTSFIRNTPLPHTA

SEQ ID NO: 107036 - DNA, 1187 bp, Arabidopsis thaliana
  misc_feature (1)..(1187): Ceres Seq. ID no. 13621224
  misc_feature (1)..(1187): Ortholog of  Ceres SEQ ID NO 13598528 as cited in SEQ ID NO 64938
atctcttcgaggtcggttctagggtttcactacgagaatggacggagatgagctcaccgagcaggaaactgctctttatgaccgtcaaattagggtatggggagctggtgctcaaagaagattgagtaaatctcatgttttggtatctggaattaagggcactgttgctgagttttgtaagaacattgtgttggcaggagtaggtagtgtgactctgttggatgatcgattggttacaacggaagtcttcaacgcaaacttcttgattcttcctgatgaaaatgcttatgtaggcaaaaccgtagctgagatttgttgtgattcacttaaggattttaaccctatggttcatgtttcaatagagaaaggtgatttgtcaacacttggtgttgattttttcgagaagtttgatgttgtggttatcggctacagttctcgtgctactaagaaagcagttaatgaaaagtgtaggaacctagcaaaagatgtagcgttctatacagttgattgtagaggctcatgtggcgaaatatttgtcgaccttcagaattataagtacacaaagcttgatgaaacagtggaatgtgaactaacatttccaagttttgaggaggcagtttcagtaccgtggaaaccgatgccaaggagaacagcaaagctctactttgcaatgagagtgatagaactatttgaggaaactgaaggacgtaaacctggggaatgttcgctgtctgatctcccaagagttttgaaactcaaaaaggaactatgtgaaggaaattcggtcagcgagaatcatattccagatatcctcttggagagactcgtatctaataacacagaattcccaccggcttgtgccatcattggagggattctaggacaggaggtgataaaagttatatcaggcaaaggagagccgttgaagaacttcttctactttgatgcagaggatgggaaaggtgtaatcgaggacctatcccacaagctttaacttccaaacatgaaaggtgctgtgaaacgctgctcttagtaattagttccttgttgaagattgtattggaaattagactttagagtacttagaacttggctccttgtcttttgtatctactaacttggttcgctcctaaagacaatctgtaacccactatttactttaatccatcaatttacacactcctatc

SEQ ID NO: 107037 - protein, 318 aa, Arabidopsis thaliana
  peptide (1)..(318): Ceres Seq. ID no. 13621225
MDGDELTEQETALYDRQIRVWGAGAQRRLSKSHVLVSGIKGTVAEFCKNIVLAGVGSVTLLDDRLVTTEVFNANFLILPDENAYVGKTVAEICCDSLKDFNPMVHVSIEKGDLSTLGVDFFEKFDVVVIGYSSRATKKAVNEKCRNLAKDVAFYTVDCRGSCGEIFVDLQNYKYTKLDETVECELTFPSFEEAVSVPWKPMPRRTAKLYFAMRVIELFEETEGRKPGECSLSDLPRVLKLKKELCEGNSVSENHIPDILLERLVSNNTEFPPACAIIGGILGQEVIKVISGKGEPLKNFFYFDAEDGKGVIEDLSHKL

SEQ ID NO: 107038 - protein, 216 aa, Arabidopsis thaliana
  peptide (1)..(216): Ceres Seq. ID no. 13621226
MVHVSIEKGDLSTLGVDFFEKFDVVVIGYSSRATKKAVNEKCRNLAKDVAFYTVDCRGSCGEIFVDLQNYKYTKLDETVECELTFPSFEEAVSVPWKPMPRRTAKLYFAMRVIELFEETEGRKPGECSLSDLPRVLKLKKELCEGNSVSENHIPDILLERLVSNNTEFPPACAIIGGILGQEVIKVISGKGEPLKNFFYFDAEDGKGVIEDLSHKL

SEQ ID NO: 107039 - DNA, 1298 bp, Arabidopsis thaliana
  misc_feature (1)..(1298): Ceres Seq. ID no. 13621227
  misc_feature (1)..(1298): Ortholog of  Ceres SEQ ID NO 14301830 as cited in SEQ ID NO 62310
  misc_feature (1)..(1298): Ortholog of  Ceres SEQ ID NO 15179524 as cited in SEQ ID NO 0
atcttattcacacatctaattaactttaagtaccaaaaatggcgggctacaacctcgaagctatcgaagcggcacctttgaaagacgatctggatattgtgatcccaaccatcagaagcctcgactttctagagcaatggagaccatttttgcaccattaccacctgatcattgtccaagatggagacccttccatcaagatccgagttcccgagggttatgactacgagctctacaaccgtaatgatatcaacaggatccttggtccaagagctaattgtatctcctacaaagatggtggttgtcgctgctttggcttcatggtttctaaaaagaagtatatctacaccattgatgatgattgctttgtggcaaaggatccaagtgggaaagacatcaatgtgatagctcagcacataaagaaccttgaaacaccttcaacaccacactacttcaacactctctatgacccttttagagatggaactgatttcgtcagagggtatcctttcagtctaagggaaggtgtccaaaccgccatatctcatggtctttggctcaacatccctgactatgatgccccaacccaacttgtgaagccccgcgaacgtaacacgaggtatgtggatgcagtaatgacaattccaaaaagagtattgtacccaatgtgtggtatgaatcttgctttcaatagagagcttgttggacctgctatgtactttggacttatgggtgaaggccagcccatttctcggtacgatgacatgtgggctggttgggcagcaaaggtggtgtgtgaccacttgggctttggggtcaagactggtctgccgtatctgtggcacagcaaagccagtaacccattcgtgaacctgaagaaagagcataagggactccactggcaagaagatatggttcctttcttccaaaaccttcgtctctcgaaagaatctgacactgcagctaaatgttatatggaaatttcaaatatgacaaaagaaaagctcactaaagtggatccttactttgagaagttggctgatgcaatggtggtttggattgaggcgtgggaggagcttaacccgccggttaagaagaagcagagcgatggcaaagatgtcaaggccaagtgatgaagataatgagtgatcctattgttgctaatgaataagtatgttgtgagtttatagattatatgatattgtatttattttctccattttggaagtgtgcgttattatgtaataatttggcatgtattaagcgtgattggaagaacaagagaatcttacatttct

SEQ ID NO: 107040 - protein, 364 aa, Arabidopsis thaliana
  peptide (1)..(364): Ceres Seq. ID no. 13621228
MAGYNLEAIEAAPLKDDLDIVIPTIRSLDFLEQWRPFLHHYHLIIVQDGDPSIKIRVPEGYDYELYNRNDINRILGPRANCISYKDGGCRCFGFMVSKKKYIYTIDDDCFVAKDPSGKDINVIAQHIKNLETPSTPHYFNTLYDPFRDGTDFVRGYPFSLREGVQTAISHGLWLNIPDYDAPTQLVKPRERNTRYVDAVMTIPKRVLYPMCGMNLAFNRELVGPAMYFGLMGEGQPISRYDDMWAGWAAKVVCDHLGFGVKTGLPYLWHSKASNPFVNLKKEHKGLHWQEDMVPFFQNLRLSKESDTAAKCYMEISNMTKEKLTKVDPYFEKLADAMVVWIEAWEELNPPVKKKQSDGKDVKAK

SEQ ID NO: 107041 - protein, 270 aa, Arabidopsis thaliana
  peptide (1)..(270): Ceres Seq. ID no. 13621229
MVSKKKYIYTIDDDCFVAKDPSGKDINVIAQHIKNLETPSTPHYFNTLYDPFRDGTDFVRGYPFSLREGVQTAISHGLWLNIPDYDAPTQLVKPRERNTRYVDAVMTIPKRVLYPMCGMNLAFNRELVGPAMYFGLMGEGQPISRYDDMWAGWAAKVVCDHLGFGVKTGLPYLWHSKASNPFVNLKKEHKGLHWQEDMVPFFQNLRLSKESDTAAKCYMEISNMTKEKLTKVDPYFEKLADAMVVWIEAWEELNPPVKKKQSDGKDVKAK

SEQ ID NO: 107042 - DNA, 3175 bp, Arabidopsis thaliana
  misc_feature (1)..(3175): Ceres Seq. ID no. 13621234
  misc_feature (1)..(3175): Ortholog of  Ceres SEQ ID NO 13581686 as cited in SEQ ID NO 57695
  misc_feature (1)..(3175): Ortholog of  Ceres SEQ ID NO 15224315 as cited in SEQ ID NO 66131
atcgaaaattacttgagagatcgtttactttcagagagaagaataacatcaaatattttcccggaaaaattctctcattttctcgggaaaaatgttgtctctgcgtttacaaaattttcctctaaaaaagtagtgagagattccataagaccataaccagtagacaacaaattcttcatcattttgtgtctcttgtttgagatcccggtgaaatttagcggcgacgagaaaattttcaggtagagtgtgttaaaaaatgtctagagtgagttttgaagtgtcaggaggctatcactctgatgcagaagccggaaacagcggaccaatgagcggtggtcaattaccaccgatctataaaaaaccggggaactccagattcactgctgagaacagtcagagaacacgtacggcaccatacgtggacctcacggtagatgtacaagacgatacagtctctgtacatagcttgaaaatggaaggtggatctagcgttgaagagagtccggagcttactttgctgaaacgaaaccgtcttgagaagaaaacaacggtggtgaaacgtttggcgtctgtttctcacgagcttaagcgtttgacatctgtttctggtggtattggtggaagaaagccgcctcgaccggctaagttagaccggactaaatccgccgcgagtcaagcgttgaagggacttaagttcattagtaaaaccgacggtggcgccggttggtctgccgtggagaagcggtttaatcagattaccgcgactaccggtggactacttcttcggacaaagttcggtgaatgcataggaatgacttcaaaggattttgctttggaactgtttgatgcattggctagaagaaggaatataacaggggaagtgattgatggagatcaactaaaggagttttgggaacaaattaatgatcaaagttttgattctcggcttaagacattctttgacatggtggataaagatgctgatggtagacttacagaagacgaagttagagagattatcagtcttagtgcttctgcgaataatctatctacaatacagaagagagctgatgaatatgcagcattgatcatggaagagttggatccagacaatataggatacatcatgttggagagtcttgagactctgcttttgcaagcggcaacacagtctgtgataacaagtactggggagagaaagaatctgagtcatatgatgagtcagaggcttaagcctacgtttaaccgcaacccgttgaagcgatggtaccgtggtcttagattcttcttgttagacaactggcaaagatgttgggttatagtgctatggttcatagttatggctatactcttcacctacaaatatatccaatacaggcgtagccctgtgtatccagtgatgggtgattgtgtgtgcatggctaaaggtgctgcagaaacagtgaagctgaacatggctttgattctcttacctgtttgtagaaacaccatcacatggcttagaaataagaccaggttgggtcgtgttgtcccatttgatgacaatctcaacttccacaaggttatagcggtggggattatagttggagtaacgatgcacgccggggcacatttagcgtgtgatttcccgcggttactacatgcaactccagaggcatataggcctttaagacagttttttggggatgagcaaccaaagagctactggcattttgtaaactcggtagaaggtataaccggacttgtgatggttttgttaatggcgattgcattcacactagccacgccttggttcagaagagggaagctaaactatcttccaggaccattaaagaaactagctagcttcaatgccttctggtacactcatcatttgtttgtcatagtctacattcttcttgttgctcatggatactacttgtatctcaccagagactggcacaataaaacgacttggatgtatttggtggtaccagtggttctatacgcgtgtgaaaggttgataagagcattcaggtcgagcatcaaggcggtgactattaggaaagtagcagtttatccaggaaacgtgctggcaattcacttgtcaaggcctcaaaacttcaaatacaagagtggtcaatacatgtttgttaactgtgctgctgtttctccatttgaatggcatccattttcaatcacatctgcaccacaagatgattacctaagtgttcacattagagttcttggggattggacacgagctctcaaaggagtcttctctgaggtgtgtaagccaccaccggcaggagttagtggtctgcttagagccgacatgttgcatggtgcaaataatcccgacttcccgaaagtcttgattgatggtccatatggtgcaccagcacaagactacaagaagtacgaggtggttctactagttggtctcgggattggagccacaccaatgatcagtatcgtcaaagacattgttaataacatcaaggccaaggaacaagcccaactaaaccgaatggagaatggaacaagcgaaccacaacgaagtaagaaagagagtttcaggacccgtagagcttacttctattgggttacgcgtgagcaaggctctttcgattggttcaagaacataatgaacgaagtcgcggaacgagatgccaaccgcgtcatcgaaatgcataactattgtacaagtgtctatgaagaaggtgacgctcgttccgcacttatacatatgcttcaatcactaaaccatgcaaagaacggcgtcgacattgtctctggaacaagagttatgtcccatttcgctaaacctaattggagaaatgtttacaagcgtatagctatggatcatcctaacaccaaagttggagtgttttactgtggagcaccagcattgacaaaggagctaaggcatctagctttagatttcacccacaaaacaagcaccagattctccttccacaaagagaatttctaaaggacacacagagttaaaaggcctaaacaaaaaaaataaaagaaagaagcatgagttattatgtttttcgtaattttacttcccttactattttttaaaacattaatatttgtatacatatatatatatatatatatactctcttgactgtagatttctttgtatgcttttttttattgtatgattaatttgttttttctg

SEQ ID NO: 107043 - protein, 905 aa, Arabidopsis thaliana
  peptide (1)..(905): Ceres Seq. ID no. 13621235
MSRVSFEVSGGYHSDAEAGNSGPMSGGQLPPIYKKPGNSRFTAENSQRTRTAPYVDLTVDVQDDTVSVHSLKMEGGSSVEESPELTLLKRNRLEKKTTVVKRLASVSHELKRLTSVSGGIGGRKPPRPAKLDRTKSAASQALKGLKFISKTDGGAGWSAVEKRFNQITATTGGLLLRTKFGECIGMTSKDFALELFDALARRRNITGEVIDGDQLKEFWEQINDQSFDSRLKTFFDMVDKDADGRLTEDEVREIISLSASANNLSTIQKRADEYAALIMEELDPDNIGYIMLESLETLLLQAATQSVITSTGERKNLSHMMSQRLKPTFNRNPLKRWYRGLRFFLLDNWQRCWVIVLWFIVMAILFTYKYIQYRRSPVYPVMGDCVCMAKGAAETVKLNMALILLPVCRNTITWLRNKTRLGRVVPFDDNLNFHKVIAVGIIVGVTMHAGAHLACDFPRLLHATPEAYRPLRQFFGDEQPKSYWHFVNSVEGITGLVMVLLMAIAFTLATPWFRRGKLNYLPGPLKKLASFNAFWYTHHLFVIVYILLVAHGYYLYLTRDWHNKTTWMYLVVPVVLYACERLIRAFRSSIKAVTIRKVAVYPGNVLAIHLSRPQNFKYKSGQYMFVNCAAVSPFEWHPFSITSAPQDDYLSVHIRVLGDWTRALKGVFSEVCKPPPAGVSGLLRADMLHGANNPDFPKVLIDGPYGAPAQDYKKYEVVLLVGLGIGATPMISIVKDIVNNIKAKEQAQLNRMENGTSEPQRSKKESFRTRRAYFYWVTREQGSFDWFKNIMNEVAERDANRVIEMHNYCTSVYEEGDARSALIHMLQSLNHAKNGVDIVSGTRVMSHFAKPNWRNVYKRIAMDHPNTKVGVFYCGAPALTKELRHLALDFTHKTSTRFSFHKENF

SEQ ID NO: 107044 - protein, 882 aa, Arabidopsis thaliana
  peptide (1)..(882): Ceres Seq. ID no. 13621236
MSGGQLPPIYKKPGNSRFTAENSQRTRTAPYVDLTVDVQDDTVSVHSLKMEGGSSVEESPELTLLKRNRLEKKTTVVKRLASVSHELKRLTSVSGGIGGRKPPRPAKLDRTKSAASQALKGLKFISKTDGGAGWSAVEKRFNQITATTGGLLLRTKFGECIGMTSKDFALELFDALARRRNITGEVIDGDQLKEFWEQINDQSFDSRLKTFFDMVDKDADGRLTEDEVREIISLSASANNLSTIQKRADEYAALIMEELDPDNIGYIMLESLETLLLQAATQSVITSTGERKNLSHMMSQRLKPTFNRNPLKRWYRGLRFFLLDNWQRCWVIVLWFIVMAILFTYKYIQYRRSPVYPVMGDCVCMAKGAAETVKLNMALILLPVCRNTITWLRNKTRLGRVVPFDDNLNFHKVIAVGIIVGVTMHAGAHLACDFPRLLHATPEAYRPLRQFFGDEQPKSYWHFVNSVEGITGLVMVLLMAIAFTLATPWFRRGKLNYLPGPLKKLASFNAFWYTHHLFVIVYILLVAHGYYLYLTRDWHNKTTWMYLVVPVVLYACERLIRAFRSSIKAVTIRKVAVYPGNVLAIHLSRPQNFKYKSGQYMFVNCAAVSPFEWHPFSITSAPQDDYLSVHIRVLGDWTRALKGVFSEVCKPPPAGVSGLLRADMLHGANNPDFPKVLIDGPYGAPAQDYKKYEVVLLVGLGIGATPMISIVKDIVNNIKAKEQAQLNRMENGTSEPQRSKKESFRTRRAYFYWVTREQGSFDWFKNIMNEVAERDANRVIEMHNYCTSVYEEGDARSALIHMLQSLNHAKNGVDIVSGTRVMSHFAKPNWRNVYKRIAMDHPNTKVGVFYCGAPALTKELRHLALDFTHKTSTRFSFHKENF

SEQ ID NO: 107045 - protein, 833 aa, Arabidopsis thaliana
  peptide (1)..(833): Ceres Seq. ID no. 13621237
MEGGSSVEESPELTLLKRNRLEKKTTVVKRLASVSHELKRLTSVSGGIGGRKPPRPAKLDRTKSAASQALKGLKFISKTDGGAGWSAVEKRFNQITATTGGLLLRTKFGECIGMTSKDFALELFDALARRRNITGEVIDGDQLKEFWEQINDQSFDSRLKTFFDMVDKDADGRLTEDEVREIISLSASANNLSTIQKRADEYAALIMEELDPDNIGYIMLESLETLLLQAATQSVITSTGERKNLSHMMSQRLKPTFNRNPLKRWYRGLRFFLLDNWQRCWVIVLWFIVMAILFTYKYIQYRRSPVYPVMGDCVCMAKGAAETVKLNMALILLPVCRNTITWLRNKTRLGRVVPFDDNLNFHKVIAVGIIVGVTMHAGAHLACDFPRLLHATPEAYRPLRQFFGDEQPKSYWHFVNSVEGITGLVMVLLMAIAFTLATPWFRRGKLNYLPGPLKKLASFNAFWYTHHLFVIVYILLVAHGYYLYLTRDWHNKTTWMYLVVPVVLYACERLIRAFRSSIKAVTIRKVAVYPGNVLAIHLSRPQNFKYKSGQYMFVNCAAVSPFEWHPFSITSAPQDDYLSVHIRVLGDWTRALKGVFSEVCKPPPAGVSGLLRADMLHGANNPDFPKVLIDGPYGAPAQDYKKYEVVLLVGLGIGATPMISIVKDIVNNIKAKEQAQLNRMENGTSEPQRSKKESFRTRRAYFYWVTREQGSFDWFKNIMNEVAERDANRVIEMHNYCTSVYEEGDARSALIHMLQSLNHAKNGVDIVSGTRVMSHFAKPNWRNVYKRIAMDHPNTKVGVFYCGAPALTKELRHLALDFTHKTSTRFSFHKENF

SEQ ID NO: 107046 - DNA, 1176 bp, Arabidopsis thaliana
  misc_feature (1)..(1176): Ceres Seq. ID no. 13621238
  misc_feature (1)..(1176): Ortholog of  Ceres SEQ ID NO 14305357 as cited in SEQ ID NO 60046
  misc_feature (1)..(1176): Ortholog of  Ceres SEQ ID NO 14313511 as cited in SEQ ID NO 64459
  misc_feature (1)..(1176): Ortholog of  Ceres SEQ ID NO 14303006 as cited in SEQ ID NO 67498
  misc_feature (1)..(1176): Ortholog of  Ceres SEQ ID NO 13599627 as cited in SEQ ID NO 0
  misc_feature (1)..(1176): Ortholog of  Ceres SEQ ID NO 14305069 as cited in SEQ ID NO 0
aggaagattatttgacattttaagtaagaacagctagctttgccatctccctaaaggcaataaatctcggatccactttcacgatattttgatattttttctatttataatctttctgggttttgagtcttttgaaggctgaattgctctgaaatctcaattgtataatcatctcctgggtcgtcgttatcgtgatcatctagaagaaagcatgactacactagatttgaccagagccgagcttgctcttattgttctctatttgaacaaagctgaggctagagataagatatgcagagctatccaatatggttccaaatttttgagcggtggccaacctggtactgctcaaactgtcgacaaaaacaccagcttggcgagaaaagttttccgtcttttcaagtttgtcaatgattttcacggtcttatcagccccgtgcctaaagggactccacttcctcttgtcttactcgggaagtcgaagaatgcgctcttgtctacctttttgtttcttgatcaaatcgtctggcttggtagatccggcatatacaagaacaaagaacgaactgaattgcttggacgtatatcacttttctgctggctgggatcatccgtttgtacaagtgcagtcgagattggtgagcttggaaggctctcttcatctatgaagaagatggaaaaggaactcaaagctgatgatgagctgtatcgtgctaagcttcagaaatcaaacgacagaactctagctttgattaaatcaagcatggacattattgtagccattggtctccttcagttagctccaaagacgattagtcctcgtgtcactggtgctttcgggtttaccacctcacttatctcttgttatcagttgcttccatcgcgccccaagttgaagacaccttgaagaaggaataagcttgttctctagactttcagaataattgtttcatattcatcagtaaacctattgtgttcaggtattctaaggagtctatgttcctcctttgaatgaatttgctgctcttataacgcgtttgcaagaataatgataagttttagaataagattattatgatacatcttcaagattttttgattagaaatttgtgtttgtttctcattttgaacaagactctgttcctacatagtagagaggaaatcatttgatgttcg

SEQ ID NO: 107047 - protein, 231 aa, Arabidopsis thaliana; identical to SEQ ID NO: 23905
  peptide (1)..(231): Ceres Seq. ID no. 13621239

SEQ ID NO: 107048 - DNA, 1428 bp, Arabidopsis thaliana
  misc_feature (1)..(1428): Ceres Seq. ID no. 13621244
  misc_feature (1)..(1428): Ortholog of  Ceres SEQ ID NO 15177291 as cited in SEQ ID NO 52286
  misc_feature (1)..(1428): Ortholog of  Ceres SEQ ID NO 13595164 as cited in SEQ ID NO 56222
  misc_feature (1)..(1428): Ortholog of  Ceres SEQ ID NO 13591068 as cited in SEQ ID NO 69043
  misc_feature (1)..(1428): Ortholog of  Ceres SEQ ID NO 13623041 as cited in SEQ ID NO 0
gatgcaatgtatttgtctcgttttctcatccatttatatgattgctttcttctccacctcaccaatcactcctcctctaaacttttcttcactctcttgtctcttcaaacttcggttactccgttttagtcgacaacaatggcctctgtttcaaggaggttactgaggagagagacgatcccctgtttcagccacaccgtgaggaaactcttctccaccgttggatctccttcttttgctcagagactcagagatctccccaaagacttcccctctaccaacgccaaacgtgacgcctctctgcttattgggaaaacgcctcttgtgttcctcaacaaagtcactgaaggttgtgaagcgtatgttgcagccaaacaagaacatttccagccaacttgtagcattaaagacagaccagctatagccatgattgcagatgcagagaagaaaaaactaatcatccctggaaaaacaacactgatagagcctacttcaggaaacatgggaatcagtttggctttcatggctgctatgaaagggtacaggattataatgacgatgccttcgtacactagcttggagaggagagtgacgatgagatcctttggtgctgagcttgttctcactgatccagccaaaggaatgggtggaactgttaagaaagcttatgacctccttgatagtactcctgatgctttcatgtgtcaacagtttgctaatcctgcaaacactcagattcattttgatacaactggtcctgagatttgggaagatacacttggaaatgttgatatatttgtgatgggaattggcagtggaggcacagtctctggtgttggccgataccttaaatctaaaaaccccaatgtcaagatatatggagtggagcctgctgaaagcaacatactcaacggtggcaaaccaggtccacatgctatcacaggcaatggtgttggattcaaaccagaaatcttggatatggatgttatggagagtgttcttgaggttagtagtgaggatgctataaagatggctagagaattggcattgaaagaaggtctcatggttgggatatcgtcgggagctaacaccgtggcagcaattagactggcgaaaatgccagagaataaaggcaaactcattgtgacaattcatgcgagcttcggagaaagatatctgtcgtctgttctgtttgatgagctgaggaaagaagcagaggagatgaagccagtttcagtggattgatgaaggaagactgacactttaccaaaaatctcgggagcaaaagattataaaaagaaagatgtaagagtaataagtttgtgtttatattgttctattgttgatgtataatataatcacagtattgttgatgttgatcttggatattgaagatccaactaaataaagttcatcattttctgtttc

SEQ ID NO: 107049 - protein, 368 aa, Arabidopsis thaliana; identical to SEQ ID NO: 22215
  peptide (1)..(368): Ceres Seq. ID no. 13621245

SEQ ID NO: 107050 - protein, 272 aa, Arabidopsis thaliana; identical to SEQ ID NO: 22216
  peptide (1)..(272): Ceres Seq. ID no. 13621246

SEQ ID NO: 107051 - protein, 247 aa, Arabidopsis thaliana; identical to SEQ ID NO: 22217
  peptide (1)..(247): Ceres Seq. ID no. 13621247

SEQ ID NO: 107052 - DNA, 1028 bp, Arabidopsis thaliana
  misc_feature (1)..(1028): Ceres Seq. ID no. 13621248
  misc_feature (1)..(1028): Ortholog of  Ceres SEQ ID NO 12557497 as cited in SEQ ID NO 43
  misc_feature (1)..(1028): Ortholog of  Ceres SEQ ID NO 13664283 as cited in SEQ ID NO 61283
  misc_feature (1)..(1028): Ortholog of  Ceres SEQ ID NO 12635513 as cited in SEQ ID NO 0
  misc_feature (1)..(1028): Ortholog of  Ceres SEQ ID NO 15179044 as cited in SEQ ID NO 0
  misc_feature (1)..(1028): Ortholog of  Ceres SEQ ID NO 15179333 as cited in SEQ ID NO 0
agattacacaacacacgttcgtttctttcttcttctaacacactctgagtcttgaaggtcaacaacgtcgagaataatggcatcatctctttgtgcttcttctgccatcgctgccatttcttctccaagtttcttgggtggtaagaaactgaggctgaagaagaagttgactgttccagctgtgtccaggcaagatgcgtcggtgcgcgccgtcgcagctgatccagatagaccaatctggttcccgggaagcactcctccagagtggctagacggtagcctccctggtgacttcggatttgatcctcttggtctttcatcggacccggacagtctaaaatggaacgtacaagccgagatagtccactgccgatgggctatgctaggagccgccgggatattcatcccagagttcctaacgaagatcggaatcctcaacactccgtcatggtacacggcgggagagcaagagtatttcacggacaaaaccacactctttgtcgttgagctcattttgatcggatgggcagaaggacgtagatgggccgatatcatcaagcccggtagcgtcaacactgacccagtcttcccaaacaacaaactgacgggcacagacgttggttacccaggtgggttatggttcgacccgttgggttggggatccggtagcccggctaagctcaaggagttgaggaccaaggagatcaagaacggaaggttggctatgttggcagtgatgggtgcttggttccaacacatctacactggcactggtcctattgataacctttttgcacatcttgctgatcctggtcacgccacaatcttcgctgctttcacacccaagtgagacaacgaaaaagggttatggggaggtgaatgcgtttgtgtgtgatcatgtttgtacaaatatcattttgaacttaaaattattatgtactttatataaattgtggtcgaatgcaaattaaggttccccgtaacactcttttcctaactcaatgatcataagatgcttttacattgtc

SEQ ID NO: 107053 - protein, 257 aa, Arabidopsis thaliana
  peptide (1)..(257): Ceres Seq. ID no. 13621249
MASSLCASSAIAAISSPSFLGGKKLRLKKKLTVPAVSRQDASVRAVAADPDRPIWFPGSTPPEWLDGSLPGDFGFDPLGLSSDPDSLKWNVQAEIVHCRWAMLGAAGIFIPEFLTKIGILNTPSWYTAGEQEYFTDKTTLFVVELILIGWAEGRRWADIIKPGSVNTDPVFPNNKLTGTDVGYPGGLWFDPLGWGSGSPAKLKELRTKEIKNGRLAMLAVMGAWFQHIYTGTGPIDNLFAHLADPGHATIFAAFTPK

SEQ ID NO: 107054 - protein, 156 aa, Arabidopsis thaliana; identical to SEQ ID NO: 41714
  peptide (1)..(156): Ceres Seq. ID no. 13621250

SEQ ID NO: 107055 - DNA, 851 bp, Arabidopsis thaliana
  misc_feature (1)..(851): Ceres Seq. ID no. 13621254
  misc_feature (1)..(851): Ortholog of  Ceres SEQ ID NO 14315060 as cited in SEQ ID NO 60039
  misc_feature (1)..(851): Ortholog of  Ceres SEQ ID NO 13597809 as cited in SEQ ID NO 64598
  misc_feature (1)..(851): Ortholog of  Ceres SEQ ID NO 12617960 as cited in SEQ ID NO 69051
  misc_feature (1)..(851): Ortholog of  Ceres SEQ ID NO 13589401 as cited in SEQ ID NO 0
ataagttgcctaataaacctatttctccgttcgttctctccctctctctcgcttcacgttggatcgaaatcggacaaaagtaaacgacaatggcggaagaattggagaaatctatgcacaaggaagaatctctgatggagaagatcgctgataagatccacgatcacgactcttcgtcgtcgtctgattccgagcacgagaaaccagagtctccgtcagctttgaaggccaagatatatcgtttgtttggtagagagaagcctgttcataaggttctcggtggtggcttaccggctgatgtgttcttgtggagggacaaaaaactctcagcttctgttcttggtgtagcgactgcgatatgggttctgtttgaattggttgagtatcatttcttgagtcttgtgtgtcacattttgatattcgctctcgcagccctgtttttattgtccaatgctcatgcctttatgaacaagactccacctaaaattcctgaaatccatattaaagaggaacatttccttatgattgtttctgcactgagaaacgagctgaaccaggcctttgttattttaaggagcattgccttaggaagggacttgaagaaatttctcatggtggtttttgggctgtggataatctcggttgtgggaaactggttcaacttcttgactcttgtatacatctgttttgtggtgttacatacagtaccaatgttgtatgagaaacatgaggacaaggtagatccagtggcagagaagacgttgaaggagctgaagaaacattacatggtgtttgatgagaaggttctttctaagcttcctgttgcttcccttaaggcaaagttgggttaa

SEQ ID NO: 107056 - protein, 253 aa, Arabidopsis thaliana
  peptide (1)..(253): Ceres Seq. ID no. 13621255
MAEELEKSMHKEESLMEKIADKIHDHDSSSSSDSEHEKPESPSALKAKIYRLFGREKPVHKVLGGGLPADVFLWRDKKLSASVLGVATAIWVLFELVEYHFLSLVCHILIFALAALFLLSNAHAFMNKTPPKIPEIHIKEEHFLMIVSALRNELNQAFVILRSIALGRDLKKFLMVVFGLWIISVVGNWFNFLTLVYICFVVLHTVPMLYEKHEDKVDPVAEKTLKELKKHYMVFDEKVLSKLPVASLKAKLG

SEQ ID NO: 107057 - protein, 245 aa, Arabidopsis thaliana
  peptide (1)..(245): Ceres Seq. ID no. 13621256
MHKEESLMEKIADKIHDHDSSSSSDSEHEKPESPSALKAKIYRLFGREKPVHKVLGGGLPADVFLWRDKKLSASVLGVATAIWVLFELVEYHFLSLVCHILIFALAALFLLSNAHAFMNKTPPKIPEIHIKEEHFLMIVSALRNELNQAFVILRSIALGRDLKKFLMVVFGLWIISVVGNWFNFLTLVYICFVVLHTVPMLYEKHEDKVDPVAEKTLKELKKHYMVFDEKVLSKLPVASLKAKLG

SEQ ID NO: 107058 - protein, 238 aa, Arabidopsis thaliana
  peptide (1)..(238): Ceres Seq. ID no. 13621257
MEKIADKIHDHDSSSSSDSEHEKPESPSALKAKIYRLFGREKPVHKVLGGGLPADVFLWRDKKLSASVLGVATAIWVLFELVEYHFLSLVCHILIFALAALFLLSNAHAFMNKTPPKIPEIHIKEEHFLMIVSALRNELNQAFVILRSIALGRDLKKFLMVVFGLWIISVVGNWFNFLTLVYICFVVLHTVPMLYEKHEDKVDPVAEKTLKELKKHYMVFDEKVLSKLPVASLKAKLG

SEQ ID NO: 107059 - DNA, 1329 bp, Arabidopsis thaliana
  misc_feature (1)..(1329): Ceres Seq. ID no. 13621262
  misc_feature (1)..(1329): Ortholog of  Ceres SEQ ID NO 14311207 as cited in SEQ ID NO 60304
aaccttttgactcttcttctctctctctctgcaaattcaaaacagtgaaaaaaacctctcttcattttttaactccctctctctctctctctctatggagagacgaacgagacgagtgaagttcacagagaatcgtacggtcacaaacgtagcagctacaccatctaacgggtctccgagactggtccgtatcactgttactgatcctttcgctactgactcgtctagcgacgacgacgacaacaacaacgtcacggtggttccaagagtgaaacgatacgtgaaggagattagattctgccaaggtgaatcttcttcctccaccgcggcgaggaaaggtaagcacaaggaggaggaaagcgtagtggttgaagatgacgtgtcgacgtcggtgaagcctaaaaagtacagaggcgtgagacagagaccttggggaaaattcgcggcggagattagagatccgtcgagccgtactcggatttggcttgggacttttgtcacggcggaggaagctgctatagcgtacgatagagccgcgattcatctcaaaggacctaaagcgctcacgaatttcctaactccgccgacgccaacgccggttatcgatctccaaacggtttccgcctgcgattacggtagagattctcggcagagccttcattcaccgacctctgttctaagattcaacgtcaacgaggaaacagagcatgagattgaagcgatcgagctatctccggagagaaagtcgacggttataaaagaagaagaagaatcgtcggcgggtttggtgttcccggatccgtatctgttaccggatttatctctcgccggcgaatgtttttgggataccgaaattgcccctgaccttttgtttctcgatgaagaaaccaaaatccaatcaacgttgttaccaaacacagaggtttcgaaacaaggagaaaacgaaactgaagatttcgagtttggtttgattgatgatttcgagtcttctccatgggatgtggatcatttcttcgaccatcatcatcactctttcgattaaaaatctcttcttttttggggaaatttttgtgtggtgatgatgacgtggatacatcgtgaccgtcggcttaccttttttagtctgaatgacgtggactgttcagatcaactgaagcgcaaacccaaaaaaactagggttttgttttattaatttgtgggtaaatattttagttaagaagaagataagtatgttaatgtttatcaaggtttggacctttcgttgttttggttcctctctctgagattgtctcaacggtaggaagcagtatataaatgtgtttctatgtc

SEQ ID NO: 107060 - protein, 315 aa, Arabidopsis thaliana
  peptide (1)..(315): Ceres Seq. ID no. 13621263
MERRTRRVKFTENRTVTNVAATPSNGSPRLVRITVTDPFATDSSSDDDDNNNVTVVPRVKRYVKEIRFCQGESSSSTAARKGKHKEEESVVVEDDVSTSVKPKKYRGVRQRPWGKFAAEIRDPSSRTRIWLGTFVTAEEAAIAYDRAAIHLKGPKALTNFLTPPTPTPVIDLQTVSACDYGRDSRQSLHSPTSVLRFNVNEETEHEIEAIELSPERKSTVIKEEEESSAGLVFPDPYLLPDLSLAGECFWDTEIAPDLLFLDEETKIQSTLLPNTEVSKQGENETEDFEFGLIDDFESSPWDVDHFFDHHHHSFD

SEQ ID NO: 107061 - DNA, 1309 bp, Arabidopsis thaliana
  misc_feature (1)..(1309): Ceres Seq. ID no. 13621272
  misc_feature (1)..(1309): Ortholog of  Ceres SEQ ID NO 13597019 as cited in SEQ ID NO 64303
  misc_feature (1)..(1309): Ortholog of  Ceres SEQ ID NO 13654191 as cited in SEQ ID NO 68235
  misc_feature (1)..(1309): Ortholog of  Ceres SEQ ID NO 15179513 as cited in SEQ ID NO 0
agaatcagaagagagtacatgagtttcctcttctgcctctttggtgattcttagcatttattattactcactcatcttcttttcattacattacataccaaacaagagctctcaaatggaaaggtttcaaggacacatcaacccctgtttcttcgatcgaaaaccggatgtgagaagcctcgaggttcaaggatttgcagaggctcaaagctttgctttcaaagaaaaagaggaagaaagcttacaagatacagttccatttctacagatgctgcaaagtgaagacccctcatcgtttttttcaatcaaagagccaaactttctgacgctactgtctcttcaaaccctcaaggagccttgggaactcgaaagatatctttcacttgaggattcacaatttcattcaccggtccaatctgagaccaaccgcttcatggaaggagccaatcaagctgtgtcaagccaagaaattccctttagccaagcaaacatgacactcccttcttctacctcatcaccactcagtgcacattcaagacgaaagcgcaaaatcaaccacttgctgcctcaagaaatgactagagaaaagagaaagaggaggaaaacaaaaccaagtaaaaacaatgaagagattgagaatcaaagaataaaccacattgctgttgaacgaaacagaagacgtcaaatgaacgaacatatcaactctctccgggcccttctcccaccttcctacatccaacgaggagaccaagcttccatagtaggaggagcaataaactacgtgaaggtcctcgagcaaatcatacaatctctcgaatcgcaaaagagaacgcaacaacaaagtaacagtgaggtagtagaaaacgcacttaatcatctctcaggcatttcgtcgaacgacctgtggacaactcttgaagatcaaacttgtatccccaaaatcgaagctacagtgatacaaaaccatgtcagccttaaagttcaatgtgagaagaaacaaggacaacttctcaaaggaatcatatcacttgaaaagcttaaactcactgttcttcatctcaatatcactacttcgtctcattcctctgtttcttattccttcaacctcaagatggaagatgagtgcgacttagagtcagccgacgagattacggcggctgttcatcggattttcgatattccgacaatttgattaaacacatataattccaaaaatattaacagctgacaaaatggtatcttttttttttttcctacttgtaccaattttttaagaattaagagaataaaaaaatttcgtttttcgttc

SEQ ID NO: 107062 - protein, 358 aa, Arabidopsis thaliana
  peptide (1)..(358): Ceres Seq. ID no. 13621273
MERFQGHINPCFFDRKPDVRSLEVQGFAEAQSFAFKEKEEESLQDTVPFLQMLQSEDPSSFFSIKEPNFLTLLSLQTLKEPWELERYLSLEDSQFHSPVQSETNRFMEGANQAVSSQEIPFSQANMTLPSSTSSPLSAHSRRKRKINHLLPQEMTREKRKRRKTKPSKNNEEIENQRINHIAVERNRRRQMNEHINSLRALLPPSYIQRGDQASIVGGAINYVKVLEQIIQSLESQKRTQQQSNSEVVENALNHLSGISSNDLWTTLEDQTCIPKIEATVIQNHVSLKVQCEKKQGQLLKGIISLEKLKLTVLHLNITTSSHSSVSYSFNLKMEDECDLESADEITAAVHRIFDIPTI

SEQ ID NO: 107063 - protein, 307 aa, Arabidopsis thaliana; identical to SEQ ID NO: 39873
  peptide (1)..(307): Ceres Seq. ID no. 13621274

SEQ ID NO: 107064 - protein, 252 aa, Arabidopsis thaliana; identical to SEQ ID NO: 39874
  peptide (1)..(252): Ceres Seq. ID no. 13621275

SEQ ID NO: 107065 - DNA, 1126 bp, Arabidopsis thaliana
  misc_feature (1)..(1126): Ceres Seq. ID no. 13621276
  misc_feature (1)..(1126): Ortholog of  Ceres SEQ ID NO 15176803 as cited in SEQ ID NO 52778
  misc_feature (1)..(1126): Ortholog of  Ceres SEQ ID NO 14302283 as cited in SEQ ID NO 68688
aattctcttccttctgaaattagggttttttttatctcctcctctctctttcttgtctaccaaaaaaggttttatcgaattactctcaaatcgtatggtgaggaagtcaaaatcttgagagatctgagattgtaagaagatgaatcaagaagataaagagaagcctattgaagaagcttcttcatcaatggagagagaacacatgttcgacaaagtagtaacaccaagcgacgttggcaaactaaaccgactcgtgatccctaagcaacacgcagagagatacttcccattagataactccacaacaaacgacagcaacaaaggtttgcttctaaacttcgaagatcgaagtggaaactcatggaggttccgttactcttactggaacagtagtcaaagctatgtcatgactaaaggttggagccgttttgtcaaagacaagaagcttgatgctggagacatcgtttcttttcagagagattcttgtaataaagacaagctttacatcgattggaggagacgacctaagattcccgatcatcatcatcagcaattcgccggagctatgttccctaggttttacacttttcctcatcctcagatgccgacaaattacgaaactcacaacctttatcatcgatttcatcaacgagatctaggaattggatactatgtgaggtcaatggagaggagtcatccaacggctgtgattgaatctgtgccggtgatgatgcaaaggagagcacaagtggcttcaatggcttcgagaggagagaagcggttaaggctgtttggtgtagatatggagtgcggaggaggaggagggagtgtgaatagtacggaggaagagtcgtcgtcttccggtggtagtataccacgtggcagagtttctatggttggtgctggttctctcctccagttgaggttagtgagcagtgatgatgagtctttagtagcaatggaagctgcaagtcttgaggatcatcacttctttacaaagaaaggaaaaccttctttgtcttttgatttggataggtgatgattatcatgagattaatcactatttaaaaatgcatatatatgataatttataccatatattatatatgacacaaagatgtctttc

SEQ ID NO: 107066 - protein, 299 aa, Arabidopsis thaliana
  peptide (1)..(299): Ceres Seq. ID no. 13621277
MNQEDKEKPIEEASSSMEREHMFDKVVTPSDVGKLNRLVIPKQHAERYFPLDNSTTNDSNKGLLLNFEDRSGNSWRFRYSYWNSSQSYVMTKGWSRFVKDKKLDAGDIVSFQRDSCNKDKLYIDWRRRPKIPDHHHQQFAGAMFPRFYTFPHPQMPTNYETHNLYHRFHQRDLGIGYYVRSMERSHPTAVIESVPVMMQRRAQVASMASRGEKRLRLFGVDMECGGGGGSVNSTEEESSSSGGSIPRGRVSMVGAGSLLQLRLVSSDDESLVAMEAASLEDHHFFTKKGKPSLSFDLDR

SEQ ID NO: 107067 - protein, 283 aa, Arabidopsis thaliana
  peptide (1)..(283): Ceres Seq. ID no. 13621278
MEREHMFDKVVTPSDVGKLNRLVIPKQHAERYFPLDNSTTNDSNKGLLLNFEDRSGNSWRFRYSYWNSSQSYVMTKGWSRFVKDKKLDAGDIVSFQRDSCNKDKLYIDWRRRPKIPDHHHQQFAGAMFPRFYTFPHPQMPTNYETHNLYHRFHQRDLGIGYYVRSMERSHPTAVIESVPVMMQRRAQVASMASRGEKRLRLFGVDMECGGGGGSVNSTEEESSSSGGSIPRGRVSMVGAGSLLQLRLVSSDDESLVAMEAASLEDHHFFTKKGKPSLSFDLDR

SEQ ID NO: 107068 - protein, 278 aa, Arabidopsis thaliana
  peptide (1)..(278): Ceres Seq. ID no. 13621279
MFDKVVTPSDVGKLNRLVIPKQHAERYFPLDNSTTNDSNKGLLLNFEDRSGNSWRFRYSYWNSSQSYVMTKGWSRFVKDKKLDAGDIVSFQRDSCNKDKLYIDWRRRPKIPDHHHQQFAGAMFPRFYTFPHPQMPTNYETHNLYHRFHQRDLGIGYYVRSMERSHPTAVIESVPVMMQRRAQVASMASRGEKRLRLFGVDMECGGGGGSVNSTEEESSSSGGSIPRGRVSMVGAGSLLQLRLVSSDDESLVAMEAASLEDHHFFTKKGKPSLSFDLDR

SEQ ID NO: 107069 - DNA, 699 bp, Arabidopsis thaliana
  misc_feature (1)..(699): Ceres Seq. ID no. 13621280
  misc_feature (1)..(699): Ortholog of  Ceres SEQ ID NO 13594979 as cited in SEQ ID NO 56172
aaacaacacggttacgcaaactctctctgagaaaatccccaaatctcatgaaattagggtttcaatcattctttgaacgcaaaattagaaacctcctctccatccgccacgaatctctagggttcttctgaaggattagatttctgggttttagaaatctgtctctcgtcatcaacaattcacgtgatgccgtcgttaacactgagcattcgtttccttttcttagttctctgcttgatcggtttacaagctgcggatgatttcccagataaatcccgcggtgacgtatgccctcgggttaaggatcggggtggatgcacaatcaactgtttccgggcggatccggtttgtggaaccgatggagtcacgtactggtgcggttgtcccgacgcagcttgccatggcgctcgcgtagtcaaaaaaggagcttgtgacacaggtaatgcaggaagtgcttctgttcctggacaagctttgttattgattcatattgtttggctcttcttgctcggactctctcttctcgttggtggtttctgatctctagagagttagtggtggaattagacaaggaattagatagatcacacgtcctgagtttgttgtatgtgtatagttgagtattgttttgctttgtgtgctatatatatgtaatagattctgttgcagttcattctaataatgaagatttgatcggac

SEQ ID NO: 107070 - protein, 117 aa, Arabidopsis thaliana; identical to SEQ ID NO: 31083
  peptide (1)..(117): Ceres Seq. ID no. 13621281

SEQ ID NO: 107071 - DNA, 1201 bp, Arabidopsis thaliana
  misc_feature (1)..(1201): Ceres Seq. ID no. 13621282
  misc_feature (1)..(1201): Ortholog of  Ceres SEQ ID NO 12618176 as cited in SEQ ID NO 64489
  misc_feature (1)..(1201): Ortholog of  Ceres SEQ ID NO 15179231 as cited in SEQ ID NO 0
accaatcaccactcacatgttatcaataattgcttataagaatttgtattcccactctaatcatcaactctattgattccacgcgatgacgacgttttcaacgagctttcttttccttttgttggttttctgcttgatcggttcactagctgccgatgatctccaacataaatccggtcgggacgtctgctccggtggttctgatcttagaacccccgatattcgtcttaaccggccgacagactctgtcgtcggaaactgcccgacggaggcgagtcctttagttatggctgacgacgagaagtacggtaacaaaatggttatcagtctcactcctcgcctttatgactatgtcctcaacaacgttcgtgagcatgagattttgaagcaacttcgagaagaaactgccattagtcaaattcaggtgtcacctgatcaagcgcaattgcttgcaatgcttgtagagattcttggagctaaacgatgtattgaagttggagtttacacgggatattcatcactggctgtggcgttggttctaccagaatcagggcgtcttgttgcctgtgataaagatgctaacgctcttgaagttgctaagaggtactacgagcttgccggagtgtctcacaaggtcactgtgaaacatggtcttgcagcagaatctttgatgtctatgattcagaacggtgaagagtccagctatgattttgcatttcttgatgctgataaggcgatgtatcaggagtacttcgaatcgctacttcgactcgtcagggttggtggagtcattgtgattgataatgttctttggcatggatgggttgcggattctacggtgaatgatgagaggaccatcagcctaagaaatttcaacaaaaaattaatggatgatcaacgtgtaagcattagtatggtatcaatcggcgatggtatgaccatatgccgcaagaggtaatcatccgtaaaaaccactcagctcgcagtgaacctgtttcaagatagaagaagtctttaaacataaaaggattgatgaagccaagatatccagtctcacaaacactaaagactcatcaacttttcccttttcagtcaaaaataagttgaataattgataaaccaatgtgtgggcctattgggctttgatatgtactgttttctatgtccgtttgaggccttttataaaatcgtcttacgaccc

SEQ ID NO: 107072 - protein, 290 aa, Arabidopsis thaliana; identical to SEQ ID NO: 25215
  peptide (1)..(290): Ceres Seq. ID no. 13621283

SEQ ID NO: 107073 - protein, 223 aa, Arabidopsis thaliana; identical to SEQ ID NO: 25216
  peptide (1)..(223): Ceres Seq. ID no. 13621284

SEQ ID NO: 107074 - protein, 213 aa, Arabidopsis thaliana; identical to SEQ ID NO: 25217
  peptide (1)..(213): Ceres Seq. ID no. 13621285

SEQ ID NO: 107075 - DNA, 1010 bp, Arabidopsis thaliana
  misc_feature (1)..(1010): Ceres Seq. ID no. 13621286
  misc_feature (1)..(1010): Ortholog of  Ceres SEQ ID NO 13639246 as cited in SEQ ID NO 56576
acttttattaaagaacttgtccactgtcttcttctgcccattttaccattttgattaggctctctgtttctctttcttggttctaaaagatatccgtcactctttagtattatgggaatcggtgaagaaagcacaaagcctatttgggggagcgtgagccacacgtcttcaggctacgctctcaacggcaaaatcatgctctcctccgtgatcgttctattcgtcgccgttattatgatcctctgcttccacagctacgcccgttggttattccgtcgtcacaaccgtcgcattcgccgccgtattcgttctcacctccgcactctctccgcctcaccccgagaccaagctctcgaccaggctgttctcgacaagattccgatcttcgtttactcctccaagaatccaccaccaccagaagagaaggaggagtgctccgtctgcttgtcggagttcgaggaagaagacgaaggccgtcttcttcctaaatgtggccactcttttcacgtcgactgcatcgatacttggttccgttccagatccacttgcccgctttgcagagctccggttcaacccccgtttcaggtcattgaaaccggttcttcttcttcttcttcgccgttgacatttccgacggagggttgcgagagagaaccgattgacctcgccggtatcattgtggatatttccagagaagttgaatttgaaggctcaaatccgggtctacccatcgaaaacggatcaaagtttccgggtagtcgggttttgtctttaaaaaggctatggagcatctgattgcgggcgggtaaatgggtttctatttttttcaaaaaacgcatgaactttgacacgtggaatttatatcagcacacgtggccgttactcctggggaccactgagcctgagcgtctacttctaattagtctaatcacattaatttgattacccgttcattattattagatttcgaagaaaaccattcggttgtacaatagtaagttaaagttatt

SEQ ID NO: 107076 - protein, 227 aa, Arabidopsis thaliana
  peptide (1)..(227): Ceres Seq. ID no. 13621287
MGIGEESTKPIWGSVSHTSSGYALNGKIMLSSVIVLFVAVIMILCFHSYARWLFRRHNRRIRRRIRSHLRTLSASPRDQALDQAVLDKIPIFVYSSKNPPPPEEKEECSVCLSEFEEEDEGRLLPKCGHSFHVDCIDTWFRSRSTCPLCRAPVQPPFQVIETGSSSSSSPLTFPTEGCEREPIDLAGIIVDISREVEFEGSNPGLPIENGSKFPGSRVLSLKRLWSI

SEQ ID NO: 107077 - protein, 199 aa, Arabidopsis thaliana
  peptide (1)..(199): Ceres Seq. ID no. 13621288
MLSSVIVLFVAVIMILCFHSYARWLFRRHNRRIRRRIRSHLRTLSASPRDQALDQAVLDKIPIFVYSSKNPPPPEEKEECSVCLSEFEEEDEGRLLPKCGHSFHVDCIDTWFRSRSTCPLCRAPVQPPFQVIETGSSSSSSPLTFPTEGCEREPIDLAGIIVDISREVEFEGSNPGLPIENGSKFPGSRVLSLKRLWSI

SEQ ID NO: 107078 - protein, 186 aa, Arabidopsis thaliana
  peptide (1)..(186): Ceres Seq. ID no. 13621289
MILCFHSYARWLFRRHNRRIRRRIRSHLRTLSASPRDQALDQAVLDKIPIFVYSSKNPPPPEEKEECSVCLSEFEEEDEGRLLPKCGHSFHVDCIDTWFRSRSTCPLCRAPVQPPFQVIETGSSSSSSPLTFPTEGCEREPIDLAGIIVDISREVEFEGSNPGLPIENGSKFPGSRVLSLKRLWSI

SEQ ID NO: 107079 - DNA, 1046 bp, Arabidopsis thaliana
  misc_feature (1)..(1046): Ceres Seq. ID no. 13621290
  misc_feature (1)..(1046): Ortholog of  Ceres SEQ ID NO 14315518 as cited in SEQ ID NO 60467
  misc_feature (1)..(1046): Ortholog of  Ceres SEQ ID NO 12585444 as cited in SEQ ID NO 62814
atggcggtttctcaccgtctcctcaggccggcgacgacgacgataaagaatactttttcttctctctttattaggtctctctcttcttcttcgtctgggtcctcgctagaccccaaaatcgatctggaggaggctgcggctcagctcgggaagtcttcgtctacgtcaacgtctccatacaaaggcagaaatttccactgggtgtttcttggatgtcctggtgttggtaaaggaacctatgcctctcgtctctcttctctcctcggcgttcctcatattgccactggtgatctcgttcgtgaagagctctcctcctctggcctcctctcctctcagctcaaggagcttgttaaccatggaaaactagttcctgatgaattcataataagtttgttatcaaagcgtctccaagctggcaaagacaagggtgaatctggatacattcttgatggttttccacgcaccgtgactcaagcggaaatactggagggagtaactaatatcgatctggtgattaacctgaagctacgagaagaggcattgcttgcgaaatgtttaggaagaagaatttgcagcgagtgtggtggaaactataacgttgcctgcattgatatcaaaggtgatgatgatactcccagaatgtatatgcctcctcttcttcctccgccaaactgtgaatcgaagcttataagccgagctgatgacactgaagaagttgtcaaggaaagactcaggatttacaacaaaatgactcaaccagtggaggaattctacaagaaacgcgggaagctgttggaatttgaattgcccggtggaatcccagagtcatgggcaaggctccttagggcattacaccttgaagacgataaacagtctgcaatagcctaatctctctctgcattttatgattgaatcaaacaacttgtactacattctttgctcgagtaatcctcctcgtgcatatatgcttaagatagtcaataaaagagatacatgtcccactatggttatttgatgcatatattatatagtgaagtttctttgtg

SEQ ID NO: 107080 - protein, 295 aa, Arabidopsis thaliana
  peptide (1)..(295): Ceres Seq. ID no. 13621291
MAVSHRLLRPATTTIKNTFSSLFIRSLSSSSSGSSLDPKIDLEEAAAQLGKSSSTSTSPYKGRNFHWVFLGCPGVGKGTYASRLSSLLGVPHIATGDLVREELSSSGLLSSQLKELVNHGKLVPDEFIISLLSKRLQAGKDKGESGYILDGFPRTVTQAEILEGVTNIDLVINLKLREEALLAKCLGRRICSECGGNYNVACIDIKGDDDTPRMYMPPLLPPPNCESKLISRADDTEEVVKERLRIYNKMTQPVEEFYKKRGKLLEFELPGGIPESWARLLRALHLEDDKQSAIA

SEQ ID NO: 107081 - DNA, 1193 bp, Arabidopsis thaliana
  misc_feature (1)..(1193): Ceres Seq. ID no. 13621296
  misc_feature (1)..(1193): Ortholog of  Ceres SEQ ID NO 15227018 as cited in SEQ ID NO 0
gatatcttatcaaaaactcgctctccatccaacaaaacccgaagaaagagagattcagactcaaatctctcagtaggaatggcaagtgaaacagagaacatcaagtatgaagagagtttcatcaagaacactcgaggaatgaaactgttcacgtgcaaatgggtaccagcaaagcaagagccaaaggctttagtctttatttgccatggatatgcaatggaatgtagcatcaccatgaacagtactgcgaggaggctggtgaaagcaggatttgcggtatatggaattgattacgaagggcatggaaaatctgatgggcttagtgcttatgtcccaaactttgaccatctcgttgatgatgtctctactcactacacaagcatttgcgagaaagaagagaataaagggaagatgaggttcttgttaggagaatcaatgggaggagcagtgcttttgttgttacacagaaagaagcctcagttttgggatggggctgtcttggttgctccaatgtgtaagattgctgaagaaatgaaaccaagccctttggtaatttcgatattggccaaacttagtggagtgataccttcgtggaaaatcatccctggccaagatatcattgagactgcttttaagcagccagaaatcaggaaacaggttagggaaaatccctactgctacaagggacgtccacgtttgaagactgcttatgagcttttgagggttagcaccgatctcgagaagaggcttaatgaggtttcattaccgttcatagttttgcacggtgaagacgataaagtcacagataaagcggtgagtcgacaactgtatgaagttgcatctagttcggacaagactttcaagttgtaccctgggatgtggcatggtttactctatggagagacaccagagaatatcgagactgtttttgctgacatcattggctggttggataagaaagttgctgatgaaagtggaggctttgaatccgagcttaaacgtaaaaatgatggtattcctttgaaagggtagttatcactttaacataaacaaataaaggatagttaaaatctgtttgtctgtttgtttttctctcttttcctgaattctgtttatgttaattagttgttaccatgtttgtcactctctgacttagtgtaatactatttaataatttatggatttgatttccc

SEQ ID NO: 107082 - protein, 343 aa, Arabidopsis thaliana; identical to SEQ ID NO: 103663
  peptide (1)..(343): Ceres Seq. ID no. 13621297

SEQ ID NO: 107083 - protein, 317 aa, Arabidopsis thaliana; identical to SEQ ID NO: 103664
  peptide (1)..(317): Ceres Seq. ID no. 13621298

SEQ ID NO: 107084 - protein, 297 aa, Arabidopsis thaliana; identical to SEQ ID NO: 103665
  peptide (1)..(297): Ceres Seq. ID no. 13621299

SEQ ID NO: 107085 - DNA, 1204 bp, Arabidopsis thaliana
  misc_feature (1)..(1204): Ceres Seq. ID no. 13621324
  misc_feature (1)..(1204): Ortholog of  Ceres SEQ ID NO 12609146 as cited in SEQ ID NO 52118
  misc_feature (1)..(1204): Ortholog of  Ceres SEQ ID NO 14316158 as cited in SEQ ID NO 52413
  misc_feature (1)..(1204): Ortholog of  Ceres SEQ ID NO 13638136 as cited in SEQ ID NO 58644
  misc_feature (1)..(1204): Ortholog of  Ceres SEQ ID NO 13596868 as cited in SEQ ID NO 62806
  misc_feature (1)..(1204): Ortholog of  Ceres SEQ ID NO 12587035 as cited in SEQ ID NO 63605
  misc_feature (1)..(1204): Ortholog of  Ceres SEQ ID NO 13595885 as cited in SEQ ID NO 69265
  misc_feature (1)..(1204): Ortholog of  Ceres SEQ ID NO 12566239 as cited in SEQ ID NO 0
  misc_feature (1)..(1204): Ortholog of  Ceres SEQ ID NO 13599119 as cited in SEQ ID NO 0
atgcaactctcaaagaatccgatcaaacaaacgagaaatcgagagaagaattacaccgacgatttcaccatgaagagatctgtaatcatggctcctgaatctccggtttttttcccacctccgcttgttttctctccgacgtcggtcaaaacgccgttgtcttctcctcgttcgtcgccaccgaagctgacgatggttgcttgtcctccaagaaagccaaaggagacgaagactacgggttctgattctgaaacggtgttgaaaaggaaacgaccaccgatgcttgacttaacggcggctccgacggttgcatcgtggtgcagtacgacgagagagacggcggagaaaggagcggaagttgttgaagcagaagaagatggatactactctgtttattgcaagagaggaagacgcggaccaatggaagataggtatttcgcggccgttgatcgtaacgacgacggaggttacaaaaatgctttctttggggtatttgatggtcacggcggatccaaggcggcggaattcgctgcgatgaatctagggaacaatatcgaggcggcaatggcatcggcgagatcaggagaagatggttgttcgatggagagtgcgataagagaaggttatatcaaaacggatgaggatttcttgaaagaaggttcgagaggtggcgcgtgttgtgtaaccgctttgatatcgaaaggcgagcttgcggtttcgaatgcaggcgactgccgggctgttatgagtcgtggtggaaccgcggaagctctcacttccgatcataatccttctcaagcaaatgagctcaaaaggattgaagcattgggtggttatgttgactgctgcaacggcgtttggagaattcaagggacattagcagtctcacgaggaattggagaccggtacctcaaggagtgggtgatagctgaaccggaaaccagaacattacggattaaaccggagttcgaattcttgatcttagcatctgatggcctgtgggacaaggtaacgaaccaagaggccgtcgatgtcgttcgaccgtactgcgtaggcgtagagaatccaatgacactttctgcttgcaagaaactggctgagctatcggttaagagaggctctttggatgatataagtctaattataattcagctacaaaactttcttccatgatatattaacacatagtacattagctaaactt

SEQ ID NO: 107086 - protein, 390 aa, Arabidopsis thaliana
  peptide (1)..(390): Ceres Seq. ID no. 13621325
MQLSKNPIKQTRNREKNYTDDFTMKRSVIMAPESPVFFPPPLVFSPTSVKTPLSSPRSSPPKLTMVACPPRKPKETKTTGSDSETVLKRKRPPMLDLTAAPTVASWCSTTRETAEKGAEVVEAEEDGYYSVYCKRGRRGPMEDRYFAAVDRNDDGGYKNAFFGVFDGHGGSKAAEFAAMNLGNNIEAAMASARSGEDGCSMESAIREGYIKTDEDFLKEGSRGGACCVTALISKGELAVSNAGDCRAVMSRGGTAEALTSDHNPSQANELKRIEALGGYVDCCNGVWRIQGTLAVSRGIGDRYLKEWVIAEPETRTLRIKPEFEFLILASDGLWDKVTNQEAVDVVRPYCVGVENPMTLSACKKLAELSVKRGSLDDISLIIIQLQNFLP

SEQ ID NO: 107087 - protein, 367 aa, Arabidopsis thaliana
  peptide (1)..(367): Ceres Seq. ID no. 13621326
MKRSVIMAPESPVFFPPPLVFSPTSVKTPLSSPRSSPPKLTMVACPPRKPKETKTTGSDSETVLKRKRPPMLDLTAAPTVASWCSTTRETAEKGAEVVEAEEDGYYSVYCKRGRRGPMEDRYFAAVDRNDDGGYKNAFFGVFDGHGGSKAAEFAAMNLGNNIEAAMASARSGEDGCSMESAIREGYIKTDEDFLKEGSRGGACCVTALISKGELAVSNAGDCRAVMSRGGTAEALTSDHNPSQANELKRIEALGGYVDCCNGVWRIQGTLAVSRGIGDRYLKEWVIAEPETRTLRIKPEFEFLILASDGLWDKVTNQEAVDVVRPYCVGVENPMTLSACKKLAELSVKRGSLDDISLIIIQLQNFLP

SEQ ID NO: 107088 - protein, 361 aa, Arabidopsis thaliana
  peptide (1)..(361): Ceres Seq. ID no. 13621327
MAPESPVFFPPPLVFSPTSVKTPLSSPRSSPPKLTMVACPPRKPKETKTTGSDSETVLKRKRPPMLDLTAAPTVASWCSTTRETAEKGAEVVEAEEDGYYSVYCKRGRRGPMEDRYFAAVDRNDDGGYKNAFFGVFDGHGGSKAAEFAAMNLGNNIEAAMASARSGEDGCSMESAIREGYIKTDEDFLKEGSRGGACCVTALISKGELAVSNAGDCRAVMSRGGTAEALTSDHNPSQANELKRIEALGGYVDCCNGVWRIQGTLAVSRGIGDRYLKEWVIAEPETRTLRIKPEFEFLILASDGLWDKVTNQEAVDVVRPYCVGVENPMTLSACKKLAELSVKRGSLDDISLIIIQLQNFLP

SEQ ID NO: 107089 - DNA, 2838 bp, Arabidopsis thaliana
  misc_feature (1)..(2838): Ceres Seq. ID no. 13621339
  misc_feature (1)..(2838): Ortholog of  Ceres SEQ ID NO 15168405 as cited in SEQ ID NO 56980
atgactaaagtatgtcctaaaacagaagaaaagagagtggtgtctgaagctgtggttgaaccaatttcagcagatgtgagctttgcttctaatcattttccaacgtacaagttaggacctgatgatcagattgttgatgaacctgatgaagatgataaagttccatctgtcaaagatgtcgtcggtaaggagaccggagatttgtcagatcagcacaagaagctttctgttcgtgatctcgcttgcaaatttgacaagaatttagctgcagcttctaagttagttgatgaggttccactctatttctcatcctcctatgattatgtgtctgtggcaaagttaaacgatgtgacttctttggaaggacatgttatgctaaagaaacttagggatgctttagaaaccatgagaggtcgtatggatggaagaaacagagaagcagtggaaaaagctatctccatggttgaggcactagccgttaagttaactcaaaatgaaggtgaactaattcatgataagtttgaagtgaagaaactggcaagcttcctcaagaaggcttcagacgacgcgaagaagttagtaaaccaagaaaagtcgtttgcttgtgctgaaatagagagtgcacgggctcttgtgatgaaacttggaggtgcatttgaagaacaggagctttgttctaaagcttctagagatcagggaccggtgatcggtatgcaacatgagcttcgtgatttaaagagtcaaatccaagagaagtctgcatattccgttaaacttcaaagagagatagcaataattaagaaagctgaggggtccaagtcatgtccgtatgttctggatggtgcacaaagtcttggctcgtgcctaagaatccgtgcctcctcagacagtggtatagatatttccaaatgctcaatccattggtaccgtgcagcatctgagtctagtcgaagagaagctatatctggtgccaaccggtcagtatatgctccagaaccatttgatgtcgggcgagtgatacaagcagacattgtttcaaatggccagaagttcaccgttacaaccgatggtccaattaatactgctgctggcttgcagtcacgcgttgaatcactcctgcgcaaatctaacagtgaattcaccgtggttatatcacagatgaatggacaagaccatgcatcacgatcccatgtatttactgttggaaaggcgaggataaagctgtcccgaggatggatcacaaaggctagagaaatatattcaacctccatgcagctttatttgaagttttctttttcttcaagtttaaatggtttggtaacatttcagctctgtggagtgagaggcaatgctaacgttcctgcaaaggcattgttctggcaacttagaaagggtctaactttcttactaactttcgagtcagagcaagaacgtaatgcagccatagtactcgcacgaacatatgcatatgattgtaatgtgagtaaaatccatcgtccgaccgagattttgtcttctcgtgagttcaaatccaaatccatggggaagatccttgtggaaatctgtatgatatcagctcgagggctccgtgtgggaattggaatcggatcctctctactgaaacaccaatggtacgccgttggttggcttgatccagaagacaaatactgcaccacaatcgatgcttcaagagcagacaatcctgtctggagaacaaagtttgctactttgctcgatgattccacgattcaggattcgaagttggctttgcaagtcgaggtttatagcagagaacccttgttcttaaggaagaggcttcatggctctgctactgtttctttgaaggagtttctgactaagtataagcaacaacagagttcttcgaaagctgtaattgaagaaactggaagctatcagcttaggaagacgaactcgagcaagcctcagggttttgtcgatgtgtcgatacgtatatctgcagagcgagaggattttgggggttttactgtttatttgcattttgtctgcaatcagattatatgtaaattgaacaacaatagacgcaaatgtgaatgggttgtgtcaatttgcagaaagaaaccaactttggtgctgcttttgtttcctgtaactcaattcttgaagaaccttaaatttgggtttccgaatatccgatttcgagatcttagcgtttttaagatgggagattttggaggagtcatgctctcgaacaactcagattacaacacttcaggacaggattacatggctggttcatcgcagtatccatttgctccaatggaccagtcaaacccattctcagttcccccatcatataaccaccactcatcaatgcctaaccctccaatgaccaacaccaacccacaaatgcaacaaccttactatcctccaccgatgcagccaccaccaccacctatgaactcagggtacatgcctacatacatccccaaatctgtgaatgactcatcaatgcctaaccctccaatgaacaacaccaacccacaaatgcaacaaccttactatcctccaccaatgcagccagcaccaccacctatgaactcagggtacatgcctacatacatccctaattcagagaatgttacgaacattccatcgtcatcatcatctggaggagtaccaggaggggcgggaagaggatatgctaggactggcccagggtttgctgtaggagtgggagctggtgcagtagttggagctggtgcagctttatatggaagcgagtttatgtcaggaatcgacttaccttcaagcttacctcacccaagtgtccccatttccattgatcctccattttga

SEQ ID NO: 107090 - protein, 945 aa, Arabidopsis thaliana
  peptide (1)..(945): Ceres Seq. ID no. 13621340
MTKVCPKTEEKRVVSEAVVEPISADVSFASNHFPTYKLGPDDQIVDEPDEDDKVPSVKDVVGKETGDLSDQHKKLSVRDLACKFDKNLAAASKLVDEVPLYFSSSYDYVSVAKLNDVTSLEGHVMLKKLRDALETMRGRMDGRNREAVEKAISMVEALAVKLTQNEGELIHDKFEVKKLASFLKKASDDAKKLVNQEKSFACAEIESARALVMKLGGAFEEQELCSKASRDQGPVIGMQHELRDLKSQIQEKSAYSVKLQREIAIIKKAEGSKSCPYVLDGAQSLGSCLRIRASSDSGIDISKCSIHWYRAASESSRREAISGANRSVYAPEPFDVGRVIQADIVSNGQKFTVTTDGPINTAAGLQSRVESLLRKSNSEFTVVISQMNGQDHASRSHVFTVGKARIKLSRGWITKAREIYSTSMQLYLKFSFSSSLNGLVTFQLCGVRGNANVPAKALFWQLRKGLTFLLTFESEQERNAAIVLARTYAYDCNVSKIHRPTEILSSREFKSKSMGKILVEICMISARGLRVGIGIGSSLLKHQWYAVGWLDPEDKYCTTIDASRADNPVWRTKFATLLDDSTIQDSKLALQVEVYSREPLFLRKRLHGSATVSLKEFLTKYKQQQSSSKAVIEETGSYQLRKTNSSKPQGFVDVSIRISAEREDFGGFTVYLHFVCNQIICKLNNNRRKCEWVVSICRKKPTLVLLLFPVTQFLKNLKFGFPNIRFRDLSVFKMGDFGGVMLSNNSDYNTSGQDYMAGSSQYPFAPMDQSNPFSVPPSYNHHSSMPNPPMTNTNPQMQQPYYPPPMQPPPPPMNSGYMPTYIPKSVNDSSMPNPPMNNTNPQMQQPYYPPPMQPAPPPMNSGYMPTYIPNSENVTNIPSSSSSGGVPGGAGRGYARTGPGFAVGVGAGAVVGAGAALYGSEFMSGIDLPSSLPHPSVPISIDPPF

SEQ ID NO: 107091 - protein, 821 aa, Arabidopsis thaliana
  peptide (1)..(821): Ceres Seq. ID no. 13621341
MLKKLRDALETMRGRMDGRNREAVEKAISMVEALAVKLTQNEGELIHDKFEVKKLASFLKKASDDAKKLVNQEKSFACAEIESARALVMKLGGAFEEQELCSKASRDQGPVIGMQHELRDLKSQIQEKSAYSVKLQREIAIIKKAEGSKSCPYVLDGAQSLGSCLRIRASSDSGIDISKCSIHWYRAASESSRREAISGANRSVYAPEPFDVGRVIQADIVSNGQKFTVTTDGPINTAAGLQSRVESLLRKSNSEFTVVISQMNGQDHASRSHVFTVGKARIKLSRGWITKAREIYSTSMQLYLKFSFSSSLNGLVTFQLCGVRGNANVPAKALFWQLRKGLTFLLTFESEQERNAAIVLARTYAYDCNVSKIHRPTEILSSREFKSKSMGKILVEICMISARGLRVGIGIGSSLLKHQWYAVGWLDPEDKYCTTIDASRADNPVWRTKFATLLDDSTIQDSKLALQVEVYSREPLFLRKRLHGSATVSLKEFLTKYKQQQSSSKAVIEETGSYQLRKTNSSKPQGFVDVSIRISAEREDFGGFTVYLHFVCNQIICKLNNNRRKCEWVVSICRKKPTLVLLLFPVTQFLKNLKFGFPNIRFRDLSVFKMGDFGGVMLSNNSDYNTSGQDYMAGSSQYPFAPMDQSNPFSVPPSYNHHSSMPNPPMTNTNPQMQQPYYPPPMQPPPPPMNSGYMPTYIPKSVNDSSMPNPPMNNTNPQMQQPYYPPPMQPAPPPMNSGYMPTYIPNSENVTNIPSSSSSGGVPGGAGRGYARTGPGFAVGVGAGAVVGAGAALYGSEFMSGIDLPSSLPHPSVPISIDPPF

SEQ ID NO: 107092 - protein, 810 aa, Arabidopsis thaliana
  peptide (1)..(810): Ceres Seq. ID no. 13621342
MRGRMDGRNREAVEKAISMVEALAVKLTQNEGELIHDKFEVKKLASFLKKASDDAKKLVNQEKSFACAEIESARALVMKLGGAFEEQELCSKASRDQGPVIGMQHELRDLKSQIQEKSAYSVKLQREIAIIKKAEGSKSCPYVLDGAQSLGSCLRIRASSDSGIDISKCSIHWYRAASESSRREAISGANRSVYAPEPFDVGRVIQADIVSNGQKFTVTTDGPINTAAGLQSRVESLLRKSNSEFTVVISQMNGQDHASRSHVFTVGKARIKLSRGWITKAREIYSTSMQLYLKFSFSSSLNGLVTFQLCGVRGNANVPAKALFWQLRKGLTFLLTFESEQERNAAIVLARTYAYDCNVSKIHRPTEILSSREFKSKSMGKILVEICMISARGLRVGIGIGSSLLKHQWYAVGWLDPEDKYCTTIDASRADNPVWRTKFATLLDDSTIQDSKLALQVEVYSREPLFLRKRLHGSATVSLKEFLTKYKQQQSSSKAVIEETGSYQLRKTNSSKPQGFVDVSIRISAEREDFGGFTVYLHFVCNQIICKLNNNRRKCEWVVSICRKKPTLVLLLFPVTQFLKNLKFGFPNIRFRDLSVFKMGDFGGVMLSNNSDYNTSGQDYMAGSSQYPFAPMDQSNPFSVPPSYNHHSSMPNPPMTNTNPQMQQPYYPPPMQPPPPPMNSGYMPTYIPKSVNDSSMPNPPMNNTNPQMQQPYYPPPMQPAPPPMNSGYMPTYIPNSENVTNIPSSSSSGGVPGGAGRGYARTGPGFAVGVGAGAVVGAGAALYGSEFMSGIDLPSSLPHPSVPISIDPPF

SEQ ID NO: 107093 - DNA, 752 bp, Arabidopsis thaliana
  misc_feature (1)..(752): Ceres Seq. ID no. 13621347
  misc_feature (1)..(752): Ortholog of  Ceres SEQ ID NO 12600643 as cited in SEQ ID NO 20529
atccaccacatatttatgtttgatccaaaagccaacacaagcaaagaaattaaaagtgttcttgttgctgtagaacacaaacagaacaaacaaaaaatcaattgaagagtctctcagtcgttaggggaagcaaatagagaaatggctagctttactgcctccgcttccaccgtctccgccgctcgtccggctctccttctcaagcctaccgtcgccatctctgctcctgttcttggtttgcctccaatgggtaagaagaagggaggagtgagatgttcaatggagacaaagcaaggaaacgtctcagtcatgggggctggagtttcagctgcagcaacagctgctttgacggcggtgatgagcaatcccgcgatggctttggttgatgagaggatgtcaacagaaggaacaggattaccctttggtctaagcaacaacctcttgggttggattctgtttggagtctttggtttgatctggactttcttcttcgtctacacttcatctctcgaggaggatgaagaatctggtctttcactctgaaggaagaatcaatctttcgtcttctcatttccattttcatgtgagaacatgaatcaaaagtgttcacccttctagtttcttgtaattgttaagtaaagactaaaaactattttcatgtgtgtttactttcccccattctctttatcttgtcataacattgataaggaggagattatgtgattattaaatatcatgcatgacatgttcat

SEQ ID NO: 107094 - protein, 133 aa, Arabidopsis thaliana; identical to SEQ ID NO: 20530
  peptide (1)..(133): Ceres Seq. ID no. 13621348

SEQ ID NO: 107095 - protein, 98 aa, Arabidopsis thaliana; identical to SEQ ID NO: 20531
  peptide (1)..(98): Ceres Seq. ID no. 13621349

SEQ ID NO: 107096 - protein, 87 aa, Arabidopsis thaliana; identical to SEQ ID NO: 20532
  peptide (1)..(87): Ceres Seq. ID no. 13621350

SEQ ID NO: 107097 - DNA, 1252 bp, Arabidopsis thaliana
  misc_feature (1)..(1252): Ceres Seq. ID no. 13621353
  misc_feature (1)..(1252): Ortholog of  Ceres SEQ ID NO 12578315 as cited in SEQ ID NO 62451
  misc_feature (1)..(1252): Ortholog of  Ceres SEQ ID NO 13597295 as cited in SEQ ID NO 63743
  misc_feature (1)..(1252): Ortholog of  Ceres SEQ ID NO 12617090 as cited in SEQ ID NO 64005
  misc_feature (1)..(1252): Ortholog of  Ceres SEQ ID NO 13597233 as cited in SEQ ID NO 64370
  misc_feature (1)..(1252): Ortholog of  Ceres SEQ ID NO 13584577 as cited in SEQ ID NO 65298
  misc_feature (1)..(1252): Ortholog of  Ceres SEQ ID NO 13600370 as cited in SEQ ID NO 0
acaaaggaagaagaagatggaagcaacatacgatcgtgctagtgaggtaaaagcttttgacgagttgaagatcggcgtaaaaggtctcctagacgccggagttactcagatcccacgtatcttccatcatccacatcttaatttaaccgactcaaatctacttctttcctctacaacgatggttataccaacaatcgatcttaaaggaggcgtgttcgacgagtacacagtcacgcgagagagcgtcatcgcgatgatcagagacgcggttgagagattcgggtttttccaggtgattaaccatgggattagtaatgatgttatggagaagatgaaagatgggattcgtgggtttcatgagcaagactcagacgttaggaaaaagttttatactcgtgacgtcaccaaaacagttaagtataacagtaattttgatctttatagctctccttcagcgaactggagagataccttgagttgctttatggctcctgatgttccagaaacagaggacttaccagatatttgtggggaaatcatgttggaatatgcgaaacgagtgatgaaactaggggaactaatctttgagcttttatcagaagctttagggctgaatcctaaccacttgaaagaaatggattgcacaaaaggtttattgatgctttctcattactacccgccttgtcctgagcctggtttaacttttggcacaagtccgcattcagacagatcttttctcactattcttcttcaagatcacattggtgggcttcaagttcgtcagaatggttattgggttgatgttcctcctgttccgggagctcttctcgttaacctcggagatcttttacagcttatgaccaatgatcagtttgtgagcgtagagcatagagttctggctaataaaggtgaaaagccgcggatctcagtagcatctttctttgtgcatcctttaccgagtttacgagtttatggaccgataaaagaacttttgtctgagcaaaaccttcccaagtatagagacactaccgtcactgagtacacgagtcattacatggcaagaggactttatggaaattctgtgttgcttgatttcaagatctgataaaataaactttggagtttaccaacataactcaggtcttctacagtttcacttgattgttccgtaccttatgaaagaaagcttctcgcacactcaaacaaatgtactcatgatgctattaatttaggcaatgagttgggatatgtt

SEQ ID NO: 107098 - protein, 367 aa, Arabidopsis thaliana
  peptide (1)..(367): Ceres Seq. ID no. 13621354
QRKKKMEATYDRASEVKAFDELKIGVKGLLDAGVTQIPRIFHHPHLNLTDSNLLLSSTTMVIPTIDLKGGVFDEYTVTRESVIAMIRDAVERFGFFQVINHGISNDVMEKMKDGIRGFHEQDSDVRKKFYTRDVTKTVKYNSNFDLYSSPSANWRDTLSCFMAPDVPETEDLPDICGEIMLEYAKRVMKLGELIFELLSEALGLNPNHLKEMDCTKGLLMLSHYYPPCPEPGLTFGTSPHSDRSFLTILLQDHIGGLQVRQNGYWVDVPPVPGALLVNLGDLLQLMTNDQFVSVEHRVLANKGEKPRISVASFFVHPLPSLRVYGPIKELLSEQNLPKYRDTTVTEYTSHYMARGLYGNSVLLDFKI

SEQ ID NO: 107099 - protein, 362 aa, Arabidopsis thaliana
  peptide (1)..(362): Ceres Seq. ID no. 13621355
MEATYDRASEVKAFDELKIGVKGLLDAGVTQIPRIFHHPHLNLTDSNLLLSSTTMVIPTIDLKGGVFDEYTVTRESVIAMIRDAVERFGFFQVINHGISNDVMEKMKDGIRGFHEQDSDVRKKFYTRDVTKTVKYNSNFDLYSSPSANWRDTLSCFMAPDVPETEDLPDICGEIMLEYAKRVMKLGELIFELLSEALGLNPNHLKEMDCTKGLLMLSHYYPPCPEPGLTFGTSPHSDRSFLTILLQDHIGGLQVRQNGYWVDVPPVPGALLVNLGDLLQLMTNDQFVSVEHRVLANKGEKPRISVASFFVHPLPSLRVYGPIKELLSEQNLPKYRDTTVTEYTSHYMARGLYGNSVLLDFKI

SEQ ID NO: 107100 - protein, 308 aa, Arabidopsis thaliana
  peptide (1)..(308): Ceres Seq. ID no. 13621356
MVIPTIDLKGGVFDEYTVTRESVIAMIRDAVERFGFFQVINHGISNDVMEKMKDGIRGFHEQDSDVRKKFYTRDVTKTVKYNSNFDLYSSPSANWRDTLSCFMAPDVPETEDLPDICGEIMLEYAKRVMKLGELIFELLSEALGLNPNHLKEMDCTKGLLMLSHYYPPCPEPGLTFGTSPHSDRSFLTILLQDHIGGLQVRQNGYWVDVPPVPGALLVNLGDLLQLMTNDQFVSVEHRVLANKGEKPRISVASFFVHPLPSLRVYGPIKELLSEQNLPKYRDTTVTEYTSHYMARGLYGNSVLLDFKI

SEQ ID NO: 107101 - DNA, 1893 bp, Arabidopsis thaliana
  misc_feature (1)..(1893): Ceres Seq. ID no. 13621365
  misc_feature (1)..(1893): Ortholog of  Ceres SEQ ID NO 13598865 as cited in SEQ ID NO 0
cactataaatactgtttccatacaaaatcatcatgtacacataaaaaaatcaccaaacacaaaaatggtactcttcactttatcaacaacttcttcttcttcttctaagctaaaacaacattcacaccaaagcttctcagagtctctaatggaacacactatcgaagacgctgaatccatcatccatcgatggatttcaccagaacacgtccactcttcttccttctgcttcatctcatcgctattttcaaccgaaaaccgcgaagaagcgaaacgattcatcgacgctgttaccaccttacactccggtatgataagactaatctcagtgaatccaacgtcaatgaaactcgttaaagcagagaatctaatgcgtatctcaatgactcatctctccaaagagttttaccgcattctcaaatcgaaccgacgttatctcgaccccgaatccgtctctatccgttcttcaaaagcttccgattccgactccgattccgattccaacaccatggatgatctaaagatgatcgcggattgtatgatatcatctggctacagcaaagaatgctttaaaatctacaaaagaatccgtaaatcgatcattaacgaagcgttaaaccaactcggattcgagaatttaacgttttcgcagattcagaaacttgaatgggaagttatggagaagaagatacgtaaatggttaagaacaacaacaagagcagtgaatactctgttttccggtgaacaaatcctctccgatcatgtcttctcttcatcatcatcaacaattcgtgaatctgcatttgcagaaatcacatcacaaaccgctttagctttgttcactttcccggaaaaaatggcgaaatgtcgaaaatctccggagaagatcttcctcactctcgatgtttatcaaacgatcgttgatctattacctaagatcaacgaactctttagctctgattcaacctccaccgttagatcacaagtcgatttaacattagtgaatctcagagaaggtgtggtttcgatgatcgacgagttcgaatcttcgatttcgaaagaatcatcgaaatcgttaatctccggtggtggaattcatcaattgacaaggtatgtaatgaatttcatcgtcttcctcgctgattacagtgatacactctccgatatcatctcgaaaccgtcgttaccttcaccggaagaagaaaaagactccggagattcgtcaccggtgaaatcacgaatctcgaggttgattttgttcttactctgtaaaatcgacgccaagtctcgtctctataacgacgtagctctctcgtatctgtttttgattaataacgttaattacgttgttgttaaagtccgatcttcgaatttgaagacggttttgagtgaggattgggttaagaagcatgaagcgaaggtgaagaagtatgtggcgaagtttgaggagattgtttggggagagatgatgacgtcactttctgatgatgtgacgatgactgcggaggaagggattaagcggtttagtgatgggtttgaggaagcgtataagagacaaaccggttggattgtaccggattcgaaattgagagatgagattaaacggtctgttgggatgatgattataccgagatattccgggttttgtgaaaggaaccgggtcaggttattggagaatgtcggatttgaccctgaggatattgggaattatctttcggatttgtattttgggtctggtggatcagggagtggttcgtcagttcattcttcgggttcttctgtttaacacgtttgtgatgatttaatttatattgataagtaaataatattggtatttgatatcttgtcccaaaaatagaaagtaaatatattgatgtaattattttggaagcc

SEQ ID NO: 107102 - protein, 594 aa, Arabidopsis thaliana
  peptide (1)..(594): Ceres Seq. ID no. 13621366
TINTVSIQNHHVHIKKSPNTKMVLFTLSTTSSSSSKLKQHSHQSFSESLMEHTIEDAESIIHRWISPEHVHSSSFCFISSLFSTENREEAKRFIDAVTTLHSGMIRLISVNPTSMKLVKAENLMRISMTHLSKEFYRILKSNRRYLDPESVSIRSSKASDSDSDSDSNTMDDLKMIADCMISSGYSKECFKIYKRIRKSIINEALNQLGFENLTFSQIQKLEWEVMEKKIRKWLRTTTRAVNTLFSGEQILSDHVFSSSSSTIRESAFAEITSQTALALFTFPEKMAKCRKSPEKIFLTLDVYQTIVDLLPKINELFSSDSTSTVRSQVDLTLVNLREGVVSMIDEFESSISKESSKSLISGGGIHQLTRYVMNFIVFLADYSDTLSDIISKPSLPSPEEEKDSGDSSPVKSRISRLILFLLCKIDAKSRLYNDVALSYLFLINNVNYVVVKVRSSNLKTVLSEDWVKKHEAKVKKYVAKFEEIVWGEMMTSLSDDVTMTAEEGIKRFSDGFEEAYKRQTGWIVPDSKLRDEIKRSVGMMIIPRYSGFCERNRVRLLENVGFDPEDIGNYLSDLYFGSGGSGSGSSVHSSGSSV

SEQ ID NO: 107103 - protein, 573 aa, Arabidopsis thaliana
  peptide (1)..(573): Ceres Seq. ID no. 13621367
MVLFTLSTTSSSSSKLKQHSHQSFSESLMEHTIEDAESIIHRWISPEHVHSSSFCFISSLFSTENREEAKRFIDAVTTLHSGMIRLISVNPTSMKLVKAENLMRISMTHLSKEFYRILKSNRRYLDPESVSIRSSKASDSDSDSDSNTMDDLKMIADCMISSGYSKECFKIYKRIRKSIINEALNQLGFENLTFSQIQKLEWEVMEKKIRKWLRTTTRAVNTLFSGEQILSDHVFSSSSSTIRESAFAEITSQTALALFTFPEKMAKCRKSPEKIFLTLDVYQTIVDLLPKINELFSSDSTSTVRSQVDLTLVNLREGVVSMIDEFESSISKESSKSLISGGGIHQLTRYVMNFIVFLADYSDTLSDIISKPSLPSPEEEKDSGDSSPVKSRISRLILFLLCKIDAKSRLYNDVALSYLFLINNVNYVVVKVRSSNLKTVLSEDWVKKHEAKVKKYVAKFEEIVWGEMMTSLSDDVTMTAEEGIKRFSDGFEEAYKRQTGWIVPDSKLRDEIKRSVGMMIIPRYSGFCERNRVRLLENVGFDPEDIGNYLSDLYFGSGGSGSGSSVHSSGSSV

SEQ ID NO: 107104 - protein, 545 aa, Arabidopsis thaliana
  peptide (1)..(545): Ceres Seq. ID no. 13621368
MEHTIEDAESIIHRWISPEHVHSSSFCFISSLFSTENREEAKRFIDAVTTLHSGMIRLISVNPTSMKLVKAENLMRISMTHLSKEFYRILKSNRRYLDPESVSIRSSKASDSDSDSDSNTMDDLKMIADCMISSGYSKECFKIYKRIRKSIINEALNQLGFENLTFSQIQKLEWEVMEKKIRKWLRTTTRAVNTLFSGEQILSDHVFSSSSSTIRESAFAEITSQTALALFTFPEKMAKCRKSPEKIFLTLDVYQTIVDLLPKINELFSSDSTSTVRSQVDLTLVNLREGVVSMIDEFESSISKESSKSLISGGGIHQLTRYVMNFIVFLADYSDTLSDIISKPSLPSPEEEKDSGDSSPVKSRISRLILFLLCKIDAKSRLYNDVALSYLFLINNVNYVVVKVRSSNLKTVLSEDWVKKHEAKVKKYVAKFEEIVWGEMMTSLSDDVTMTAEEGIKRFSDGFEEAYKRQTGWIVPDSKLRDEIKRSVGMMIIPRYSGFCERNRVRLLENVGFDPEDIGNYLSDLYFGSGGSGSGSSVHSSGSSV

SEQ ID NO: 107105 - DNA, 1398 bp, Arabidopsis thaliana
  misc_feature (1)..(1398): Ceres Seq. ID no. 13621377
  misc_feature (1)..(1398): Ortholog of  Ceres SEQ ID NO 13596392 as cited in SEQ ID NO 62136
  misc_feature (1)..(1398): Ortholog of  Ceres SEQ ID NO 13654360 as cited in SEQ ID NO 67980
  misc_feature (1)..(1398): Ortholog of  Ceres SEQ ID NO 13596394 as cited in SEQ ID NO 68561
aatattgactaatctcagagcacacaccagtcttcgggtctctcctcctcgcggctcgaaacgcaagcttcacgcttgaaaatctccgttcgttttctacctcgtttagatcggagatggcggagaagccggcgcaagagcaagagcagaagcgagcgatggaacctgcagttctcgacgatattattcgtcgtttggttgagtttcggaacacgagacctggatcggggaagcaagttcatctcagtgaaggtgaaattcgtcagctttgtgctgtctccaaagaaatatttcttcaacagcccaatctgcttgaattggaagctcccatcaagatctgcggtgatattcatgggcagtattcagatctattgaggctttttgagtatggagggttccctcccgaagctaattatttgttcttgggtgattatgttgaccgtggcaagcaaagcttggaaacaatatgtcttcttctagcttacaaaatcaagtaccctgagaacttcttcttgttgagagggaatcatgaatctgcttccattaatcgtatttacggtttctatgatgagtgcaaacgcaggttcaatgtcagactctggaaaatattcaccgattgctttaactgtcttcctgtggccgccttaattgatgacagaatactatgtatgcatggtgggatttccccagagctgaaaagtttggaccagattagaaatattgcacggccgatggatattccggagtctggtttggtatgtgatttactatggtcggatcctagtggagacgtaggctggggcatgaatgatcgtggtgtttcatacacttttggagctgacaaagtcgcagagttcttggagaaacatgacatggaccttatctgtcgtgcccaccaggttgttgaagatgggtatgagttctttgcagaaagacaacttgttacagtattttcagctcccaactattgcggggaatttgacaacgctggcgcaatgatgagcattgatgagagcttaatgtgctcattccagattctaaagccgtcagaaaagaagtcgccttttctgtgacaccgattatccagtgaccaccattgcttcaaattaacaattctacaaaagttgtatactggcaagaggatctagagacggaaactgctcaattgggaccttaatggtactgataatagagcattagacatgtagctgttgacagtgatggcatcgagcagaaggaacaagtcaagtctgtactgtgattttagcatctctcacatctatgtttgtctaaaatgtgtgtgtgtttttagtcttctctctgaataatattagattctcatttgtactctctatttatttaggagaacccaaattcaaaactttttttagtctcttc

SEQ ID NO: 107106 - protein, 318 aa, Arabidopsis thaliana; identical to SEQ ID NO: 76986
  peptide (1)..(318): Ceres Seq. ID no. 13621378

SEQ ID NO: 107107 - protein, 304 aa, Arabidopsis thaliana; identical to SEQ ID NO: 76987
  peptide (1)..(304): Ceres Seq. ID no. 13621379

SEQ ID NO: 107108 - DNA, 990 bp, Arabidopsis thaliana
  misc_feature (1)..(990): Ceres Seq. ID no. 13621396
  misc_feature (1)..(990): Ortholog of  Ceres SEQ ID NO 13594193 as cited in SEQ ID NO 58558
  misc_feature (1)..(990): Ortholog of  Ceres SEQ ID NO 15177545 as cited in SEQ ID NO 0
caatctctcaaacacacaagaaggaaaaaaaaaaaaaaaatctctcaaacacataacttcaaacatcaatcaaagcttatacagaacttttttttctttctatttctcggacaaaaagaaaaatggatgacatatcagtgagcaaaagcnaccacggaaatgttgttgtgctcaacatcaaagcntcttctcttgcagacacttctcttccttccaacaaacacgagtnatcgtccccgcctttgctctctgtcnatttnttgcaaaagctcttagcggagctcgttggaacttactatctgatatttgctggctgtgccgccattgccgtgaatgctcaacacaaccatgtagtgactcttgtggggattgctgtggtttggggtatagtgataatggttcttgtttactgtctcggccacctctctgcacatttcaatcctgctgtcactcttgccttagcatcttcccaaagattccctctgaatcaagtcccggcctacataactgttcaagtcatcggatcaaccttggcatctgcgactctgcgtcttctgtttgatctgaacaatgatgtgtgcagcaagaaacacgatgtcttcctcggggtcatctccttctgggtctgatcttcaagcattcgtgatggagttcatcattaccggcttcctcatgttagtcgtctgtgccgtcacaaccaccaagagaactacagaggaactagaggggctaatcattggggcaaccgtcacactgaatgttatctttgttggagaggtatcaggagcatcgatgaatccagcaagaagcataggacctgcacttgtgtggggatgttacaaagggatttggatatacttgctggctccaacacttggtgccgtctctcgggccttgattcataaaatgttaccgtcaataccaaacgcagagcctaagttctccaagacaggatcttctcataaacgagtttccgatcttcctctgtga

SEQ ID NO: 107109 - protein, 168 aa, Arabidopsis thaliana
  peptide (1)..(168): Ceres Seq. ID no. 13621397
  misc_feature (10)..(10): Xaa is any aa, unknown or other
  misc_feature (21)..(21): Xaa is any aa, unknown or other
  misc_feature (36)..(36): Xaa is any aa, unknown or other
  misc_feature (45)..(45): Xaa is any aa, unknown or other
  misc_feature (46)..(46): Xaa is any aa, unknown or other
MDDISVSKSXHGNVVVLNIKXSSLADTSLPSNKHEXSSPPLLSVXXLQKLLAELVGTYYLIFAGCAAIAVNAQHNHVVTLVGIAVVWGIVIMVLVYCLGHLSAHFNPAVTLALASSQRFPLNQVPAYITVQVIGSTLASATLRLLFDLNNDVCSKKHDVFLGVISFWV

SEQ ID NO: 107110 - protein, 139 aa, Arabidopsis thaliana
  peptide (1)..(139): Ceres Seq. ID no. 13621398
MMCAARNTMSSSGSSPSGSDLQAFVMEFIITGFLMLVVCAVTTTKRTTEELEGLIIGATVTLNVIFVGEVSGASMNPARSIGPALVWGCYKGIWIYLLAPTLGAVSRALIHKMLPSIPNAEPKFSKTGSSHKRVSDLPL

SEQ ID NO: 107111 - protein, 138 aa, Arabidopsis thaliana
  peptide (1)..(138): Ceres Seq. ID no. 13621399
MCAARNTMSSSGSSPSGSDLQAFVMEFIITGFLMLVVCAVTTTKRTTEELEGLIIGATVTLNVIFVGEVSGASMNPARSIGPALVWGCYKGIWIYLLAPTLGAVSRALIHKMLPSIPNAEPKFSKTGSSHKRVSDLPL

SEQ ID NO: 107112 - DNA, 1460 bp, Arabidopsis thaliana
  misc_feature (1)..(1460): Ceres Seq. ID no. 13621408
  misc_feature (1)..(1460): Ortholog of  Ceres SEQ ID NO 13596198 as cited in SEQ ID NO 68488
acacgaaaagttagttaagcagcaacaaaaaaaaaacatggagaaacagaacattatctcaaacacttcttcttcttcgtcttcttggattcgtggttcttgtgttggaagaggttgttttggtacagtaagcaaagctttgagtaaaatcgacggtggacttttcgccgtgaagtcgatagatctcgccacgtgtcttccttctcaagcagagtcgttagagaacgaaatcgttattctacggtcgatgaagtctcatccaaacatagtgaggtttctcggtgatgatgtgtctaaagaaggaacggcgtcgtttcgaaatcttcatttagagtattcaccggaaggtgacgttgctaacggtggaatcgttaacgaaacgcttctcaggcgttacgtgtggtgtcttgtctctgctttgagtcacgttcattctaacggaattgttcactgcgacgttaaatctaagaacgttcttgtttttaacggtggtagctccgttaagctagcggattttggatcggcggttgagtttgagaaatctacgattcatgtttcgccacgtggaagtccgctttggatggctccggaggtggttagaagagagtaccaaggaccggagagtgacgtgtggtctttagggtgtaccgtcatcgagatgctcaccggaaaaccagcttgggaagatcacggtttcgactcgctgagtcggatcgggttctctaacgatttgccttttattccggtggggttatcggaactcgggagagatttcttagagaaatgcttgaaacgtgatcggagtcagcgttggagctgtgatcagctcttgcagcatccgtttctgtgtcaagatcatcatgactcgttcttcactgagtcgtctccgcgttgtgttcttgactgggtcaactcggagtttgacgaagaagaagagagcgacgaatggagaccagaatccatggtttcggcgatggcaaggataagtaaattagctataaccggaggagcaaattgggaatctaatggttggactgaggttagagacacttccgaagagtcagaggcaaaaaaggaagttcttgtttctccaagggtagaattggaatcttacatatcattggagtcgtcaagcgatgattccgtaagacaaccgaggaatgaagagtcggcgacggagttggcgtcggcagtgacgtgtgaagcaatattgttggtgatgatattggtggtagagaatattcaaatatatgccacgttttacaccagtagtattattatgcatattctatattgttgtagttgttgttgttattatcattatcaaaacaataataagaagaataatttttcgaaatctacatctttcattctcagccttaactttttgtttggtattgcatgtgattcggatcggtctatctattaacataaaaactcttttacgtgagtgtccttaa

SEQ ID NO: 107113 - protein, 475 aa, Arabidopsis thaliana
  peptide (1)..(475): Ceres Seq. ID no. 13621409
HEKLVKQQQKKNMEKQNIISNTSSSSSSWIRGSCVGRGCFGTVSKALSKIDGGLFAVKSIDLATCLPSQAESLENEIVILRSMKSHPNIVRFLGDDVSKEGTASFRNLHLEYSPEGDVANGGIVNETLLRRYVWCLVSALSHVHSNGIVHCDVKSKNVLVFNGGSSVKLADFGSAVEFEKSTIHVSPRGSPLWMAPEVVRREYQGPESDVWSLGCTVIEMLTGKPAWEDHGFDSLSRIGFSNDLPFIPVGLSELGRDFLEKCLKRDRSQRWSCDQLLQHPFLCQDHHDSFFTESSPRCVLDWVNSEFDEEEESDEWRPESMVSAMARISKLAITGGANWESNGWTEVRDTSEESEAKKEVLVSPRVELESYISLESSSDDSVRQPRNEESATELASAVTCEAILLVMILVVENIQIYATFYTSSIIMHILYCCSCCCYYHYQNNNKKNNFSKSTSFILSLNFLFGIACDSDRSIY

SEQ ID NO: 107114 - protein, 463 aa, Arabidopsis thaliana
  peptide (1)..(463): Ceres Seq. ID no. 13621410
MEKQNIISNTSSSSSSWIRGSCVGRGCFGTVSKALSKIDGGLFAVKSIDLATCLPSQAESLENEIVILRSMKSHPNIVRFLGDDVSKEGTASFRNLHLEYSPEGDVANGGIVNETLLRRYVWCLVSALSHVHSNGIVHCDVKSKNVLVFNGGSSVKLADFGSAVEFEKSTIHVSPRGSPLWMAPEVVRREYQGPESDVWSLGCTVIEMLTGKPAWEDHGFDSLSRIGFSNDLPFIPVGLSELGRDFLEKCLKRDRSQRWSCDQLLQHPFLCQDHHDSFFTESSPRCVLDWVNSEFDEEEESDEWRPESMVSAMARISKLAITGGANWESNGWTEVRDTSEESEAKKEVLVSPRVELESYISLESSSDDSVRQPRNEESATELASAVTCEAILLVMILVVENIQIYATFYTSSIIMHILYCCSCCCYYHYQNNNKKNNFSKSTSFILSLNFLFGIACDSDRSIY

SEQ ID NO: 107115 - protein, 393 aa, Arabidopsis thaliana
  peptide (1)..(393): Ceres Seq. ID no. 13621411
MKSHPNIVRFLGDDVSKEGTASFRNLHLEYSPEGDVANGGIVNETLLRRYVWCLVSALSHVHSNGIVHCDVKSKNVLVFNGGSSVKLADFGSAVEFEKSTIHVSPRGSPLWMAPEVVRREYQGPESDVWSLGCTVIEMLTGKPAWEDHGFDSLSRIGFSNDLPFIPVGLSELGRDFLEKCLKRDRSQRWSCDQLLQHPFLCQDHHDSFFTESSPRCVLDWVNSEFDEEEESDEWRPESMVSAMARISKLAITGGANWESNGWTEVRDTSEESEAKKEVLVSPRVELESYISLESSSDDSVRQPRNEESATELASAVTCEAILLVMILVVENIQIYATFYTSSIIMHILYCCSCCCYYHYQNNNKKNNFSKSTSFILSLNFLFGIACDSDRSIY

SEQ ID NO: 107116 - DNA, 929 bp, Arabidopsis thaliana
  misc_feature (1)..(929): Ceres Seq. ID no. 13621423
  misc_feature (1)..(929): Ortholog of  Ceres SEQ ID NO 13661001 as cited in SEQ ID NO 67531
aaagcacaattttagaaaggatttaattaagtataataacacaaagaaacagagtaaaagaaagaaaaatggattttaagaaggaagaaacacttcgtagagggccatggctcgaagaagaagacgaacggctagtgaaggtcattagtcttttgggagaacgtcgttgggattctttagcaatagtttccggtttgaagaggagtggtaagagttgcaggctaaggtggatgaactatctgaatccgactctgaagcgtggaccgatgagtcaagaagaagagagaatcatctttcagctccatgctctatggggtaacaagtggtcgaagattgcgagaagattacccggtaggactgataacgagataaagaactattggagaactcattatagaaagaaacaggaagctcaaaactatggaaagctctttgagtggagaggaaatacaggagaagaattgttgcacaagtataaggaaacagagatcactaggacaaagacgacgtctcaagaacatggttttgttgaagttgtgagcatggaaagtggtaaagaagccaacggtggtgttggtggaagagaaagcttcggtgttatgaaatcaccgtatgaaaatcggatttcggattggatatcagagatttctactgaccagagtgaagcaaatctttcagaagatcacagcagcaatagctgcagtgagaacaatattaacattggtacttggtggtttcaagagactagggactttgaggagttttcatgttctctatggtcataattctaaagttggtttatttactttttaactgatggataattgaattcgaaagtgctatattaaagtaacaagtgttccaatattcaaccttaatgtacacaaatatgtaaaatttgaactcaatttgaatcggttatcaatagg

SEQ ID NO: 107117 - protein, 238 aa, Arabidopsis thaliana
  peptide (1)..(238): Ceres Seq. ID no. 13621424
MDFKKEETLRRGPWLEEEDERLVKVISLLGERRWDSLAIVSGLKRSGKSCRLRWMNYLNPTLKRGPMSQEEERIIFQLHALWGNKWSKIARRLPGRTDNEIKNYWRTHYRKKQEAQNYGKLFEWRGNTGEELLHKYKETEITRTKTTSQEHGFVEVVSMESGKEANGGVGGRESFGVMKSPYENRISDWISEISTDQSEANLSEDHSSNSCSENNINIGTWWFQETRDFEEFSCSLWS

SEQ ID NO: 107118 - protein, 184 aa, Arabidopsis thaliana
  peptide (1)..(184): Ceres Seq. ID no. 13621425
MNYLNPTLKRGPMSQEEERIIFQLHALWGNKWSKIARRLPGRTDNEIKNYWRTHYRKKQEAQNYGKLFEWRGNTGEELLHKYKETEITRTKTTSQEHGFVEVVSMESGKEANGGVGGRESFGVMKSPYENRISDWISEISTDQSEANLSEDHSSNSCSENNINIGTWWFQETRDFEEFSCSLWS

SEQ ID NO: 107119 - protein, 172 aa, Arabidopsis thaliana
  peptide (1)..(172): Ceres Seq. ID no. 13621426
MSQEEERIIFQLHALWGNKWSKIARRLPGRTDNEIKNYWRTHYRKKQEAQNYGKLFEWRGNTGEELLHKYKETEITRTKTTSQEHGFVEVVSMESGKEANGGVGGRESFGVMKSPYENRISDWISEISTDQSEANLSEDHSSNSCSENNINIGTWWFQETRDFEEFSCSLWS

SEQ ID NO: 107120 - DNA, 1295 bp, Arabidopsis thaliana
  misc_feature (1)..(1295): Ceres Seq. ID no. 13621451
  misc_feature (1)..(1295): Ortholog of  Ceres SEQ ID NO 13502952 as cited in SEQ ID NO 62271
  misc_feature (1)..(1295): Ortholog of  Ceres SEQ ID NO 13502973 as cited in SEQ ID NO 68052
  misc_feature (1)..(1295): Ortholog of  Ceres SEQ ID NO 13596000 as cited in SEQ ID NO 68188
agggactcagtaaggccacctcaaaacaagacccatcgataacagcgatcatggtggctaaagccttagcacagctgataacatgcatcatcttattctgccacgttgtagcttccgtagaagacctcaccatacgccaagtcacggccgacaatcggcgaattcgcccgaatcttctcgggactcacacagagagtaaattccggcttttcatgtccgattacggcaagaactactccacgagggaggagtacatccaccgcctcggaatatttgccaaaaacgtccttaaggccgcagagcaccagatgatggacccctccgccgtccacggagtcacacagttctctgacctcacggaagaggagttcaagcggatgtacactggagtagccgatgttggcggcagccgtggcggtacggttggagcggaggcacctatggttgaggttgatggattgcctgaagattttgactggagggagaagggtggagttactgaggttaagaatcaaggtgcatgtggatcgtgctgggcttttagcacaacgggagcagctgaaggagcccatttcgtctccaccgggaagctcctcagtcttagcgaacaacaacttgtcgattgtgatcatatagtcgatccaaaggacaagaaagcatgcgacaatggatgtggcgggggactgatgacaaatgcctacgagtatttgatggaggcaggaggattagaagaagaaagatcatatccttacactggtaaacgaggccattgcaagtttgatcctgagaaggttgcggtaagagtactgaacttcacgactataccactggatgagaaccaaatcgcagcaaacttagttcggcatggtcccttagcagtgggattaaacgccgtgttcatgcaaacatatataggaggagtgtcatgtccgcttatatgcagcaagcgaaacgttaaccacggagtacttcttgttgggtacggatcaaaagggttttcgatcttgcggcttagtaataaaccttattggattatcaaaaactcgtgggggaaaaagtggggagagaatggatactacaagctgtgtcgtgggcacgatatatgtgggattaactcgatggtatctgcagtagccacccaagtttcctcgtagatgggtcttgtctttcctctgctctcttgttttctaatctagggtttgatcatgttttaggagtggagtttggggtttgaatattgggttgtttctttccgtgaccgttcttgtagtaaaagtgggtgattatttccgttt

SEQ ID NO: 107121 - protein, 383 aa, Arabidopsis thaliana
  peptide (1)..(383): Ceres Seq. ID no. 13621452
GLSKATSKQDPSITAIMVAKALAQLITCIILFCHVVASVEDLTIRQVTADNRRIRPNLLGTHTESKFRLFMSDYGKNYSTREEYIHRLGIFAKNVLKAAEHQMMDPSAVHGVTQFSDLTEEEFKRMYTGVADVGGSRGGTVGAEAPMVEVDGLPEDFDWREKGGVTEVKNQGACGSCWAFSTTGAAEGAHFVSTGKLLSLSEQQLVDCDHIVDPKDKKACDNGCGGGLMTNAYEYLMEAGGLEEERSYPYTGKRGHCKFDPEKVAVRVLNFTTIPLDENQIAANLVRHGPLAVGLNAVFMQTYIGGVSCPLICSKRNVNHGVLLVGYGSKGFSILRLSNKPYWIIKNSWGKKWGENGYYKLCRGHDICGINSMVSAVATQVSS

SEQ ID NO: 107122 - protein, 367 aa, Arabidopsis thaliana
  peptide (1)..(367): Ceres Seq. ID no. 13621453
MVAKALAQLITCIILFCHVVASVEDLTIRQVTADNRRIRPNLLGTHTESKFRLFMSDYGKNYSTREEYIHRLGIFAKNVLKAAEHQMMDPSAVHGVTQFSDLTEEEFKRMYTGVADVGGSRGGTVGAEAPMVEVDGLPEDFDWREKGGVTEVKNQGACGSCWAFSTTGAAEGAHFVSTGKLLSLSEQQLVDCDHIVDPKDKKACDNGCGGGLMTNAYEYLMEAGGLEEERSYPYTGKRGHCKFDPEKVAVRVLNFTTIPLDENQIAANLVRHGPLAVGLNAVFMQTYIGGVSCPLICSKRNVNHGVLLVGYGSKGFSILRLSNKPYWIIKNSWGKKWGENGYYKLCRGHDICGINSMVSAVATQVSS

SEQ ID NO: 107123 - protein, 313 aa, Arabidopsis thaliana
  peptide (1)..(313): Ceres Seq. ID no. 13621454
MSDYGKNYSTREEYIHRLGIFAKNVLKAAEHQMMDPSAVHGVTQFSDLTEEEFKRMYTGVADVGGSRGGTVGAEAPMVEVDGLPEDFDWREKGGVTEVKNQGACGSCWAFSTTGAAEGAHFVSTGKLLSLSEQQLVDCDHIVDPKDKKACDNGCGGGLMTNAYEYLMEAGGLEEERSYPYTGKRGHCKFDPEKVAVRVLNFTTIPLDENQIAANLVRHGPLAVGLNAVFMQTYIGGVSCPLICSKRNVNHGVLLVGYGSKGFSILRLSNKPYWIIKNSWGKKWGENGYYKLCRGHDICGINSMVSAVATQVSS

SEQ ID NO: 107124 - DNA, 2701 bp, Arabidopsis thaliana
  misc_feature (1)..(2701): Ceres Seq. ID no. 13621455
  misc_feature (1)..(2701): Ortholog of  Ceres SEQ ID NO 13657677 as cited in SEQ ID NO 66119
atttatttctccgatcatcttttctctgctgaagatagttgagagaagaacctcgaaagatgagatctttattggtttttagaaaaatcccttcacggattcgtcttcgtaacttgagaaacaataaacccttttgttcacagtctcagtttcccaaagaatctgagaatccaagtcaagagcagagactactagtttacggatccacttctgaagaaaacccagttacctccaaagtgagtcttttgtctgcgaagcctgaacagaaggacgatgcatctgtaatcgatgttcttctcaatcgcaggaacaacccagaagctgctcttcgtttctataattgggctagaccatggcgtggaagttttgaagatggtgacgtcttctgggtactcattcatattctggtcagttctcctgagacctatggacgtgcaagtgatttgctcatacggtacgtttctacgagcaatccaactccaatggcaagtgttttggtcagtaaattggtggattcggcgaaatcatttgggtttgaagtcaattcacgagcttttaattacttattgaatgcttattctaaagataggcaaacggatcatgcggtggatatcgtcaaccagatgttggaactagatgtgattccattttttccatatgtgaataggaccttgagtgctttagttcaaaggaattcgttaactgaagctaaggaactctacagtaggatggttgccattggtgttgatggtgataatgtaacaacgcaattgttaatgagagctagtttgagagaagaaaagcctgcggaggctttggaggttttaagtagagctattgagagaggagcagaaccggatagtttactgtatagtcttgctgttcaggcttgttgcaagacgcttgatttggctatggctaatagtttattgagagagatgaaggagaagaagttgtgtgtcccgtcgcaggaaacttatacttctgtgattttggcttctgtgaagcaaggtaatatggatgatgcaattagattgaaggatgagatgttgagtgatgggatatcgatgaatgtagttgctgcgacgagtctgatcacgggacactgcaagaacaatgacttggttagtgctttggttttgtttgataagatggaaaaggaaggcccctctccgaacagcgttactttttcggttctgatagaatggtttcgtaagaacggggaaatggaaaaggcgcttgaattttacaagaaaatggaagtcttaggtcttactccttctgtctttcatgtccacacgataattcaagggtggttgaaaggtcagaaacatgaagaggcactgaaactctttgacgagtcttttgaaaccggtcttgcaaacgtgtttgtatgtaacactatattatcctggttatgcaagcaaggtaagacagacgaagctacagagttattaagcaagatggaaagtagaggtattggaccgaatgtagtttcttacaataacgtgatgcttggccactgcagacagaaaaacatggacttggctcgtattgttttttcaaatatactggaaaagggtctaaagccgaataactacacgtattccattctgattgatggatgtttcaggaatcatgatgaacaaaacgctttggaagtcgtcaatcatatgacttcttccaatattgaagtcaacggggttgtataccaaacaattatcaatggtttatgcaaagttggtcagacatccaaagcaagagaattgttggcaaatatgatcgaagaaaaacggttatgtgttagttgcatgagttacaatagcattatagatggatttttcaaagagggtgaaatggattctgcggttgcagcatacgaagagatgtgtggcaatggtatttctccaaacgtcataacttataccagcttgatgaatgggttatgcaaaaataacagaatggatcaagcattggaaatgagagacgaaatgaagaacaaaggtgtcaaactcgatattccagcctatggtgctcttatcgatgggttctgcaaaaggagtaacatggaaagcgcatctgctctgttctctgaactccttgaagaaggattgaatccaagccaacctatatacaacagcttgatttctggatttcgtaatctgggaaacatggtagcagcccttgatttgtacaagaaaatgttgaaagacggtctacgatgtgatctgggtacatatacaacactgattgatggattgttgaaagatggaaatttgatcctggcctctgagttgtacacagaaatgcaggcggtgggtcttgtccctgatgaaatcatttacacagtaattgtaaacggtcttagcaagaaggggcagtttgtaaaagtggttaagatgtttgaggagatgaagaagaataatgtcactccgaatgtccttatctacaacgcggtgattgccggacattatagagaaggaaatctcgatgaggcttttagacttcacgatgagatgcttgacaagggtattttacccgatggtgctacatttgatattctagttagtgggcaagtcggaaacctccaacctgtacgtgcagcaagtttgtagtctgccaaaaccagaccacattattgactgatgacttagctttggcttttcgtgagaccccgataatatgactgcttaaggtgtgc

SEQ ID NO: 107125 - protein, 851 aa, Arabidopsis thaliana
  peptide (1)..(851): Ceres Seq. ID no. 13621456
MRSLLVFRKIPSRIRLRNLRNNKPFCSQSQFPKESENPSQEQRLLVYGSTSEENPVTSKVSLLSAKPEQKDDASVIDVLLNRRNNPEAALRFYNWARPWRGSFEDGDVFWVLIHILVSSPETYGRASDLLIRYVSTSNPTPMASVLVSKLVDSAKSFGFEVNSRAFNYLLNAYSKDRQTDHAVDIVNQMLELDVIPFFPYVNRTLSALVQRNSLTEAKELYSRMVAIGVDGDNVTTQLLMRASLREEKPAEALEVLSRAIERGAEPDSLLYSLAVQACCKTLDLAMANSLLREMKEKKLCVPSQETYTSVILASVKQGNMDDAIRLKDEMLSDGISMNVVAATSLITGHCKNNDLVSALVLFDKMEKEGPSPNSVTFSVLIEWFRKNGEMEKALEFYKKMEVLGLTPSVFHVHTIIQGWLKGQKHEEALKLFDESFETGLANVFVCNTILSWLCKQGKTDEATELLSKMESRGIGPNVVSYNNVMLGHCRQKNMDLARIVFSNILEKGLKPNNYTYSILIDGCFRNHDEQNALEVVNHMTSSNIEVNGVVYQTIINGLCKVGQTSKARELLANMIEEKRLCVSCMSYNSIIDGFFKEGEMDSAVAAYEEMCGNGISPNVITYTSLMNGLCKNNRMDQALEMRDEMKNKGVKLDIPAYGALIDGFCKRSNMESASALFSELLEEGLNPSQPIYNSLISGFRNLGNMVAALDLYKKMLKDGLRCDLGTYTTLIDGLLKDGNLILASELYTEMQAVGLVPDEIIYTVIVNGLSKKGQFVKVVKMFEEMKKNNVTPNVLIYNAVIAGHYREGNLDEAFRLHDEMLDKGILPDGATFDILVSGQVGNLQPVRAASL

SEQ ID NO: 107126 - protein, 710 aa, Arabidopsis thaliana
  peptide (1)..(710): Ceres Seq. ID no. 13621457
MASVLVSKLVDSAKSFGFEVNSRAFNYLLNAYSKDRQTDHAVDIVNQMLELDVIPFFPYVNRTLSALVQRNSLTEAKELYSRMVAIGVDGDNVTTQLLMRASLREEKPAEALEVLSRAIERGAEPDSLLYSLAVQACCKTLDLAMANSLLREMKEKKLCVPSQETYTSVILASVKQGNMDDAIRLKDEMLSDGISMNVVAATSLITGHCKNNDLVSALVLFDKMEKEGPSPNSVTFSVLIEWFRKNGEMEKALEFYKKMEVLGLTPSVFHVHTIIQGWLKGQKHEEALKLFDESFETGLANVFVCNTILSWLCKQGKTDEATELLSKMESRGIGPNVVSYNNVMLGHCRQKNMDLARIVFSNILEKGLKPNNYTYSILIDGCFRNHDEQNALEVVNHMTSSNIEVNGVVYQTIINGLCKVGQTSKARELLANMIEEKRLCVSCMSYNSIIDGFFKEGEMDSAVAAYEEMCGNGISPNVITYTSLMNGLCKNNRMDQALEMRDEMKNKGVKLDIPAYGALIDGFCKRSNMESASALFSELLEEGLNPSQPIYNSLISGFRNLGNMVAALDLYKKMLKDGLRCDLGTYTTLIDGLLKDGNLILASELYTEMQAVGLVPDEIIYTVIVNGLSKKGQFVKVVKMFEEMKKNNVTPNVLIYNAVIAGHYREGNLDEAFRLHDEMLDKGILPDGATFDILVSGQVGNLQPVRAASL

SEQ ID NO: 107127 - protein, 663 aa, Arabidopsis thaliana
  peptide (1)..(663): Ceres Seq. ID no. 13621458
MLELDVIPFFPYVNRTLSALVQRNSLTEAKELYSRMVAIGVDGDNVTTQLLMRASLREEKPAEALEVLSRAIERGAEPDSLLYSLAVQACCKTLDLAMANSLLREMKEKKLCVPSQETYTSVILASVKQGNMDDAIRLKDEMLSDGISMNVVAATSLITGHCKNNDLVSALVLFDKMEKEGPSPNSVTFSVLIEWFRKNGEMEKALEFYKKMEVLGLTPSVFHVHTIIQGWLKGQKHEEALKLFDESFETGLANVFVCNTILSWLCKQGKTDEATELLSKMESRGIGPNVVSYNNVMLGHCRQKNMDLARIVFSNILEKGLKPNNYTYSILIDGCFRNHDEQNALEVVNHMTSSNIEVNGVVYQTIINGLCKVGQTSKARELLANMIEEKRLCVSCMSYNSIIDGFFKEGEMDSAVAAYEEMCGNGISPNVITYTSLMNGLCKNNRMDQALEMRDEMKNKGVKLDIPAYGALIDGFCKRSNMESASALFSELLEEGLNPSQPIYNSLISGFRNLGNMVAALDLYKKMLKDGLRCDLGTYTTLIDGLLKDGNLILASELYTEMQAVGLVPDEIIYTVIVNGLSKKGQFVKVVKMFEEMKKNNVTPNVLIYNAVIAGHYREGNLDEAFRLHDEMLDKGILPDGATFDILVSGQVGNLQPVRAASL

SEQ ID NO: 107128 - DNA, 1852 bp, Arabidopsis thaliana
  misc_feature (1)..(1852): Ceres Seq. ID no. 13621459
  misc_feature (1)..(1852): Ortholog of  Ceres SEQ ID NO 13655852 as cited in SEQ ID NO 64636
ctctcaatttgggattcgagacgaaaccctagctctgatttttttcaattccgatggaggcgggagagcggcgcaatggcgattcgatgagtcacaatcaccgcgcaccgaagaagccacgtctcgctgggttattaaccgagtcagatatcgactctgagttcgctcaccaccagaccggtgttgccagaatcaacaacggtagcttcgggtgctgtcctggctccgttctcgaggcgcaacgcgagtggcagcttcgttatctccgtcagcctgatgagttctacttcaacggtctccgtcgtggacttctcgcttctcgaactgtgatcagtgacctaatcaacgccgatgatgttgatgaggtctctctcgttgataacgccaccactgctgctgctattgttcttcagaaagttggaaggtgtttctcggaagggaagtataagaaggaagatactgtagtgatgtttcactgtgcgtttcagagtgtgaagaagtcgattcaggcttatgtctctcgtgtgggaggttctactgttgaggttaggttacctttccctgtaaattcgaacgaagagattatctccaagtttagagaaggactagagaaaggtagagcgaatggtagaacggttaggttagctatcattgatcatataacgtcgatgccgtgtgttttgatgccggtacgagaattggttaagatctgcagagaggaaggtgtggagcaggtttttgttgatgcagctcatgccattggtagtgttaaagttgatgtgaaagaaatcggagctgattactatgtgagtaatctgcataaatggttcttttgtccaccgtctatcgcgtttttctattgtaagaaacgtggttctgagtctgatgttcatcaccctgtggtgtctcatgagtttggaaatggtttgcctatagaaagtgcctggattgggactagggattacagttcacagcttgtggttccatctgtgatggagtttgtaaacaggttcgagggagggatggaagggataatgatgaagaaccatgatgaagctgttagaatgggtttaatgctggctgatgcttggggaacgaatctagggtcacctccagaaatgtgtgttgggatggttatgatcggtttaccttcaaaactctgtgttggaagtgatgaagatgctattaagttgcggtcatatctgcgggttcattactcagttgaggttccagttttttatctcggattgagggatggagaggaaggagtgaaagacaaagacagtggactaattactgcgtatgttcggatctctcatcaggtctataacaaaactgaggattatgagagattgagagacgcaataacagagttagtcaaggatcagatgacttgtcaaaaccttcctgcattgtagtaaccagatatactttgataatccacaagagcctcattgagactctttcatagatcaactgccggtgtaacaataaggcgatggaagagccacgggcaaagattccggaggtaacatgtattgatgagcttgtggaggagcggcttgcaatggaagaagaagctaaccttgagaggccctctctttttattagtcttttataacgtttaacggctttgtatgattattgcaaataaaatcatgtgcgtctaatcttatcttcctcaaacattctgcttgcgaatctcctgtcgcagttccaataatttttccttattgaaaactttttccctcacattgaaagcatattcatagatatgtaatgacacctaatttatcattgttttgtatgattctggttcgttttcacatctatgtctattatgtctatttac

SEQ ID NO: 107129 - protein, 454 aa, Arabidopsis thaliana; identical to SEQ ID NO: 20963
  peptide (1)..(454): Ceres Seq. ID no. 13621460

SEQ ID NO: 107130 - protein, 443 aa, Arabidopsis thaliana; identical to SEQ ID NO: 20964
  peptide (1)..(443): Ceres Seq. ID no. 13621461

SEQ ID NO: 107131 - protein, 316 aa, Arabidopsis thaliana; identical to SEQ ID NO: 20965
  peptide (1)..(316): Ceres Seq. ID no. 13621462

SEQ ID NO: 107132 - DNA, 1251 bp, Arabidopsis thaliana
  misc_feature (1)..(1251): Ceres Seq. ID no. 13621467
  misc_feature (1)..(1251): Ortholog of  Ceres SEQ ID NO 14305461 as cited in SEQ ID NO 57996
  misc_feature (1)..(1251): Ortholog of  Ceres SEQ ID NO 15174376 as cited in SEQ ID NO 0
  misc_feature (1)..(1251): Ortholog of  Ceres SEQ ID NO 15178108 as cited in SEQ ID NO 0
aaaaggataagcttggtgttactttatcgccttctttcgtttggcctttgatcctatcataagctttttttcgtttatcaatcttctcgattcagccacaattcttgtttctcagataattcatctcctttctttgattcgtttccttctcttctgtcactcagatctagatctagatctaggtttttttctttctcatcggaaatttggcttagaggcttgttttgatctagggtttggtttttgggaattttgaaaaaaaaacaaaattaggaatgaatctatgagctactcaatcctgtttcgtcggattcgaattctacactctttctccgtcgtttacctctactacacctacgttttctcatgaagtaatcgttctcgatctcagttttcgtttttgatctaacttattctttgatagatttagaaatcggggattttcagattgtgtttttgagaggtttttataggaaaatatctctagaagaagaagaataatattatattgattttaattttggtgagaagaagtcaaaaagtcaacgagaaatggggtcgttgcaaatgcaaacaagtcctgaatccgataatgatccgaggtacgccacggtgacggatgagaggaagaggaagagaatgatctctaacagagaatctgctcggaggtcaaggatgaggaaacagaagcaacttggtgatttgatcaacgaagtcactcttctcaagaatgataacgctaaaatcactgagcaggttgatgaagcttcaaagaaatacattgaaatggagtctaagaacaatgtcttgagggcacaggcttcggagttgacggataggttgagatcattgaactctgtgcttgagatggttgaagaaattagtggtcaggctttggatattcctgagattcctgaatctatgcagaacccttggcagatgccttgtccaatgcaaccaatcagagcttctgctgatatgtttgattgctgaagatggatgattcatatctgaaggatcaaaaatgaagcattgagttcgagtctttggtctgttttacttactgtccttgttgtaacaattagtgtgtcattggtgaattgagtcttgtgttgtcaatggacaacgcaatctttatgcaatttcaatttgttcgtgtctttgtatggttttgtagcctcagtcctctagtcttgtgtctcatgtaattggtgtctaatgtgtttcttattgaattcaagctttcttatt

SEQ ID NO: 107133 - protein, 146 aa, Arabidopsis thaliana; identical to SEQ ID NO: 21432
  peptide (1)..(146): Ceres Seq. ID no. 13621468

SEQ ID NO: 107134 - protein, 141 aa, Arabidopsis thaliana; identical to SEQ ID NO: 21433
  peptide (1)..(141): Ceres Seq. ID no. 13621469

SEQ ID NO: 107135 - protein, 117 aa, Arabidopsis thaliana; identical to SEQ ID NO: 21434
  peptide (1)..(117): Ceres Seq. ID no. 13621470

SEQ ID NO: 107136 - DNA, 776 bp, Arabidopsis thaliana
  misc_feature (1)..(776): Ceres Seq. ID no. 13621471
  misc_feature (1)..(776): Ortholog of  Ceres SEQ ID NO 13595704 as cited in SEQ ID NO 51001
  misc_feature (1)..(776): Ortholog of  Ceres SEQ ID NO 13638279 as cited in SEQ ID NO 57674
  misc_feature (1)..(776): Ortholog of  Ceres SEQ ID NO 15177534 as cited in SEQ ID NO 0
gtgaaaatcttcaatctcgcgagagagaagaagaagaagaagaagaagaagaagcgatgttcctggtggattggttctatggagttctggcaactctgggactatggcagaaagaagcgaagattctgtttctaggtctcgacaacgccggcaaaaccaccttgcttcacatgttaaaggacgagagactggtccagcatcagccgacacagcatccgacatcggaagagcttagtatcggcaaaatcaagttcaaagccttcgatttgggaggtcatcagattgctcgtagagtctggaaggactattacgctaaggttgatgcagtggtatacctagttgatgcatatgacaaagagaggtttgcagaatcaaagaaagagcttgacgctcttctctctgatgaatccctagcaaatgtccctttcctcatccttggaaacaaaatcgacattccgtacgctgcatcagaagacgagctgcgttatcatctaggcctcaccagtttcaccactgggaaaggtaaagtgaatctagcaggaacaaatgttcgtcctcttgaggtgttcatgtgcagcattgtcagaaagatgggttacggcgaaggatttaaatgggtttctcaatatatcgactagatcaatcatatttaagtcttatctatctatactgtgtgattggtatctgtacgtgttataacctaatgtataattacgattaatgtgtgtatacaacaagatttgacggcttttaaattatcaattttgtgtttacag

SEQ ID NO: 107137 - protein, 211 aa, Arabidopsis thaliana
  peptide (1)..(211): Ceres Seq. ID no. 13621472
ENLQSREREEEEEEEEEAMFLVDWFYGVLATLGLWQKEAKILFLGLDNAGKTTLLHMLKDERLVQHQPTQHPTSEELSIGKIKFKAFDLGGHQIARRVWKDYYAKVDAVVYLVDAYDKERFAESKKELDALLSDESLANVPFLILGNKIDIPYAASEDELRYHLGLTSFTTGKGKVNLAGTNVRPLEVFMCSIVRKMGYGEGFKWVSQYID

SEQ ID NO: 107138 - protein, 193 aa, Arabidopsis thaliana
  peptide (1)..(193): Ceres Seq. ID no. 13621473
MFLVDWFYGVLATLGLWQKEAKILFLGLDNAGKTTLLHMLKDERLVQHQPTQHPTSEELSIGKIKFKAFDLGGHQIARRVWKDYYAKVDAVVYLVDAYDKERFAESKKELDALLSDESLANVPFLILGNKIDIPYAASEDELRYHLGLTSFTTGKGKVNLAGTNVRPLEVFMCSIVRKMGYGEGFKWVSQYID

SEQ ID NO: 107139 - protein, 155 aa, Arabidopsis thaliana
  peptide (1)..(155): Ceres Seq. ID no. 13621474
MLKDERLVQHQPTQHPTSEELSIGKIKFKAFDLGGHQIARRVWKDYYAKVDAVVYLVDAYDKERFAESKKELDALLSDESLANVPFLILGNKIDIPYAASEDELRYHLGLTSFTTGKGKVNLAGTNVRPLEVFMCSIVRKMGYGEGFKWVSQYID

SEQ ID NO: 107140 - DNA, 1395 bp, Arabidopsis thaliana
  misc_feature (1)..(1395): Ceres Seq. ID no. 13621479
  misc_feature (1)..(1395): Ortholog of  Ceres SEQ ID NO 13639663 as cited in SEQ ID NO 57850
aatcgtttccacgaaaacaagtagagagagtgattcgagttttccaatcataaaaatcagcgaagaagatcttcgttcttgttcattctgtgaggtttcattgttaaaatcgaaacgaatctcaggttggagtaatccttgggagagatccgatttccgtttccatggcgattcggtggtcggagctgtgtatcgtactgttcgctctttcctacgccatctgcgtccttgccgggaagagttactacgatgtgttgcaagtcccgaaaggtgcatctgatgaacagatcaagagagcttataggaaactagctttgaagtatcatcccgataagaatcaaggaaatgaggaagcgactcgcaaattcgctgagatcaacaatgcttatgaagtgttatcggatgaggagaagagggagatatataacaagtatggtgaagagggacttaaacagttttctgcaaatggaggaagaggaggaggaggaggcggcatgaatatgcaggacatcttcagctcgttttttggtggaggttcgatggaggaagaagagaaggttgtcaagggggatgacgtaattgtggaacttgaggcaactctagaagatttgtacatgggaggctctatgaaggtatggagggaaaagaatgtgataaaaccagctcctggaaagagaaagtgtaactgcaggaacgaggtctatcacagacaaattggtcctggaatgttccaacagatgacagagcaggtctgtgacaaatgccctaatgtcaaatacgaacgggagggatactttgtgacagttgatatcgagaaaggaatgaaagatggagaagaagtgtctttctatgaagacggcgaacccattcttgacggtgaccctggtgaccttaagttccgaatcagaactgcaccacatgcccgtttcagaagggatggcaacgatctacacatgaacgtgaacattacactggttgaggcgctagttggttttgagaaatcattcaaacacttggatgatcacgaagttgacatcagttccaagggaattacaaagccgaaggaagtaaagaagttcaaaggagaagggatgccacttcactacagcacaaagaaaggcaacctctttgtcacttttgaggttttgtttccgtcttctctcactgacgatcagaagaagaagattaaagaagtctttgcttagtgctcttctctcgctttcgctctctctctctttagaagtttggggattaaagagaagaacatgtgatggtcctaatgtataacatgattaggttttaatatagaaagaaaaaagatatggggagacaaagtcggaaggacgttttgatcaagttgtcatttttgtttgctctttgttaatcatattagtg

SEQ ID NO: 107141 - protein, 346 aa, Arabidopsis thaliana; identical to SEQ ID NO: 23911
  peptide (1)..(346): Ceres Seq. ID no. 13621480

SEQ ID NO: 107142 - protein, 236 aa, Arabidopsis thaliana; identical to SEQ ID NO: 23912
  peptide (1)..(236): Ceres Seq. ID no. 13621481

SEQ ID NO: 107143 - protein, 234 aa, Arabidopsis thaliana; identical to SEQ ID NO: 23913
  peptide (1)..(234): Ceres Seq. ID no. 13621482

SEQ ID NO: 107144 - DNA, 1904 bp, Arabidopsis thaliana
  misc_feature (1)..(1904): Ceres Seq. ID no. 13621491
  misc_feature (1)..(1904): Ortholog of  Ceres SEQ ID NO 14311854 as cited in SEQ ID NO 51455
  misc_feature (1)..(1904): Ortholog of  Ceres SEQ ID NO 14313097 as cited in SEQ ID NO 58902
caaaatgaatagagataatatataaacacaagcattaggctgtcgagaaaacataaattttctatgattaggccatacaaatcataataagtagtagaaatacaaaaaaatctgtttgttggctaaagagaaatcgaaggaattagtcttttcacccatttttctctctctgtgtggcttcttcttcttcttcttcttcctatcaaaatcatcatcatcatcttctctatattactaaaatagagagagccaacaaaagagaggagagggcgtaaaacagcagacggtggcgcaccgtagcaccgccccctcctaacctgcgcctttcttccttctctttcattttttttttttccggtttcaggaattattcctctcctcctctctcaggtcgcttcgatcccaaggcaaaatagtttcctgatttttgattcttaccttcgattttggcttcttcttcttcttcttcagatgcattcacctagaaaactctggcggacatcaaaggaaccctagcttttctccggtcttgttatatcgcctctatcgccgccgatcggtggtttgatttcaaatccaagagaaagaaacgcagaggttcatttctcaggatgctttggatcatgagattctccggtttattctccgccgctttggttatcatcgtcctctctccttctctccaatcgtttcctccagctgaagctatcagatcctctcatctcgacgcttacctccgtttcccctcctccgatccaccgccgcatagattctccttcagaaaagctcctgttttccgcaatgccgccgattgcgccgccgcagatatcgattccggcgtctgtaacccttccttggtccacgtcgcgattactctcgatttcgagtacctgcgtggctcaatcgccgccgttcattcgattctcaagcactcgtcgtgtcccgagagcgtcttcttccatttcctcgtctccgagactgacctagaatccttgattcgttcgacttttcccgaattgaaattaaaggtttactacttcgatccggagattgtacggacgctgatctcaacctccgtgagacaagcgctcgagcagccgttgaattacgctagaaattacctagctgaccttctcgagccttgcgtgcgtcgcgtgatctacctagattccgatctaatcgtcgtcgacgacatcgcaaagctctggatgacgaaactgggatcgaaaacgatcggagctcccgagtactgtcacgcgaacttcacaaagtatttcacaccggcgttctggtccgacgagaggttctccggagctttctccgggaggaaaccgtgctacttcaacacgggagtgatggtgatggatctagagagatggaggcgcgtagggtacacggaggtgatagagaaatggatggagattcagaagagtgataggatttacgagctgggatcattgccgccgttcttgttggtgttcgccggagaagtagctccgatagagcatcggtggaaccagcatgggcttggtggagataacgtgagaggaagctgtagagatttacatcccggtccggttagcttgcttcattggtccggtagtggtaaaccgtggtttcggttagattcgagacggccttgtccacttgatactctttgggcaccttatgatttgtatggacactactctcgctgatgatgattgatgatctctgttattacatattattatagtctcagtctcagctggtaaattctctcatctcctttgacaaaaaaaaaaacattctttcttctctcttttgattttaccaacttttggttggaatttgtttcgttactctgtattctattcgattgttctgtgcatcaaaccataggatacaatcagatttgttgttgt

SEQ ID NO: 107145 - protein, 361 aa, Arabidopsis thaliana; identical to SEQ ID NO: 39815
  peptide (1)..(361): Ceres Seq. ID no. 13621492

SEQ ID NO: 107146 - protein, 357 aa, Arabidopsis thaliana; identical to SEQ ID NO: 39816
  peptide (1)..(357): Ceres Seq. ID no. 13621493

SEQ ID NO: 107147 - DNA, 1762 bp, Arabidopsis thaliana
  misc_feature (1)..(1762): Ceres Seq. ID no. 13621498
  misc_feature (1)..(1762): Ortholog of  Ceres SEQ ID NO 13639120 as cited in SEQ ID NO 56708
aaatttaaatcttcattgaatgctttttctgaagctttatctaataaatctcttcgttgatccttcctttccattaacgaggtagaaattccaaaacgcgtaataatcttgtcgtcattacaaattacaataaaaagaagacatttttatttagatttccctctgatcctctcttttagatttcgaatcgagaccagatctgcgtgaagatgatagagaagtgtataggagcgcatcggtttcggagattacagagattcatgcgtcaagggaaagtgacgattctttgtctcgttctcaccgtcatcgtcttacgtggcacaatcggagccggtaagtttggtacgccggagaaagatatcgaggagatccgtgagcatttcttctacacgcgtaaacgcggcgagcctcaccgtgtcctcgtcgaggtctcttccaaaacgacgtcgtccgaagacggaggaaatggtggtaacagctacgagaccttcgatatcaacaagctattcgttgatgaaggagacgaagagaaatctcgagaccggactaataaaccttattctcttggtcccaagatctctgattgggatgagcagagacgtgattggctcaaacaaaaccctagcttccctaatttcgtggcgccaaacaagcctagggttcttcttgtcacaggttcagctcctaaaccgtgtgagaatcctgtaggagaccattacctcttgaaatcgattaagaacaaaatcgattactgtagaatacacggaatcgagatcttctacaacatggcgttgctcgatgctgagatggctggattctgggctaagcttccgttgattaggaagttactcttgtcacatcctgagattgagtttctatggtggatggatagtgatgccatgttcacggacatggtgttcgagcttccatgggagaggtacaaagattacaacttggtgatgcatggttggaacgagatggtttatgaccagaagaattggattggtctcaacacgggaagtttcttgctcaggaactcacagtggtcgcttgatcttcttgacgcttgggctcctatgggcccaaaagggaagatccgagaagaagcgggtaaagtcttgacccgggaacttaaagaccgacccgctttcgaagctgacgatcaatcggcgatggtttatctgctggcgacggagagagagaaatggggaggcaaagtttatctagagagtggttattacttgcacggttattgggggattttggtagaccggtacgaggagatgattgagaatcataaaccgggttttggagaccatcggtggccattggttacgcatttcgtcgggtgtaaaccgtgcgggaaatttggagattatccggtggaacggtgtctacggcagatggatagagcgtttaatttcggagacaatcagatccttcaaatgtatggtttcacgcataaatcgcttgggagccggcgcgtgaaacccacgcgcaatcagacggataggccgctcgatgccaaggacgagtttgggctgcttcatccgccgttcaaagcggccaagcttagtacgacgacgacgtgagtgagtgagaggatatattgttttgtatcttttaattttgcgtttaggggacacacgtttatttgttttattcaattttatttgtttgtagtttacttaattgttttgatctcccattcatggtggagtcgtgtatggagtatttaatgatttattgtagacgttatttc

SEQ ID NO: 107148 - protein, 460 aa, Arabidopsis thaliana; identical to SEQ ID NO: 39965
  peptide (1)..(460): Ceres Seq. ID no. 13621499

SEQ ID NO: 107149 - protein, 443 aa, Arabidopsis thaliana; identical to SEQ ID NO: 39966
  peptide (1)..(443): Ceres Seq. ID no. 13621500

SEQ ID NO: 107150 - protein, 268 aa, Arabidopsis thaliana; identical to SEQ ID NO: 39967
  peptide (1)..(268): Ceres Seq. ID no. 13621501

SEQ ID NO: 107151 - DNA, 1698 bp, Arabidopsis thaliana
  misc_feature (1)..(1698): Ceres Seq. ID no. 13621506
  misc_feature (1)..(1698): Ortholog of  Ceres SEQ ID NO 15176911 as cited in SEQ ID NO 54868
  misc_feature (1)..(1698): Ortholog of  Ceres SEQ ID NO 13596433 as cited in SEQ ID NO 68721
  misc_feature (1)..(1698): Ortholog of  Ceres SEQ ID NO 13599169 as cited in SEQ ID NO 0
actctctcgttcaaggtccgactcagttcccggcgagttcgactcggtgattgattttttcctagaaaaataaaatttcttcttaacgattgatcgattttggttttctatctttcgattctagatctagaattcaatttgtgaggtttggagatggcgagcgagctgatcaatcggcgacacgagacggatcaaccaaccgccgatgcttattacccgaaaccaatcaaaccatggttcacggtgactcgtccgatgcgttacatgctccgtgaacagagacttatcttcgttctcgttggcattgcaatcgctactttggttttcacaattttccctcgctccacacaatcaaccccttactcggatcctttctccggttacggaatccgacccgacgaatcgtacgttccggctatacaagctcagaggaaacctagcctcgagtacctgaaccggatcggagcaacaggcgggaaaatcccactgggattgaaacgcaaagggctaagagtggttgtgaccggtggtgctggattcgttggatcgcatctcgtggatcgtttgatggctagaggagatactgtgattgttgttgataatttcttcactggaaggaaagagaacgttatgcaccatttcagtaaccctaactttgagatgatccgtcacgatgtggttgagccgattcttcttgaggttgatcagatctaccatttggcttgccctgcttctcctgttcattacaaattcaatcccgtcaagactatcataacgaatgtggttggaacattgaacatgcttggtttggctaagcgagttggggctagatttcttctgacgagtaccagtgaggtttatggtgatcctctgcagcatcctcaggttgagacttactggggcaacgttaatcccattggtgttcgtagttgctacgatgaaggaaaacgtacggcagagacgttgaccatggactatcaccgaggtgccaatgttgaggtcagaattgctaggatcttcaacacctatggtccaagaatgtgtatagatgatgggcgtgttgttagtaacttcgttgcacaggcactaaggaaagagccattgactgtttacggtgatgggaagcagacaaggagtttccaatttgtttctgatctggttgaaggtttgatgagactgatggaaggagaacatgtcggcccattcaacctcggtaaccctggtgaattcacgatgctcgagctcgctaaggtggtccaagagacaattgatccgaatgcaaacatagagttcagaccaaacacagaagacgaccctcacaagagaaagcctgacatcacaaaggccaaagagcttttaggttgggaaccaaaggtctctcttcgtcagggactgcctctcatggtcaaagatttccgtcaacgtgtctttggtgaccagaaggaaggctcctccgcagctgcaaccaccaccaagacaacttcagcttgagcaaatgcagaatctgagtagcagccactgcggctggtagtgggtttataacaaaattgcaagagcgtcgtttctttaaatttatttcgcttttgatttctgttttgataatcgtgtaaacgtagagtaagaatttggtacctttacttactactattcatggacctcactacagttttaaaagaaaaaagaacttctcttttgata

SEQ ID NO: 107152 - protein, 445 aa, Arabidopsis thaliana
  peptide (1)..(445): Ceres Seq. ID no. 13621507
MASELINRRHETDQPTADAYYPKPIKPWFTVTRPMRYMLREQRLIFVLVGIAIATLVFTIFPRSTQSTPYSDPFSGYGIRPDESYVPAIQAQRKPSLEYLNRIGATGGKIPLGLKRKGLRVVVTGGAGFVGSHLVDRLMARGDTVIVVDNFFTGRKENVMHHFSNPNFEMIRHDVVEPILLEVDQIYHLACPASPVHYKFNPVKTIITNVVGTLNMLGLAKRVGARFLLTSTSEVYGDPLQHPQVETYWGNVNPIGVRSCYDEGKRTAETLTMDYHRGANVEVRIARIFNTYGPRMCIDDGRVVSNFVAQALRKEPLTVYGDGKQTRSFQFVSDLVEGLMRLMEGEHVGPFNLGNPGEFTMLELAKVVQETIDPNANIEFRPNTEDDPHKRKPDITKAKELLGWEPKVSLRQGLPLMVKDFRQRVFGDQKEGSSAAATTTKTTSA

SEQ ID NO: 107153 - protein, 411 aa, Arabidopsis thaliana
  peptide (1)..(411): Ceres Seq. ID no. 13621508
MRYMLREQRLIFVLVGIAIATLVFTIFPRSTQSTPYSDPFSGYGIRPDESYVPAIQAQRKPSLEYLNRIGATGGKIPLGLKRKGLRVVVTGGAGFVGSHLVDRLMARGDTVIVVDNFFTGRKENVMHHFSNPNFEMIRHDVVEPILLEVDQIYHLACPASPVHYKFNPVKTIITNVVGTLNMLGLAKRVGARFLLTSTSEVYGDPLQHPQVETYWGNVNPIGVRSCYDEGKRTAETLTMDYHRGANVEVRIARIFNTYGPRMCIDDGRVVSNFVAQALRKEPLTVYGDGKQTRSFQFVSDLVEGLMRLMEGEHVGPFNLGNPGEFTMLELAKVVQETIDPNANIEFRPNTEDDPHKRKPDITKAKELLGWEPKVSLRQGLPLMVKDFRQRVFGDQKEGSSAAATTTKTTSA

SEQ ID NO: 107154 - protein, 408 aa, Arabidopsis thaliana
  peptide (1)..(408): Ceres Seq. ID no. 13621509
MLREQRLIFVLVGIAIATLVFTIFPRSTQSTPYSDPFSGYGIRPDESYVPAIQAQRKPSLEYLNRIGATGGKIPLGLKRKGLRVVVTGGAGFVGSHLVDRLMARGDTVIVVDNFFTGRKENVMHHFSNPNFEMIRHDVVEPILLEVDQIYHLACPASPVHYKFNPVKTIITNVVGTLNMLGLAKRVGARFLLTSTSEVYGDPLQHPQVETYWGNVNPIGVRSCYDEGKRTAETLTMDYHRGANVEVRIARIFNTYGPRMCIDDGRVVSNFVAQALRKEPLTVYGDGKQTRSFQFVSDLVEGLMRLMEGEHVGPFNLGNPGEFTMLELAKVVQETIDPNANIEFRPNTEDDPHKRKPDITKAKELLGWEPKVSLRQGLPLMVKDFRQRVFGDQKEGSSAAATTTKTTSA

SEQ ID NO: 107155 - DNA, 1047 bp, Arabidopsis thaliana
  misc_feature (1)..(1047): Ceres Seq. ID no. 13621510
  misc_feature (1)..(1047): Ortholog of  Ceres SEQ ID NO 15227018 as cited in SEQ ID NO 0
atgatgaagttcaagttccagtacgaggaggaatacatcaaaaactcgagagacgttgagttgttcgcttgcagatggcttccttcttcttctccccgagctctagtcttcctctgccatggttatggaatggagtgcagtagcttcatgagagaatgcggaatacggctggcatcagcgggatatgcagtgtttgggatggactacgaggggcatggtcggtccaagggtgctcgttgctatataaaaaaattcagtaatatagtaaatgactgctttgactattacacatccatctctgcacaagaagaatacaaagagaaaggtagatttttgtatggagaatcaatgggaggtgcagttgctttgttgcttcacaagaaagatccttctttttggaacggggctcttctcgttgctcccatgtgtaagatatcagagaaggtgaaaccacacccagtagtcataaatctactaacgagagttgaagatattataccaaaatggaagatagttcctacaaaagatgttatcgatgctgccttcaaggatccggtcaagcgcgaagagataaggaacaacaagctgatatatcaagacaagccaagacttaaaaccgcacttgaaatgcttagaacgagcatggaccttgaagacactctccacgagatcacattgcctttctttgtccttcacggtgaagcagacattgtgactgatccagagataagcaaagccttgttcgagaaggcaagcacacgcgacaaaaccattaaactttacccaggaatgtggcatggattaacttctggtgagcctgatgctaacgttgacctcgtttttgctgacattgtcaattggcttgatgctcgtaccggcgactccgcttctctgacagtcactcccgtacatgattttacctccaatgttcaaaaggtcgttgacggtgttagtaacggtcaaggaaaatctaaacgaccacaagctagtctcctttgtggtttaaatggtggtggacgtcgtttggtccatagatcttctatgtaa

SEQ ID NO: 107156 - protein, 348 aa, Arabidopsis thaliana
  peptide (1)..(348): Ceres Seq. ID no. 13621511
MMKFKFQYEEEYIKNSRDVELFACRWLPSSSPRALVFLCHGYGMECSSFMRECGIRLASAGYAVFGMDYEGHGRSKGARCYIKKFSNIVNDCFDYYTSISAQEEYKEKGRFLYGESMGGAVALLLHKKDPSFWNGALLVAPMCKISEKVKPHPVVINLLTRVEDIIPKWKIVPTKDVIDAAFKDPVKREEIRNNKLIYQDKPRLKTALEMLRTSMDLEDTLHEITLPFFVLHGEADIVTDPEISKALFEKASTRDKTIKLYPGMWHGLTSGEPDANVDLVFADIVNWLDARTGDSASLTVTPVHDFTSNVQKVVDGVSNGQGKSKRPQASLLCGLNGGGRRLVHRSSM

SEQ ID NO: 107157 - protein, 347 aa, Arabidopsis thaliana
  peptide (1)..(347): Ceres Seq. ID no. 13621512
MKFKFQYEEEYIKNSRDVELFACRWLPSSSPRALVFLCHGYGMECSSFMRECGIRLASAGYAVFGMDYEGHGRSKGARCYIKKFSNIVNDCFDYYTSISAQEEYKEKGRFLYGESMGGAVALLLHKKDPSFWNGALLVAPMCKISEKVKPHPVVINLLTRVEDIIPKWKIVPTKDVIDAAFKDPVKREEIRNNKLIYQDKPRLKTALEMLRTSMDLEDTLHEITLPFFVLHGEADIVTDPEISKALFEKASTRDKTIKLYPGMWHGLTSGEPDANVDLVFADIVNWLDARTGDSASLTVTPVHDFTSNVQKVVDGVSNGQGKSKRPQASLLCGLNGGGRRLVHRSSM

SEQ ID NO: 107158 - protein, 305 aa, Arabidopsis thaliana
  peptide (1)..(305): Ceres Seq. ID no. 13621513
MECSSFMRECGIRLASAGYAVFGMDYEGHGRSKGARCYIKKFSNIVNDCFDYYTSISAQEEYKEKGRFLYGESMGGAVALLLHKKDPSFWNGALLVAPMCKISEKVKPHPVVINLLTRVEDIIPKWKIVPTKDVIDAAFKDPVKREEIRNNKLIYQDKPRLKTALEMLRTSMDLEDTLHEITLPFFVLHGEADIVTDPEISKALFEKASTRDKTIKLYPGMWHGLTSGEPDANVDLVFADIVNWLDARTGDSASLTVTPVHDFTSNVQKVVDGVSNGQGKSKRPQASLLCGLNGGGRRLVHRSSM

SEQ ID NO: 107159 - DNA, 2321 bp, Arabidopsis thaliana
  misc_feature (1)..(2321): Ceres Seq. ID no. 13621516
  misc_feature (1)..(2321): Ortholog of  Ceres SEQ ID NO 12778278 as cited in SEQ ID NO 63035
actctctctctctctctatctatcttcttcatctttgtttcagcttctcctttgaaactagattatctccgttaatggcgcctcagatctaaccttgggagttatatatatatacttgttcaactcttcttcgaacgctgtccaacttcttcctctggttcgatcatcgagatctcgaggttatttggccgcaatgcagaagcgaatagccttgtcgtttccagaagaggtactagagcatgtgttctcgtttattcagctggataaggataggaactcagtctctctggtgtgcaagtcatggtacgagatcgagcggtggtgcaggaggaaagtcttcatcgggaactgctacgccgtgagtccagcgacggtgattaggaggttcccgaaagtgagatccgtggagcttaaaggaaaacctcactttgctgactttaatttggtacctgacggatggggaggttacgtgtatccatggattgaggccatgtcttcgtcttacacgtggcttgaagagataaggctgaagaggatggtggtcaccgacgattgcttggagctcatagccaagtcttttaagaattttaaggttcttgtgctttcttcctgcgaaggcttctccaccgatggtctcgctgctatcgctgccacttgcaggaatctgaaagagcttgacttacgagagagtgatgttgacgacgttagtggccactggcttagccatttcccagatacatacacttctttggtatcactcaatatatcttgcttagcatctgaggtcagtttctctgctctggaaaggctggtgactaggtgtcccaatctcaagtctctcaagcttaaccgagctgttccacttgaaaaattggctactttacttcaaagagcacctcaattggaggaattgggcactggtgggtacactgcagaagtgcgaccagatgtttactctggtttatctgtagcgctctctgggtgcaaggaattgaggtgcttatctggattttgggatgctgttcctgcctatcttccagcagtttattcggtttgcagtcggcttacaactttgaatctgagttatgcaacagtccagagctatgatcttgtcaagcttctttgtcaatgccctaaactgcagcgcctctgggtgcttgactacatcgaggatgctggtcttgaggtgcttgcttcaacctgcaaggacctacgcgagctgagagtgtttccgtccgagccttttgtcatggaaccaaatgtggcattgacggaacaggggcttgtctccgtctccatgggctgtccaaaactcgagtcggttctctacttctgccgtcaaatgaccaatgctgcattgataaccattgctaggaaccgtcccaacatgactcgcttccgtttgtgcatcattgagccaaaagccccagactatctgactctagagccactggatattggatttggagccatagtagagcactgcaaggatctccgtcgcctctctctatctggcctcttgaccgacaaggtttttgaatacattgggacatatgccaagaagatggaaatgctctcagtggcatttgcaggagacagtgacttaggcatgcatcatgttttgtccgggtgcgatagcttgaggaaactagagataagggactgcccgtttggagacaaggcgcttttggccaatgcttcaaagctggagacaatgcgatccctttggatgtcttcttgttccgtgagttttggagcctgcaagttactaggacagaagatgccaaagctgaatgtggaagtcatcgatgaacggggtgcaccggactcgagaccagagagctgccctgttgagagagtcttcatataccgaacagtggctggtcctcgatttgacatgcctggcttcgtctggaacatggaccaagactcaacaatgaggttttccaggcaaatcattactactaacggattataagacaaagaaacgaggtacatttttcattaatccttgttcatcatcccatataatcgtgttccggtttaggaacatgagagagctcggtcgccaataatttgaatctcggctgcttcatataaccatcaagctcatgagcaatgaataagtggagagagagaaagagagatctaagagagctttgttttatttatgtaagaattattgattgttgtatgtttatttggctacttacactgagagatcctggtggggtatttttcttaagaggataagagatttttttaaaagacaatgtcaaaaatgtaactgttctacttgttttgtttggactcttttatcc

SEQ ID NO: 107160 - protein, 594 aa, Arabidopsis thaliana; identical to SEQ ID NO: 29941
  peptide (1)..(594): Ceres Seq. ID no. 13621517

SEQ ID NO: 107161 - protein, 495 aa, Arabidopsis thaliana; identical to SEQ ID NO: 29942
  peptide (1)..(495): Ceres Seq. ID no. 13621518

SEQ ID NO: 107162 - protein, 480 aa, Arabidopsis thaliana; identical to SEQ ID NO: 29943
  peptide (1)..(480): Ceres Seq. ID no. 13621519

SEQ ID NO: 107163 - DNA, 1756 bp, Arabidopsis thaliana
  misc_feature (1)..(1756): Ceres Seq. ID no. 13621524
  misc_feature (1)..(1756): Ortholog of  Ceres SEQ ID NO 13654989 as cited in SEQ ID NO 63117
  misc_feature (1)..(1756): Ortholog of  Ceres SEQ ID NO 13584744 as cited in SEQ ID NO 69137
cccaaaattttacgaaaactctcgattttaatctaaatctccttccttatcacctcacaaatttctcgtgtttttttgtaatcaatttttgatggaaaattattcccaaaactcgaatctctgttgatcgtgtgtttcttggggttcgtctgattccttcaaagttttcatctttttgataacaaaaccgttagttctttgtcctcgtgtgtgatcatctcttgagccctattgataaaccatatagagagtgtatgtgtgtgtatatctttgtttattgagtgacaccaacaacaaaaagattattttccttgagattgattaaaagaaaacatggttagttgcttgtgttttcgtcccagtcggaaaacgaagctcaaagacaaatctcataagagatccatacgtaaccagacatcctcctcttctgcccaaccagctggaacagcaaaagaagtagattcgtcaagttcacaaaccgtagtgcaagattcttctagatacagatgtcagattttctcatacagagaactcgccatcgcgactaacagcttcaggaatgaatctttgatcggaagaggtggatttggaactgtgtataaaggaaggctaagcactggacagaacatagctgttaaaatgcttgatcagtctggtattcaaggagacaaagagtttcttgtggaagtcctaatgctctcgctcttgcaccaccgaaacctagtgcatttgttcggttattgtgctgaaggcgatcaaagactcgttgtctatgaatacatgcctcttggatctgtagaagatcatctctacgatcttagcgagggtcaagaggctttagattggaagacaaggatgaagatagctctaggagcggctaaagggttagcgtttcttcacaacgaagcacaacctcctgtgatatacagagatttgaaaacttcaaacatattgttggatcatgactataaacctaagctctcagattttggacttgcaaagtttggtccaagtgatgatatgtctcatgtctctactagagttatgggaactcatgggtattgtgcaccagagtacgcgaacaccgggaagttgacgctgaaatctgatatttatagctttggagttgtgctgctggagcttatcagtggacgcaaagctcttatgccctcatccgaatgcgttggtaatcaaagtcgctatcttgtgcattgggcacgaccgttgttcttgaatggcagaataaggcagattgtagatccaaggttagcaagaaaaggcggtttttcgaatatacttctttatagaggtattgaagtggcctttctgtgcctagcagaagaagcaaacgctagaccatcgatcagccaagtcgtggagtgtcttaagtatatcattgatcacacaattaggaaggaaaggagaactaggcgtagactactaggaggaaataaggatggggcggggacatcgaggtcaccggatgagacaatgatgaggatgttagaagaagaagaagaatacgtaactagtgaagaagctattgagagaaggagggtaatcgtggatgatgctcgtacttgggccggtatgaataggagaggggctacgccaccaactccgactccatgaaagtgaagtaaatttttattaacttgtttttcaagttatatttggttaagtttgtttggtgagactattgttagaaaccaaattttgttaaaacatttaaacatggcaatttagttaatactag

SEQ ID NO: 107164 - protein, 432 aa, Arabidopsis thaliana
  peptide (1)..(432): Ceres Seq. ID no. 13621525
MVSCLCFRPSRKTKLKDKSHKRSIRNQTSSSSAQPAGTAKEVDSSSSQTVVQDSSRYRCQIFSYRELAIATNSFRNESLIGRGGFGTVYKGRLSTGQNIAVKMLDQSGIQGDKEFLVEVLMLSLLHHRNLVHLFGYCAEGDQRLVVYEYMPLGSVEDHLYDLSEGQEALDWKTRMKIALGAAKGLAFLHNEAQPPVIYRDLKTSNILLDHDYKPKLSDFGLAKFGPSDDMSHVSTRVMGTHGYCAPEYANTGKLTLKSDIYSFGVVLLELISGRKALMPSSECVGNQSRYLVHWARPLFLNGRIRQIVDPRLARKGGFSNILLYRGIEVAFLCLAEEANARPSISQVVECLKYIIDHTIRKERRTRRRLLGGNKDGAGTSRSPDETMMRMLEEEEEYVTSEEAIERRRVIVDDARTWAGMNRRGATPPTPTP

SEQ ID NO: 107165 - protein, 330 aa, Arabidopsis thaliana
  peptide (1)..(330): Ceres Seq. ID no. 13621526
MLDQSGIQGDKEFLVEVLMLSLLHHRNLVHLFGYCAEGDQRLVVYEYMPLGSVEDHLYDLSEGQEALDWKTRMKIALGAAKGLAFLHNEAQPPVIYRDLKTSNILLDHDYKPKLSDFGLAKFGPSDDMSHVSTRVMGTHGYCAPEYANTGKLTLKSDIYSFGVVLLELISGRKALMPSSECVGNQSRYLVHWARPLFLNGRIRQIVDPRLARKGGFSNILLYRGIEVAFLCLAEEANARPSISQVVECLKYIIDHTIRKERRTRRRLLGGNKDGAGTSRSPDETMMRMLEEEEEYVTSEEAIERRRVIVDDARTWAGMNRRGATPPTPTP

SEQ ID NO: 107166 - protein, 312 aa, Arabidopsis thaliana
  peptide (1)..(312): Ceres Seq. ID no. 13621527
MLSLLHHRNLVHLFGYCAEGDQRLVVYEYMPLGSVEDHLYDLSEGQEALDWKTRMKIALGAAKGLAFLHNEAQPPVIYRDLKTSNILLDHDYKPKLSDFGLAKFGPSDDMSHVSTRVMGTHGYCAPEYANTGKLTLKSDIYSFGVVLLELISGRKALMPSSECVGNQSRYLVHWARPLFLNGRIRQIVDPRLARKGGFSNILLYRGIEVAFLCLAEEANARPSISQVVECLKYIIDHTIRKERRTRRRLLGGNKDGAGTSRSPDETMMRMLEEEEEYVTSEEAIERRRVIVDDARTWAGMNRRGATPPTPTP

SEQ ID NO: 107167 - DNA, 1183 bp, Arabidopsis thaliana
  misc_feature (1)..(1183): Ceres Seq. ID no. 13621528
  misc_feature (1)..(1183): Ortholog of  Ceres SEQ ID NO 13654285 as cited in SEQ ID NO 68661
gtaaattcccaaagaaaaaaaaaaaaaactcgataccttttgttttacaaagtcgtcacaattctgaaacccttaattgaatccaagagaatttttgattaaattaagtctctggaccctgaagtccccacacaagcaagcttcgatggatcccaagaacctaaatcgtcaccaagtaccaaatttcttgaacccaccaccaccaccgcgaaatcagggtttggtagatgatgatgctgcttctgctgttgtttccgacgagaatcgcaaaccaacaactgagattaaagatttccagatcgtggtctctgcttccgacaaagaaccaaacaagaagagtcagaatcagaaccagcttggtcctaagagaagctctaacaaagacagacacactaaagtcgaaggtagaggtcgacgaattcggatgcctgctctttgtgctgctaggatttttcaattgactagagaattgggtcataaatctgatggtgaaactatccagtggctgcttcaacaagctgagccatcgattattgcagctactggttcaggaactataccggcctctgctttagcttcttcagctgcaacctctaaccatcatcaaggtgggtctcttactgctggtttaatgatcagtcatgacttagatggtgggtctagtagtagtggtagaccattaaattgggggattggtggcggtgaaggagtttctaggtcaagtttaccaactgggttatggccaaatgtagctgggtttggttctggtgtgccaaccactggtttaatgagtgaaggagctggttatagaattgggtttcctggttttgattttcctggtgttggtcatatgagttttgcatctattttgggtgggaatcataatcagatgcctggacttgagttaggcttgtctcaagaagggaatgttggtgttttgaatcctcagtcttttactcagatttatcaacagatgggtcaggctcaggctcaagctcaaggtagggttcttcaccatatgcatcataaccatgaagaacatcagcaagagagtggtgagaaagatgattctcaaggctcaggtcgttaaaaggattgggtttttttttgtatcttctggatttgaaaaagcttttggcttttgttttgtgataatattgttgtaatttgtaccaccatggag

SEQ ID NO: 107168 - protein, 314 aa, Arabidopsis thaliana
  peptide (1)..(314): Ceres Seq. ID no. 13621529
MDPKNLNRHQVPNFLNPPPPPRNQGLVDDDAASAVVSDENRKPTTEIKDFQIVVSASDKEPNKKSQNQNQLGPKRSSNKDRHTKVEGRGRRIRMPALCAARIFQLTRELGHKSDGETIQWLLQQAEPSIIAATGSGTIPASALASSAATSNHHQGGSLTAGLMISHDLDGGSSSSGRPLNWGIGGGEGVSRSSLPTGLWPNVAGFGSGVPTTGLMSEGAGYRIGFPGFDFPGVGHMSFASILGGNHNQMPGLELGLSQEGNVGVLNPQSFTQIYQQMGQAQAQAQGRVLHHMHHNHEEHQQESGEKDDSQGSGR

SEQ ID NO: 107169 - protein, 221 aa, Arabidopsis thaliana
  peptide (1)..(221): Ceres Seq. ID no. 13621530
MPALCAARIFQLTRELGHKSDGETIQWLLQQAEPSIIAATGSGTIPASALASSAATSNHHQGGSLTAGLMISHDLDGGSSSSGRPLNWGIGGGEGVSRSSLPTGLWPNVAGFGSGVPTTGLMSEGAGYRIGFPGFDFPGVGHMSFASILGGNHNQMPGLELGLSQEGNVGVLNPQSFTQIYQQMGQAQAQAQGRVLHHMHHNHEEHQQESGEKDDSQGSGR

SEQ ID NO: 107170 - DNA, 1322 bp, Arabidopsis thaliana
  misc_feature (1)..(1322): Ceres Seq. ID no. 13621535
  misc_feature (1)..(1322): Ortholog of  Ceres SEQ ID NO 14311463 as cited in SEQ ID NO 51400
gatctgccaatcacaaattaacagaaaacacaactaaattgcgatttgaatttattaaatcgtaaaactgagatcttctctgagatttttctcctcctaaagtttgaaactttgaacataaaaattgtatttttttttttgaagtttccagcaaaaaaaaaattgaaactttcagtgattggaattttaatttgtgttttagtttggtgggtttctttatcgggatcgttgtcgtggatttttgtttgtagcagcttgaaagacgatgtcgtcgtcgccggacattgccggaatcttagataatacgaaggagcttgatcggttaagaaaagaacaagaggaagttcttgtggagattaataagatgcataagaagcttcaagctacgccggagatagttgagaagcctggtgatatttcattgtcaaagcttaaaaatttgtacattcaagcaaaagagctttcagaaagtgaagtaaccgtttcaaatattctgcttactcagttggattctctgcttccatctggaccaactgggcaacaacgcagaaaattagaaggcaacgaacagaagagaaagagaatgaaagtagatacagatgtaacaagagtttctccttccatgagaaatcaaatcgaggcatatgctagtctaaagggtgaacaggttgctgcaagagtcacagctgaagatgccgagaaggatgaatggtttgtggtgaaagttattcacttcgacagagaaacaaaagaagttgaagtacttgatgaagaaccaggagatgatgaagaaggaggtggccagaggacgtataaactatcaatgtcatgtattttaccgtttccaaaacggaatgatccttcaagcacacaagagtttataccagggaaacacgtcttagctgtatatccaggaaccacagccctctacaaggcaactgttataagtaccccacgaaagaggaaatctgacgagtacttgctagaatttgatgatgatgaagaagacggagcattacctcaaagaacagtgccattccacaaagtggtagctttaccagaaggccatcgccagtaattttagatggatacaatgaaataagagacgatttctttgggccagagtgtaagttaagagttgttgcctttgtttgtgatgatgactttgaagaataaaaaggtatgttttaactttttattatttcaatttgtggcaaaactactctagcaacatttgtaacatttaaatgtgtatatatgaatggaaccatgggtatgtatatcatattgagacacaatttaaaaaaaaattacatttttct

SEQ ID NO: 107171 - protein, 270 aa, Arabidopsis thaliana
  peptide (1)..(270): Ceres Seq. ID no. 13621536
MSSSPDIAGILDNTKELDRLRKEQEEVLVEINKMHKKLQATPEIVEKPGDISLSKLKNLYIQAKELSESEVTVSNILLTQLDSLLPSGPTGQQRRKLEGNEQKRKRMKVDTDVTRVSPSMRNQIEAYASLKGEQVAARVTAEDAEKDEWFVVKVIHFDRETKEVEVLDEEPGDDEEGGGQRTYKLSMSCILPFPKRNDPSSTQEFIPGKHVLAVYPGTTALYKATVISTPRKRKSDEYLLEFDDDEEDGALPQRTVPFHKVVALPEGHRQ

SEQ ID NO: 107172 - protein, 237 aa, Arabidopsis thaliana
  peptide (1)..(237): Ceres Seq. ID no. 13621537
MHKKLQATPEIVEKPGDISLSKLKNLYIQAKELSESEVTVSNILLTQLDSLLPSGPTGQQRRKLEGNEQKRKRMKVDTDVTRVSPSMRNQIEAYASLKGEQVAARVTAEDAEKDEWFVVKVIHFDRETKEVEVLDEEPGDDEEGGGQRTYKLSMSCILPFPKRNDPSSTQEFIPGKHVLAVYPGTTALYKATVISTPRKRKSDEYLLEFDDDEEDGALPQRTVPFHKVVALPEGHRQ

SEQ ID NO: 107173 - protein, 164 aa, Arabidopsis thaliana; identical to SEQ ID NO: 36863
  peptide (1)..(164): Ceres Seq. ID no. 13621538

SEQ ID NO: 107174 - DNA, 1027 bp, Arabidopsis thaliana
  misc_feature (1)..(1027): Ceres Seq. ID no. 13621550
  misc_feature (1)..(1027): Ortholog of  Ceres SEQ ID NO 14313599 as cited in SEQ ID NO 54989
  misc_feature (1)..(1027): Ortholog of  Ceres SEQ ID NO 15176204 as cited in SEQ ID NO 55608
  misc_feature (1)..(1027): Ortholog of  Ceres SEQ ID NO 15225111 as cited in SEQ ID NO 58444
  misc_feature (1)..(1027): Ortholog of  Ceres SEQ ID NO 14313064 as cited in SEQ ID NO 59543
  misc_feature (1)..(1027): Ortholog of  Ceres SEQ ID NO 13661001 as cited in SEQ ID NO 67531
  misc_feature (1)..(1027): Ortholog of  Ceres SEQ ID NO 15178920 as cited in SEQ ID NO 0
atcaactcacccacatctttctctcttattctctcactcttttttttttatattcctctctctctaaatctataaaatatatttaaaaacttgatcgtatataataaagtaaataaagaataataacaaaaaaaatggagaaaagaggaggaggaagtagtggaggttcgggatcatcagcagaagcagaagtgagaaaaggaccatggacgatggaagaagatcttattcttatcaactatatcgccaaccacggcgatggtgtttggaattctctcgccaaatctgcaggtctaaaacgaaccgggaaaagttgccggctccggtggctgaactatctccgccccgacgtacgacggggaaacatcactccagaagagcaacttatcatcatggaacttcatgctaagtggggaaacaggtggtcgaaaatcgccaaacatcttccaggaagaacggacaacgagatcaaaaatttctggaggacaagaattcaaaaatacatcaagcaatcggatgtaacaacaacatcgtccgttggatctcatcatagctcagagatcaacgatcaagctgcaagcacgtcgagccataatgtcttttgtacacaagatcaagcgatggagacttattctcctacaccgacatcatatcaacataccaatatggaattcaactatggtaactattcggccgcggcagtgacggcaaccgtggattatccagtaccgatgaccgttgatgatcaaaccggtgaaaactattggggcatggatgatatttggtcatcaatgcatttattgaatggtaattgattgatcggtggacaaaacatggaatattaattgagtattatatatgatttttaggagtactattattagtacgtgacatgtatatgtttttgcctcgttgtagaggtttggggttataattaatatataatgttatctaatatgcaaccttgatacatatttggatctttattgaacccatgttatacataaataaaattgttgaaggggtc

SEQ ID NO: 107175 - protein, 226 aa, Arabidopsis thaliana; identical to SEQ ID NO: 106225
  peptide (1)..(226): Ceres Seq. ID no. 13621551

SEQ ID NO: 107176 - protein, 200 aa, Arabidopsis thaliana; identical to SEQ ID NO: 106226
  peptide (1)..(200): Ceres Seq. ID no. 13621552

SEQ ID NO: 107177 - protein, 140 aa, Arabidopsis thaliana; identical to SEQ ID NO: 106227
  peptide (1)..(140): Ceres Seq. ID no. 13621553

SEQ ID NO: 107178 - DNA, 1060 bp, Arabidopsis thaliana
  misc_feature (1)..(1060): Ceres Seq. ID no. 13621598
  misc_feature (1)..(1060): Ortholog of  Ceres SEQ ID NO 13595775 as cited in SEQ ID NO 60203
aacattgttacactaaaccatggcgacgccttcgccgacctcctctcctccctctgattcaaaccctaattctgccgctactccgccgcatcagaaacaaccaccctctcctcctcaacccacgaatccatcctctccaccaccgcacaccaccgtcgtagctttagccgcatcaacctccgccgtcgccagaaaaacccaacctgttctctggactcaagacgagaccctcctcttaatcgaatcatacaaagagaaatggttcgcaattggtcgtggtcctctaaaatcaactcactgggaagagatcgccgttgctgcctcatctcgttccggcgttgaacggacatctacacagtgtaggcataagatcgagaagatgcgtaaaagattccgatctgagagacagagtatgggacctatctcaatttggcctttctataatcaaatggaggaattggattcttcaaatcctgctccgatctcagctcgtcctctcactcgtcttcctcctaattcgaataatcgctacgtagacgacgaagaagaagatgaagaagaggataacaataactacgaagaagaggaagaagaagatgagagacagagcaaatcgaggagtattaattacatattgagaagacctggaactgttaacagatttgctggagttggtggaggattgttgtcatggggacaaaaagagagatcatcgaagaggaagaggaacgatggagacggtggtgagaggcggaggaaaggaatgcgagccgttgcagcggagattagggcgtttgctgagagagtaatggtaatggagaagaagaagattgagtttgctaaagagactgtgagacttcgtaaggaaatggagattcgtagaatcaatttgattcagagttctcaaactcagcttcttcaatttatcaacaatgcttttgattctttctaacgtagagatttagtcattgttgcttttagatttgtaacataggtaacggatttgaagaaatgcactatgtaagctaatgtttatgggagtgaagtgaacttttttttt

SEQ ID NO: 107179 - protein, 310 aa, Arabidopsis thaliana
  peptide (1)..(310): Ceres Seq. ID no. 13621599
MATPSPTSSPPSDSNPNSAATPPHQKQPPSPPQPTNPSSPPPHTTVVALAASTSAVARKTQPVLWTQDETLLLIESYKEKWFAIGRGPLKSTHWEEIAVAASSRSGVERTSTQCRHKIEKMRKRFRSERQSMGPISIWPFYNQMEELDSSNPAPISARPLTRLPPNSNNRYVDDEEEDEEEDNNNYEEEEEEDERQSKSRSINYILRRPGTVNRFAGVGGGLLSWGQKERSSKRKRNDGDGGERRRKGMRAVAAEIRAFAERVMVMEKKKIEFAKETVRLRKEMEIRRINLIQSSQTQLLQFINNAFDSF

SEQ ID NO: 107180 - protein, 190 aa, Arabidopsis thaliana
  peptide (1)..(190): Ceres Seq. ID no. 13621600
MRKRFRSERQSMGPISIWPFYNQMEELDSSNPAPISARPLTRLPPNSNNRYVDDEEEDEEEDNNNYEEEEEEDERQSKSRSINYILRRPGTVNRFAGVGGGLLSWGQKERSSKRKRNDGDGGERRRKGMRAVAAEIRAFAERVMVMEKKKIEFAKETVRLRKEMEIRRINLIQSSQTQLLQFINNAFDSF

SEQ ID NO: 107181 - protein, 179 aa, Arabidopsis thaliana
  peptide (1)..(179): Ceres Seq. ID no. 13621601
MGPISIWPFYNQMEELDSSNPAPISARPLTRLPPNSNNRYVDDEEEDEEEDNNNYEEEEEEDERQSKSRSINYILRRPGTVNRFAGVGGGLLSWGQKERSSKRKRNDGDGGERRRKGMRAVAAEIRAFAERVMVMEKKKIEFAKETVRLRKEMEIRRINLIQSSQTQLLQFINNAFDSF

SEQ ID NO: 107182 - DNA, 917 bp, Arabidopsis thaliana
  misc_feature (1)..(917): Ceres Seq. ID no. 13621642
  misc_feature (1)..(917): Ortholog of  Ceres SEQ ID NO 13638849 as cited in SEQ ID NO 52046
  misc_feature (1)..(917): Ortholog of  Ceres SEQ ID NO 13599613 as cited in SEQ ID NO 0
atgctgagagtaagaaaggcaatggagaataagaaccagaagcggtttgtgctcatccatggggtgtgccacggggcatggacttgggacaaggtgaaaacgcagctggaggttgcaggtcactgtgtgacggcagtggatcttgctgcatcaggtataaacatgaccaaagtggaagagattcagactctgaacgattactgcaaaccattgcttgagtttctgagctcgcttggctcagatgacggtaaggtgattgttgttgctcatagcatgggaggaatatccgctgcacttgctgctgacagcttcgcttgtaagattgccgctattgtctttttgacagctttcatgcccgacacaataaacccacctgcttatgtttacgaaaagctgctcagaagcattccacaagaggaatggttggacaccacgtgtgtgaactacgggaaacctgattttcctctacagtatactcttttgggaccaaagtttatggccaagaaaatgtatcaaaactctccagttcaagatcttgaagtggtgaagacattagtgagggaaaacccgttagttacaaacaatctggcagggacaagaagctttagtgaggaagggtacggatccgttacacgtatatatattgtatgcagagaggatcttgtggaagtcgaagattaccagcgttggatgattagcaactttccaccaaaagaagtaatggagatcaaatgtgcagatcatatgccaatgttctccaagcctcaagaagtttgtgctcttctcctggagattgcaaataaatattgcaaaaattaaccaatttcagcttccaccaataaataatacgccataagagaatacatctatatgtatgagaactaagcaaatgataatgcttatataataaagtttcg

SEQ ID NO: 107183 - protein, 272 aa, Arabidopsis thaliana
  peptide (1)..(272): Ceres Seq. ID no. 13621643
MLRVRKAMENKNQKRFVLIHGVCHGAWTWDKVKTQLEVAGHCVTAVDLAASGINMTKVEEIQTLNDYCKPLLEFLSSLGSDDGKVIVVAHSMGGISAALAADSFACKIAAIVFLTAFMPDTINPPAYVYEKLLRSIPQEEWLDTTCVNYGKPDFPLQYTLLGPKFMAKKMYQNSPVQDLEVVKTLVRENPLVTNNLAGTRSFSEEGYGSVTRIYIVCREDLVEVEDYQRWMISNFPPKEVMEIKCADHMPMFSKPQEVCALLLEIANKYCKN

SEQ ID NO: 107184 - protein, 265 aa, Arabidopsis thaliana
  peptide (1)..(265): Ceres Seq. ID no. 13621644
MENKNQKRFVLIHGVCHGAWTWDKVKTQLEVAGHCVTAVDLAASGINMTKVEEIQTLNDYCKPLLEFLSSLGSDDGKVIVVAHSMGGISAALAADSFACKIAAIVFLTAFMPDTINPPAYVYEKLLRSIPQEEWLDTTCVNYGKPDFPLQYTLLGPKFMAKKMYQNSPVQDLEVVKTLVRENPLVTNNLAGTRSFSEEGYGSVTRIYIVCREDLVEVEDYQRWMISNFPPKEVMEIKCADHMPMFSKPQEVCALLLEIANKYCKN

SEQ ID NO: 107185 - protein, 218 aa, Arabidopsis thaliana
  peptide (1)..(218): Ceres Seq. ID no. 13621645
MTKVEEIQTLNDYCKPLLEFLSSLGSDDGKVIVVAHSMGGISAALAADSFACKIAAIVFLTAFMPDTINPPAYVYEKLLRSIPQEEWLDTTCVNYGKPDFPLQYTLLGPKFMAKKMYQNSPVQDLEVVKTLVRENPLVTNNLAGTRSFSEEGYGSVTRIYIVCREDLVEVEDYQRWMISNFPPKEVMEIKCADHMPMFSKPQEVCALLLEIANKYCKN

SEQ ID NO: 107186 - DNA, 2762 bp, Arabidopsis thaliana
  misc_feature (1)..(2762): Ceres Seq. ID no. 13621646
  misc_feature (1)..(2762): Ortholog of  Ceres SEQ ID NO 12607856 as cited in SEQ ID NO 55419
atttctctgtgtactggcgcgtgagatagaacagaaaataaagacatcaaatctttgctacatgtctttggtcgtatccgtatatatgttcttcttctaattattttagcagaaagaaaaaaaactaatcgctttcataaactcagatttgtttttttttttcaatggtagaagaagacaagtgttcttggagtttagtttcttcttatgattcattcataaatccgaggaaatatatcaaatctgtttctttctttctctaagtcaaaacccaactaagagattcttcttcttctttctttgagatcagttacaaagtgagctttgtttttaagttctaattgctaatttgctacacataagttctgtttagcttcttagagatgggatttgaagacaagaaaatgctgagacagagacataagcgttctaagagctgtactgttcctgagaagaaaaagcttgaagatgagaatagcattgattcttctctggatgcttctcaacgcctcaagctcgacttacctcgttgcggcgataaatcttttgaaatgaagaaggatctatcccctgatgtaaaattcaagagctctctgaagcaagagattcaagagcttgagaaaagattacagaaccagtttgatgtccgtggtgcgttagagaaggcattaggctataaaacaccatctcgagacatcaaaggcgactctactccaaagcctccaacagaattgatcaaggaaatcgcggtgttggagttagaagtttctcatttggaacagtaccttctatctttgtatcgtaaagcgtttgatcaacaaacatcttctgtatcgccaccaacatcgaaacaacaaagctcgtgttcacctaaatctactcttagaggaaaacgtctagacttctcaagaacacctgaatctcggtgtttctcctttgacaacagactgaagagtccacgtttggtagagaaggagctagagtctcctaaccttagatgtagacaagaaagcttagccacgcaacctcgatgtttctcatttgacaatagactgaaggaacctagttctgctggtcgacaatgtaatcaagaagtctcaagaatcgattctcggagtttctcctttgacaatagagtgaaggaacccggttctgctgctcggcatttcaatcaagaagactcaagaatcgattctcagtgtgtctcctttgacaatagagtgaaggaacccgtttctggtgttcgacaattcgatcaagaaagctcaagaatcgattctcggtgtttctctttcgacaatagactgaaagatcaatgttttatcgagaaggaggacatcgattcatgtgttcgtcgttgccagtcctctcttaatcaacgttccaccttcaataaccgaatatctccaccagaagactcggtattcgcgtgccactcccaaccattgtccatacatgaatacatacaaaatggatcaaatgatgcaagccttgcagaacacatgggaactcggatatctgatcacatattcatgactccaaacaagttatcagaggaaatgatcaagtgtgcatcagctatatattccaagctcgctgatccaccatcgataaaccacggtttctcatccccgagttcgtctccatcatcaacaagcgagttttcaccacaagaccagtatgatatgtggagtccaagcttcagaaaaaactcgtctttcgatgaccagtttgaattcagcggaccttatagctcaatgatcgaagtgtcacacattcatcgaaaccgtaaaagacgcgaccttgacctgatgaatcgaaacttcagcttacttcttaagcaactggaaagtgttgatccgagaaaactgactcatcaagagaaactggcgttctggattaacgtacataacgctcttgtgatgcatacatttctggcaaatgggattccacagaacaatgggaagcgatttttactactctccaagccagcttacaagataggaggtcgcatggtaagcttagaagcaatacaaagttatattcttcgtatcaagatgcctcgtcctggccagtggctgaagttattactcatacctaaaaaattcagaaccggagatgaacatcaagaatattccctcgagcattccgagcctctcttatactttgcactttgttcaggcaaccattctgaccctgcgattcgtgtttttacgcccaagggaatataccaagagctagaaaccgcaaaggaagagtacatccgcgcaacgtttggagtaaagaaagaccagaaactagtcttaccaaagatcattgagtcttttagcaaagactcaggtttaggtcaagcagcattgatggagatgattcaagaatgtctcccggaaacaatgaaaaaaaccataaagaaacttaactcagggagatcccgaaagagcattgtcgaatggacgcctcataatttcgtgtttcggtatttgatagccagagaacttgttagatgaaattttcttatgtgattgtcttgggaagggtttttatttgcaaggactctgtttctttgtaatgtattattggtttagtgtataggtggatgtcttgtgtggtgagtgtagagtagaaatagaaatagaggaaaaattgcatgccgttttttggttaccaatccgcgatgatgtttgtacatacaaaatcgattctcttattttttaaaatttatttgttatagtaacgatatatattactaagcaaaatttcct

SEQ ID NO: 107187 - protein, 707 aa, Arabidopsis thaliana
  peptide (1)..(707): Ceres Seq. ID no. 13621647
MGFEDKKMLRQRHKRSKSCTVPEKKKLEDENSIDSSLDASQRLKLDLPRCGDKSFEMKKDLSPDVKFKSSLKQEIQELEKRLQNQFDVRGALEKALGYKTPSRDIKGDSTPKPPTELIKEIAVLELEVSHLEQYLLSLYRKAFDQQTSSVSPPTSKQQSSCSPKSTLRGKRLDFSRTPESRCFSFDNRLKSPRLVEKELESPNLRCRQESLATQPRCFSFDNRLKEPSSAGRQCNQEVSRIDSRSFSFDNRVKEPGSAARHFNQEDSRIDSQCVSFDNRVKEPVSGVRQFDQESSRIDSRCFSFDNRLKDQCFIEKEDIDSCVRRCQSSLNQRSTFNNRISPPEDSVFACHSQPLSIHEYIQNGSNDASLAEHMGTRISDHIFMTPNKLSEEMIKCASAIYSKLADPPSINHGFSSPSSSPSSTSEFSPQDQYDMWSPSFRKNSSFDDQFEFSGPYSSMIEVSHIHRNRKRRDLDLMNRNFSLLLKQLESVDPRKLTHQEKLAFWINVHNALVMHTFLANGIPQNNGKRFLLLSKPAYKIGGRMVSLEAIQSYILRIKMPRPGQWLKLLLIPKKFRTGDEHQEYSLEHSEPLLYFALCSGNHSDPAIRVFTPKGIYQELETAKEEYIRATFGVKKDQKLVLPKIIESFSKDSGLGQAALMEMIQECLPETMKKTIKKLNSGRSRKSIVEWTPHNFVFRYLIARELVR

SEQ ID NO: 107188 - protein, 700 aa, Arabidopsis thaliana
  peptide (1)..(700): Ceres Seq. ID no. 13621648
MLRQRHKRSKSCTVPEKKKLEDENSIDSSLDASQRLKLDLPRCGDKSFEMKKDLSPDVKFKSSLKQEIQELEKRLQNQFDVRGALEKALGYKTPSRDIKGDSTPKPPTELIKEIAVLELEVSHLEQYLLSLYRKAFDQQTSSVSPPTSKQQSSCSPKSTLRGKRLDFSRTPESRCFSFDNRLKSPRLVEKELESPNLRCRQESLATQPRCFSFDNRLKEPSSAGRQCNQEVSRIDSRSFSFDNRVKEPGSAARHFNQEDSRIDSQCVSFDNRVKEPVSGVRQFDQESSRIDSRCFSFDNRLKDQCFIEKEDIDSCVRRCQSSLNQRSTFNNRISPPEDSVFACHSQPLSIHEYIQNGSNDASLAEHMGTRISDHIFMTPNKLSEEMIKCASAIYSKLADPPSINHGFSSPSSSPSSTSEFSPQDQYDMWSPSFRKNSSFDDQFEFSGPYSSMIEVSHIHRNRKRRDLDLMNRNFSLLLKQLESVDPRKLTHQEKLAFWINVHNALVMHTFLANGIPQNNGKRFLLLSKPAYKIGGRMVSLEAIQSYILRIKMPRPGQWLKLLLIPKKFRTGDEHQEYSLEHSEPLLYFALCSGNHSDPAIRVFTPKGIYQELETAKEEYIRATFGVKKDQKLVLPKIIESFSKDSGLGQAALMEMIQECLPETMKKTIKKLNSGRSRKSIVEWTPHNFVFRYLIARELVR

SEQ ID NO: 107189 - protein, 651 aa, Arabidopsis thaliana
  peptide (1)..(651): Ceres Seq. ID no. 13621649
MKKDLSPDVKFKSSLKQEIQELEKRLQNQFDVRGALEKALGYKTPSRDIKGDSTPKPPTELIKEIAVLELEVSHLEQYLLSLYRKAFDQQTSSVSPPTSKQQSSCSPKSTLRGKRLDFSRTPESRCFSFDNRLKSPRLVEKELESPNLRCRQESLATQPRCFSFDNRLKEPSSAGRQCNQEVSRIDSRSFSFDNRVKEPGSAARHFNQEDSRIDSQCVSFDNRVKEPVSGVRQFDQESSRIDSRCFSFDNRLKDQCFIEKEDIDSCVRRCQSSLNQRSTFNNRISPPEDSVFACHSQPLSIHEYIQNGSNDASLAEHMGTRISDHIFMTPNKLSEEMIKCASAIYSKLADPPSINHGFSSPSSSPSSTSEFSPQDQYDMWSPSFRKNSSFDDQFEFSGPYSSMIEVSHIHRNRKRRDLDLMNRNFSLLLKQLESVDPRKLTHQEKLAFWINVHNALVMHTFLANGIPQNNGKRFLLLSKPAYKIGGRMVSLEAIQSYILRIKMPRPGQWLKLLLIPKKFRTGDEHQEYSLEHSEPLLYFALCSGNHSDPAIRVFTPKGIYQELETAKEEYIRATFGVKKDQKLVLPKIIESFSKDSGLGQAALMEMIQECLPETMKKTIKKLNSGRSRKSIVEWTPHNFVFRYLIARELVR

SEQ ID NO: 107190 - DNA, 1388 bp, Arabidopsis thaliana
  misc_feature (1)..(1388): Ceres Seq. ID no. 13621654
  misc_feature (1)..(1388): Ortholog of  Ceres SEQ ID NO 12336358 as cited in SEQ ID NO 20733
  misc_feature (1)..(1388): Ortholog of  Ceres SEQ ID NO 12623467 as cited in SEQ ID NO 60951
  misc_feature (1)..(1388): Ortholog of  Ceres SEQ ID NO 14309133 as cited in SEQ ID NO 0
accgaatttgatttttatttttctctctcaaagtttttcttgggagagcaacaatggcgatgaggaagcttttatcgaagaaactcttcaatatcacgaatgttgcttcacagagtcttatgaattgtcgcatttcgtcttcttcgttagccgtacgaaccagagttccgaatgattcaacagatacaaccaaaatcgcaccggagcctggagatttggcgatgtcgcgaaggttcatgcataacagtgctatgattaggccggcggagattatgcagatgccggtgggagagagtttgattgagaaactccgtgagattgatggaagcaaggatcggattcgattagacggactttctccgccggagagggagacgagtttgacggtggcggatacgaagaagctgcttagagcggcgcagatcgagattgtgaaatcgaagctaagagaaacgggaagaagctggatgccgtataaggagtttgttagcgtttgtggtgaagcttcttcagatccagatctcggatctaaaatcgcgaagatgcttgatgattcagcaaacgtcatcgttttgggagattccgtttgtattagacctgatcaggttaccaaatccattgaaggactgcttcctttgccaaagatccataacccaaatgaccctcggagaatcgagtttaaagagcttgaagctgaaaaggcagtgatcgatgtgaaagctcacactttggtgcggaaagagctttgggctggtctcggttacttgatcctacagactgcggggttcatgaggctaacgttttgggaactctcgtgggacgtgatggagccaatctgtttctatgtcacgtccgtgtactttatggctggttacgcgtttttcctcaggacatcgaaagagccttcttttgaagggttttaccaaagcaggttcgaggcgaaacagagaaagttgatgaatgagtatgagtttgatctggagaggtataatgaactgaagaagctgttttgctctaagccttcggatcatgtttccaagattcttggagctatcaagagttaaaattttgattaggggaaaaattgcttagattcaatgttgttgtcacaaatggtgtctgattttccctaactagagaattttcccccaaaaaaaagtaagaaaaaaacgaatgggtactactctcaaatttttcagttttcgaaaaaaagacaaagaggttgtttttattattgcggcttatgtaacatcagggaagagttaggtttttgttttcgatttttattttttattttttttatttttttattttaggcccgatttaaaatttaccattgtgtaaataaatgtttgaaggtgtaatataatccagaattaattttttgc

SEQ ID NO: 107191 - protein, 336 aa, Arabidopsis thaliana
  peptide (1)..(336): Ceres Seq. ID no. 13621655
MAMRKLLSKKLFNITNVASQSLMNCRISSSSLAVRTRVPNDSTDTTKIAPEPGDLAMSRRFMHNSAMIRPAEIMQMPVGESLIEKLREIDGSKDRIRLDGLSPPERETSLTVADTKKLLRAAQIEIVKSKLRETGRSWMPYKEFVSVCGEASSDPDLGSKIAKMLDDSANVIVLGDSVCIRPDQVTKSIEGLLPLPKIHNPNDPRRIEFKELEAEKAVIDVKAHTLVRKELWAGLGYLILQTAGFMRLTFWELSWDVMEPICFYVTSVYFMAGYAFFLRTSKEPSFEGFYQSRFEAKQRKLMNEYEFDLERYNELKKLFCSKPSDHVSKILGAIKS

SEQ ID NO: 107192 - protein, 334 aa, Arabidopsis thaliana
  peptide (1)..(334): Ceres Seq. ID no. 13621656
MRKLLSKKLFNITNVASQSLMNCRISSSSLAVRTRVPNDSTDTTKIAPEPGDLAMSRRFMHNSAMIRPAEIMQMPVGESLIEKLREIDGSKDRIRLDGLSPPERETSLTVADTKKLLRAAQIEIVKSKLRETGRSWMPYKEFVSVCGEASSDPDLGSKIAKMLDDSANVIVLGDSVCIRPDQVTKSIEGLLPLPKIHNPNDPRRIEFKELEAEKAVIDVKAHTLVRKELWAGLGYLILQTAGFMRLTFWELSWDVMEPICFYVTSVYFMAGYAFFLRTSKEPSFEGFYQSRFEAKQRKLMNEYEFDLERYNELKKLFCSKPSDHVSKILGAIKS

SEQ ID NO: 107193 - protein, 314 aa, Arabidopsis thaliana
  peptide (1)..(314): Ceres Seq. ID no. 13621657
MNCRISSSSLAVRTRVPNDSTDTTKIAPEPGDLAMSRRFMHNSAMIRPAEIMQMPVGESLIEKLREIDGSKDRIRLDGLSPPERETSLTVADTKKLLRAAQIEIVKSKLRETGRSWMPYKEFVSVCGEASSDPDLGSKIAKMLDDSANVIVLGDSVCIRPDQVTKSIEGLLPLPKIHNPNDPRRIEFKELEAEKAVIDVKAHTLVRKELWAGLGYLILQTAGFMRLTFWELSWDVMEPICFYVTSVYFMAGYAFFLRTSKEPSFEGFYQSRFEAKQRKLMNEYEFDLERYNELKKLFCSKPSDHVSKILGAIKS

SEQ ID NO: 107194 - DNA, 1703 bp, Arabidopsis thaliana
  misc_feature (1)..(1703): Ceres Seq. ID no. 13621668
  misc_feature (1)..(1703): Ortholog of  Ceres SEQ ID NO 13659033 as cited in SEQ ID NO 66372
  misc_feature (1)..(1703): Ortholog of  Ceres SEQ ID NO 13655724 as cited in SEQ ID NO 68973
  misc_feature (1)..(1703): Ortholog of  Ceres SEQ ID NO 12625899 as cited in SEQ ID NO 69079
gacattttagagagcctcgacagagaattatttttttcttttttattttcgtttacaagtttcaattcttctctatatattaaaaaaacaaacagatgcaaccttggagaagaaaatttccattgttcgaaacaggagttacaatgaaacagaggaagaacagtaatctctcaatcttcgtcgtagtcttctctgttttcctcttcgggatcttcatgtacaatgaagacgtcaagtccatcgcagagtttcctttctccacctcaaaacctcacgacgtccacgacgaagcgacaccgatcacagagatcacaacactaccggttcaagagtcgatcaagaactcagacccaattcaggaatcgatcaaaaacgcagactcagttcaagattcagttaaagacgtagcagaaccagttcaagaggaggtatcgaaaacagaggaagttaaaaagattgagcttttcgctgcgacggaggatgaagaagacgtggaattgccgccggaggaatgcgatttgttcaccggagaatgggtttttgataacgagacgcatccattgtataaagaggatcaatgtgagttcttgacggcgcaagtcacttgcatgagaaatggaagaagagattctctgtatcagaactggagatggcaacctagagattgttctttaccaaagttcaaagcgaaattgctgttggagaagctaaggaacaagagaatgatgttcgttggagattccctaaaccggaaccaatgggaatcaatggtttgtttggttcaatcagtggttcctcccggtcgaaaaagcttgaacaaaaccggttctctctccgtcttccgagtcgaggattataatgcgacggtggagttttattgggcaccatttttggtggaatcgaattcagatgatccaaatatgcatagtatacttaaccgtataataatgcctgagtccattgaaaagcatggagtcaactggaaaggcgttgactttcttgttttcaacacttacatttggtggatgaacacattcgctatgaaagtcctacgaggatcgttcgataaaggagacaccgagtatgaggagatcgaacggccagtagcgtataggagagtgatgaggacttggggagattgggtggaacgaaatattgatcctctacgtaccactgtcttctttgctagcatgtctcctcttcacatcaagagcttggattgggagaatccagatgggatcaagtgtgcattagagacgacaccaatcctaaacatgtcaatgccattcagcgtaggaacagactacagactgttttcagtagcggaaaacgtcacgcattctcttaatgttccggtttactttctcaacattaccaaactctccgaataccggaaagatgctcacacttcggttcacacaatccgacaaggcaaaatgctgacgccggagcaacaagccgatcccaacacttacgccgattgtatccattggtgtcttcccggtttacctgacacgtggaatgagttcctttacacacgtatcatttcccgttcgtgacctacaaaatatttgaaatatctctttttcaatattttttcccactttgctccatccaatggaagagccttgaaattttattattttgatgtcctaatgttcataatttttcttgaattgtaattgtgaaatgtttctttcttc

SEQ ID NO: 107195 - protein, 487 aa, Arabidopsis thaliana
  peptide (1)..(487): Ceres Seq. ID no. 13621669
MQPWRRKFPLFETGVTMKQRKNSNLSIFVVVFSVFLFGIFMYNEDVKSIAEFPFSTSKPHDVHDEATPITEITTLPVQESIKNSDPIQESIKNADSVQDSVKDVAEPVQEEVSKTEEVKKIELFAATEDEEDVELPPEECDLFTGEWVFDNETHPLYKEDQCEFLTAQVTCMRNGRRDSLYQNWRWQPRDCSLPKFKAKLLLEKLRNKRMMFVGDSLNRNQWESMVCLVQSVVPPGRKSLNKTGSLSVFRVEDYNATVEFYWAPFLVESNSDDPNMHSILNRIIMPESIEKHGVNWKGVDFLVFNTYIWWMNTFAMKVLRGSFDKGDTEYEEIERPVAYRRVMRTWGDWVERNIDPLRTTVFFASMSPLHIKSLDWENPDGIKCALETTPILNMSMPFSVGTDYRLFSVAENVTHSLNVPVYFLNITKLSEYRKDAHTSVHTIRQGKMLTPEQQADPNTYADCIHWCLPGLPDTWNEFLYTRIISRS

SEQ ID NO: 107196 - protein, 471 aa, Arabidopsis thaliana; identical to SEQ ID NO: 74247
  peptide (1)..(471): Ceres Seq. ID no. 13621670

SEQ ID NO: 107197 - protein, 447 aa, Arabidopsis thaliana; identical to SEQ ID NO: 74248
  peptide (1)..(447): Ceres Seq. ID no. 13621671

SEQ ID NO: 107198 - DNA, 863 bp, Arabidopsis thaliana
  misc_feature (1)..(863): Ceres Seq. ID no. 13621680
  misc_feature (1)..(863): Ortholog of  Ceres SEQ ID NO 13504265 as cited in SEQ ID NO 85
atgacgaccaccgttattatcattatcttcgttgccatcttcgctacgactcttcacgacgccagaggagcaaccatggaaccgtgtctcgaatcaatgaagactgcttcgcttcctgatcttccgtatgcttatgatgcgctagagccagcaatcagtgaggagatcatgcggctacaccatcagaaacaccaccagacttatgtcactcagtacaacaaagccctcaacagccttcgttctgccatggctgacggtgatcactcctccgtcgtcaaactccaaagcctcatcaagttcaacggcggagggcacgttaaccatgcaatcttctggaaaaacctagccccggttcatgaaggaggtggcaaaccaccgcatgatcctttggcttcggcgatcgatgctcatttcggatcactagaaggattgatccaaaaaatgaacgcggaaggcgctgctgtacagggatctggatgggtgtggtttggattagacagagagcttaagagacttgtcgttgaaaccacagccaaccaggatccattggtgactaagggatcacacctagttcctctaattgggattgacgtgtgggagcatgcctactatccacagtacaagaatgcaagagcggagtacttgaagaacatatggactgtaatcaactggaaatatgcagcggacgtcttcgagaagcacactcgtgatcttgatattaactgagttttatatgtctgtagtagcttttgttttttgggtttcttgtcttgttgataaatacggcagtaccgaagatgcaatattaagtttaagatgctatgtatgtaccttggaaaataacgtttgttaagctttttttt

SEQ ID NO: 107199 - protein, 241 aa, Arabidopsis thaliana
  peptide (1)..(241): Ceres Seq. ID no. 13621681
MTTTVIIIIFVAIFATTLHDARGATMEPCLESMKTASLPDLPYAYDALEPAISEEIMRLHHQKHHQTYVTQYNKALNSLRSAMADGDHSSVVKLQSLIKFNGGGHVNHAIFWKNLAPVHEGGGKPPHDPLASAIDAHFGSLEGLIQKMNAEGAAVQGSGWVWFGLDRELKRLVVETTANQDPLVTKGSHLVPLIGIDVWEHAYYPQYKNARAEYLKNIWTVINWKYAADVFEKHTRDLDIN

SEQ ID NO: 107200 - protein, 216 aa, Arabidopsis thaliana
  peptide (1)..(216): Ceres Seq. ID no. 13621682
MEPCLESMKTASLPDLPYAYDALEPAISEEIMRLHHQKHHQTYVTQYNKALNSLRSAMADGDHSSVVKLQSLIKFNGGGHVNHAIFWKNLAPVHEGGGKPPHDPLASAIDAHFGSLEGLIQKMNAEGAAVQGSGWVWFGLDRELKRLVVETTANQDPLVTKGSHLVPLIGIDVWEHAYYPQYKNARAEYLKNIWTVINWKYAADVFEKHTRDLDIN

SEQ ID NO: 107201 - protein, 209 aa, Arabidopsis thaliana
  peptide (1)..(209): Ceres Seq. ID no. 13621683
MKTASLPDLPYAYDALEPAISEEIMRLHHQKHHQTYVTQYNKALNSLRSAMADGDHSSVVKLQSLIKFNGGGHVNHAIFWKNLAPVHEGGGKPPHDPLASAIDAHFGSLEGLIQKMNAEGAAVQGSGWVWFGLDRELKRLVVETTANQDPLVTKGSHLVPLIGIDVWEHAYYPQYKNARAEYLKNIWTVINWKYAADVFEKHTRDLDIN

SEQ ID NO: 107202 - DNA, 1070 bp, Arabidopsis thaliana
  misc_feature (1)..(1070): Ceres Seq. ID no. 13621692
  misc_feature (1)..(1070): Ortholog of  Ceres SEQ ID NO 13597234 as cited in SEQ ID NO 64118
gggaatgacgttgactttcctttacaaatttcttcttcttcttccttgcccgagtttttctgttgatctaaattctcggaatctggggattttcttttcccggtgtgtctatctcgccgggaaactctaataaaccatcttttcttacttctctatactatcctacgattgcttttcgatttttttttgtcggaattgttgtttgtgtaatattctcgaaagctcggtctcaacaatgggaactccagaatttccagatctgggtaaacactgctccgtcgattattgcaaacagatcgatttcttgcccttcacatgcgatcgctgccttcaggtgtattgtctggatcatcgtagctatatgaaacacgattgtccaaaaggaaacagaggagatgtcactgtggttatttgtccattatgtgctaaaggagttagattaaaccctgacgaagatcccaacatcacctgggagaaacatgttaatacagactgtgatccatctaactacgaaaaagctgtcaagaagaagaaatgtcctgttcctagatgcagagaactcttgacattctccaatactattaaatgtcgagattgtagcatcgatcattgtttgaaacatcggtttggacctgatcatagttgttctggacccaagaagcctgaatcgagtttctcattcatgggtttcttgagtacaaacacaaaagaagctcctgcatcatcatcatcttcttcgagatggtctagtcttttcgcttctgcggaagcaagtattagtagactcggtaacgatataagccagaagttacagtttgcgagtggcaatgatggcaattcagagaaaacgcaagagaggaatggaaaacagaattgtggcaaagttacggttgatgtttgtcccaaatgtagtagagggtttcgtgatccggtggatctattgaagcatatcgataaggatcatcgtggcacttctaaagcctagaagaaaggaagtggttttatatttgtgtgatttgtatcattctttgtaacacagccaggaagaaagaaatttccatattcttttg

SEQ ID NO: 107203 - protein, 249 aa, Arabidopsis thaliana
  peptide (1)..(249): Ceres Seq. ID no. 13621693
MGTPEFPDLGKHCSVDYCKQIDFLPFTCDRCLQVYCLDHRSYMKHDCPKGNRGDVTVVICPLCAKGVRLNPDEDPNITWEKHVNTDCDPSNYEKAVKKKKCPVPRCRELLTFSNTIKCRDCSIDHCLKHRFGPDHSCSGPKKPESSFSFMGFLSTNTKEAPASSSSSSRWSSLFASAEASISRLGNDISQKLQFASGNDGNSEKTQERNGKQNCGKVTVDVCPKCSRGFRDPVDLLKHIDKDHRGTSKA

SEQ ID NO: 107204 - protein, 207 aa, Arabidopsis thaliana
  peptide (1)..(207): Ceres Seq. ID no. 13621694
MKHDCPKGNRGDVTVVICPLCAKGVRLNPDEDPNITWEKHVNTDCDPSNYEKAVKKKKCPVPRCRELLTFSNTIKCRDCSIDHCLKHRFGPDHSCSGPKKPESSFSFMGFLSTNTKEAPASSSSSSRWSSLFASAEASISRLGNDISQKLQFASGNDGNSEKTQERNGKQNCGKVTVDVCPKCSRGFRDPVDLLKHIDKDHRGTSKA

SEQ ID NO: 107205 - DNA, 1561 bp, Arabidopsis thaliana
  misc_feature (1)..(1561): Ceres Seq. ID no. 13621695
  misc_feature (1)..(1561): Ortholog of  Ceres SEQ ID NO 13595932 as cited in SEQ ID NO 67810
aaattttctctttcttccttttttccctcaaaaatatcaaaaatccccaaattcaacctgccgttagggttttcaatttctccacttcttcttcttcgtttcgcttcttcaacgtctctccttgttcgacagttctaaattcaccatgaggaagacggtgaagcgagaatcggaagccaccggcgggaaaagagaagccgacgacgagccggagaagttgaggtctgtgaagaaagagaaacagagaaaaaccgaagctgactccgtacgacccgacgagcctcctccgcctcaggaggaagaacaaggaatatctgatcggagaattctcagatccaagtatctctctcttcaaaacgaaatcaacgattgtaaagatgatttgatgaagattgattctgacaaattctccagaattattaatgcagttgaaaacttgcaccaacaagttcggaagcctagggaacaaattgcagacgcagaggcacttctggatatagcaaacactttaatgtcatcggtgaagtctcagtctgctcatggggtttcaccggctgagtttgttaatgctttgatcagtgggtttggtcaaggttctttggggattgatactgatgaaactgctcaagtatctttaaagtggaaggatcttgggtttgctgtttgttctactgttttagtatcatgtggttgttctacaatgttgggacctatggatactgaactgaagcaaaggaaaagggcacccaacagaaaacgtacaaagcctggtgaaggtgttcgtccagatgaggtagatgattcacaatcagaagaaaaaactgatacagacaagaatatgacaataatgtttaacatcttggggaaaaagaagcgcgtgcagcttgagaatttggtgctcaacaggcggtcatttgcacagactgtagagaatttgtttgctctatctttcttggccaaagatggacgagttgagatcattgtcgacaaaagtggttctcatttcgccatgccgagaaatgcacctgatgcaaacgtggtgatgtcgggtgaagtcatttataaccattttgtgtttagattagatttcaaagattggaagttgatgtctgaaatggtgccactgggcgaggagctaatgccacacagacaaactgcagttgcttcatcttcttgtcccgctgcatcagcccctgcatcagcagacttcacacaagatactcagacaacaccaataagaaaactatcgagaaaccgagggttggttgtacaagaagaaactgttgtagaagatactcctgacaaagagggcgatgggactcgaaggagatgtaagcggagactcacctcttcttaaggagtgtatagagagagaagtgagttgtatctatttcattttgtgacattaactaaatgtctttgttaggattgtttagttcgttgtagtttgtagcagttaagtggcttttgtcttaactcttaaaagaagaagaatttaaagcctcttttggtttttcttcttctttttttttttgatctactcaagagagacaatttatct

SEQ ID NO: 107206 - protein, 403 aa, Arabidopsis thaliana
  peptide (1)..(403): Ceres Seq. ID no. 13621696
MRKTVKRESEATGGKREADDEPEKLRSVKKEKQRKTEADSVRPDEPPPPQEEEQGISDRRILRSKYLSLQNEINDCKDDLMKIDSDKFSRIINAVENLHQQVRKPREQIADAEALLDIANTLMSSVKSQSAHGVSPAEFVNALISGFGQGSLGIDTDETAQVSLKWKDLGFAVCSTVLVSCGCSTMLGPMDTELKQRKRAPNRKRTKPGEGVRPDEVDDSQSEEKTDTDKNMTIMFNILGKKKRVQLENLVLNRRSFAQTVENLFALSFLAKDGRVEIIVDKSGSHFAMPRNAPDANVVMSGEVIYNHFVFRLDFKDWKLMSEMVPLGEELMPHRQTAVASSSCPAASAPASADFTQDTQTTPIRKLSRNRGLVVQEETVVEDTPDKEGDGTRRRCKRRLTSS

SEQ ID NO: 107207 - protein, 323 aa, Arabidopsis thaliana
  peptide (1)..(323): Ceres Seq. ID no. 13621697
MKIDSDKFSRIINAVENLHQQVRKPREQIADAEALLDIANTLMSSVKSQSAHGVSPAEFVNALISGFGQGSLGIDTDETAQVSLKWKDLGFAVCSTVLVSCGCSTMLGPMDTELKQRKRAPNRKRTKPGEGVRPDEVDDSQSEEKTDTDKNMTIMFNILGKKKRVQLENLVLNRRSFAQTVENLFALSFLAKDGRVEIIVDKSGSHFAMPRNAPDANVVMSGEVIYNHFVFRLDFKDWKLMSEMVPLGEELMPHRQTAVASSSCPAASAPASADFTQDTQTTPIRKLSRNRGLVVQEETVVEDTPDKEGDGTRRRCKRRLTSS

SEQ ID NO: 107208 - protein, 281 aa, Arabidopsis thaliana
  peptide (1)..(281): Ceres Seq. ID no. 13621698
MSSVKSQSAHGVSPAEFVNALISGFGQGSLGIDTDETAQVSLKWKDLGFAVCSTVLVSCGCSTMLGPMDTELKQRKRAPNRKRTKPGEGVRPDEVDDSQSEEKTDTDKNMTIMFNILGKKKRVQLENLVLNRRSFAQTVENLFALSFLAKDGRVEIIVDKSGSHFAMPRNAPDANVVMSGEVIYNHFVFRLDFKDWKLMSEMVPLGEELMPHRQTAVASSSCPAASAPASADFTQDTQTTPIRKLSRNRGLVVQEETVVEDTPDKEGDGTRRRCKRRLTSS

SEQ ID NO: 107209 - DNA, 1803 bp, Arabidopsis thaliana
  misc_feature (1)..(1803): Ceres Seq. ID no. 13621714
  misc_feature (1)..(1803): Ortholog of  Ceres SEQ ID NO 13654989 as cited in SEQ ID NO 63117
  misc_feature (1)..(1803): Ortholog of  Ceres SEQ ID NO 13584744 as cited in SEQ ID NO 69137
atggctacaaagttagagtcttttaaggtggtggagaaattgggtgttgagaaaggtgaaaaagggaagatgatgagtaaaaaaaagaatgttaagaaagatggagatgagagtgaaagtgggttttggtttagattcaagtttatctttagttgtatctcttctagatcaaaagttgatagttccatgaatgctactgctgttattgcagaacctaagaaagttattgagaagcttgaaggtcatccagctccgactaaagacactggctgtgcggagagcggttcctcaacacctctaatgagcggggaattgaagtattcttctaagctacggattttcatgtttaacgaccttaagttagccactaggaatttcagaccagagtctcttctcggtgagggtgggtttggatgtgtttttaaaggatggatagaggagaatggaactgcacctgtcaagcctggtactggtctaactgtagctgtcaaaacactgaacccagatggccttcaaggtcacaaggagtggctggctgaaattaacttccttggaaaccttgttcaccccagtctggttaaattagttggctactgcatggaagaagaccaaaggctgcttgtttacgagtttatgccacgaggaagtttggagaaccatcttttcagaaggaccttacctctcccttggtctgttcgaatgaaaattgcacttggtgcagctaaaggtctcgcctttcttcacgaagaagctgagaagccagtcatatatcgagatttcaaaacatctaatattttactggatggggaatataatgcaaagctctctgattttgggcttgcaaaagatgctccagacgagaaaaaatcccacgtatcaacccgagtcatgggaacttatggttatgctgcccctgaatatgtaatgactggacatctgacaacgaagagcgatgtatacagttttggagtagttttacttgaaatattaactggacgaagatctgtggataaaagtcggccgaacggggaacagaacttggtagaatgggtgagacctcatctcttagacaagaaaaggttttaccggctattagatcctcggttagagggtcactactcgatcaaaggtgctcagaaagccacacaagtagcggcgcaatgccttaaccgagactccaaagccagaccgaaaatgagtgaagttgtggaagccttaaagccattaccaaatcttaaagactttgctagctcttcttcttctttccaaacaatgcagcctgttgctaagaacggagtcagaacacaaggaggagggtttgtgtcgagaaatggaccgccaatgaggagtttgtctagcttaaacttgcctcaagcatccccttatcgttatgcccgtcaatcaccaaagcctaaaggaaaagagccatgactccaaaatagatattaatttagttcttcatgtctgaccaaggtttactgatttgagctgtatgttcagctttctgtttcatcgatcctttccgactcaagacgggggctgcagccttttactcagatcaaaaagatggtctgtgggaaactgaagcctggcaagtttggaacgtttcggatcctggtttgtgttctttgagttgaaaaaatatctttggtcctgaaggtcttatgattttgatcttatgatgattttaatgtgtagaagatgtaaagtttgagagtgtaaagtttccataaatgataaaaaccagttgtctgtaaaaccttatgtaatatatgttctgatatgtattgatttttcatcttt

SEQ ID NO: 107210 - protein, 476 aa, Arabidopsis thaliana
  peptide (1)..(476): Ceres Seq. ID no. 13621715
MATKLESFKVVEKLGVEKGEKGKMMSKKKNVKKDGDESESGFWFRFKFIFSCISSRSKVDSSMNATAVIAEPKKVIEKLEGHPAPTKDTGCAESGSSTPLMSGELKYSSKLRIFMFNDLKLATRNFRPESLLGEGGFGCVFKGWIEENGTAPVKPGTGLTVAVKTLNPDGLQGHKEWLAEINFLGNLVHPSLVKLVGYCMEEDQRLLVYEFMPRGSLENHLFRRTLPLPWSVRMKIALGAAKGLAFLHEEAEKPVIYRDFKTSNILLDGEYNAKLSDFGLAKDAPDEKKSHVSTRVMGTYGYAAPEYVMTGHLTTKSDVYSFGVVLLEILTGRRSVDKSRPNGEQNLVEWVRPHLLDKKRFYRLLDPRLEGHYSIKGAQKATQVAAQCLNRDSKARPKMSEVVEALKPLPNLKDFASSSSSFQTMQPVAKNGVRTQGGGFVSRNGPPMRSLSSLNLPQASPYRYARQSPKPKGKEP

SEQ ID NO: 107211 - protein, 453 aa, Arabidopsis thaliana
  peptide (1)..(453): Ceres Seq. ID no. 13621716
MMSKKKNVKKDGDESESGFWFRFKFIFSCISSRSKVDSSMNATAVIAEPKKVIEKLEGHPAPTKDTGCAESGSSTPLMSGELKYSSKLRIFMFNDLKLATRNFRPESLLGEGGFGCVFKGWIEENGTAPVKPGTGLTVAVKTLNPDGLQGHKEWLAEINFLGNLVHPSLVKLVGYCMEEDQRLLVYEFMPRGSLENHLFRRTLPLPWSVRMKIALGAAKGLAFLHEEAEKPVIYRDFKTSNILLDGEYNAKLSDFGLAKDAPDEKKSHVSTRVMGTYGYAAPEYVMTGHLTTKSDVYSFGVVLLEILTGRRSVDKSRPNGEQNLVEWVRPHLLDKKRFYRLLDPRLEGHYSIKGAQKATQVAAQCLNRDSKARPKMSEVVEALKPLPNLKDFASSSSSFQTMQPVAKNGVRTQGGGFVSRNGPPMRSLSSLNLPQASPYRYARQSPKPKGKEP

SEQ ID NO: 107212 - protein, 452 aa, Arabidopsis thaliana
  peptide (1)..(452): Ceres Seq. ID no. 13621717
MSKKKNVKKDGDESESGFWFRFKFIFSCISSRSKVDSSMNATAVIAEPKKVIEKLEGHPAPTKDTGCAESGSSTPLMSGELKYSSKLRIFMFNDLKLATRNFRPESLLGEGGFGCVFKGWIEENGTAPVKPGTGLTVAVKTLNPDGLQGHKEWLAEINFLGNLVHPSLVKLVGYCMEEDQRLLVYEFMPRGSLENHLFRRTLPLPWSVRMKIALGAAKGLAFLHEEAEKPVIYRDFKTSNILLDGEYNAKLSDFGLAKDAPDEKKSHVSTRVMGTYGYAAPEYVMTGHLTTKSDVYSFGVVLLEILTGRRSVDKSRPNGEQNLVEWVRPHLLDKKRFYRLLDPRLEGHYSIKGAQKATQVAAQCLNRDSKARPKMSEVVEALKPLPNLKDFASSSSSFQTMQPVAKNGVRTQGGGFVSRNGPPMRSLSSLNLPQASPYRYARQSPKPKGKEP

SEQ ID NO: 107213 - DNA, 2339 bp, Arabidopsis thaliana
  misc_feature (1)..(2339): Ceres Seq. ID no. 13621726
  misc_feature (1)..(2339): Ortholog of  Ceres SEQ ID NO 13598865 as cited in SEQ ID NO 0
aaaaccaaatccaaaaaaaatcattttgaagagagaaagagagatttgcatttttcaatctttaaagaaattgattcttcaatccatacgtttcttcttcttcaccaatctcactttcaaaaagatcttcttttgctaagttctgaatccaaagtctcaaactttcatgtaaagttgaagtcttttgtgattctttcttctgggtttttgaatgggttcaaagttttgagaattagggtttagagatttaagtttgttttggggttttaagtttttggataagcttgtttagtgatttgtgtggagatgggagagtttgaggtagatggagaagagaaactgattgttgctgctaagtatcttgttaaggaacttagatctggtaagagtcttactaaaaatgctaagaatgttttaggcaatctcttattagagctttctcgtgtggtgatagctgaggatactcaggatagagatgaggaagatgaaataggtgagattgaggaaaggcttaatgttgttagtgagaagattatgactagagaagtcgatgaatcaatgatttgggatttaggttcagatgaaggtaatctgtatttggatgctgtgaatgagttgagaagtttgattgatcggttagacggaagtgaggagctttctttaagaaaagctcatgatgttcttcaaatagctatggcacggcttgaggatgagtttaagcatcttcttgtggagaatagattgccttttgagcttgaacattcgtcgtttcggtctattgaagcggatcatggtgtggaggaagagtccatggcttcttttggtgctgcttctactgaggatttgattcttggaagtaataatgatagtaggagaaactcaggggacgttgtggttgatttggtgaatcctgatgttatattagatctcaagaacattgcgaatactatgattgcttcagggtatgaccgtgagtgtattcaggtgtgtacaatggttagaaaagatgctttggatgagtttttgtataaccatgaggttgagaagttgagtattgaagatgttttgaggatggattgggcgacgttgaatacgaatatcaagaaatgggttcgggttatgagagatatcgtccaggtatatctcttgagtgagaagtctctggataatcagatctttggagacttgaatgagatcggtctaacatgtttcgtcgatactgtgaaggctccgatgatgcagttgcttaattttggtgaagctgtgtctcttggtccacgacaacctgagaaattgcttaggattcttgaaatgtatgagctagcatctgagcttttaccagagatcgatgctttgttcttggatcatcccggttcgtccgtaagaaccgaatacagggaagtgatgaggagacttggggattgtgcaagaacaacgtttcttgaattcaaaagtgcgattgcagcggatgtctcatcgcatcctttccctggaggcgcggttcacccgcttacaaactacgtgatgaattacctcatggctctaacagatttcaaacacacgctcgactctcttctaatggaacatgatgatgcagaagatctcacaataccaccatcgccggatattatcaatcccgtgatggtcgaagaagagtctacctacgaaaactcctcttcaccggagaaatttctggcaatgacccgacatttctactccataacctctgtcctcgaagccaaccttcaagagaaatcaaaactatacaaagatgtctctctacaacacatttttctcctcaacaacatacactacatgacccggaaagtgctaaagtccgagctgagacacatcttcggcgacaaatggaaccgaaaacatacatggaagtttcagcagcaagcaacagagtacgaacgcgcaacctggctccctgtcctatcgttcctcaaggacgatggttcaggttctggtcccggttctggctcaggttctggttcaaagaatctacgcccgagggagcggttccaaggattcaacactgcgttcgaggaagtgtacaaagcgcaaaccggatggctaatttcggacgaggggctaagagaagatgtaaggacaaaggcgtccatgtgggtgattcaagcgtattggacattttacagtagacacaagaacagtgtcagtgaaaggtatataaagtacactactgatgatattgagagactcttgttggatctctttgctggttcttctaaatccttgaacaattcttatagaagatgatgataaattgtgttatgatgataattttttactgttacaagtatagaaatatatgt

SEQ ID NO: 107214 - protein, 658 aa, Arabidopsis thaliana
  peptide (1)..(658): Ceres Seq. ID no. 13621727
MGEFEVDGEEKLIVAAKYLVKELRSGKSLTKNAKNVLGNLLLELSRVVIAEDTQDRDEEDEIGEIEERLNVVSEKIMTREVDESMIWDLGSDEGNLYLDAVNELRSLIDRLDGSEELSLRKAHDVLQIAMARLEDEFKHLLVENRLPFELEHSSFRSIEADHGVEEESMASFGAASTEDLILGSNNDSRRNSGDVVVDLVNPDVILDLKNIANTMIASGYDRECIQVCTMVRKDALDEFLYNHEVEKLSIEDVLRMDWATLNTNIKKWVRVMRDIVQVYLLSEKSLDNQIFGDLNEIGLTCFVDTVKAPMMQLLNFGEAVSLGPRQPEKLLRILEMYELASELLPEIDALFLDHPGSSVRTEYREVMRRLGDCARTTFLEFKSAIAADVSSHPFPGGAVHPLTNYVMNYLMALTDFKHTLDSLLMEHDDAEDLTIPPSPDIINPVMVEEESTYENSSSPEKFLAMTRHFYSITSVLEANLQEKSKLYKDVSLQHIFLLNNIHYMTRKVLKSELRHIFGDKWNRKHTWKFQQQATEYERATWLPVLSFLKDDGSGSGPGSGSGSGSKNLRPRERFQGFNTAFEEVYKAQTGWLISDEGLREDVRTKASMWVIQAYWTFYSRHKNSVSERYIKYTTDDIERLLLDLFAGSSKSLNNSYRR

SEQ ID NO: 107215 - protein, 582 aa, Arabidopsis thaliana
  peptide (1)..(582): Ceres Seq. ID no. 13621728
MTREVDESMIWDLGSDEGNLYLDAVNELRSLIDRLDGSEELSLRKAHDVLQIAMARLEDEFKHLLVENRLPFELEHSSFRSIEADHGVEEESMASFGAASTEDLILGSNNDSRRNSGDVVVDLVNPDVILDLKNIANTMIASGYDRECIQVCTMVRKDALDEFLYNHEVEKLSIEDVLRMDWATLNTNIKKWVRVMRDIVQVYLLSEKSLDNQIFGDLNEIGLTCFVDTVKAPMMQLLNFGEAVSLGPRQPEKLLRILEMYELASELLPEIDALFLDHPGSSVRTEYREVMRRLGDCARTTFLEFKSAIAADVSSHPFPGGAVHPLTNYVMNYLMALTDFKHTLDSLLMEHDDAEDLTIPPSPDIINPVMVEEESTYENSSSPEKFLAMTRHFYSITSVLEANLQEKSKLYKDVSLQHIFLLNNIHYMTRKVLKSELRHIFGDKWNRKHTWKFQQQATEYERATWLPVLSFLKDDGSGSGPGSGSGSGSKNLRPRERFQGFNTAFEEVYKAQTGWLISDEGLREDVRTKASMWVIQAYWTFYSRHKNSVSERYIKYTTDDIERLLLDLFAGSSKSLNNSYRR

SEQ ID NO: 107216 - protein, 574 aa, Arabidopsis thaliana
  peptide (1)..(574): Ceres Seq. ID no. 13621729
MIWDLGSDEGNLYLDAVNELRSLIDRLDGSEELSLRKAHDVLQIAMARLEDEFKHLLVENRLPFELEHSSFRSIEADHGVEEESMASFGAASTEDLILGSNNDSRRNSGDVVVDLVNPDVILDLKNIANTMIASGYDRECIQVCTMVRKDALDEFLYNHEVEKLSIEDVLRMDWATLNTNIKKWVRVMRDIVQVYLLSEKSLDNQIFGDLNEIGLTCFVDTVKAPMMQLLNFGEAVSLGPRQPEKLLRILEMYELASELLPEIDALFLDHPGSSVRTEYREVMRRLGDCARTTFLEFKSAIAADVSSHPFPGGAVHPLTNYVMNYLMALTDFKHTLDSLLMEHDDAEDLTIPPSPDIINPVMVEEESTYENSSSPEKFLAMTRHFYSITSVLEANLQEKSKLYKDVSLQHIFLLNNIHYMTRKVLKSELRHIFGDKWNRKHTWKFQQQATEYERATWLPVLSFLKDDGSGSGPGSGSGSGSKNLRPRERFQGFNTAFEEVYKAQTGWLISDEGLREDVRTKASMWVIQAYWTFYSRHKNSVSERYIKYTTDDIERLLLDLFAGSSKSLNNSYRR

SEQ ID NO: 107217 - DNA, 1510 bp, Arabidopsis thaliana
  misc_feature (1)..(1510): Ceres Seq. ID no. 13621751
  misc_feature (1)..(1510): Ortholog of  Ceres SEQ ID NO 13581327 as cited in SEQ ID NO 51165
  misc_feature (1)..(1510): Ortholog of  Ceres SEQ ID NO 12610002 as cited in SEQ ID NO 55823
  misc_feature (1)..(1510): Ortholog of  Ceres SEQ ID NO 14308310 as cited in SEQ ID NO 58573
  misc_feature (1)..(1510): Ortholog of  Ceres SEQ ID NO 14308795 as cited in SEQ ID NO 59140
  misc_feature (1)..(1510): Ortholog of  Ceres SEQ ID NO 14313354 as cited in SEQ ID NO 61520
  misc_feature (1)..(1510): Ortholog of  Ceres SEQ ID NO 13596744 as cited in SEQ ID NO 62765
atatttctcacccatttttcaccaatttctctccacttaaaaccaaccccaattctcaccaaaaatcgcaaaaaagatttcaactttcgataaacccagatcgaaaaatcagatttttccagatcaatcagagagttagagatggagtataataacaacaatcagcaatctttttggcagttcagcgaccagctgagagttcagacaccgaatctagcgaatctgtctctcaacgactcgatctggagcacaaactctgtcttcaaagagcgtcgaaacttagacatagccgccaccaccgacaagaacaacaaccagatcgactattatcagaagaagacaacttccgacaacatcaattccaactggaactggaagtcttctggttcaaacaacgacatgggtttaggattcggacctgtgggttcaaaatccaccgtcgatttaaacccaatcgacaaattcaactcaccgttcaacgacacgtggaaattcaactcagtcaacgttaacgttaacggttactcaccgtcaagcgccgttaacggagatttcaacaaaggggtttacacgtcgatgaagaagtatgggtacaacgtcaatctaaagaacaacaacaagaacaaaggaatcgatgaagatcatcagattcagaaaggtgggaagaagaacagaaagaatcagcagaacaataataaccagaggaacgaagacgacaagaacaatggtttggacaagaggtttaagactcttcctccagcagaagctttgccaagaaacgaaaccattggtggttacatctttgtctgcaacaacgataccatggaagagaatctcaaacgccagcttttcggattgccaccaagatacagggactcggttagagcgataactccaggacttcctctgtttctttacaactactccactcaccaacttcatggaatctacgaggcagctagcttcggaggaacaaacattgagttgaatgcttttgaagacaagaaatgtcctggcgaatctcgtttccctgctcaggtgagggccataacgaggaaagtatgtttgccactggaagaagattctttccgacccattttgcaccactacgacggtcctaagttccgactcgaactcagtgtccctgaggtgctttctctattggacatttttgctgaccaaaacccttgaattgggtaataccaatgaagaacacaaaacagtggtttgttacttcaaatccagaaagagagagataccccattatacatatatgattataaggaggagtattaataataattgtctgaagaaatggtattttactagtttatacagtttctttcttaagtatattcccaggagatatgggataaatagaagatgtgctatttttgtgtgggtggatgaagaatagatctcatctccgcgcttttttctttttgtaaattatataaaataacatatgtacaaccccaaaaatagggagaaatgagatgatgaactctta

SEQ ID NO: 107218 - protein, 349 aa, Arabidopsis thaliana; identical to SEQ ID NO: 27656
  peptide (1)..(349): Ceres Seq. ID no. 13621752

SEQ ID NO: 107219 - protein, 263 aa, Arabidopsis thaliana; identical to SEQ ID NO: 27657
  peptide (1)..(263): Ceres Seq. ID no. 13621753

SEQ ID NO: 107220 - protein, 204 aa, Arabidopsis thaliana; identical to SEQ ID NO: 27658
  peptide (1)..(204): Ceres Seq. ID no. 13621754

SEQ ID NO: 107221 - DNA, 1725 bp, Arabidopsis thaliana
  misc_feature (1)..(1725): Ceres Seq. ID no. 13621757
  misc_feature (1)..(1725): Ortholog of  Ceres SEQ ID NO 13594209 as cited in SEQ ID NO 59089
  misc_feature (1)..(1725): Ortholog of  Ceres SEQ ID NO 13502874 as cited in SEQ ID NO 66298
  misc_feature (1)..(1725): Ortholog of  Ceres SEQ ID NO 12614124 as cited in SEQ ID NO 68392
atcgatcgataaccaaacgaaaaaaaacatggccatctctttcctctgtttttgcctcattaccctcgcttcgttaatctttttcgccaagaagattaaacacttgaaatggaatcttcctccaagccctccaaagtttccggtcatcggaaatttacaccagattggagaattgcctcacaggtcacttcaacatctcgccgaaagatacggacctgtgatgcttcttcactttgggtttgtccctgtaactgtggtctcatcaagagaagcagctgaagaagtgctcagaactcatgacctagactgttgcagcaggcctaaacttgtcgggacaaggttactctcgcggaattttaaagatgtctgttttacgccatacggtaacgagtggaaggcgcggcgtaagtttgccctgcgtgagcttttctgtttgaaaaaggttcagtcctttaggcatatccgagaggaagaatgtaactttctggtcaagcaactgtcggaatccgcggttaatcgctctccggtcgatttgagcaaatcacttttctggctaaccgctagtatctttttcagagttgccttaggacagaattttcatgagagcaattttatcgataaagaaaagatcgaagagctcgtgttcgaagctgagactgccctagcaagtttcacttgttctgatttcttccctgttgccggacttggatggcttgttgattggttttccggacaacacaagagactcaacgatgttttttacaagctcgatgctctgtttcaacatgtcatagatgatcatttaaatccaggaagatcaaaagagcacgaagacatcatcgattcaatgttggatgcgattcataaagaaggaaaagatagttccttagagctcataatagatcatattaaggggtttctcgcgaatatatttcttgcagggatagacacaggggccctcaccatgatatgggcaatgacggagctcgttaaaaacccgaaacttataaagaaagttcaaggcgagatccgagaacaacttggcagcaataaggcgagaatcaccgaggaagatatcgataaagttccttacttgaagatggtaatcaaagaaacattcaggttacacccggcagctcctcttatacttccaagagaaacaatggctcacatcaaagttcaagggtatgatattcctcccaagaggcggatcttggtcaatgtttcggctatcggaagagatcccaaactctggacaaacccggaagagtttgaccctgagaggtttatggatagctctgttgattataggggacaacattacgagctcttaccatttgggtccggtcgaaggatatgtcccgggatgccaatggggattgctgccgtcgaattgggactcttgaacttactttacttcttcgattggaagttgcctgatgggatgacacataaagatattgatactgaagaagctggtactcttacaatcgtcaagaaagtacctctccagctcgttccagttcgagttcagtgatcagaccaaactccaaacggtttggaccaaaccttttgaataaatatatcatgcaaatcatgtaagcttctctgatgatgtatgaagtatatttttcagtaaaatactaaattgaacgttcatttgcgtttgaggaatgtaattaacgtttacgaaccttacatgttccggttctgattcatcaaaat

SEQ ID NO: 107222 - protein, 511 aa, Arabidopsis thaliana
  peptide (1)..(511): Ceres Seq. ID no. 13621758
SIDNQTKKNMAISFLCFCLITLASLIFFAKKIKHLKWNLPPSPPKFPVIGNLHQIGELPHRSLQHLAERYGPVMLLHFGFVPVTVVSSREAAEEVLRTHDLDCCSRPKLVGTRLLSRNFKDVCFTPYGNEWKARRKFALRELFCLKKVQSFRHIREEECNFLVKQLSESAVNRSPVDLSKSLFWLTASIFFRVALGQNFHESNFIDKEKIEELVFEAETALASFTCSDFFPVAGLGWLVDWFSGQHKRLNDVFYKLDALFQHVIDDHLNPGRSKEHEDIIDSMLDAIHKEGKDSSLELIIDHIKGFLANIFLAGIDTGALTMIWAMTELVKNPKLIKKVQGEIREQLGSNKARITEEDIDKVPYLKMVIKETFRLHPAAPLILPRETMAHIKVQGYDIPPKRRILVNVSAIGRDPKLWTNPEEFDPERFMDSSVDYRGQHYELLPFGSGRRICPGMPMGIAAVELGLLNLLYFFDWKLPDGMTHKDIDTEEAGTLTIVKKVPLQLVPVRVQ

SEQ ID NO: 107223 - protein, 502 aa, Arabidopsis thaliana
  peptide (1)..(502): Ceres Seq. ID no. 13621759
MAISFLCFCLITLASLIFFAKKIKHLKWNLPPSPPKFPVIGNLHQIGELPHRSLQHLAERYGPVMLLHFGFVPVTVVSSREAAEEVLRTHDLDCCSRPKLVGTRLLSRNFKDVCFTPYGNEWKARRKFALRELFCLKKVQSFRHIREEECNFLVKQLSESAVNRSPVDLSKSLFWLTASIFFRVALGQNFHESNFIDKEKIEELVFEAETALASFTCSDFFPVAGLGWLVDWFSGQHKRLNDVFYKLDALFQHVIDDHLNPGRSKEHEDIIDSMLDAIHKEGKDSSLELIIDHIKGFLANIFLAGIDTGALTMIWAMTELVKNPKLIKKVQGEIREQLGSNKARITEEDIDKVPYLKMVIKETFRLHPAAPLILPRETMAHIKVQGYDIPPKRRILVNVSAIGRDPKLWTNPEEFDPERFMDSSVDYRGQHYELLPFGSGRRICPGMPMGIAAVELGLLNLLYFFDWKLPDGMTHKDIDTEEAGTLTIVKKVPLQLVPVRVQ

SEQ ID NO: 107224 - protein, 438 aa, Arabidopsis thaliana
  peptide (1)..(438): Ceres Seq. ID no. 13621760
MLLHFGFVPVTVVSSREAAEEVLRTHDLDCCSRPKLVGTRLLSRNFKDVCFTPYGNEWKARRKFALRELFCLKKVQSFRHIREEECNFLVKQLSESAVNRSPVDLSKSLFWLTASIFFRVALGQNFHESNFIDKEKIEELVFEAETALASFTCSDFFPVAGLGWLVDWFSGQHKRLNDVFYKLDALFQHVIDDHLNPGRSKEHEDIIDSMLDAIHKEGKDSSLELIIDHIKGFLANIFLAGIDTGALTMIWAMTELVKNPKLIKKVQGEIREQLGSNKARITEEDIDKVPYLKMVIKETFRLHPAAPLILPRETMAHIKVQGYDIPPKRRILVNVSAIGRDPKLWTNPEEFDPERFMDSSVDYRGQHYELLPFGSGRRICPGMPMGIAAVELGLLNLLYFFDWKLPDGMTHKDIDTEEAGTLTIVKKVPLQLVPVRVQ

SEQ ID NO: 107225 - DNA, 1509 bp, Arabidopsis thaliana
  misc_feature (1)..(1509): Ceres Seq. ID no. 13621765
  misc_feature (1)..(1509): Ortholog of  Ceres SEQ ID NO 13599900 as cited in SEQ ID NO 531
  misc_feature (1)..(1509): Ortholog of  Ceres SEQ ID NO 14310498 as cited in SEQ ID NO 55066
  misc_feature (1)..(1509): Ortholog of  Ceres SEQ ID NO 13659971 as cited in SEQ ID NO 67565
  misc_feature (1)..(1509): Ortholog of  Ceres SEQ ID NO 13500385 as cited in SEQ ID NO 67583
ataattagtctcacatatacttgtaactagtcagacaaagacaatggaagaatcaaaccgtagtagtactgtcttgttcgacaaatacaacatcggaagacttctcggaaccggtaacttcgccaaagtgtatcacggaacagagatctccaccggcgatgacgtggcaatcaaagtcatcaaaaaagaccacgttttcaaacgtcgtggcatgatggagcaaatcgaacgagagatcgccgtcatgcgtctcctccgtcatccaaacgtggtcgagctccgcgaagtaatggctacaaagaagaagattttcttcgtcatggagtacgtcaacggcggagagcttttcgaaatgatcgatagagatgggaagctcccggaggatctagccagaaagtatttccaacaattgatatccgcggtggatttttgccacagccgcggtgttttccaccgcgatattaaacccgagaatctgttgcttgacggagaaggtgatcttaaggtaacggatttcggactttccgcattgatgatgccagaagggctaggtggcaggcgtggtagcagcgatgatcttttacatacgcggtgcgggacaccggcttacgtggcgccggaggttttacggaataaaggatacgacggagctatggctgatatttggtcgtgcgggattgttttgtatgcactccttgctggcttcttgccgtttatcgacgaaaacgtcatgacattgtacacgaagatcttcaaggcggaatgcgagttcccaccgtggttttccttagaatccaaggaactactctcaagattgcttgtgccggatcctgaacaaagaatttcaatgtcagagatcaaaatgattccatggttccgaaagaactttacaccatcagtagccttttcgatagacgaaacgatcccatctccaccggagccaccaacaaagaaaaagaagaaagacctaaacgagaaagaagacgacggagcttcaccaagatccttcaacgccttccaattcatcacatcaatgtcttcaggtttcgatctctctaacctattcgagataaaacgaaagccaaagcggatgttcacatcgaagttcccggcgaaatctgttaaagagaggctggagacggcggcgcgtgagatggatatgagagtgaaacatgtaaaagactgcaagatgaagctgcaaagaagaacagaaggtcgtaaaggaaggctctcggtgacggcggaagtattcgaagtcgctcctgaagtctctgtcgtggagttctgcaaaacctcgggggatacgttggagtattacctcttctgtgaggatgacgtcagaccagctcttaaagacattgtatggtcatggcaaggtgatgatgatgaagacgatgttaccactaatgataatgttgacacaaatgataacaaaataaataatgtttcatgagctgtaataattcactttttggaattggatgtgcgaggcgagactgtcttattgcg

SEQ ID NO: 107226 - protein, 469 aa, Arabidopsis thaliana
  peptide (1)..(469): Ceres Seq. ID no. 13621766
MEESNRSSTVLFDKYNIGRLLGTGNFAKVYHGTEISTGDDVAIKVIKKDHVFKRRGMMEQIEREIAVMRLLRHPNVVELREVMATKKKIFFVMEYVNGGELFEMIDRDGKLPEDLARKYFQQLISAVDFCHSRGVFHRDIKPENLLLDGEGDLKVTDFGLSALMMPEGLGGRRGSSDDLLHTRCGTPAYVAPEVLRNKGYDGAMADIWSCGIVLYALLAGFLPFIDENVMTLYTKIFKAECEFPPWFSLESKELLSRLLVPDPEQRISMSEIKMIPWFRKNFTPSVAFSIDETIPSPPEPPTKKKKKDLNEKEDDGASPRSFNAFQFITSMSSGFDLSNLFEIKRKPKRMFTSKFPAKSVKERLETAAREMDMRVKHVKDCKMKLQRRTEGRKGRLSVTAEVFEVAPEVSVVEFCKTSGDTLEYYLFCEDDVRPALKDIVWSWQGDDDEDDVTTNDNVDTNDNKINNVS

SEQ ID NO: 107227 - protein, 413 aa, Arabidopsis thaliana
  peptide (1)..(413): Ceres Seq. ID no. 13621767
MMEQIEREIAVMRLLRHPNVVELREVMATKKKIFFVMEYVNGGELFEMIDRDGKLPEDLARKYFQQLISAVDFCHSRGVFHRDIKPENLLLDGEGDLKVTDFGLSALMMPEGLGGRRGSSDDLLHTRCGTPAYVAPEVLRNKGYDGAMADIWSCGIVLYALLAGFLPFIDENVMTLYTKIFKAECEFPPWFSLESKELLSRLLVPDPEQRISMSEIKMIPWFRKNFTPSVAFSIDETIPSPPEPPTKKKKKDLNEKEDDGASPRSFNAFQFITSMSSGFDLSNLFEIKRKPKRMFTSKFPAKSVKERLETAAREMDMRVKHVKDCKMKLQRRTEGRKGRLSVTAEVFEVAPEVSVVEFCKTSGDTLEYYLFCEDDVRPALKDIVWSWQGDDDEDDVTTNDNVDTNDNKINNVS

SEQ ID NO: 107228 - protein, 412 aa, Arabidopsis thaliana
  peptide (1)..(412): Ceres Seq. ID no. 13621768
MEQIEREIAVMRLLRHPNVVELREVMATKKKIFFVMEYVNGGELFEMIDRDGKLPEDLARKYFQQLISAVDFCHSRGVFHRDIKPENLLLDGEGDLKVTDFGLSALMMPEGLGGRRGSSDDLLHTRCGTPAYVAPEVLRNKGYDGAMADIWSCGIVLYALLAGFLPFIDENVMTLYTKIFKAECEFPPWFSLESKELLSRLLVPDPEQRISMSEIKMIPWFRKNFTPSVAFSIDETIPSPPEPPTKKKKKDLNEKEDDGASPRSFNAFQFITSMSSGFDLSNLFEIKRKPKRMFTSKFPAKSVKERLETAAREMDMRVKHVKDCKMKLQRRTEGRKGRLSVTAEVFEVAPEVSVVEFCKTSGDTLEYYLFCEDDVRPALKDIVWSWQGDDDEDDVTTNDNVDTNDNKINNVS

SEQ ID NO: 107229 - DNA, 1741 bp, Arabidopsis thaliana
  misc_feature (1)..(1741): Ceres Seq. ID no. 13621777
  misc_feature (1)..(1741): Ortholog of  Ceres SEQ ID NO 15227091 as cited in SEQ ID NO 60294
  misc_feature (1)..(1741): Ortholog of  Ceres SEQ ID NO 13502874 as cited in SEQ ID NO 66298
  misc_feature (1)..(1741): Ortholog of  Ceres SEQ ID NO 12614124 as cited in SEQ ID NO 68392
agatcaaacacaaatcaaatcagccatacatggatctaatcatgctttttcttctctctgctctcttcatcttccctgttttaatcttaattaagtctcggcttcgtcccaagaacaagaagagtacagcacctatggtccccggagcatggccattgctcggtcatttacatttatttgacaccgtaaacccgactcacgttacgtttggggcaatggctgacgtgtatggaccggtgttcatggcaaagcttggctctatcaaagtcatgatcataaacagcaaagaagtggccaaagagatttacacggtccacgacaagctcctagaacgaccagaacttactgcgtctaagcttctaggctacaacgactcgttcttgacgtttagtccttacggtctttactggagagagatacggaagattgcagtatccgagcttttctcgacatccggggttgatatgcacatggttagtagagcacgtgaggctgacttggcatttagagccttatacgttagatgggagaaaagaggtaagcctaaagaaggagtcttggtggacatgaagcaagagttcatagatctaactgcgaacatctcattgatgatggtctcggggaagagatactttggtgaaaacccgaactgcgaagtgaaagaagctaggagatgcgggaagctgattcgggagtttttggattacttcgcactatttttgttgtccgatgtggcaccagttctaggttttcttgattggaagaccaagagaggaatgaagagaacggctaaagggttggataaagttgctgaaggttggattgaagaacacaagaacaagaggagtgatcacggtaggagtgaaaatgactacttggatatactcattaagatattgggacaagacaagattcctggtttgagtgatactcacacgaaaattaaagccctctgcctcaacttggtattggcagggagcgagacggccattgtggttctggtttgggcggtatccttgctcttgaacaacccgcatgtcttgaggaaagctcaggaggagctggacagcaaaattggaaaggagagagttgtggaagagttagacatcaaagatttggtttacctccaagccattgtcaaggagacatttcgtctatacccaccagtccctctcgttgcttacagagctgtggtggaagatttcgacattgcattttgcaaatgtcatgtacctgcagggacacaattgatggtgagtgcatggaagattcacagggatccaaatgtttggtcgaaccccgaacagttcgagccagagagattcttgacatctaatagagaattggatgttggcgggcagagttacaagttttttccatttgggttgggacgaaggtcatgccccgcaatccccctaggtatgaggatggtgcactatctcctagtcaggtttttgcacagctttgacttggcaagaccatcgagtcaagatgtggacatgaccgagagcaatggattggtcaatcacaaagccacccctcttgaagtcaatatcattcctaggcttcataaatctctatatgaagtggatcatatagggactgataattagtacattgttcgtggccactgagttaaacaaaacaatgccgggtctgttccatgattttaaatttgttatgctatttgtggaagattaatttcatgaaaataagtattttggaatatggtggttatcgt

SEQ ID NO: 107230 - protein, 536 aa, Arabidopsis thaliana
  peptide (1)..(536): Ceres Seq. ID no. 13621778
IKHKSNQPYMDLIMLFLLSALFIFPVLILIKSRLRPKNKKSTAPMVPGAWPLLGHLHLFDTVNPTHVTFGAMADVYGPVFMAKLGSIKVMIINSKEVAKEIYTVHDKLLERPELTASKLLGYNDSFLTFSPYGLYWREIRKIAVSELFSTSGVDMHMVSRAREADLAFRALYVRWEKRGKPKEGVLVDMKQEFIDLTANISLMMVSGKRYFGENPNCEVKEARRCGKLIREFLDYFALFLLSDVAPVLGFLDWKTKRGMKRTAKGLDKVAEGWIEEHKNKRSDHGRSENDYLDILIKILGQDKIPGLSDTHTKIKALCLNLVLAGSETAIVVLVWAVSLLLNNPHVLRKAQEELDSKIGKERVVEELDIKDLVYLQAIVKETFRLYPPVPLVAYRAVVEDFDIAFCKCHVPAGTQLMVSAWKIHRDPNVWSNPEQFEPERFLTSNRELDVGGQSYKFFPFGLGRRSCPAIPLGMRMVHYLLVRFLHSFDLARPSSQDVDMTESNGLVNHKATPLEVNIIPRLHKSLYEVDHIGTDN

SEQ ID NO: 107231 - protein, 527 aa, Arabidopsis thaliana
  peptide (1)..(527): Ceres Seq. ID no. 13621779
MDLIMLFLLSALFIFPVLILIKSRLRPKNKKSTAPMVPGAWPLLGHLHLFDTVNPTHVTFGAMADVYGPVFMAKLGSIKVMIINSKEVAKEIYTVHDKLLERPELTASKLLGYNDSFLTFSPYGLYWREIRKIAVSELFSTSGVDMHMVSRAREADLAFRALYVRWEKRGKPKEGVLVDMKQEFIDLTANISLMMVSGKRYFGENPNCEVKEARRCGKLIREFLDYFALFLLSDVAPVLGFLDWKTKRGMKRTAKGLDKVAEGWIEEHKNKRSDHGRSENDYLDILIKILGQDKIPGLSDTHTKIKALCLNLVLAGSETAIVVLVWAVSLLLNNPHVLRKAQEELDSKIGKERVVEELDIKDLVYLQAIVKETFRLYPPVPLVAYRAVVEDFDIAFCKCHVPAGTQLMVSAWKIHRDPNVWSNPEQFEPERFLTSNRELDVGGQSYKFFPFGLGRRSCPAIPLGMRMVHYLLVRFLHSFDLARPSSQDVDMTESNGLVNHKATPLEVNIIPRLHKSLYEVDHIGTDN

SEQ ID NO: 107232 - protein, 523 aa, Arabidopsis thaliana
  peptide (1)..(523): Ceres Seq. ID no. 13621780
MLFLLSALFIFPVLILIKSRLRPKNKKSTAPMVPGAWPLLGHLHLFDTVNPTHVTFGAMADVYGPVFMAKLGSIKVMIINSKEVAKEIYTVHDKLLERPELTASKLLGYNDSFLTFSPYGLYWREIRKIAVSELFSTSGVDMHMVSRAREADLAFRALYVRWEKRGKPKEGVLVDMKQEFIDLTANISLMMVSGKRYFGENPNCEVKEARRCGKLIREFLDYFALFLLSDVAPVLGFLDWKTKRGMKRTAKGLDKVAEGWIEEHKNKRSDHGRSENDYLDILIKILGQDKIPGLSDTHTKIKALCLNLVLAGSETAIVVLVWAVSLLLNNPHVLRKAQEELDSKIGKERVVEELDIKDLVYLQAIVKETFRLYPPVPLVAYRAVVEDFDIAFCKCHVPAGTQLMVSAWKIHRDPNVWSNPEQFEPERFLTSNRELDVGGQSYKFFPFGLGRRSCPAIPLGMRMVHYLLVRFLHSFDLARPSSQDVDMTESNGLVNHKATPLEVNIIPRLHKSLYEVDHIGTDN

SEQ ID NO: 107233 - DNA, 1890 bp, Arabidopsis thaliana
  misc_feature (1)..(1890): Ceres Seq. ID no. 13621789
  misc_feature (1)..(1890): Ortholog of  Ceres SEQ ID NO 14301676 as cited in SEQ ID NO 67423
atttctcataaaacaaaaattcgagacctcctctccacttcgaaatttcattttttttttctcaacagagtaaatttggctcttatgcacctgtcgtgtgaatcctgatctcgctttagattgtggaagccttcgacacatttcccattttgaatttgtcttcttcttcttcttcctttagtttttggggatatttcaccatcctcgttgaaatcagtgtgattcttcttcgtatacaatgacgaaattgagatcgaaatggttaggtttaagatctgtaaccatcttcttaatcaatttctctctagcttttgctttcgtttccgctgagagaagaggaaaatctctgaggttaagtacagacgaaacgcgggaaaatgaatcaagtttcttccttaaagctatcaattttctatgggaatctgatcaaataggttatcgtcatgtttggcctgaatttgagtttaattggcaaattgtattgggaacacttgttggattctttggagctgcgtttggtagtgtaggtggtgttggtggtggtgggattttcgtacctatgcttagtttgattattgggtttgatcctaaatcagctacagctatttcaaaatgtatgattatgggtgcttctgtgtccactgtgtattacaatcttagattgaggcatccaacacttgacatgcctatcattgattatgatctcgctttactgatccagcctatgcttatgcttgggattagtattggtgttgcttttaatgtgatttttccagattggttggttacagttctactcatcgtcctctttcttggcacgtcaacaaaggcgttcttgaagggttctgagacttggaacaaggagactatagagaaaaaggaggctgctaaacgtttagagtcaaatggtgtatctggcacagaagtggaatacgtgcctcttcccgcagccccgagcacgaaccctggaaacaaaaagaaagaagaagtaagtattattgaaaatgtatactggaaggaactgggacttctcgtgtttgtctggattgtgttcctggcgctgcagatatccaagcaaaatctggctaattgttcagtagcatattgggtcataaatctgttacagattccggttgcagttggtgtatcaggctatgaagcagtagctttgtaccagggtagaagaatcattgcgtctaagggacaaggagactcgaatttcaccgttggtcagcttgttatgtattgtacatttggcataatagcaggcatagtcggtggtttacttggtttaggcggaggtttcatcatgggtccattgttcttggagctcggtgtcccaccacaggtctcaagtgccacagccacttttgcaatgactttctcatcatccatgtctgttgtagaatactatcttctcaaacgattccctgttccatatgctttgtaccttgtgggagtggcaacaattgcagcttgggttggacagcatgtagtcagaaggctaatcgcagccatcggccgcgcatctctcatcatcttcatcctcgcgtccatgatctttatcagtgcgatatcgcttggtggcgtgggaatagtgaatatgatcggcaaaatccaacggcatgagtacatgggtttcgagaacctttgcaagtacggtggctgacgttgtacttagcatgtagcttgttaagtgttaaacttataaagcttcattcttgatggcaagacttatggtcttttgattgtgtcttgtgtcattttttaaatttgaaaatcgaattgtataattactacttacttagtagtagtggtactaatttttttcttttcttttttggctgaattatggttggaaatctaatctatgtcaatataagtgattga

SEQ ID NO: 107234 - protein, 476 aa, Arabidopsis thaliana
  peptide (1)..(476): Ceres Seq. ID no. 13621790
MTKLRSKWLGLRSVTIFLINFSLAFAFVSAERRGKSLRLSTDETRENESSFFLKAINFLWESDQIGYRHVWPEFEFNWQIVLGTLVGFFGAAFGSVGGVGGGGIFVPMLSLIIGFDPKSATAISKCMIMGASVSTVYYNLRLRHPTLDMPIIDYDLALLIQPMLMLGISIGVAFNVIFPDWLVTVLLIVLFLGTSTKAFLKGSETWNKETIEKKEAAKRLESNGVSGTEVEYVPLPAAPSTNPGNKKKEEVSIIENVYWKELGLLVFVWIVFLALQISKQNLANCSVAYWVINLLQIPVAVGVSGYEAVALYQGRRIIASKGQGDSNFTVGQLVMYCTFGIIAGIVGGLLGLGGGFIMGPLFLELGVPPQVSSATATFAMTFSSSMSVVEYYLLKRFPVPYALYLVGVATIAAWVGQHVVRRLIAAIGRASLIIFILASMIFISAISLGGVGIVNMIGKIQRHEYMGFENLCKYGG

SEQ ID NO: 107235 - protein, 369 aa, Arabidopsis thaliana
  peptide (1)..(369): Ceres Seq. ID no. 13621791
MLSLIIGFDPKSATAISKCMIMGASVSTVYYNLRLRHPTLDMPIIDYDLALLIQPMLMLGISIGVAFNVIFPDWLVTVLLIVLFLGTSTKAFLKGSETWNKETIEKKEAAKRLESNGVSGTEVEYVPLPAAPSTNPGNKKKEEVSIIENVYWKELGLLVFVWIVFLALQISKQNLANCSVAYWVINLLQIPVAVGVSGYEAVALYQGRRIIASKGQGDSNFTVGQLVMYCTFGIIAGIVGGLLGLGGGFIMGPLFLELGVPPQVSSATATFAMTFSSSMSVVEYYLLKRFPVPYALYLVGVATIAAWVGQHVVRRLIAAIGRASLIIFILASMIFISAISLGGVGIVNMIGKIQRHEYMGFENLCKYGG

SEQ ID NO: 107236 - protein, 350 aa, Arabidopsis thaliana
  peptide (1)..(350): Ceres Seq. ID no. 13621792
MIMGASVSTVYYNLRLRHPTLDMPIIDYDLALLIQPMLMLGISIGVAFNVIFPDWLVTVLLIVLFLGTSTKAFLKGSETWNKETIEKKEAAKRLESNGVSGTEVEYVPLPAAPSTNPGNKKKEEVSIIENVYWKELGLLVFVWIVFLALQISKQNLANCSVAYWVINLLQIPVAVGVSGYEAVALYQGRRIIASKGQGDSNFTVGQLVMYCTFGIIAGIVGGLLGLGGGFIMGPLFLELGVPPQVSSATATFAMTFSSSMSVVEYYLLKRFPVPYALYLVGVATIAAWVGQHVVRRLIAAIGRASLIIFILASMIFISAISLGGVGIVNMIGKIQRHEYMGFENLCKYGG

SEQ ID NO: 107237 - DNA, 1391 bp, Arabidopsis thaliana
  misc_feature (1)..(1391): Ceres Seq. ID no. 13621797
  misc_feature (1)..(1391): Ortholog of  Ceres SEQ ID NO 15171606 as cited in SEQ ID NO 57214
  misc_feature (1)..(1391): Ortholog of  Ceres SEQ ID NO 13596921 as cited in SEQ ID NO 62368
  misc_feature (1)..(1391): Ortholog of  Ceres SEQ ID NO 13600673 as cited in SEQ ID NO 0
aatctctcaactcaaaactcaacattttctgaagaaagtcgcaaactttacccaaaacccagtttctaattttagcaacaaaatcaaaaatatctacttttgtttctcgaaagttacgaaattcatacaatctagcttatctctgagcttatggatttgagataaacaacgaaaatggaagaactgaaagtggaaatggaggaagaaacggtgacgtttactggttctgtagcggcttcttcatctgtaggatcctcttcctctcctagaccaatggaagggcttaacgaaacagggccaccaccgtttctgactaagacttacgaaatggtggaagatccggcgacggacacggtggtttcttggagtaatggtcgtaacagctttgtggtgtgggattctcataagttctcaacaactctccttccacgttacttcaagcatagcaatttctcaagttttattcgtcagctcaatacttatggattcagaaagattgatccagatagatgggaatttgcaaatgaagggtttttagcaggacaaaagcatctcttgaagaacatcaaaagaaggaggaacatgggtttgcagaatgtgaatcagcaaggatctgggatgtcatgtgttgaggttgggcaatacggtttcgacggggaggttgagaggttgaagagggatcatggtgtgcttgtagctgaggtagttaggttgaggcaacagcaacacagctccaagagtcaagttgcagctatggagcaacggttgcttgttactgagaagagacagcagcagatgatgacgttccttgccaaggcgttgaacaatccgaactttgttcagcagtttgcggttatgagtaaagagaagaagagtttgtttggtttggatgtggggaggaaacggaggcttacttctactccaagcttggggactatggaggagaatttgttacatgatcaagagtttgatagaatgaaggatgatatggaaatgttgttcgctgcagcaatcgatgatgaggcgaataattcgatgcctactaaggaggaacaatgtttggaggctatgaatgtgatgatgagagatggtaatttggaagcagcgttggatgtgaaagtggaagatttggttggttcgcctttggattgggacagccaagatctacatgacatggttgatcaaatgggttttcttggttcggaaccttaactatacggtattaacacatctacttgttgcggtctaagttatggtaatgctaccacttttatttactagttgaattgtttgtttgtttgttttgactcaaggaagagtcattgagtgtggtttgttgtacatttgtgttttcttgttctgatgaataaaaaactctgatttcgtttgac

SEQ ID NO: 107238 - protein, 345 aa, Arabidopsis thaliana
  peptide (1)..(345): Ceres Seq. ID no. 13621798
MEELKVEMEEETVTFTGSVAASSSVGSSSSPRPMEGLNETGPPPFLTKTYEMVEDPATDTVVSWSNGRNSFVVWDSHKFSTTLLPRYFKHSNFSSFIRQLNTYGFRKIDPDRWEFANEGFLAGQKHLLKNIKRRRNMGLQNVNQQGSGMSCVEVGQYGFDGEVERLKRDHGVLVAEVVRLRQQQHSSKSQVAAMEQRLLVTEKRQQQMMTFLAKALNNPNFVQQFAVMSKEKKSLFGLDVGRKRRLTSTPSLGTMEENLLHDQEFDRMKDDMEMLFAAAIDDEANNSMPTKEEQCLEAMNVMMRDGNLEAALDVKVEDLVGSPLDWDSQDLHDMVDQMGFLGSEP

SEQ ID NO: 107239 - protein, 338 aa, Arabidopsis thaliana
  peptide (1)..(338): Ceres Seq. ID no. 13621799
MEEETVTFTGSVAASSSVGSSSSPRPMEGLNETGPPPFLTKTYEMVEDPATDTVVSWSNGRNSFVVWDSHKFSTTLLPRYFKHSNFSSFIRQLNTYGFRKIDPDRWEFANEGFLAGQKHLLKNIKRRRNMGLQNVNQQGSGMSCVEVGQYGFDGEVERLKRDHGVLVAEVVRLRQQQHSSKSQVAAMEQRLLVTEKRQQQMMTFLAKALNNPNFVQQFAVMSKEKKSLFGLDVGRKRRLTSTPSLGTMEENLLHDQEFDRMKDDMEMLFAAAIDDEANNSMPTKEEQCLEAMNVMMRDGNLEAALDVKVEDLVGSPLDWDSQDLHDMVDQMGFLGSEP

SEQ ID NO: 107240 - protein, 312 aa, Arabidopsis thaliana
  peptide (1)..(312): Ceres Seq. ID no. 13621800
MEGLNETGPPPFLTKTYEMVEDPATDTVVSWSNGRNSFVVWDSHKFSTTLLPRYFKHSNFSSFIRQLNTYGFRKIDPDRWEFANEGFLAGQKHLLKNIKRRRNMGLQNVNQQGSGMSCVEVGQYGFDGEVERLKRDHGVLVAEVVRLRQQQHSSKSQVAAMEQRLLVTEKRQQQMMTFLAKALNNPNFVQQFAVMSKEKKSLFGLDVGRKRRLTSTPSLGTMEENLLHDQEFDRMKDDMEMLFAAAIDDEANNSMPTKEEQCLEAMNVMMRDGNLEAALDVKVEDLVGSPLDWDSQDLHDMVDQMGFLGSEP

SEQ ID NO: 107241 - DNA, 2166 bp, Arabidopsis thaliana
  misc_feature (1)..(2166): Ceres Seq. ID no. 13621801
  misc_feature (1)..(2166): Ortholog of  Ceres SEQ ID NO 13594037 as cited in SEQ ID NO 55666
  misc_feature (1)..(2166): Ortholog of  Ceres SEQ ID NO 13657707 as cited in SEQ ID NO 66407
gagagaagacaagaaagagccaaaaataaaacgtaaaaaggattcatctttccttttaacctctctgccttggccgccttctaaggcagaggagattcatttctttctctccccaagaaaaacaatacaaaatttcagaaaatttatagtaatttcagtatggcgtttcaggattttgacaagatccaagaacgtgtaaacgccaataggaaacgtaaattcaggaagaggatcatcgttggaacggtctctttgcttgtggttgttgctgccattgttggaggagcttttgcttatgttgcttatgagaaaagaaatgaacaacaacaacaacaacaacaagcaaagaaccacaacaaaagcggtagcggcaacaacgtcgtcaaggatagcgacaagaagagcccgagcccaccaaccccgagccaaaaagcgcccgtttccgcagcgcagtcagtgaaacccggtcagggtgataagattatccaaactctctgcagttcaacgctttacatgcaaatctgcgagaaaacgctcaaaaacagaacagacaagggttttgctttggacaatccgacgacctttttgaagtctgccattgaagctgtcaatgaagatcttgaccttgttttagagaaggtcttgagtctcaagactgaaaaccaggatgataaagatgcgatcgagcaatgtaagttgcttgtcgaagacgcaaaggaggaaaccgtcgcgtcgctgaacaaaatcaacgtcacagaagtcaacagcttcgaaaaagtagttcctgacctggaaagttggctaagcgcggtcatgtcttatcaggagacatgccttgacgggtttgaagaagggaacttaaaatctgaagtgaagacgagcgtcaattcttctcaagttctgaccagcaattccctcgcgttgatcaaaacatttaccgagaatctctctccggtaatgaaggtcgtagaacgacatcttcttgatgacatcccgtcttgggtaagcaacgatgatagaagaatgttaagggctgttgatgtgaaggctttgaagccaaacgcaactgtggccaaagatggcagtggggatttcacaaccattaatgatgcgctgagagcaatgcctgagaaatatgagggaaggtacattatctacgtcaaacaaggcatttatgacgaatatgtgaccgttgataagaagaaggcgaatctcactatggtcggagatggatcacagaagacaattgtgaccggtaacaaaagccatgcaaagaaaatccgcacttttctcacggcaacgttcgttgcacagggagaagggttcatggcacagtcaatggggttccggaacacggctgggccagagggacatcaagcagtcgcaatacgtgtccaatccgatcgatcaattttcctcaactgccgatttgaaggttaccaagacacattgtatgcttacacgcaccgtcaatactacagaagttgtgtgatagttggaacaatcgacttcatattcggagatgcagccgccatcttccagaactgtaacatcttcatcagaaaaggcttaccaggacaaaagaacacggtgaccgctcaaggtcgtgttgacaagtttcagacgactggtttcgtagtacacaattgtaaaatcgctgcaaatgaagaccttaagccagtaaaggaagagtacaagagctacctcgggcgaccgtggaagaactactctcgaacgatcataatggaatctaaaatcgagaatgtgattgaccctgttggatggttgagatggcaagagacggatttcgcgatagacacgttgtactacgcggagtacaataacaaaggatcaagtggagatacaacttcaagagttaaatggcctggatttaaggtcataaacaaggaggaggctttgaactatactgttggacccttcttacaaggagattggatcagtgcctcaggctctcccgttaagttgggtctttatgatgcttgatgacaacttgttgtttgcaaagaaagccatgtggatatagaacttcatccatggaaatttacttggaaaatcggatactagaacatagtgtgctaagagaatgtgttgtatcaaatttatatcgatttgtgctgaaaatatttttggaaggaagcatattat

SEQ ID NO: 107242 - protein, 614 aa, Arabidopsis thaliana
  peptide (1)..(614): Ceres Seq. ID no. 13621802
MAFQDFDKIQERVNANRKRKFRKRIIVGTVSLLVVVAAIVGGAFAYVAYEKRNEQQQQQQQAKNHNKSGSGNNVVKDSDKKSPSPPTPSQKAPVSAAQSVKPGQGDKIIQTLCSSTLYMQICEKTLKNRTDKGFALDNPTTFLKSAIEAVNEDLDLVLEKVLSLKTENQDDKDAIEQCKLLVEDAKEETVASLNKINVTEVNSFEKVVPDLESWLSAVMSYQETCLDGFEEGNLKSEVKTSVNSSQVLTSNSLALIKTFTENLSPVMKVVERHLLDDIPSWVSNDDRRMLRAVDVKALKPNATVAKDGSGDFTTINDALRAMPEKYEGRYIIYVKQGIYDEYVTVDKKKANLTMVGDGSQKTIVTGNKSHAKKIRTFLTATFVAQGEGFMAQSMGFRNTAGPEGHQAVAIRVQSDRSIFLNCRFEGYQDTLYAYTHRQYYRSCVIVGTIDFIFGDAAAIFQNCNIFIRKGLPGQKNTVTAQGRVDKFQTTGFVVHNCKIAANEDLKPVKEEYKSYLGRPWKNYSRTIIMESKIENVIDPVGWLRWQETDFAIDTLYYAEYNNKGSSGDTTSRVKWPGFKVINKEEALNYTVGPFLQGDWISASGSPVKLGLYDA

SEQ ID NO: 107243 - protein, 496 aa, Arabidopsis thaliana
  peptide (1)..(496): Ceres Seq. ID no. 13621803
MQICEKTLKNRTDKGFALDNPTTFLKSAIEAVNEDLDLVLEKVLSLKTENQDDKDAIEQCKLLVEDAKEETVASLNKINVTEVNSFEKVVPDLESWLSAVMSYQETCLDGFEEGNLKSEVKTSVNSSQVLTSNSLALIKTFTENLSPVMKVVERHLLDDIPSWVSNDDRRMLRAVDVKALKPNATVAKDGSGDFTTINDALRAMPEKYEGRYIIYVKQGIYDEYVTVDKKKANLTMVGDGSQKTIVTGNKSHAKKIRTFLTATFVAQGEGFMAQSMGFRNTAGPEGHQAVAIRVQSDRSIFLNCRFEGYQDTLYAYTHRQYYRSCVIVGTIDFIFGDAAAIFQNCNIFIRKGLPGQKNTVTAQGRVDKFQTTGFVVHNCKIAANEDLKPVKEEYKSYLGRPWKNYSRTIIMESKIENVIDPVGWLRWQETDFAIDTLYYAEYNNKGSSGDTTSRVKWPGFKVINKEEALNYTVGPFLQGDWISASGSPVKLGLYDA

SEQ ID NO: 107244 - protein, 396 aa, Arabidopsis thaliana
  peptide (1)..(396): Ceres Seq. ID no. 13621804
MSYQETCLDGFEEGNLKSEVKTSVNSSQVLTSNSLALIKTFTENLSPVMKVVERHLLDDIPSWVSNDDRRMLRAVDVKALKPNATVAKDGSGDFTTINDALRAMPEKYEGRYIIYVKQGIYDEYVTVDKKKANLTMVGDGSQKTIVTGNKSHAKKIRTFLTATFVAQGEGFMAQSMGFRNTAGPEGHQAVAIRVQSDRSIFLNCRFEGYQDTLYAYTHRQYYRSCVIVGTIDFIFGDAAAIFQNCNIFIRKGLPGQKNTVTAQGRVDKFQTTGFVVHNCKIAANEDLKPVKEEYKSYLGRPWKNYSRTIIMESKIENVIDPVGWLRWQETDFAIDTLYYAEYNNKGSSGDTTSRVKWPGFKVINKEEALNYTVGPFLQGDWISASGSPVKLGLYDA

SEQ ID NO: 107245 - DNA, 760 bp, Arabidopsis thaliana
  misc_feature (1)..(760): Ceres Seq. ID no. 13621805
  misc_feature (1)..(760): Ortholog of  Ceres SEQ ID NO 14307324 as cited in SEQ ID NO 54131
  misc_feature (1)..(760): Ortholog of  Ceres SEQ ID NO 14303336 as cited in SEQ ID NO 54567
aacacaaacatcttgtttggtcctatttctcagatcgatcatggctaactctgtgatggcaaccgaacagctctgctacatcccttgcaacttttgcaacataattcttgcggtgaatgtcccatgcagcagcctgttcgacatcgtgaccgtccgatgcggtcactgcaccaatctgtggtctgtaaacatggcagctgctcttcagtcgctttcacgccctaatttccaggcaacaaactatgcagtaccagagtatggatcctcctcaagaagccacacaaaaatcccttcaagaatttcaactcgtaccataactgagcaacggattgtaaaccgtcctccggagaagcggcagcgagtaccttctgcgtacaatcaattcataaaagaggaaattcagaggattaaggcgaataatccagacataagccacagagaagcattcagcactgctgccaagaattgggcacactttcctcatattcactttggtctaatgctggagagtaacaagcaagctaagatagcctaataattctcgagattaatggtaatataagtgttggagacttcgaagtaacaagagctgagaaggcaactatatgtattgtatgatctttggaaccgtatgtatgtaagtgaagatgtctatctttaaaaccatctatagttataatttagtaaaagcttcttttaatttatttctatggcccttgttgtatggttcgtctcacaagatttatgagttctttcggat

SEQ ID NO: 107246 - protein, 177 aa, Arabidopsis thaliana
  peptide (1)..(177): Ceres Seq. ID no. 13621806
TQTSCLVLFLRSIMANSVMATEQLCYIPCNFCNIILAVNVPCSSLFDIVTVRCGHCTNLWSVNMAAALQSLSRPNFQATNYAVPEYGSSSRSHTKIPSRISTRTITEQRIVNRPPEKRQRVPSAYNQFIKEEIQRIKANNPDISHREAFSTAAKNWAHFPHIHFGLMLESNKQAKIA

SEQ ID NO: 107247 - protein, 164 aa, Arabidopsis thaliana; identical to SEQ ID NO: 71054
  peptide (1)..(164): Ceres Seq. ID no. 13621807

SEQ ID NO: 107248 - protein, 159 aa, Arabidopsis thaliana; identical to SEQ ID NO: 71055
  peptide (1)..(159): Ceres Seq. ID no. 13621808

SEQ ID NO: 107249 - DNA, 879 bp, Arabidopsis thaliana
  misc_feature (1)..(879): Ceres Seq. ID no. 13621809
  misc_feature (1)..(879): Ortholog of  Ceres SEQ ID NO 13589868 as cited in SEQ ID NO 55521
  misc_feature (1)..(879): Ortholog of  Ceres SEQ ID NO 15226426 as cited in SEQ ID NO 55985
  misc_feature (1)..(879): Ortholog of  Ceres SEQ ID NO 14312250 as cited in SEQ ID NO 59168
  misc_feature (1)..(879): Ortholog of  Ceres SEQ ID NO 15173326 as cited in SEQ ID NO 63793
  misc_feature (1)..(879): Ortholog of  Ceres SEQ ID NO 12617659 as cited in SEQ ID NO 65286
  misc_feature (1)..(879): Ortholog of  Ceres SEQ ID NO 12780566 as cited in SEQ ID NO 65822
  misc_feature (1)..(879): Ortholog of  Ceres SEQ ID NO 15179979 as cited in SEQ ID NO 0
aaagaagaagaaaagatctgagaggtggtcgaatgatccaagagaagaagaacaatctctcttagatcgtttgatctgatccaatcgaagaagaagatgggaatcttattcacgcggatgttctcttccgtctttggtaacaaagaagctcgaatcctcgtcctcggtctcgacaatgctggaaaaaccacaatcctctatcggcttcagatgggggaagttgtctctacgattccgactattggatttaacgttgagactgtgcagtacaacaatatcaagtttcaggtctgggatttaggtggacaaacaagcatcaggccatactggcgatgctatttcccgaatacacaagcagtgatctatgttgttgactcgagtgatacagatagaatcggggtggcgaaagaggagtttcatgcaattttagaggaagatgaattgaaaggtgcggtggttctgatatttgcaaacaagcaggatcttcccggtgcactcgatgatgcggctgttacagaagccttggagttgcataagataaagagtcgtcaatgggcaatcttcaaaacttgtgctgtgaaaggcgagggacttttcgagggattggactggttgagtaatacattgaagtcgggaagtggctaaaatcatcgtcatacaccaatctgtcacatttctcaagagtgtaactttgatcatttttacttattggtttgtttagtatcttttttttatcttagttcttcatcttaaagagttaatatcaatgacatgttcacttaatattctctttttgttgttttgtttcattctgaaagaaaaaacccaacacagatttttgattgagacccataaggggtaatatcatcactttttaac

SEQ ID NO: 107250 - protein, 182 aa, Arabidopsis thaliana; identical to SEQ ID NO: 26250
  peptide (1)..(182): Ceres Seq. ID no. 13621810

SEQ ID NO: 107251 - protein, 175 aa, Arabidopsis thaliana; identical to SEQ ID NO: 26251
  peptide (1)..(175): Ceres Seq. ID no. 13621811

SEQ ID NO: 107252 - protein, 144 aa, Arabidopsis thaliana; identical to SEQ ID NO: 26252
  peptide (1)..(144): Ceres Seq. ID no. 13621812

SEQ ID NO: 107253 - DNA, 2025 bp, Arabidopsis thaliana
  misc_feature (1)..(2025): Ceres Seq. ID no. 13621817
  misc_feature (1)..(2025): Ortholog of  Ceres SEQ ID NO 15224811 as cited in SEQ ID NO 0
  misc_feature (1)..(2025): Ortholog of  Ceres SEQ ID NO 15226156 as cited in SEQ ID NO 0
tctatagacatcgttgataaaaatgagtacaccaggctcttctagatccattccattcaaatcgaagaaacgattggtgatggattcgccgtcttcgaaatctcaaaccgggaatccaaatccgtcttctgtagcattgcctacgccggaaaaaccacttgagaacatgcttagtagatcgagaaaccgatctgtggctttatcagtgaaagaaattcgtcaagccgctggatctcgtcgcagatctgaagatccggttgcttcatctgccaaaagcaggctctttttcgattcatcatcatcttctccttcaaaacgtaaaagctctaacaaaaatgcagagaaagagaaacttccggagaagtacgagaatctgggaaagttctttgaagcattggataattcgatgttgttatcgaaattaagaggttctaagccaacattctccaacatttctaaacaaatcgagcatttaaccgagaggaggttttgttatagtcacttggctcaaataaagcatatattgcctgaagcgattgagattaagagagtattgatacatgatgaaactacttgctgtatgaaaccggaccttcatgttacgctcaatgccgatgctgttgaatacaacgacaagtcgaaatcggaaagtaagaaaatcgctcttcggaaagtgtttcgggctagacttgcggattttgttaaagctcaccctcagggtgatgaagttccagaggaaccgcttcctgagcccttcaatagaaggaaaccagttgaaaactcaaatgttgaagtcaagcgtgttagttctctcatggaagagatggcttctattccagcatctaaattgttttcatctcccatcacatcaacgccagtcaaaacaacttcaagtctggctaaaccaacttcgtctcagattaacattgctccaactccaaccaaaccaacttcaactcctgctaaacagactttgtctgagattaatatattgccaactccagtcaaaccagtgtcaactctggctaagtttccttcaacaccggcgattattgactcaacaccagtcattactgcaactccacctgaatttgcttcaactcctgcccggctgatgagtacttctctggcagctcgtccgctgaaaagaagcaacggtcatacaaatccagatgatatttctgctgacccaccgactaagctcgtgaggcgttccttgtctctgaactttgattcttatcctgaggatgagagaactatggatttcacagatgatatacccattgatcaagtaccagaagaagatgtatccagcgatgatgaaatactcagcatacttcctgataaacttcgacatgcgataaaagaacaagagaggaaagcgattgaggatcaaaatccagcaatctctctggcaaaaagaaggcgaaagatgatcgcttgtctacctaaacttttcaatgtcatccattacttaattcaatcgataaggcgttgggttatcacaaaagaagagcttgtgcacaagatcattgccggtcactctgatattactgacagaaaggaagttgaagaacaactaatcttactgcaagaaattgtccctgaatggatgtctgagaaaaaatcatcaagtggagatgttctagtatgcataaacaagttggcatctcctctaacaatccgatcacgtcttgaagaagaaaacaagcaagagatggctccactgctttcttgagaccgtggttccatcggctgcggttactttgggttctaacttatttttggactgccaaatatgttatagtctattcatgagacagatgtgtagagactactaagttataaagttcctaagtaaagtaaaagggtgaaaacaagtagatgacaaactatttaggaaggtgttttcatctttttctgaattatgacaatgaggttatttctctatcaataaagagtaattttatgcattttgtaacagaattctttatagaacaagactataaggaccgttgttgtgtt

SEQ ID NO: 107254 - protein, 571 aa, Arabidopsis thaliana
  peptide (1)..(571): Ceres Seq. ID no. 13621818
MSTPGSSRSIPFKSKKRLVMDSPSSKSQTGNPNPSSVALPTPEKPLENMLSRSRNRSVALSVKEIRQAAGSRRRSEDPVASSAKSRLFFDSSSSSPSKRKSSNKNAEKEKLPEKYENLGKFFEALDNSMLLSKLRGSKPTFSNISKQIEHLTERRFCYSHLAQIKHILPEAIEIKRVLIHDETTCCMKPDLHVTLNADAVEYNDKSKSESKKIALRKVFRARLADFVKAHPQGDEVPEEPLPEPFNRRKPVENSNVEVKRVSSLMEEMASIPASKLFSSPITSTPVKTTSSLAKPTSSQINIAPTPTKPTSTPAKQTLSEINILPTPVKPVSTLAKFPSTPAIIDSTPVITATPPEFASTPARLMSTSLAARPLKRSNGHTNPDDISADPPTKLVRRSLSLNFDSYPEDERTMDFTDDIPIDQVPEEDVSSDDEILSILPDKLRHAIKEQERKAIEDQNPAISLAKRRRKMIACLPKLFNVIHYLIQSIRRWVITKEELVHKIIAGHSDITDRKEVEEQLILLQEIVPEWMSEKKSSSGDVLVCINKLASPLTIRSRLEEENKQEMAPLLS

SEQ ID NO: 107255 - protein, 552 aa, Arabidopsis thaliana
  peptide (1)..(552): Ceres Seq. ID no. 13621819
MDSPSSKSQTGNPNPSSVALPTPEKPLENMLSRSRNRSVALSVKEIRQAAGSRRRSEDPVASSAKSRLFFDSSSSSPSKRKSSNKNAEKEKLPEKYENLGKFFEALDNSMLLSKLRGSKPTFSNISKQIEHLTERRFCYSHLAQIKHILPEAIEIKRVLIHDETTCCMKPDLHVTLNADAVEYNDKSKSESKKIALRKVFRARLADFVKAHPQGDEVPEEPLPEPFNRRKPVENSNVEVKRVSSLMEEMASIPASKLFSSPITSTPVKTTSSLAKPTSSQINIAPTPTKPTSTPAKQTLSEINILPTPVKPVSTLAKFPSTPAIIDSTPVITATPPEFASTPARLMSTSLAARPLKRSNGHTNPDDISADPPTKLVRRSLSLNFDSYPEDERTMDFTDDIPIDQVPEEDVSSDDEILSILPDKLRHAIKEQERKAIEDQNPAISLAKRRRKMIACLPKLFNVIHYLIQSIRRWVITKEELVHKIIAGHSDITDRKEVEEQLILLQEIVPEWMSEKKSSSGDVLVCINKLASPLTIRSRLEEENKQEMAPLLS

SEQ ID NO: 107256 - protein, 523 aa, Arabidopsis thaliana
  peptide (1)..(523): Ceres Seq. ID no. 13621820
MLSRSRNRSVALSVKEIRQAAGSRRRSEDPVASSAKSRLFFDSSSSSPSKRKSSNKNAEKEKLPEKYENLGKFFEALDNSMLLSKLRGSKPTFSNISKQIEHLTERRFCYSHLAQIKHILPEAIEIKRVLIHDETTCCMKPDLHVTLNADAVEYNDKSKSESKKIALRKVFRARLADFVKAHPQGDEVPEEPLPEPFNRRKPVENSNVEVKRVSSLMEEMASIPASKLFSSPITSTPVKTTSSLAKPTSSQINIAPTPTKPTSTPAKQTLSEINILPTPVKPVSTLAKFPSTPAIIDSTPVITATPPEFASTPARLMSTSLAARPLKRSNGHTNPDDISADPPTKLVRRSLSLNFDSYPEDERTMDFTDDIPIDQVPEEDVSSDDEILSILPDKLRHAIKEQERKAIEDQNPAISLAKRRRKMIACLPKLFNVIHYLIQSIRRWVITKEELVHKIIAGHSDITDRKEVEEQLILLQEIVPEWMSEKKSSSGDVLVCINKLASPLTIRSRLEEENKQEMAPLLS

SEQ ID NO: 107257 - DNA, 1249 bp, Arabidopsis thaliana
  misc_feature (1)..(1249): Ceres Seq. ID no. 13621829
  misc_feature (1)..(1249): Ortholog of  Ceres SEQ ID NO 13579918 as cited in SEQ ID NO 64644
  misc_feature (1)..(1249): Ortholog of  Ceres SEQ ID NO 13654122 as cited in SEQ ID NO 68192
gtgtgagtaatttagaaaagccctaattttaaaataagatagagattatgaagactaagaacgtgaaactcttattcttcttcttctccgtctccctccttctcatcgccgtcgtcaacgccgccgaaggccattcacatggtggaccaaaatgtgaatgctcacacgaagacgaccatgaaaacaaagccggagctcggaaatacaagatcgccgcaattcctacagttctaatagccggcataatcggagttcttttccctttgttaggcaaagtcttcccttctttgcgtccagaaacatgtttcttcttcgtcacgaaagctttcgcagccggagttatcttggctaccggatttatgcatgtcttgcctgaggcttacgagatgcttaactctccatgtttgacatctgaagcatgggaatttccgttcaccggatttattgcgatgattgctgcgatcttgacgttatccgttgatacatttgccacttcgagtttctataaatcgcattgcaaagcgtctaagagggtcagtgatggagaaaccggcgagtcctccgttgactccgagaaggtccaaattctccggactagagttattgcacaggtattggagttgggaataatagtacactcagtggtaataggaatatcactaggagcttcacagagcccagatgctgcaaaagctctgtttattgccttaatgtttcatcaatgcttcgaaggtctaggccttggtggttgtattgctcagggaaaattcaagtgtttgtcagtaacaatcatgtcgacgttcttcgcaataacgacaccgataggaatcgttgtgggaatgggaatagcaaattcttacgatgagtcttcaccaacggctctgatcgttcaaggagttttgaacgctgcatccgcaggcattctcatctacatgtctttggttgaccttctcgcagcagatttcacgcaccctaaaatgcaatccaatactgggcttcaaattatggcccatattgctctccttcttggtgctggcctcatgtctctattggctaaatgggcttgatagctctttaattcaactcttctagtttttgctcatggccttttatggccaccttgaattcgaattatttgttcttattttcccccttttcaatgatatttttgagatctctattttctgaaacacttcatgtactcatgtttaacattattacaattgtgtatattgatcagtgtccaagg

SEQ ID NO: 107258 - protein, 339 aa, Arabidopsis thaliana
  peptide (1)..(339): Ceres Seq. ID no. 13621830
MKTKNVKLLFFFFSVSLLLIAVVNAAEGHSHGGPKCECSHEDDHENKAGARKYKIAAIPTVLIAGIIGVLFPLLGKVFPSLRPETCFFFVTKAFAAGVILATGFMHVLPEAYEMLNSPCLTSEAWEFPFTGFIAMIAAILTLSVDTFATSSFYKSHCKASKRVSDGETGESSVDSEKVQILRTRVIAQVLELGIIVHSVVIGISLGASQSPDAAKALFIALMFHQCFEGLGLGGCIAQGKFKCLSVTIMSTFFAITTPIGIVVGMGIANSYDESSPTALIVQGVLNAASAGILIYMSLVDLLAADFTHPKMQSNTGLQIMAHIALLLGAGLMSLLAKWA

SEQ ID NO: 107259 - protein, 235 aa, Arabidopsis thaliana
  peptide (1)..(235): Ceres Seq. ID no. 13621831
MHVLPEAYEMLNSPCLTSEAWEFPFTGFIAMIAAILTLSVDTFATSSFYKSHCKASKRVSDGETGESSVDSEKVQILRTRVIAQVLELGIIVHSVVIGISLGASQSPDAAKALFIALMFHQCFEGLGLGGCIAQGKFKCLSVTIMSTFFAITTPIGIVVGMGIANSYDESSPTALIVQGVLNAASAGILIYMSLVDLLAADFTHPKMQSNTGLQIMAHIALLLGAGLMSLLAKWA

SEQ ID NO: 107260 - protein, 226 aa, Arabidopsis thaliana
  peptide (1)..(226): Ceres Seq. ID no. 13621832
MLNSPCLTSEAWEFPFTGFIAMIAAILTLSVDTFATSSFYKSHCKASKRVSDGETGESSVDSEKVQILRTRVIAQVLELGIIVHSVVIGISLGASQSPDAAKALFIALMFHQCFEGLGLGGCIAQGKFKCLSVTIMSTFFAITTPIGIVVGMGIANSYDESSPTALIVQGVLNAASAGILIYMSLVDLLAADFTHPKMQSNTGLQIMAHIALLLGAGLMSLLAKWA

SEQ ID NO: 107261 - DNA, 1949 bp, Arabidopsis thaliana
  misc_feature (1)..(1949): Ceres Seq. ID no. 13621833
  misc_feature (1)..(1949): Ortholog of  Ceres SEQ ID NO 15170209 as cited in SEQ ID NO 58562
  misc_feature (1)..(1949): Ortholog of  Ceres SEQ ID NO 14315134 as cited in SEQ ID NO 59476
  misc_feature (1)..(1949): Ortholog of  Ceres SEQ ID NO 12616332 as cited in SEQ ID NO 63449
  misc_feature (1)..(1949): Ortholog of  Ceres SEQ ID NO 13597498 as cited in SEQ ID NO 64648
  misc_feature (1)..(1949): Ortholog of  Ceres SEQ ID NO 14308053 as cited in SEQ ID NO 67790
acccctcctcttccactcttacgtcaaaaatacagagccagagaaagagaaagaaagagaccaagaatctatttaattccatctcttattatacaatacgaaactacagagcaccacttctctttcaatttctctcggactaattgaaaaatctcaactttattgttattaggaggctctgaagattgatgagctacttctttttgatgtatctgaatttaacctgatttttggttatgattaatcttatggagttgattggattaaattagctacttttactcctgaggaatctctattcttcctctggtagctgaagagaataaataatgtcgacgaagatcaaaggagagctttttccctccagaagtttagtatctaaaaaatggacatttttactctgctttgggagcttctgcttcggaatattattcaccgataggatgtggattattccggagtctaaagacatgcctcgaccatctgtaagtacagaagctgaaagattgaagctgatctctgagggctgtgatccgaaaaccctctaccagaaagaagtaaatcgtgatcctcaggcattgtttggagaagtttccaagactcataacgctatacagacattggataagactatttcaagcttagagatggagttagctgcagcaagatcggctcaggagtctttagtaaacggtgctcctatatctaatgatatggagaagaagcaattaccggggaaaagacggtatttgatggttgtagggattaatactgcttttagtagccgaaagagaagagattctgttcgaacaacttggatgccttcaggtgagaaaagaaagaagttggaagaagagaagggaattattatacggtttgtgattggtcatagtgccacggctggcggaattctagaccgatccattgaagcagaggacaagaagcatggagatttcttgagattggaccatgttgaaggataccttgagttatcaggcaaaacgaaaacatatttttctacagctgtttcgaagtgggatgcagagttctatgtcaaagtagatgatgatgttcatgtaaatatcgcaactcttggggaaactcttgttagacacaggaagaaacatcgagtctatctcggctgcatgaaatctggtccagtactatctcaaaaaggagttagataccatgagcctgagtattggaaatttggtgagaatggaaacaagtacttccgtcacgctactggacagttatacgccatttctagagacttggcttcttacatttcccttaatcagcatgttctgcacaaatatgcaaatgaggatgttacattaggtgcttggtttatcgggcttgatgtgacacatatcgatgatagaagactatgttgtggcactcctcctgattgtgaatggaaggcacaagcaggcaacatatgtgtagcttcattcgactggacgtgtagcggtatctgcagatcagctgatcggataaaagaggttcacaagcgatgtggtgaaccggaaaacgctatttggaaagccagattttgaggcccttccactacatatacatagatcatataaagaagtagttgttttcaaaccaaacgatcggtcatcaaatgaatgatcacccggaaaacaactcttctccttcttcttcatattctttatgaaccaagaagatagctacatttgttgtatatcatagtaacttgcatagtagagaggactatagagagataagtacgaaatgaaactctagcagagatagatagcgtttgcgtttgagaagcgtttccgattagtagaaggaaattacaaaccaaatgctgcagcaaacgcgattgcttctttctgattttggctgtttttgttttttgtgggagtgaagtagcttgtgggttttatttagatcaatgcaaagtaacgaatgttttt

SEQ ID NO: 107262 - protein, 409 aa, Arabidopsis thaliana
  peptide (1)..(409): Ceres Seq. ID no. 13621834
MSTKIKGELFPSRSLVSKKWTFLLCFGSFCFGILFTDRMWIIPESKDMPRPSVSTEAERLKLISEGCDPKTLYQKEVNRDPQALFGEVSKTHNAIQTLDKTISSLEMELAAARSAQESLVNGAPISNDMEKKQLPGKRRYLMVVGINTAFSSRKRRDSVRTTWMPSGEKRKKLEEEKGIIIRFVIGHSATAGGILDRSIEAEDKKHGDFLRLDHVEGYLELSGKTKTYFSTAVSKWDAEFYVKVDDDVHVNIATLGETLVRHRKKHRVYLGCMKSGPVLSQKGVRYHEPEYWKFGENGNKYFRHATGQLYAISRDLASYISLNQHVLHKYANEDVTLGAWFIGLDVTHIDDRRLCCGTPPDCEWKAQAGNICVASFDWTCSGICRSADRIKEVHKRCGEPENAIWKARF

SEQ ID NO: 107263 - protein, 371 aa, Arabidopsis thaliana
  peptide (1)..(371): Ceres Seq. ID no. 13621835
MWIIPESKDMPRPSVSTEAERLKLISEGCDPKTLYQKEVNRDPQALFGEVSKTHNAIQTLDKTISSLEMELAAARSAQESLVNGAPISNDMEKKQLPGKRRYLMVVGINTAFSSRKRRDSVRTTWMPSGEKRKKLEEEKGIIIRFVIGHSATAGGILDRSIEAEDKKHGDFLRLDHVEGYLELSGKTKTYFSTAVSKWDAEFYVKVDDDVHVNIATLGETLVRHRKKHRVYLGCMKSGPVLSQKGVRYHEPEYWKFGENGNKYFRHATGQLYAISRDLASYISLNQHVLHKYANEDVTLGAWFIGLDVTHIDDRRLCCGTPPDCEWKAQAGNICVASFDWTCSGICRSADRIKEVHKRCGEPENAIWKARF

SEQ ID NO: 107264 - protein, 362 aa, Arabidopsis thaliana
  peptide (1)..(362): Ceres Seq. ID no. 13621836
MPRPSVSTEAERLKLISEGCDPKTLYQKEVNRDPQALFGEVSKTHNAIQTLDKTISSLEMELAAARSAQESLVNGAPISNDMEKKQLPGKRRYLMVVGINTAFSSRKRRDSVRTTWMPSGEKRKKLEEEKGIIIRFVIGHSATAGGILDRSIEAEDKKHGDFLRLDHVEGYLELSGKTKTYFSTAVSKWDAEFYVKVDDDVHVNIATLGETLVRHRKKHRVYLGCMKSGPVLSQKGVRYHEPEYWKFGENGNKYFRHATGQLYAISRDLASYISLNQHVLHKYANEDVTLGAWFIGLDVTHIDDRRLCCGTPPDCEWKAQAGNICVASFDWTCSGICRSADRIKEVHKRCGEPENAIWKARF

SEQ ID NO: 107265 - DNA, 2878 bp, Arabidopsis thaliana
  misc_feature (1)..(2878): Ceres Seq. ID no. 13621849
  misc_feature (1)..(2878): Ortholog of  Ceres SEQ ID NO 15226720 as cited in SEQ ID NO 58707
  misc_feature (1)..(2878): Ortholog of  Ceres SEQ ID NO 13584744 as cited in SEQ ID NO 69137
actttctagtctcacaaaaacaaggaaacaattaaaaccaaagtgacgaatattaatggcgttttcttcttgttttctcttagttcttctgcaaatcttctcagctttacttctttgtcttgctcaagatcagtcaggattcatcagtttggattgcggttcgcctagagaaactagctttcgtgagaaaacaacaaacattacttacatttccgatgcgaatttcatcaataccggtgttggtggaagcatcaaacaaggataccggactcagtttcagcaacaaacatggaacctacggagttttccacaaggcataagaaactgctataccttaaacctaaccataggcgacgaatatctaatcagagccaatttccttcacggcggttatgacgacaaaccctcaacgcaattcgagctctacctcggacctaatctttggtctacagttacaaccacgaacgagaccgaagcatcaatctttgagatgattcatatcttgaccactgatcgtttacaaatctgtctggtcaagacaggaaacgcaacgccttttatctccgctttagagcttcgtaaactcatgaacacaacttacttgactcgacaaggttccttgcagaccttcatcagagcagacgttggcgcgactgttaaccaaggctacaggtacggaatcgatgtgtttgatcgtgtctggactccgtataatttcggaaactggtcacagattagtaccaatcagtcagtgaatataaacaatgactatcaaccaccagagattgctatggtcacagcctctgttccaacagacccggacgcagctatgaacatttcgctagtcggggtggaacgtactgtgcagttctacgtttttatgcattttgcagagattcaagagctcaaatccaatgatacaagagagttcaacatcatgtacaataacaagcatatctatggaccttttagaccacttaatttcaccacgtcttccgtatttacacctaccgaagttgtcgccgatgcaaatgggcagtacatattttcgcttcaaagaacaggaaattcgactttacctcctctgctcaacgctatggagatttattcggttaacttgttgccgcaacaggaaactgatagaaaagaagttgatgcaatgatgaacatcaagtcggcttacggcgtgaacaagattgactgggaaggagatccttgcgtgccgctggattacaagtggtctggtgttaattgcacttatgttgacaatgagaccccaaagatcatttctttggatctgtctacaagtggcttgaccggagagatcttagaatttatatcagaccttaccagtttagaagttcttgacttgtctaacaattctttaactggttcagtcccagagtttctagctaatatggaaaccttaaaactcataaatctatctggaaatgagctaaatggctctatccctgcaactctccttgataaagaacgacgaggatctattacgttaagtatcgaaggaaataccgggctttgttcatctacatcatgcgctaccacgaaaaagaagaagaaaaacactgttattgcacctgttgcagcatcacttgtttcagtattcctcattggagctggaatcgttactttccttatcctcaagaggaagaagagaaccaagcttggtttgaatcctaattcaggaactggtacaacaccgttacattcgaggtctcaccacggttttgaacctcccgttatagcgaaaaaccggaaattgacttacattgatgttgttaagatcacaaacaactttgagagggttcttggtaggggtggttttggtgtggtttattacggcgtcttgaataatgaaccagttgcggtaaagatgctcactgagtccactgcacttggttacaaacagtttaaagccgaggttgagttgcttcttagagttcatcacaaagatctcacatgtcttgttggatattgtgaagaaggagataaaatgtctctaatctatgagttcatggcgaatggtgacttgaaagagcacttatcagggaagcgtggaccgtcgatactaacttgggaaggaaggcttcgtatagcagcggaatcagcgcaaggattggaatatttgcacaatggatgcaaaccgcaaatagttcaccgcgacattaagactactaacatcttattaaacgagaaatttcaagctaagcttgcggatttcgggctttcacggtcttttccacttggaactgaaactcacgtctcaaccatagttgctggaactcccggatatcttgatcctgaatactacagaactaattggttgaccgagaaaagtgatgtgttcagctttggtgttgttctactagagctagtaacaaaccaacccgtgatagacatgaaaagagaaaaatcacacatagctgaatgggtaggtttgatgctatcaagaggagacattaacagcattgtagatcctaagcttcaaggagactttgatccaaacacgatatggaaagttgttgagaccgcaatgacttgcctgaatccgtcttcttcacggagaccgacaatgactcaagtcgtaatggatctgaaagaatgtctgaacatggagatggcaagaaacatgggaagccgtatgacggattcaactaatgattcttcaattgagctgtccatgaatttcacaacagagcttaatccaggagctagatgaatcaaatcttatgtataatttgtttgaagctagaagtttcttcgtacacacgtttcttttgttctgtttgtgatgaacagagtgagtgttacttgtattctattccggttctttgttatataaaattttattttttac

SEQ ID NO: 107266 - protein, 894 aa, Arabidopsis thaliana
  peptide (1)..(894): Ceres Seq. ID no. 13621850
MAFSSCFLLVLLQIFSALLLCLAQDQSGFISLDCGSPRETSFREKTTNITYISDANFINTGVGGSIKQGYRTQFQQQTWNLRSFPQGIRNCYTLNLTIGDEYLIRANFLHGGYDDKPSTQFELYLGPNLWSTVTTTNETEASIFEMIHILTTDRLQICLVKTGNATPFISALELRKLMNTTYLTRQGSLQTFIRADVGATVNQGYRYGIDVFDRVWTPYNFGNWSQISTNQSVNINNDYQPPEIAMVTASVPTDPDAAMNISLVGVERTVQFYVFMHFAEIQELKSNDTREFNIMYNNKHIYGPFRPLNFTTSSVFTPTEVVADANGQYIFSLQRTGNSTLPPLLNAMEIYSVNLLPQQETDRKEVDAMMNIKSAYGVNKIDWEGDPCVPLDYKWSGVNCTYVDNETPKIISLDLSTSGLTGEILEFISDLTSLEVLDLSNNSLTGSVPEFLANMETLKLINLSGNELNGSIPATLLDKERRGSITLSIEGNTGLCSSTSCATTKKKKKNTVIAPVAASLVSVFLIGAGIVTFLILKRKKRTKLGLNPNSGTGTTPLHSRSHHGFEPPVIAKNRKLTYIDVVKITNNFERVLGRGGFGVVYYGVLNNEPVAVKMLTESTALGYKQFKAEVELLLRVHHKDLTCLVGYCEEGDKMSLIYEFMANGDLKEHLSGKRGPSILTWEGRLRIAAESAQGLEYLHNGCKPQIVHRDIKTTNILLNEKFQAKLADFGLSRSFPLGTETHVSTIVAGTPGYLDPEYYRTNWLTEKSDVFSFGVVLLELVTNQPVIDMKREKSHIAEWVGLMLSRGDINSIVDPKLQGDFDPNTIWKVVETAMTCLNPSSSRRPTMTQVVMDLKECLNMEMARNMGSRMTDSTNDSSIELSMNFTTELNPGAR

SEQ ID NO: 107267 - protein, 749 aa, Arabidopsis thaliana
  peptide (1)..(749): Ceres Seq. ID no. 13621851
MIHILTTDRLQICLVKTGNATPFISALELRKLMNTTYLTRQGSLQTFIRADVGATVNQGYRYGIDVFDRVWTPYNFGNWSQISTNQSVNINNDYQPPEIAMVTASVPTDPDAAMNISLVGVERTVQFYVFMHFAEIQELKSNDTREFNIMYNNKHIYGPFRPLNFTTSSVFTPTEVVADANGQYIFSLQRTGNSTLPPLLNAMEIYSVNLLPQQETDRKEVDAMMNIKSAYGVNKIDWEGDPCVPLDYKWSGVNCTYVDNETPKIISLDLSTSGLTGEILEFISDLTSLEVLDLSNNSLTGSVPEFLANMETLKLINLSGNELNGSIPATLLDKERRGSITLSIEGNTGLCSSTSCATTKKKKKNTVIAPVAASLVSVFLIGAGIVTFLILKRKKRTKLGLNPNSGTGTTPLHSRSHHGFEPPVIAKNRKLTYIDVVKITNNFERVLGRGGFGVVYYGVLNNEPVAVKMLTESTALGYKQFKAEVELLLRVHHKDLTCLVGYCEEGDKMSLIYEFMANGDLKEHLSGKRGPSILTWEGRLRIAAESAQGLEYLHNGCKPQIVHRDIKTTNILLNEKFQAKLADFGLSRSFPLGTETHVSTIVAGTPGYLDPEYYRTNWLTEKSDVFSFGVVLLELVTNQPVIDMKREKSHIAEWVGLMLSRGDINSIVDPKLQGDFDPNTIWKVVETAMTCLNPSSSRRPTMTQVVMDLKECLNMEMARNMGSRMTDSTNDSSIELSMNFTTELNPGAR

SEQ ID NO: 107268 - protein, 717 aa, Arabidopsis thaliana
  peptide (1)..(717): Ceres Seq. ID no. 13621852
MNTTYLTRQGSLQTFIRADVGATVNQGYRYGIDVFDRVWTPYNFGNWSQISTNQSVNINNDYQPPEIAMVTASVPTDPDAAMNISLVGVERTVQFYVFMHFAEIQELKSNDTREFNIMYNNKHIYGPFRPLNFTTSSVFTPTEVVADANGQYIFSLQRTGNSTLPPLLNAMEIYSVNLLPQQETDRKEVDAMMNIKSAYGVNKIDWEGDPCVPLDYKWSGVNCTYVDNETPKIISLDLSTSGLTGEILEFISDLTSLEVLDLSNNSLTGSVPEFLANMETLKLINLSGNELNGSIPATLLDKERRGSITLSIEGNTGLCSSTSCATTKKKKKNTVIAPVAASLVSVFLIGAGIVTFLILKRKKRTKLGLNPNSGTGTTPLHSRSHHGFEPPVIAKNRKLTYIDVVKITNNFERVLGRGGFGVVYYGVLNNEPVAVKMLTESTALGYKQFKAEVELLLRVHHKDLTCLVGYCEEGDKMSLIYEFMANGDLKEHLSGKRGPSILTWEGRLRIAAESAQGLEYLHNGCKPQIVHRDIKTTNILLNEKFQAKLADFGLSRSFPLGTETHVSTIVAGTPGYLDPEYYRTNWLTEKSDVFSFGVVLLELVTNQPVIDMKREKSHIAEWVGLMLSRGDINSIVDPKLQGDFDPNTIWKVVETAMTCLNPSSSRRPTMTQVVMDLKECLNMEMARNMGSRMTDSTNDSSIELSMNFTTELNPGAR

SEQ ID NO: 107269 - DNA, 3528 bp, Arabidopsis thaliana
  misc_feature (1)..(3528): Ceres Seq. ID no. 13621857
  misc_feature (1)..(3528): Ortholog of  Ceres SEQ ID NO 13654989 as cited in SEQ ID NO 63117
  misc_feature (1)..(3528): Ortholog of  Ceres SEQ ID NO 13657138 as cited in SEQ ID NO 65923
  misc_feature (1)..(3528): Ortholog of  Ceres SEQ ID NO 13584744 as cited in SEQ ID NO 69137
aaattcgccattaaaacccttttttctctctctgtcggggactctgcaaatcgtatggaaaaaaaagttatgagctacgaaagcttcattttcatttctcttcatatagcgtaaagtctgagtctttcttcccgatgttatgacttaatcggtgtttatgaagctgtagttatggagctgaagtgggtttcttgtcggaaacaatctctgttcttgatctcttgtctggctctgctttgtctcgcgtccttggatactatatcatgtgaatcaactcagaatgctactgacttcaagaaacgatctcagacagtttcttgccctcctgattggatcattggaccgaaccaaaccaagtgctatgcttactttaaaaactctacttcatgggagaagtcagaaatgttctgtagaacttatggtggtcacttagcatcgcttgcatcgagcaaagaactcagctttgttcaaaaactatgcaatggaaatgttagcagttgttggattggaggacgaagtatgaattcttctacctcaggtttccgttggagctggtctgatcctaagactcctcaatggaaccaatccatgtttcctaaagttccaattcgcacccgctgtggcaatggcaacggcagttcatcgtgtcgtgctaatatatgtatagccgtgacaaatggttcatcatcaatattcggtgaaagatgtaatgcgtctcatgcttttgtttgcgctgttgattctgatatcaaatgtcgcaattgtcacaaatatctagttatcctcgctgttgtcagcggtttgattctcttcacgacattcgccattatattatggctccttgtctataagcgaagcaagaaacgccgaaaatcacgaaaagtatctaatccagcttcatcatcatcagtagttcctccttcatggaagatcttcactagtgaagaactgagatcaatgacgaagaacttcagtgaagcaaaccgtctagctggggacgcgaaaaccggtggaacctatagcggtggtttatcagacgggactaaagtggcggttaagagattgaaaaggtctagttttcagaggaagaaagagttctactccgagattagaagagcagctaaactttatcacccgaatgtagttgctataaaaggttgttgctatgatcatggagaacgtttcattgtttatgagttcatagctagtggacctctcgatagatggctacaccatgtgcctagaggtggtagaagcttggactggaacatgagattgaacatcgccacaactcttgctcaaggaatcgcgtttctacacgacaaggtcaagccacaagtggtgcaccgcgacatccgagctagcaacgtgctacttgatgaggagtttggagctcatttaatgggtgttggtctctcaaaattcgttccttgggaagtaatgcaagagagaaccgtaatggcgggtggaacctacggttacctcgcacccgaatacgtttacagaaacgagctaaccacgaagagcgatgtctacagtttcggagtccttttgcttgagattgtgagcggtcgtagaccaactcaggctgttaattcttcagttgggtggcagagcatattcgaatgggcaacaccattggttcaagctaaccgttggttagagattcttgatccggttattacatgcggtttaccggaagcatgtgtggttcagaaagttgttgacttggtttattcttgtactcagaatgtgccatcaatgcgtccaaggatgtcacatgtggttcatcagcttcagcaattggtccaacctttagaggttaagtagttaattaattaacataagtcttaataaaacactttttgtttgactgtataatcgaatcttaggagacttgtcacattacttttcatggagaaagtaaagaaatgttagagccaaaaccgatgtcgtattaaagaaagttcttggaagtttataaaggattcgagctaaagtccttgttaactaagtagttctggataagttcaagcttgttctctaagtttcacatgtttaatattaataaaaaaaactaagcgtcagagaacttataaagaccatatccaaagcatttcattagtcttaataaatcacttaatgtttgactgtataatagaatcttaggagacatttcattgtccaattacttatcatggaaaatgtaaagaaatgttagagcctaaaacgatgtcttattatagaaagttcttgttaactaagtagttctctataattttaaacttgttctctaagtttcacatttttagtatgtaatacgcttcagataatataaagactatatccaaagcattccaaggaaagtcttccatcttttgtatttacatatatctcttactttctcttaagaggaaacttcttggtttgttactttgcttcatagcttttgctatattctgattctgagtattacttcaactccattcactaaaccaccgttagattcttctgtgttttcatataaagctttgatctttttgtttactatcttcttgcgtctagaaatcggaaacaagatgtttcttaggtgcttcaaacccaagttctacaagaaaaggtgttagtcttttatcactctgtttttgacttttaagttttgaatgtttgtctatgagaaatttaactaatcattgttcttggtgaaatgcagcaaatctacaaccagctacatgaagattaggattgatatagttaggagaaaaaggattgcaatggttagaaattataaaacagatattgtgaatttcctcaagaatggccaagattctgaagcttatagaagagtaattaacacttcttctttctctcattatgtttctaagctttgttaagtttttttttttaaatgtgtcaatacttgttactgcaggcagaacttttactcgaagagctgaggataatatcgtgctacgatctcatcgagcgattctgcgattgtatctctgaaaatctctcactaatgctgaagaaaaggttttcacttttacttctaatctctagatttcactccagaaggtgtaacaatttactaacatttttgtttcttttacttttagggaatgtcctgaagaatgcagagaagctgtttcctctttgatatatgcaacggcatgggttcctgatgttcctgaacttaaggatcttagagccgtgtttaccaagcaataacgaagtttccacaataagagagaacgagagaatgtcgtcgtttcaaagacctaacctccttgattatgatgatgtggtggctcgtcttgcagctctgcgccggagataagaaagtagtaattataagggtttcttaatttctcgtcgtagttaagtttatattggtaaaattacttttttactaattagaattttcgtttgagaatatgtaattatctttatgactttgtaattagtccagtctgtagttgaatcttttcgcagcaaaaaggttgatagttcaatggatgaactttg

SEQ ID NO: 107270 - protein, 552 aa, Arabidopsis thaliana
  peptide (1)..(552): Ceres Seq. ID no. 13621858
MELKWVSCRKQSLFLISCLALLCLASLDTISCESTQNATDFKKRSQTVSCPPDWIIGPNQTKCYAYFKNSTSWEKSEMFCRTYGGHLASLASSKELSFVQKLCNGNVSSCWIGGRSMNSSTSGFRWSWSDPKTPQWNQSMFPKVPIRTRCGNGNGSSSCRANICIAVTNGSSSIFGERCNASHAFVCAVDSDIKCRNCHKYLVILAVVSGLILFTTFAIILWLLVYKRSKKRRKSRKVSNPASSSSVVPPSWKIFTSEELRSMTKNFSEANRLAGDAKTGGTYSGGLSDGTKVAVKRLKRSSFQRKKEFYSEIRRAAKLYHPNVVAIKGCCYDHGERFIVYEFIASGPLDRWLHHVPRGGRSLDWNMRLNIATTLAQGIAFLHDKVKPQVVHRDIRASNVLLDEEFGAHLMGVGLSKFVPWEVMQERTVMAGGTYGYLAPEYVYRNELTTKSDVYSFGVLLLEIVSGRRPTQAVNSSVGWQSIFEWATPLVQANRWLEILDPVITCGLPEACVVQKVVDLVYSCTQNVPSMRPRMSHVVHQLQQLVQPLEVK

SEQ ID NO: 107271 - protein, 475 aa, Arabidopsis thaliana
  peptide (1)..(475): Ceres Seq. ID no. 13621859
MFCRTYGGHLASLASSKELSFVQKLCNGNVSSCWIGGRSMNSSTSGFRWSWSDPKTPQWNQSMFPKVPIRTRCGNGNGSSSCRANICIAVTNGSSSIFGERCNASHAFVCAVDSDIKCRNCHKYLVILAVVSGLILFTTFAIILWLLVYKRSKKRRKSRKVSNPASSSSVVPPSWKIFTSEELRSMTKNFSEANRLAGDAKTGGTYSGGLSDGTKVAVKRLKRSSFQRKKEFYSEIRRAAKLYHPNVVAIKGCCYDHGERFIVYEFIASGPLDRWLHHVPRGGRSLDWNMRLNIATTLAQGIAFLHDKVKPQVVHRDIRASNVLLDEEFGAHLMGVGLSKFVPWEVMQERTVMAGGTYGYLAPEYVYRNELTTKSDVYSFGVLLLEIVSGRRPTQAVNSSVGWQSIFEWATPLVQANRWLEILDPVITCGLPEACVVQKVVDLVYSCTQNVPSMRPRMSHVVHQLQQLVQPLEVK

SEQ ID NO: 107272 - protein, 436 aa, Arabidopsis thaliana; identical to SEQ ID NO: 85988
  peptide (1)..(436): Ceres Seq. ID no. 13621860

SEQ ID NO: 107273 - DNA, 3224 bp, Arabidopsis thaliana
  misc_feature (1)..(3224): Ceres Seq. ID no. 13621869
  misc_feature (1)..(3224): Ortholog of  Ceres SEQ ID NO 14313336 as cited in SEQ ID NO 55501
gtttctttcttcttccattttctctctcaatctctctccctctctcaatcttctggtctcgtctcgtcgtctcttggagaattgagaattgggaatctgttttggttttgcccgagaaaaaaacgagagagatgggtttcatcttctcgaccgagaaagttgtgtatgttcttcttctcatcttcgtttgcttggaaaatttcggatcaaatgctcaacttttgcctgaagatgaagttcaaacattgcgaacgatctttagaaagcttcaaaaccaaacagtgaacatcgaaagaacttcttgttcggaccaaaactggaactttgttgtcgagtcagcctccaactcaccaaccagtaacattacctgcgactgtactttcaacgccagctcagtctgtcgtgtcacaaacatacagcttaaaagtttcagcttgcccggaatattcccgcctgagttcggaaacctcacgcgtcttcgagagatagatctttcgcggaactttctcaatggaacaatacctacgacattgtctcaaattccacttgaaatcttgtctgtaatcggaaaccgtctctcaggaccatttcctcctcaacttggagatattactacacttactgatgtgaatttggaaactaatttattcacaggaccacttcctcgaaacctagggaacttaagaagcttgaaagagttacttctctctgcaaacaacttcacgggtcaaatccctgagtccttaagtaatctcaagaatttgactgaatttcggattgatggaaactctctatctgggaaaatacctgattttattggaaactggactctgctggagaggctagaccttcaaggcacatcaatggaaggtccaattccaccttcaatatcaaacttgacgaacttgactgaattgaggataaccgatttgcgtggacaagcggccttttcttttccggacctgcgaaatctaatgaaaatgaaacgattgggacctatcccggaatacattggttccatgagtgagctgaagacactagatttaagctcaaacatgctaaccggtgtaattcctgacacatttcggaatctcgatgcatttaactttatgtttttgaataataactcattgactggtccagttcctcagttcatcatcaacagtaaagaaaacctagatttatctgacaacaatttcactcagccacctactttaagctgtaatcagcttgatgtgaacttgatctccagctacccttcagtaaccgataactctgttcaatggtgcttgagagagggtcttccatgtccagaagatgctaaacagtcttccctgttcatcaactgtggaggaagcagactcaagattggaaaagacacttatacagatgacttgaacagtagaggacaatcaacattctcttctgtctctgaaagatggggatacagtagttctggagtttggttaggcaaggaggatgctggctacttagcaacagacagatttaacttgatcaatggatcaactccagagtattacaaaacagcccgtctctctccacagtcactcaagtactatggactatgcttgagaagaggaagttacaaactgcagctacattttgcagagataatgttctcaaatgaccagacttttaatagcttagggcggcgaatattcgacatttatgtccaagggaacttgttggagagggactttaacatagcagagagagcaggtggagttggtaaaccgttcataaggcaaattgatggagttcaagtgaatggaagtacgttagagattcatttgcagtggacagggaaaggcacaaacgtaataccaacaagaggtgtttacgggcctctcatatctgccataaccattacaccaaatttcaaggttgataccggaaaaccattgtccaatggagcagttgcaggcattgtaatcgcagcgtgtgcggttttcgggttgctggtacttgtaatcttgaggcttacaggttacttaggtggaaaagaagtagatgagaatgaagagcttcggggacttgatttgcagacaggatcgttcacattgaaacaaataaaacgtgctactaataactttgatccagaaaacaagattggtgaaggaggatttggaccggtttataagggtgttctcgctgatgggatgaccatagcggtgaagcagctttcatcaaaatctaagcaaggaaaccgagaatttgtgactgagatcggtatgatatctgcgctgcaacaccctaatcttgtgaaactttatggttgttgcatcgaagggaaagagctcttgcttgtgtatgagtacttagagaacaacagtctcgctcgcgcactctttggcacagagaaacagaggcttcacttggattggtcaacaaggaacaagatttgcatagggattgcgaaaggattggcctatctacacgaggaatcaaggctgaagattgttcatagagacataaaagcgacaaatgtgcttcttgatctgtctctaaacgctaagatctctgattttggtctagctaaactcaacgatgacgagaatacacatatcagcacaaggattgcaggaacaataggttacatggctcctgagtatgcaatgagaggttacttgacagacaaggcagatgtttacagctttggtgttgtctgtttagagattgttagtggaaagagcaacacaaattacagaccaaaggaagagtttgtttaccttctggattgggcatatgtcttgcaagaacaaggtagtcttctagaactcgttgatccggatctcggcacaagcttttcgaagaaagaagcgatgaggatgttgaacatagcattactctgcacgaacccatctccaacattgagaccaccaatgtcatctgttgtaagtatgttagaaggaaaaatcaaagtccaaccaccattggtgaaacgtgaagcagatccaagtggttcagcagcaatgaggtttaaggccttagagcttttgtcacaagacagtgagtcacaagtctcgacatatgcaagaaacagagagcaagacataagctcctcatcgatggacggtccttgggtagattcttccttctctgagcctgggaaagatgttagcctgcaacagcaagaagaaggacgttcatcatcttcgtcgaggaaacttttagatgatcttaccgatgtgaagattgagtaa

SEQ ID NO: 107274 - protein, 1073 aa, Arabidopsis thaliana
  peptide (1)..(1073): Ceres Seq. ID no. 13621870
FFLLPFSLSISLPLSIFWSRLVVSWRIENWESVLVLPEKKTREMGFIFSTEKVVYVLLLIFVCLENFGSNAQLLPEDEVQTLRTIFRKLQNQTVNIERTSCSDQNWNFVVESASNSPTSNITCDCTFNASSVCRVTNIQLKSFSLPGIFPPEFGNLTRLREIDLSRNFLNGTIPTTLSQIPLEILSVIGNRLSGPFPPQLGDITTLTDVNLETNLFTGPLPRNLGNLRSLKELLLSANNFTGQIPESLSNLKNLTEFRIDGNSLSGKIPDFIGNWTLLERLDLQGTSMEGPIPPSISNLTNLTELRITDLRGQAAFSFPDLRNLMKMKRLGPIPEYIGSMSELKTLDLSSNMLTGVIPDTFRNLDAFNFMFLNNNSLTGPVPQFIINSKENLDLSDNNFTQPPTLSCNQLDVNLISSYPSVTDNSVQWCLREGLPCPEDAKQSSLFINCGGSRLKIGKDTYTDDLNSRGQSTFSSVSERWGYSSSGVWLGKEDAGYLATDRFNLINGSTPEYYKTARLSPQSLKYYGLCLRRGSYKLQLHFAEIMFSNDQTFNSLGRRIFDIYVQGNLLERDFNIAERAGGVGKPFIRQIDGVQVNGSTLEIHLQWTGKGTNVIPTRGVYGPLISAITITPNFKVDTGKPLSNGAVAGIVIAACAVFGLLVLVILRLTGYLGGKEVDENEELRGLDLQTGSFTLKQIKRATNNFDPENKIGEGGFGPVYKGVLADGMTIAVKQLSSKSKQGNREFVTEIGMISALQHPNLVKLYGCCIEGKELLLVYEYLENNSLARALFGTEKQRLHLDWSTRNKICIGIAKGLAYLHEESRLKIVHRDIKATNVLLDLSLNAKISDFGLAKLNDDENTHISTRIAGTIGYMAPEYAMRGYLTDKADVYSFGVVCLEIVSGKSNTNYRPKEEFVYLLDWAYVLQEQGSLLELVDPDLGTSFSKKEAMRMLNIALLCTNPSPTLRPPMSSVVSMLEGKIKVQPPLVKREADPSGSAAMRFKALELLSQDSESQVSTYARNREQDISSSSMDGPWVDSSFSEPGKDVSLQQQEEGRSSSSSRKLLDDLTDVKIE

SEQ ID NO: 107275 - protein, 1030 aa, Arabidopsis thaliana
  peptide (1)..(1030): Ceres Seq. ID no. 13621871
MGFIFSTEKVVYVLLLIFVCLENFGSNAQLLPEDEVQTLRTIFRKLQNQTVNIERTSCSDQNWNFVVESASNSPTSNITCDCTFNASSVCRVTNIQLKSFSLPGIFPPEFGNLTRLREIDLSRNFLNGTIPTTLSQIPLEILSVIGNRLSGPFPPQLGDITTLTDVNLETNLFTGPLPRNLGNLRSLKELLLSANNFTGQIPESLSNLKNLTEFRIDGNSLSGKIPDFIGNWTLLERLDLQGTSMEGPIPPSISNLTNLTELRITDLRGQAAFSFPDLRNLMKMKRLGPIPEYIGSMSELKTLDLSSNMLTGVIPDTFRNLDAFNFMFLNNNSLTGPVPQFIINSKENLDLSDNNFTQPPTLSCNQLDVNLISSYPSVTDNSVQWCLREGLPCPEDAKQSSLFINCGGSRLKIGKDTYTDDLNSRGQSTFSSVSERWGYSSSGVWLGKEDAGYLATDRFNLINGSTPEYYKTARLSPQSLKYYGLCLRRGSYKLQLHFAEIMFSNDQTFNSLGRRIFDIYVQGNLLERDFNIAERAGGVGKPFIRQIDGVQVNGSTLEIHLQWTGKGTNVIPTRGVYGPLISAITITPNFKVDTGKPLSNGAVAGIVIAACAVFGLLVLVILRLTGYLGGKEVDENEELRGLDLQTGSFTLKQIKRATNNFDPENKIGEGGFGPVYKGVLADGMTIAVKQLSSKSKQGNREFVTEIGMISALQHPNLVKLYGCCIEGKELLLVYEYLENNSLARALFGTEKQRLHLDWSTRNKICIGIAKGLAYLHEESRLKIVHRDIKATNVLLDLSLNAKISDFGLAKLNDDENTHISTRIAGTIGYMAPEYAMRGYLTDKADVYSFGVVCLEIVSGKSNTNYRPKEEFVYLLDWAYVLQEQGSLLELVDPDLGTSFSKKEAMRMLNIALLCTNPSPTLRPPMSSVVSMLEGKIKVQPPLVKREADPSGSAAMRFKALELLSQDSESQVSTYARNREQDISSSSMDGPWVDSSFSEPGKDVSLQQQEEGRSSSSSRKLLDDLTDVKIE

SEQ ID NO: 107276 - protein, 786 aa, Arabidopsis thaliana
  peptide (1)..(786): Ceres Seq. ID no. 13621872
MEGPIPPSISNLTNLTELRITDLRGQAAFSFPDLRNLMKMKRLGPIPEYIGSMSELKTLDLSSNMLTGVIPDTFRNLDAFNFMFLNNNSLTGPVPQFIINSKENLDLSDNNFTQPPTLSCNQLDVNLISSYPSVTDNSVQWCLREGLPCPEDAKQSSLFINCGGSRLKIGKDTYTDDLNSRGQSTFSSVSERWGYSSSGVWLGKEDAGYLATDRFNLINGSTPEYYKTARLSPQSLKYYGLCLRRGSYKLQLHFAEIMFSNDQTFNSLGRRIFDIYVQGNLLERDFNIAERAGGVGKPFIRQIDGVQVNGSTLEIHLQWTGKGTNVIPTRGVYGPLISAITITPNFKVDTGKPLSNGAVAGIVIAACAVFGLLVLVILRLTGYLGGKEVDENEELRGLDLQTGSFTLKQIKRATNNFDPENKIGEGGFGPVYKGVLADGMTIAVKQLSSKSKQGNREFVTEIGMISALQHPNLVKLYGCCIEGKELLLVYEYLENNSLARALFGTEKQRLHLDWSTRNKICIGIAKGLAYLHEESRLKIVHRDIKATNVLLDLSLNAKISDFGLAKLNDDENTHISTRIAGTIGYMAPEYAMRGYLTDKADVYSFGVVCLEIVSGKSNTNYRPKEEFVYLLDWAYVLQEQGSLLELVDPDLGTSFSKKEAMRMLNIALLCTNPSPTLRPPMSSVVSMLEGKIKVQPPLVKREADPSGSAAMRFKALELLSQDSESQVSTYARNREQDISSSSMDGPWVDSSFSEPGKDVSLQQQEEGRSSSSSRKLLDDLTDVKIE

SEQ ID NO: 107277 - DNA, 963 bp, Arabidopsis thaliana
  misc_feature (1)..(963): Ceres Seq. ID no. 13621877
  misc_feature (1)..(963): Ortholog of  Ceres SEQ ID NO 13647648 as cited in SEQ ID NO 20346
  misc_feature (1)..(963): Ortholog of  Ceres SEQ ID NO 15179852 as cited in SEQ ID NO 66623
ctaccaatttcaagatctggtcgtcgctcacaggagaaacgtaatggaaaacaaagagaccaagcaagaaccagcagcagcagctgagcaaaagaccgttccgttgatcgaagatgagatcgagaggagcaaagtcgggatcatgagagctctctgcgaccgacaagatcctgaaactaaggaggtggatgatctgatgataaggaggtttctgagagcgcgtgacctggacattgaaaaggcttcaacgatgtttctaaattacctgacttggaagagaagcatgctcccaaaggggcacataccagaagcagagattgcaaatgatctatcgcataacaagatgtgtatgcaaggtcatgacaagatgggtcgacctatcgctgttgccattgggaacagacataacccttccaaaggcaaccctgacgagttcaagcgttttgttgtctacacgctcgagaagatttgtgctagaatgccgagaggtcaagagaaattcgtagcaattggagatctgcaaggctggggatattctaattgtgacatccgtggctaccttgctgctctttccactttgcaggattgttacccagagagattagggaaactctatatagttcatgccccctacattttcatgaccgcatggaaggtcatttatccttttatcgacgccaacaccaagaaaaagattgttttcgtggagaacaagaaactcactccaacgctgcttgaagacatagacgaaagccaacttcccgacatctacggaggcaaattgccacttgttcctattcaggagacctgattataggtcttactacggcccacctctatttccaaattattacttactagtattattttttatttgaataaaatgaaaaacatattgagtgtcgccaaatgccaacaattatatatttactgtcaaagaagctaaaagatataatattgaaa

SEQ ID NO: 107278 - protein, 269 aa, Arabidopsis thaliana; identical to SEQ ID NO: 31059
  peptide (1)..(269): Ceres Seq. ID no. 13621878

SEQ ID NO: 107279 - protein, 255 aa, Arabidopsis thaliana; identical to SEQ ID NO: 31060
  peptide (1)..(255): Ceres Seq. ID no. 13621879

SEQ ID NO: 107280 - protein, 222 aa, Arabidopsis thaliana; identical to SEQ ID NO: 31061
  peptide (1)..(222): Ceres Seq. ID no. 13621880

SEQ ID NO: 107281 - DNA, 2225 bp, Arabidopsis thaliana
  misc_feature (1)..(2225): Ceres Seq. ID no. 13621881
  misc_feature (1)..(2225): Ortholog of  Ceres SEQ ID NO 12465083 as cited in SEQ ID NO 68239
atggctcgctcgtttggagcaaacagcactgttgtgcttgcgatcatcttcttcggatgtttatttgcgttttccactgcaaaagaagaggctacgaagttaggatcagttattgggatagatcttggtaccacttactcttgtgttggtgtttacaagaatggtcatgttgaaattattgccaatgaccaaggaaaccgtattacaccttcatgggttggttttactgactctgaaaggctcattggtgaggctgctaagaatcaggcggctgttaatcctgagaggactgtcttcgacgttaagagattgatcgggcgaaaatttgaggacaaggaggttcaaaaggacaggaaacttgtaccttaccagattgtgaacaaggatggtaagccatacattcaagtcaagatcaaggatggtgagactaaggttttcagtcctgaggagatcagtgccatgattctgactaagatgaaggagacagccgaagcctaccttggaaagaaaatcaaggacgctgttgtcactgttccagcttacttcaatgatgctcaaaggcaagctaccaaggatgccggtgttattgctgggctcaatgttgctagaatcatcaacgaacctactgctgctgctattgcctacggtcttgataagaagggtggtgagaagaacatccttgtatttgaccttggtggtggtacttttgatgtcagtgtcttgaccattgataacggagtgtttgaggttctctccacaaatggtgacactcacttgggaggtgaggactttgaccacaggatcatggagtacttcatcaagttaattaagaagaagcaccagaaggacatcagcaaggacaacaaggctcttggtaagctccgaagggaatgtgagagggcaaagagagctctaagcagtcagcaccaagtccgtgtagagattgagtcactctttgatggtgttgatttatctgagccactcaccagagctcgtttcgaggagcttaacaatgatttgttcaggaagaccatgggacctgtgaagaaggccatggatgatgccggtctacagaagagccagatcgatgagattgtccttgttggtggaagcaccaggatcccaaaggttcagcaactgttgaaggacttctttgaaggtaaagagccaaacaagggtgtgaaccccgacgaggctgttgcctatggtgctgctgttcagggtggtattttgagcggagaaggcggtgatgagaccaaagatatccttcttcttgatgttgcgccactcactttaggtatcgagactgtaggaggagtgatgacaaagttgatcccaagaaacacggttattccaaccaagaaatctcaggttttcacaacgtaccaagaccagcagaccaccgtctccattcaggtctttgaaggtgaaagaagtctcaccaaggactgcaggctactcgggaaattcgacctcactggagtcccaccggccccaagaggaacccctcaaatcgaggtcacatttgaagtggacgccaacggtattcttaatgtgaaagcagaggacaaggcgagtggtaaatcagagaagattacaatcacaaacgagaagggtcgtctgagccaagaagagattgaccggatggtgaaggaggcagaggagtttgcagaggaagacaagaaggtgaaggagaagatcgacgccaggaatgccctggagacatacgtgtacaacatgaagaaccaagtgagcgacaaggacaagcttgcagacaaattggaaggagatgagaaggagaagatagaagcagcgacgaaagaggccttggagtggctcgacgagaaccaaaactcagagaaagaagagtacgacgagaagctcaaggaggtagaggcagtgtgtaacccaatcatcacagcagtttaccagagatcaggcggagcaccaggtgcaggaggagaatcatcgactgaggaggaagatgagtctcacgatgagctctagatgtcttctgttattgttaatttattaaaccatagagacaagttttgaggatgaaacgtcgtttttgttttttgtatttggtttcctttttcttatggatttttaggaaaggggagagattaagtagcgtcccttctttagtctccctggacgttctctttatgttcatctgataactttacttcttcataacaaataccttttttctattcaacatc

SEQ ID NO: 107282 - protein, 668 aa, Arabidopsis thaliana; identical to SEQ ID NO: 97288
  peptide (1)..(668): Ceres Seq. ID no. 13621882

SEQ ID NO: 107283 - protein, 515 aa, Arabidopsis thaliana; identical to SEQ ID NO: 97289
  peptide (1)..(515): Ceres Seq. ID no. 13621883

SEQ ID NO: 107284 - protein, 510 aa, Arabidopsis thaliana
  peptide (1)..(510): Ceres Seq. ID no. 13621884
MKETAEAYLGKKIKDAVVTVPAYFNDAQRQATKDAGVIAGLNVARIINEPTAAAIAYGLDKKGGEKNILVFDLGGGTFDVSVLTIDNGVFEVLSTNGDTHLGGEDFDHRIMEYFIKLIKKKHQKDISKDNKALGKLRRECERAKRALSSQHQVRVEIESLFDGVDLSEPLTRARFEELNNDLFRKTMGPVKKAMDDAGLQKSQIDEIVLVGGSTRIPKVQQLLKDFFEGKEPNKGVNPDEAVAYGAAVQGGILSGEGGDETKDILLLDVAPLTLGIETVGGVMTKLIPRNTVIPTKKSQVFTTYQDQQTTVSIQVFEGERSLTKDCRLLGKFDLTGVPPAPRGTPQIEVTFEVDANGILNVKAEDKASGKSEKITITNEKGRLSQEEIDRMVKEAEEFAEEDKKVKEKIDARNALETYVYNMKNQVSDKDKLADKLEGDEKEKIEAATKEALEWLDENQNSEKEEYDEKLKEVEAVCNPIITAVYQRSGGAPGAGGESSTEEEDESHDEL

SEQ ID NO: 107285 - DNA, 971 bp, Arabidopsis thaliana
  misc_feature (1)..(971): Ceres Seq. ID no. 13621896
  misc_feature (1)..(971): Ortholog of  Ceres SEQ ID NO 13597524 as cited in SEQ ID NO 64782
aacgaagcatcggcgaaaaaagaagatgaatatcgttggattgagcaaacgtttcttctccgatcgtcgctctcttcacgggatcaacaatgctctcttgaaaacagtgttcaccggtcggaaaccgattctcggattctccggccgatcgattcacgagctacgcaaaactgggaatttcgtaatccctcgtgttttctccgtgtcgcgaaatctaacgacgaaggcttcgtcttcttcttcgaaacaacctgcgtttctacgatggtatttgagaaagctcgaatcacatccttttatgactaagagtatcactacttctgtcatctatatggctgcagatctcacttctcagatgatcacaatggagccaactggttcttttgacttgataagaacagcgagaatggcgagctttgggttgatatttctcgggccgtctcagcatctgtggttcagttatctttcgaagatattgccaaagcgcgacgtgttgacaacctttaagaaaataatgatggggcaggttcttttcggacctgttagcaacacagtcttctattcctacaatgctgctttacaaggcgaaaattctgaggaaattgtggcgagattgaagagagatcttctgccaacattgaaaaatggacttatgtattggccggtctgtgattttgttacattcaagtatgtgccagttcatctacagccactgatgaatagctcgtgcgcatatatatggacaatctatttgacatatatggcaaaccagacgaaagctgacagctgaacaatgacaagtatgagtgttctgggtcacacgcaatcgcattctttttattcaattgaaccaaccatcagtactagtagattttttttgtttttttggtgtctacaatgcagcaaaagtatcgcatagatatggacataaacatgtatgaattttgatcatctaagcatatatttatcag

SEQ ID NO: 107286 - protein, 262 aa, Arabidopsis thaliana
  peptide (1)..(262): Ceres Seq. ID no. 13621897
TKHRRKKKMNIVGLSKRFFSDRRSLHGINNALLKTVFTGRKPILGFSGRSIHELRKTGNFVIPRVFSVSRNLTTKASSSSSKQPAFLRWYLRKLESHPFMTKSITTSVIYMAADLTSQMITMEPTGSFDLIRTARMASFGLIFLGPSQHLWFSYLSKILPKRDVLTTFKKIMMGQVLFGPVSNTVFYSYNAALQGENSEEIVARLKRDLLPTLKNGLMYWPVCDFVTFKYVPVHLQPLMNSSCAYIWTIYLTYMANQTKADS

SEQ ID NO: 107287 - protein, 254 aa, Arabidopsis thaliana
  peptide (1)..(254): Ceres Seq. ID no. 13621898
MNIVGLSKRFFSDRRSLHGINNALLKTVFTGRKPILGFSGRSIHELRKTGNFVIPRVFSVSRNLTTKASSSSSKQPAFLRWYLRKLESHPFMTKSITTSVIYMAADLTSQMITMEPTGSFDLIRTARMASFGLIFLGPSQHLWFSYLSKILPKRDVLTTFKKIMMGQVLFGPVSNTVFYSYNAALQGENSEEIVARLKRDLLPTLKNGLMYWPVCDFVTFKYVPVHLQPLMNSSCAYIWTIYLTYMANQTKADS

SEQ ID NO: 107288 - protein, 163 aa, Arabidopsis thaliana; identical to SEQ ID NO: 29825
  peptide (1)..(163): Ceres Seq. ID no. 13621899

SEQ ID NO: 107289 - DNA, 1479 bp, Arabidopsis thaliana
  misc_feature (1)..(1479): Ceres Seq. ID no. 13621911
  misc_feature (1)..(1479): Ortholog of  Ceres SEQ ID NO 14313049 as cited in SEQ ID NO 54099
  misc_feature (1)..(1479): Ortholog of  Ceres SEQ ID NO 14314054 as cited in SEQ ID NO 56939
  misc_feature (1)..(1479): Ortholog of  Ceres SEQ ID NO 13503468 as cited in SEQ ID NO 63271
  misc_feature (1)..(1479): Ortholog of  Ceres SEQ ID NO 14303592 as cited in SEQ ID NO 68603
acaaccatcttactctacatttcccatttttgagactcctaaatcattttaaccttcttcctcaatcgtgaccatcaccaatgacgctacacgtcattgagactgcccgagtcacccccaccgactactcagtcatcaactcagccaacttgcacaaacttcctttaactttcttcgaccttccatggctactattccagccagtcaaaagagtcttcttctacgagctcaccgagtctactcgtgaccatttccactccattatcctccctaagctcaaggactctctgtcccttatcctccgtaactatctccctctcactggccacatcacttgggagccaaacgagccaaaaccgagcataatcgtctcggaaaacggcgtcgttttggtgactatagccgagagtgacgctgacttttctcatctttccggttatggacagcgtcctttgtcagagttacatgccttggttcccaagttaccggtttctgatgactcagcgaccgctttctccatacaaatcacgttgtttcctaaccaaggattctccataggtgttgcagcacaccatgctgttttagacgggaaaacgtcaagcacttttatcaaagcttgggctcaaatctgcaaacaagaacttcaaagcatgccggagaatctaactccgtcttatgaccggtctttgatcaaatatccgacctatcttgatgaaaagatgatagagttagtgagatctctcaaagaggaccaaaccaacatcagaagcttgacttcgcttccctctagtaaactcggagacgatgtcgtgttagccacgctagttctctctcgggctgatattgagagacttagggaacaagtcaagaacgtgtcaccgagcctccacttgtcgacttttgtcattgcttacgcttacgcgtggacttgtttcgtgaaggcacgtggaggtaataaagacagatcagtgagtctcttgttcgtaggagatttcagagaccggttagatccgaagctcccggggacttacttcggaaactgtatgattccggtgggctgttataaccgtaaggcggcggagtttatggaagagaagggatttgtgacggcggctgagattattagcgatttggtgaaagggttgagttcaagaaagatagagaccattgcggacactttcgtggaaggatttagttttcagagttggagtacacagtttgggacgatagccgggtcgacccggttgggagtatacgaggcggatttcgggtggggaagacccgttaaagttgatattgtctccattgaccaaggagaagcgatcgcaatggctgagagacgtgatgagtcaggtggcgttgagattggaatgtgtttgaaaaagactgaaatggattcggtcgtgtcttttttcaacaatggtttacatagctaaactcttgttttgtaagattttaataataaggtaatgcttggtt

SEQ ID NO: 107290 - protein, 451 aa, Arabidopsis thaliana
  peptide (1)..(451): Ceres Seq. ID no. 13621912
MTLHVIETARVTPTDYSVINSANLHKLPLTFFDLPWLLFQPVKRVFFYELTESTRDHFHSIILPKLKDSLSLILRNYLPLTGHITWEPNEPKPSIIVSENGVVLVTIAESDADFSHLSGYGQRPLSELHALVPKLPVSDDSATAFSIQITLFPNQGFSIGVAAHHAVLDGKTSSTFIKAWAQICKQELQSMPENLTPSYDRSLIKYPTYLDEKMIELVRSLKEDQTNIRSLTSLPSSKLGDDVVLATLVLSRADIERLREQVKNVSPSLHLSTFVIAYAYAWTCFVKARGGNKDRSVSLLFVGDFRDRLDPKLPGTYFGNCMIPVGCYNRKAAEFMEEKGFVTAAEIISDLVKGLSSRKIETIADTFVEGFSFQSWSTQFGTIAGSTRLGVYEADFGWGRPVKVDIVSIDQGEAIAMAERRDESGGVEIGMCLKKTEMDSVVSFFNNGLHS

SEQ ID NO: 107291 - protein, 261 aa, Arabidopsis thaliana
  peptide (1)..(261): Ceres Seq. ID no. 13621913
MPENLTPSYDRSLIKYPTYLDEKMIELVRSLKEDQTNIRSLTSLPSSKLGDDVVLATLVLSRADIERLREQVKNVSPSLHLSTFVIAYAYAWTCFVKARGGNKDRSVSLLFVGDFRDRLDPKLPGTYFGNCMIPVGCYNRKAAEFMEEKGFVTAAEIISDLVKGLSSRKIETIADTFVEGFSFQSWSTQFGTIAGSTRLGVYEADFGWGRPVKVDIVSIDQGEAIAMAERRDESGGVEIGMCLKKTEMDSVVSFFNNGLHS

SEQ ID NO: 107292 - protein, 238 aa, Arabidopsis thaliana
  peptide (1)..(238): Ceres Seq. ID no. 13621914
MIELVRSLKEDQTNIRSLTSLPSSKLGDDVVLATLVLSRADIERLREQVKNVSPSLHLSTFVIAYAYAWTCFVKARGGNKDRSVSLLFVGDFRDRLDPKLPGTYFGNCMIPVGCYNRKAAEFMEEKGFVTAAEIISDLVKGLSSRKIETIADTFVEGFSFQSWSTQFGTIAGSTRLGVYEADFGWGRPVKVDIVSIDQGEAIAMAERRDESGGVEIGMCLKKTEMDSVVSFFNNGLHS

SEQ ID NO: 107293 - DNA, 1600 bp, Arabidopsis thaliana
  misc_feature (1)..(1600): Ceres Seq. ID no. 13622039
  misc_feature (1)..(1600): Ortholog of  Ceres SEQ ID NO 14314896 as cited in SEQ ID NO 54010
atgggtaaagagaagtttcacatcaacattgtggtcattggccacgtcgattctggaaagtcgacaaccactggacacttgatctacaagttgggtggtattgacaagcgtgtgatcgagaggttcgagaaggaggctgctgagatgaacaagaggtccttcaagtacgcatgggtgttggacaaacttaaggctgagcgtgagcgtggtatcaccattgacattgctctctggaagttcgagaccaccaagtactactgcactgtcattgatgctcctggtcatcgtgatttcatcaagaacatgatcactggtacctcccaggctgattgtgctgtccttatcattgactccaccactggtggttttgaggctggtatctccaaggatggtcagacccgtgagcacgctctccttgctttcacccttggtgtcaagcagatgatctgctgttgtaacaagatggatgccactacccccaagtactccaaggccaggtacgatgaaatcatcaaggaggtgtcttcctacttgaagaaggttggttacaaccccgacaaaatcccatttgtgcccatctctggatttgagggtgacaacatgattgagaggtccaccaaccttgactggtacaagggaccaactctccttgaggctcttgaccagatcaacgagcccaagaggccgtcagacaagccccttcgtctcccacttcaggatgtctacaagattggtggtattggaacggtgccagtgggacgtgttgagactggtatgatcaagcctggtatggttgtgacctttgctcccacaggattgaccactgaggtcaagtctgttgagatgcaccacgagtctcttcttgaggcacttccaggtgacaacgttgggttcaatgttaagaatgttgccgtgaaggatcttaagagagggtacgtcgcctccaactccaaggatgaccctgccaagggtgctgctaacttcacctcccaggtcatcatcatgaaccaccctggtcagattggtaacggttacgccccagtcttggattgccacacctctcacattgcagtcaagttctctgagatcttgaccaagattgacaggcgttctggtaaggagattgagaaggagcccaaattcttgaagaatggtgatgctggtatggtgaagatgactccaaccaagcccatggttgtggagaccttctctgagtacccaccacttggacgtttcgctgttagggacatgaggcagactgttgcagtcggtgttatcaagagtgttgacaagaaggacccaaccggagccaaggttaccaaggctgcagttaagaagggtgcaaagtgaactcgaatcctcaaaactctatccgcagatgaatcaaaaaacaatattagtttctttactttagtttggtatttggtcgcgtgttatagcttcgtttcttctccatcggaactctgttcccggaactgggttcttgatcggaggtggcggagctactttgcacctattttgcttttgaattgttatcaattttgaacctatttggagattcggttatatgatgtgattttccgaggatattctctctttt

SEQ ID NO: 107294 - protein, 449 aa, Arabidopsis thaliana; identical to SEQ ID NO: 27284
  peptide (1)..(449): Ceres Seq. ID no. 13622040

SEQ ID NO: 107295 - protein, 401 aa, Arabidopsis thaliana; identical to SEQ ID NO: 21437
  peptide (1)..(401): Ceres Seq. ID no. 13622041

SEQ ID NO: 107296 - protein, 348 aa, Arabidopsis thaliana; identical to SEQ ID NO: 21438
  peptide (1)..(348): Ceres Seq. ID no. 13622042

SEQ ID NO: 107297 - DNA, 1272 bp, Arabidopsis thaliana
  misc_feature (1)..(1272): Ceres Seq. ID no. 13622043
  misc_feature (1)..(1272): Ortholog of  Ceres SEQ ID NO 13495070 as cited in SEQ ID NO 53216
  misc_feature (1)..(1272): Ortholog of  Ceres SEQ ID NO 13656228 as cited in SEQ ID NO 65648
  misc_feature (1)..(1272): Ortholog of  Ceres SEQ ID NO 15176717 as cited in SEQ ID NO 0
  misc_feature (1)..(1272): Ortholog of  Ceres SEQ ID NO 15179618 as cited in SEQ ID NO 0
agctcttccccaccactccgattcatctttatcctctctctcatctcgtccgttgttgcataagtgctatggatctcgcgtcgaatcttggtgggaagatcgataaatccgatgttctcaccgccgtcgaaaagtatgagcaatatcatgtcttccatggaggaaacgaggaagagagaaaagccaattatactgacatggttaataagtactatgaccttgctactagcttttatgagtacggatggggagaatccttccattttgcacaaagatggaaaggagaatcgcttcgagagagtattaagcgacacgagcactttcttgctcttcagcttggcatccaaccaggacaaaaggtactggatgtaggatgtggaattggtggaccgttgagggaaattgcaagattcagcaattcagttgttaccgggctcaacaataacgaataccagatcaccagaggcaaggaactaaaccgacttgcaggtgtcgacaagacatgtaactttgtcaaggctgacttcatgaagatgccattcccggaaaacagtttcgatgcagtttatgcaatagaagcaacttgccatgcacctgatgcgtatggatgctacaaagagatctacagagtgctaaagcctgggcaatgttttgctgcctatgagtggtgtatgactgatgcatttgaccctgataacgccgaacatcagaaaataaagggagagatagagattggagatggtcttcctgacattaggctgactacaaaatgcctcgaagctctgaagcaggccggttttgaagtgatatgggaaaaggatctggccaaggactcgccggtcccatggtacttacctcttgacaaaaatcatttctcactcagtagcttccgccttacagctgttggacgattcataaccaaaaacatggtcaagatccttgaatacataagacttgcacctcaaggaagccaaagggtctcaaatttcctggagcaggctgcggaaggattagtcgacggtggaaggagagagattttcacgccaatgtatttcttcttggcccggaagccagagtaagcggatgagagatggcgatggtcatcgtaggtcgaatgaagtgacaaaatttctcaatttgcagtcttattttctatgtttatcggatttgttgcagagtttcttattcaccaactatattttggatgttcgtaacatgtcacgtgttgttcatgtgcactctgcctgaaatctgaatcatgtgcacatgccc

SEQ ID NO: 107298 - protein, 358 aa, Arabidopsis thaliana
  peptide (1)..(358): Ceres Seq. ID no. 13622044
LFPTTPIHLYPLSHLVRCCISAMDLASNLGGKIDKSDVLTAVEKYEQYHVFHGGNEEERKANYTDMVNKYYDLATSFYEYGWGESFHFAQRWKGESLRESIKRHEHFLALQLGIQPGQKVLDVGCGIGGPLREIARFSNSVVTGLNNNEYQITRGKELNRLAGVDKTCNFVKADFMKMPFPENSFDAVYAIEATCHAPDAYGCYKEIYRVLKPGQCFAAYEWCMTDAFDPDNAEHQKIKGEIEIGDGLPDIRLTTKCLEALKQAGFEVIWEKDLAKDSPVPWYLPLDKNHFSLSSFRLTAVGRFITKNMVKILEYIRLAPQGSQRVSNFLEQAAEGLVDGGRREIFTPMYFFLARKPE

SEQ ID NO: 107299 - protein, 336 aa, Arabidopsis thaliana; identical to SEQ ID NO: 26651
  peptide (1)..(336): Ceres Seq. ID no. 13622045

SEQ ID NO: 107300 - protein, 293 aa, Arabidopsis thaliana; identical to SEQ ID NO: 26652
  peptide (1)..(293): Ceres Seq. ID no. 13622046

SEQ ID NO: 107301 - DNA, 728 bp, Arabidopsis thaliana
  misc_feature (1)..(728): Ceres Seq. ID no. 13622136
  misc_feature (1)..(728): Ortholog of  Ceres SEQ ID NO 15179194 as cited in SEQ ID NO 0
aagtaagtaagagaaaaaccaaaagaagaagagaaacaacaagaagaagtaatggcttcctctatgttctcctccaccgctgtggttacctccccggctcaagccaccatggtcgctccattcaccggcttgaagtcatccgcttctttcccggtcacccgcaaggccaacaacgacattacttccatcacaagcaacggaggaagagttagctgcatgaaggtgtggccaccaatcggaaagaagaagtttgagactctatcttacctccctgaccttagtgacgttgaattggctaaggaagttgactaccttctccgcaacaagtggattccttgtgttgaattcgagttggagcacggatttgtgtaccgtgagcacggaaacactcccggatactatgatggacgatactggacaatgtggaagcttccattgttcggatgcaccgactccgctcaagtgttgaaggaagttgaagaatgcaagaaggagtaccctggcgccttcattaggatcatcggattcgacaacacccgtcaagtccaatgcatcagtttcattgcctacaagcccccaagcttcaccgaagcttaatcccctttctggaatattcagcgttgattattctggaacccatttctatgtggtcaatgcaaatttaagaaattatttgccgacttaacagttgaggaactattgtttgaaagtgaaaatgttattcctac

SEQ ID NO: 107302 - protein, 181 aa, Arabidopsis thaliana; identical to SEQ ID NO: 86291
  peptide (1)..(181): Ceres Seq. ID no. 13622137

SEQ ID NO: 107303 - protein, 177 aa, Arabidopsis thaliana; identical to SEQ ID NO: 86292
  peptide (1)..(177): Ceres Seq. ID no. 13622138

SEQ ID NO: 107304 - protein, 162 aa, Arabidopsis thaliana; identical to SEQ ID NO: 47248
  peptide (1)..(162): Ceres Seq. ID no. 13622139

SEQ ID NO: 107305 - DNA, 1234 bp, Arabidopsis thaliana
  misc_feature (1)..(1234): Ceres Seq. ID no. 13622144
  misc_feature (1)..(1234): Ortholog of  Ceres SEQ ID NO 13593831 as cited in SEQ ID NO 53828
aacaaaattttatgttattgtcaatttgtcatcatcgtctttattttttatttctcaactttctttgcattacatcttccaactatataattaaccactctactttctcaaatcccacactcagagaagaagaagaagaaaaaaaacagagctttacaatttctctctacagagatcgaagatatggaaggcaaggaagaagacgttagagttggagctaacaagttcccggagagacaaccaatcggaacatcagctcagagtgacaaggactacaaggaaccaccaccagctccgtttttcgaacctggtgagctttcttcatggtctttttggagagctgggatcgctgagttcatcgctacttttctctttctctacatcactgtcttgactgttatgggagtgaaaaggtcaccgaacatgtgtgcttccgtcggaatccaaggaatcgcttgggctttcggtggtatgatatttgccttagtctactgtaccgctggtatctccggtggacacatcaacccagcggttacttttggtctgttcttagcccggaagctgtcgcttactagagctctgtactacatagtgatgcagtgcttgggagctatctgtggtgctggagtggttaaagggttccagcctaagcaataccaggctctaggaggaggagctaacactgtggctcatggttacaccaagggaagtggtcttggagctgagatcattggcacattcgttcttgtatacacagtcttctcagcaactgacgccaagagaaatgctcgtgactctcatgtccctattcttgcaccactcccaatcgggtttgcggttttcttggttcacttggcaaccatcccaatcactggcacaggcatcaacccagctagaagccttggagctgcaatcatctacaacaaagaccattcctgggatgaccactgggtgttttgggttggccccttcattggagctgcacttgctgctctttaccatgtggttgtcatcagagccatccccttcaagtccagaagctaagtaaaaacaagacatcaagtcctctggtttctggccttgtccttagttgcttctatagttctattgttgatctactacatgtatgtgtgcaatgtgtttatctatgtgccctcttaatgcaatatttgtaaacaaggaagaagttccaaaggagaattatttgcaaattatgatgtttaacatgtttatt

SEQ ID NO: 107306 - protein, 286 aa, Arabidopsis thaliana; identical to SEQ ID NO: 97671
  peptide (1)..(286): Ceres Seq. ID no. 13622145

SEQ ID NO: 107307 - protein, 214 aa, Arabidopsis thaliana; identical to SEQ ID NO: 27567
  peptide (1)..(214): Ceres Seq. ID no. 13622146

SEQ ID NO: 107308 - protein, 206 aa, Arabidopsis thaliana; identical to SEQ ID NO: 27568
  peptide (1)..(206): Ceres Seq. ID no. 13622147

SEQ ID NO: 107309 - DNA, 1033 bp, Arabidopsis thaliana
  misc_feature (1)..(1033): Ceres Seq. ID no. 13645690
  misc_feature (1)..(1033): Ortholog of  Ceres SEQ ID NO 13599581 as cited in SEQ ID NO 0
aatctttccctctcctcctcgaacaaaaacaacaaacgcagagaaactcaaaactcgaaaacgtttcatatagcaacgatgctttcttcatctccaacttcctttactcatccatttctctcttcttctccgcctctatctccgatatctccgccgtctcgcacggctcggatctctccacctctcgtctccgcctcttgctcatacacctacacggaagattcgccgagactgcatcagatcccgcggcgattgacgacggtgccagcttcgctttacgatgttcttgaggttcctttaggcgcgacgagtcaggatatcaaatcggcttaccggagattagccaggatctgccatccagacgtggcgggaactgatcggacttcttcttcatcggcggatgaattcatgaagatccatgccgcttactgtacgctttctgatcctgagaaacgctccgtttatgatcggaggatgttgcgacggagccgtcctttgaccgtcggaacctccgggttgggaagctacgtcggacggaactgggaaaccgatcagtgttggtagtgagttaactcggtgaccgagttagtagaacgagttaattagtgtaaatacgaagccataaaatccttgtaatttaatcatagtaagctaacatggacgggaactagtgtgctaacatacgccatgtgcttaccgtacgctccctcccccacgagcgatcggtgccgtttgtatccgtgtttacgtaggatctacgcgttttttttaccttgtgaatcctattagtttaaataatcaatgaaaatcatataaaaagatattttcttttgattatggtttggtttctttccctaaggtaagctcactaagcactgattttgagcacttctttattgttgttgatattacttgttcaaaataaccgagtgtaataaataaacaaatctaatagtatggttttattttagttgcaatcaattacgtttaggtttatagccaagttaatgctaaaacgcgggtattctgtgtt

SEQ ID NO: 107310 - protein, 187 aa, Arabidopsis thaliana
  peptide (1)..(187): Ceres Seq. ID no. 13645691
NLSLSSSNKNNKRRETQNSKTFHIATMLSSSPTSFTHPFLSSSPPLSPISPPSRTARISPPLVSASCSYTYTEDSPRLHQIPRRLTTVPASLYDVLEVPLGATSQDIKSAYRRLARICHPDVAGTDRTSSSSADEFMKIHAAYCTLSDPEKRSVYDRRMLRRSRPLTVGTSGLGSYVGRNWETDQCW

SEQ ID NO: 107311 - protein, 161 aa, Arabidopsis thaliana
  peptide (1)..(161): Ceres Seq. ID no. 13645692
MLSSSPTSFTHPFLSSSPPLSPISPPSRTARISPPLVSASCSYTYTEDSPRLHQIPRRLTTVPASLYDVLEVPLGATSQDIKSAYRRLARICHPDVAGTDRTSSSSADEFMKIHAAYCTLSDPEKRSVYDRRMLRRSRPLTVGTSGLGSYVGRNWETDQCW

SEQ ID NO: 107312 - protein, 95 aa, Arabidopsis thaliana
  peptide (1)..(95): Ceres Seq. ID no. 13645693
SFPLLLEQKQQTQRNSKLENVSYSNDAFFISNFLYSSISLFFSASISDISAVSHGSDLSTSRLRLLLIHLHGRFAETASDPAAIDDGASFALRCS

SEQ ID NO: 107313 - DNA, 1578 bp, Arabidopsis thaliana
  misc_feature (1)..(1578): Ceres Seq. ID no. 13645782
  misc_feature (1)..(1578): Ortholog of  Ceres SEQ ID NO 14312212 as cited in SEQ ID NO 54399
  misc_feature (1)..(1578): Ortholog of  Ceres SEQ ID NO 15225341 as cited in SEQ ID NO 55222
  misc_feature (1)..(1578): Ortholog of  Ceres SEQ ID NO 13653980 as cited in SEQ ID NO 69253
ccctctttgctctcactatcaaaactctgaatttcgatttcaatggagtcacgcgtgctgttacgcgccaccgcgaatgtcgttggaattccgaaattgagacgaccaatcggagcgatccaccgtcaattcagcactgcatcgtcttcctcgttctcggttaaaccaatcggaggaatcggagagggagcgaatctgatctccggtcgtcagcttcgtccaattcttcttctcgattcgtcggcgatcaacggaggagagaaaagagaaattctcaaaccggttaaagccgccgctgctgaaggtggagataccgctggggatgctaaagttggattcctcgccaagtatccatggctagtcactggattcttcttcttcatgtggtacttcttgaatgtgattttcaacatccttaacaagaagatctataattacttcccttatccctattttgtatcggtgatacacttgttcgtgggagttgtttactgcttgatcagctggtccgtgggtcttcctaaacgtgccccgattgactcgaacctcctcaaggtattgataccagtcgcagtctgtcacgccttaggccatgtcactagcaatgtctctttcgctgcggttgctgtctccttcactcacaccatcaaagcacttgagccattcttcaatgcggctgcttctcaattcattatgggacaatccatccccataacactatggttgtctctagctcctgttgttcttggtgttgcaatggcttcactaactgagctatcattcaactggctcggtttcatcagtgctatgatatcaaacatttctttcacttaccgaagcatcttctccaagaaagccatgactgatatggacagtacaaatgtctacgcttacatctccatcatcgcactcttcgtctgcattcctcctgccatcatcgttgaaggtcctaaactacttaaccatggtttcgccgacgcgattgctaaagttggaatgactaaattcatctctgatctcttctgggttggaatgttttaccatctctacaatcagctggctaccaataccttggagagggttgcaccgctgactcacgcggttggaaacgttctgaaacgtgtgttcgtgatcggtttctccatcgttatcttcggaaacaagatatcgacacagacaggtataggaacaggaatagccattgctggagttgcaatgtactctatcattaaggccaagatcgaagaagagaaacggcaaggaaagaaagcatagaaagcagctgaagacggcggtcgacagttgcataaacaagttctccgatggatatatatatctatataataaataaccaaatgcaatagtatgttgtattgtaccatcaaccattgttttcgagtttttcctttctttgttttttttttgctttctgaaaagttatatataaattttttattctgcttcttctctttttaatggagaacattttcatttccatttcttctgatatgcaattatcttaacggataaaaggcataataatgtatttatttgctctttctcttggagcatataccc

SEQ ID NO: 107314 - protein, 410 aa, Arabidopsis thaliana; identical to SEQ ID NO: 106343
  peptide (1)..(410): Ceres Seq. ID no. 13645783

SEQ ID NO: 107315 - protein, 297 aa, Arabidopsis thaliana; identical to SEQ ID NO: 23306
  peptide (1)..(297): Ceres Seq. ID no. 13645784

SEQ ID NO: 107316 - DNA, 1152 bp, Arabidopsis thaliana
  misc_feature (1)..(1152): Ceres Seq. ID no. 13645999
  misc_feature (1)..(1152): Ortholog of  Ceres SEQ ID NO 14305750 as cited in SEQ ID NO 52458
  misc_feature (1)..(1152): Ortholog of  Ceres SEQ ID NO 12608276 as cited in SEQ ID NO 57871
  misc_feature (1)..(1152): Ortholog of  Ceres SEQ ID NO 13598492 as cited in SEQ ID NO 63882
  misc_feature (1)..(1152): Ortholog of  Ceres SEQ ID NO 13657914 as cited in SEQ ID NO 66230
  misc_feature (1)..(1152): Ortholog of  Ceres SEQ ID NO 13595877 as cited in SEQ ID NO 67702
actcatctctaacgtttctttctatctctaatccaagcaacaatatggattccgtaatcgctttcgacagatctccgatgtttcgagtctacaagagtggccgcattgagcgtctcttaggagaaacaaccgtcccaccatctcttacaccacaaaacggtgtcgtctccaaagatatcatccattcaccggagaaaaacctctccctccgcatctacctaccggagaaagtcactgttaaaaagctcccaatcctcatctacttccacggtggtggtttcatcatagaaacagctttttctccaccctaccacactttcctcacatccgccgtcgcggccgctaactgcttagcaatatcagtaaactatcgccgtgcaccggagtttccggtacctattccgtacgaagattcatgggattcactcaaatgggtgttaactcatatcacaggaaccggaccggaaacttggataaacaaacacggcgatttcggaaaagtgtttctcgccggagatagcgccggtggaaacatatctcatcatctaacgatgcgagcgaaaaaagagaagctttgtgattctttaatatcagggataatcttgattcatccatatttttggagtaagactccaattgatgagtttgaggttagagacgtggggaagacgaaaggtgttgaaggaagttggagagtcgcaagtccgaatagtaaacaaggagttgatgatccatggctcaacgttgtcggatcggatccatccggattaggttgcgggcgggttttggtaatggtagctggagatgatctgtttgtgagacaaggttggtgttacgcggagaagctgaagaagagtggatgggaaggtgaagttgaggtaatggagactaaaaatgaaggtcatgtttttcatttgaagaatcctaatagtgataatgctcgtcaagtcgtgaagaaacttgaagagtttattaataagtaatattaatgagtacgtttgtcgaaggagataacaataactaaagaataaattggtgtatttgtcactgattacatatagaattatgctatcacatttagggttaaagccaagaggagtcagttaaagtttcagttattttctttcaagtaactgatagaaagacgattaa

SEQ ID NO: 107317 - protein, 326 aa, Arabidopsis thaliana
  peptide (1)..(326): Ceres Seq. ID no. 13646000
SSLTFLSISNPSNNMDSVIAFDRSPMFRVYKSGRIERLLGETTVPPSLTPQNGVVSKDIIHSPEKNLSLRIYLPEKVTVKKLPILIYFHGGGFIIETAFSPPYHTFLTSAVAAANCLAISVNYRRAPEFPVPIPYEDSWDSLKWVLTHITGTGPETWINKHGDFGKVFLAGDSAGGNISHHLTMRAKKEKLCDSLISGIILIHPYFWSKTPIDEFEVRDVGKTKGVEGSWRVASPNSKQGVDDPWLNVVGSDPSGLGCGRVLVMVAGDDLFVRQGWCYAEKLKKSGWEGEVEVMETKNEGHVFHLKNPNSDNARQVVKKLEEFINK

SEQ ID NO: 107318 - protein, 312 aa, Arabidopsis thaliana
  peptide (1)..(312): Ceres Seq. ID no. 13646001
MDSVIAFDRSPMFRVYKSGRIERLLGETTVPPSLTPQNGVVSKDIIHSPEKNLSLRIYLPEKVTVKKLPILIYFHGGGFIIETAFSPPYHTFLTSAVAAANCLAISVNYRRAPEFPVPIPYEDSWDSLKWVLTHITGTGPETWINKHGDFGKVFLAGDSAGGNISHHLTMRAKKEKLCDSLISGIILIHPYFWSKTPIDEFEVRDVGKTKGVEGSWRVASPNSKQGVDDPWLNVVGSDPSGLGCGRVLVMVAGDDLFVRQGWCYAEKLKKSGWEGEVEVMETKNEGHVFHLKNPNSDNARQVVKKLEEFINK

SEQ ID NO: 107319 - protein, 301 aa, Arabidopsis thaliana
  peptide (1)..(301): Ceres Seq. ID no. 13646002
MFRVYKSGRIERLLGETTVPPSLTPQNGVVSKDIIHSPEKNLSLRIYLPEKVTVKKLPILIYFHGGGFIIETAFSPPYHTFLTSAVAAANCLAISVNYRRAPEFPVPIPYEDSWDSLKWVLTHITGTGPETWINKHGDFGKVFLAGDSAGGNISHHLTMRAKKEKLCDSLISGIILIHPYFWSKTPIDEFEVRDVGKTKGVEGSWRVASPNSKQGVDDPWLNVVGSDPSGLGCGRVLVMVAGDDLFVRQGWCYAEKLKKSGWEGEVEVMETKNEGHVFHLKNPNSDNARQVVKKLEEFINK

SEQ ID NO: 107320 - DNA, 1411 bp, Arabidopsis thaliana
  misc_feature (1)..(1411): Ceres Seq. ID no. 13646259
  misc_feature (1)..(1411): Ortholog of  Ceres SEQ ID NO 13654409 as cited in SEQ ID NO 68534
aaagaaaaagtctattagagatcgatgaaggattaaagacgatcaataacggagatagagatcgattacaataatggatgaagagtatgatgtgattgtccttgggactggtcttaaggagtgtatccttagtggcctcctctctgtcgatggcctcaaggtactacatatggatagaaacgactactatggaggagaatcatcctctcttaacctcactcagctatggaagcgttttaggggaagtgacactcctgaagaaaatcttggagcaagcagagaatacaatgtcgatatgatcccaaagtttataatggctaatggactccttgttcaaaccctaatccacaccgatgttaccaagtatcttaactttaaggccgttgatggtagctttgtctacaagaaaggcaagatctacaaagtcccagccactgatgtggaagccctgaaatcgccattgatgggtcttttcgagaagcgacgtgcgagaaagttctttatctatgtgcaagactatgatgagaaggatcctaagtctcacgaaggacttgacctaagcaaagtcactgctagagagatcatctcaaagtatggacttgaagatgacacaatcgacttcatagggcatgccttagcgcttcacaacgatgatgactacttggatcaacccgccattgattttgttaagagaatcaagctctatgcggagtctctggctcgattccaaggaggatccccttacatctatccgttgtacggtctaggagagctgccacaggcttttgcacgtttgagtgctgtgtacggtgggacttacatgctcaacaagcccgaatgcaaggtagagtttgatggttctggaaaagctattggtgtcacttctgcaggagaaactgctaaatgcaagaaagttgtatgtgatccttcttacctgtctgaaaaggttaagaaagttggaaaagtaactcgagcggtgtgtataatgagccatcctattccagacacaaatgatgctcactcggttcaaatcattcttcctcagaagcaactcggtcgcaaatcagacatgtacttgttctgttgctcatacgctcacaatgtggcaccaaagggcaaatacatagcttttgtctctgcagaagctgaaactgacaatccagaagaggagcttaaacccggaatcgaattgcttggacctactgatgagatcttctatcattcttatgacacatacgttccaaccaatattcaagaagaagataactgtttcatctctgctacttacgatgcaacaacacatttcgagagtacagttgtagatgtacttgacatgtacaccaagatcactggaaagactcttgatttgtctgtggacttgagtgctgcaagtgctgctgcagagaattga

SEQ ID NO: 107321 - protein, 445 aa, Arabidopsis thaliana; identical to SEQ ID NO: 44495
  peptide (1)..(445): Ceres Seq. ID no. 13646260

SEQ ID NO: 107322 - protein, 413 aa, Arabidopsis thaliana; identical to SEQ ID NO: 44496
  peptide (1)..(413): Ceres Seq. ID no. 13646261

SEQ ID NO: 107323 - protein, 371 aa, Arabidopsis thaliana; identical to SEQ ID NO: 44497
  peptide (1)..(371): Ceres Seq. ID no. 13646262

SEQ ID NO: 107324 - DNA, 3020 bp, Arabidopsis thaliana
  misc_feature (1)..(3020): Ceres Seq. ID no. 13646381
  misc_feature (1)..(3020): Ortholog of  Ceres SEQ ID NO 14306148 as cited in SEQ ID NO 1370
gctctctctctctctttcgctgctctcacacgcaaataatggctcatctcttcagggagctgtctctgggccactccaagagagagtctacgccgccgccgccgtcacattcggcgacttcacgttcttcttcaatgtcttccgatctacctccatcaccactcggacaactcgctgtccaactttccgattccgatctccgtctcactgcttacgagatcttcgtcgccgcatgtcgtagcgccaccggtaaacctctctcatcggctgtttcagtcgctgttttgaatcaggattctcccaatggctctcctgcttcgccggcgattcagcgttctctgacctcaaccgccgctagtaaaatgaagaaagctttggggttaaggtcgtcttcttcgctttcacctggatctaataagagttctggttctgcttcgggttctaatggtaagtcgaaacgtcctactactgtcggtgagcttatgcggatccaaatgcgagtatcggaggctgtcgattctcgtgttcgtagagcttttcttagaatcgctgcttcacaggttggaaggaagattgagtcagtagttcttcctttagagttgttacagcagctaaagtcttctgattttacggatcagcaagaatatgatgcttggctgaagagatcattgaaggttcttgaggcaggtcttttgttgcatcctcgtgtacctcttgataagacgaatagttctcaacgactgcgacagattattcatggtgctttagatcggcctttggagactggaaggaataatgagcaaatgcaaagtcttagatcagcggtcatgtctcttgcaactagatctgatgggtctttctctgattcttgtcactgggctgatggatctccgtttaatctcaggctttatgaattgcttttagaagcgtgttttgattctaatgatgcgacgtccatggttgaggaagttgacgacctaatggaacatataaagaagacgtgggtaattcttggaatcaatcaaatgctgcataacctctgttttacgtggcttttgtttagtcgttatgttgttactggacaagttgagatggacctgcttcatgcttgtgattctcaactggcagaagttgctaaagatgcaaagacaacaaaggatcctgaatactcccaggttttaagttctacactgagtgctatattaggatgggcagagaaaaggctccttgcataccatgacacttttgaccgaggaaatattcataccatggagggaattgtttctttgggtgtatcagctgccaggatattagttgaagatatatctaacgagtaccgtagaagaaggaaaggagaagttgatgtagctcgtaccaggattgagacgtacatcaggtcctcactacgaacttcttttgcgcaggcaagtatttgcattgtcagaatggagaaagcagattcaagccggagagcatctaggaaccagaaaaatcctcttcctgttctagccatccttgctaaggacattggtgagctagctattcaggaaaagcggatgttcagtccaatattgaagagatggcatccgtttgctgcaggggttgctgtggcgacccttcatgtttgttacggaaatgagattaaacagtttatagccggaatatctgaattgacacctgatgctgtccagatactaagagctgcagataagctagaaaaggatctggtgcaaatcgcagtagaggattctgttgacagtgatgatggtggcaaagcaattatccgtgaaatgcctcccttcgaagctgagaccgtaattgctaatttggtcaaagactggataaaggcaagaatagacagacttaaggaatgggttgacaggaatttgcagcaagaggtttggaaacccctggagaacctagaaggaggatatgcacagtctgctgccgaagtgttgcggattactgatgaaactttggaagctttttttcagcttcccatacctatgcatcctgctgtattacctgatttaattattggtttagacaaatatcttcagtattatgtctcaaaggcgaaatctggctgcggctctcggactacgtacatgcctacaatgcctgcactcaccagatgtacaacgggatcaaaattccaatggaagaagaaagaaaagacacctaccactcagaagagagaatctcaggtttcggttatgaacggtgagaattcttttggggtcacgcaaatatgtgtcagaataaacagcttgcacaaaatccgcagtgagcttgatgttgtggaaaaaagagtgatcacacatttgaggaactgtgagtcagctcacaccgatgacttttccaacggcttagaaaaaaagtttgagctcacaccagcggcttgcatagaaggcgttcaacagctttctgagtctctggcttataaggtcgtcttccacgacctaagccacacgttatgggacgggttatacatcggagacctctcttcctctagaatcgatcctttcctcaaggaactcgaacagaatttgacagtcatagcagagacagtacatgaaagagttcgaacacgcatcatcaccgatattatgagagcctctttagatggcttcttacttgtcctgcttgccggaggaccctctagggcgttcacaagacaagactctcagataatggaagaagatttcaaatcaatgaaagatatgttctgggctaacggagacggtctagccatggacctgatcgataaattctcaaccactgtcagaggcgtgcttcctctgttcagtacagatacagacagtttaatagagaggttcaagggaacgaccctcgaagcatatggttcttcagctaagtcgaggcttccgttgcctccaacatcaggccagtggaatggcatggagccaaacacactcttacgtgttttgtgttaccgtaacgacgaatctgccacgaggtttctcaagaagacatataatctacctaagaagctttag

SEQ ID NO: 107325 - protein, 1005 aa, Arabidopsis thaliana
  peptide (1)..(1005): Ceres Seq. ID no. 13646382
SLSLFRCSHTQIMAHLFRELSLGHSKRESTPPPPSHSATSRSSSMSSDLPPSPLGQLAVQLSDSDLRLTAYEIFVAACRSATGKPLSSAVSVAVLNQDSPNGSPASPAIQRSLTSTAASKMKKALGLRSSSSLSPGSNKSSGSASGSNGKSKRPTTVGELMRIQMRVSEAVDSRVRRAFLRIAASQVGRKIESVVLPLELLQQLKSSDFTDQQEYDAWLKRSLKVLEAGLLLHPRVPLDKTNSSQRLRQIIHGALDRPLETGRNNEQMQSLRSAVMSLATRSDGSFSDSCHWADGSPFNLRLYELLLEACFDSNDATSMVEEVDDLMEHIKKTWVILGINQMLHNLCFTWLLFSRYVVTGQVEMDLLHACDSQLAEVAKDAKTTKDPEYSQVLSSTLSAILGWAEKRLLAYHDTFDRGNIHTMEGIVSLGVSAARILVEDISNEYRRRRKGEVDVARTRIETYIRSSLRTSFAQASICIVRMEKADSSRRASRNQKNPLPVLAILAKDIGELAIQEKRMFSPILKRWHPFAAGVAVATLHVCYGNEIKQFIAGISELTPDAVQILRAADKLEKDLVQIAVEDSVDSDDGGKAIIREMPPFEAETVIANLVKDWIKARIDRLKEWVDRNLQQEVWKPLENLEGGYAQSAAEVLRITDETLEAFFQLPIPMHPAVLPDLIIGLDKYLQYYVSKAKSGCGSRTTYMPTMPALTRCTTGSKFQWKKKEKTPTTQKRESQVSVMNGENSFGVTQICVRINSLHKIRSELDVVEKRVITHLRNCESAHTDDFSNGLEKKFELTPAACIEGVQQLSESLAYKVVFHDLSHTLWDGLYIGDLSSSRIDPFLKELEQNLTVIAETVHERVRTRIITDIMRASLDGFLLVLLAGGPSRAFTRQDSQIMEEDFKSMKDMFWANGDGLAMDLIDKFSTTVRGVLPLFSTDTDSLIERFKGTTLEAYGSSAKSRLPLPPTSGQWNGMEPNTLLRVLCYRNDESATRFLKKTYNLPKKL

SEQ ID NO: 107326 - protein, 993 aa, Arabidopsis thaliana
  peptide (1)..(993): Ceres Seq. ID no. 13646383
MAHLFRELSLGHSKRESTPPPPSHSATSRSSSMSSDLPPSPLGQLAVQLSDSDLRLTAYEIFVAACRSATGKPLSSAVSVAVLNQDSPNGSPASPAIQRSLTSTAASKMKKALGLRSSSSLSPGSNKSSGSASGSNGKSKRPTTVGELMRIQMRVSEAVDSRVRRAFLRIAASQVGRKIESVVLPLELLQQLKSSDFTDQQEYDAWLKRSLKVLEAGLLLHPRVPLDKTNSSQRLRQIIHGALDRPLETGRNNEQMQSLRSAVMSLATRSDGSFSDSCHWADGSPFNLRLYELLLEACFDSNDATSMVEEVDDLMEHIKKTWVILGINQMLHNLCFTWLLFSRYVVTGQVEMDLLHACDSQLAEVAKDAKTTKDPEYSQVLSSTLSAILGWAEKRLLAYHDTFDRGNIHTMEGIVSLGVSAARILVEDISNEYRRRRKGEVDVARTRIETYIRSSLRTSFAQASICIVRMEKADSSRRASRNQKNPLPVLAILAKDIGELAIQEKRMFSPILKRWHPFAAGVAVATLHVCYGNEIKQFIAGISELTPDAVQILRAADKLEKDLVQIAVEDSVDSDDGGKAIIREMPPFEAETVIANLVKDWIKARIDRLKEWVDRNLQQEVWKPLENLEGGYAQSAAEVLRITDETLEAFFQLPIPMHPAVLPDLIIGLDKYLQYYVSKAKSGCGSRTTYMPTMPALTRCTTGSKFQWKKKEKTPTTQKRESQVSVMNGENSFGVTQICVRINSLHKIRSELDVVEKRVITHLRNCESAHTDDFSNGLEKKFELTPAACIEGVQQLSESLAYKVVFHDLSHTLWDGLYIGDLSSSRIDPFLKELEQNLTVIAETVHERVRTRIITDIMRASLDGFLLVLLAGGPSRAFTRQDSQIMEEDFKSMKDMFWANGDGLAMDLIDKFSTTVRGVLPLFSTDTDSLIERFKGTTLEAYGSSAKSRLPLPPTSGQWNGMEPNTLLRVLCYRNDESATRFLKKTYNLPKKL

SEQ ID NO: 107327 - protein, 961 aa, Arabidopsis thaliana
  peptide (1)..(961): Ceres Seq. ID no. 13646384
MSSDLPPSPLGQLAVQLSDSDLRLTAYEIFVAACRSATGKPLSSAVSVAVLNQDSPNGSPASPAIQRSLTSTAASKMKKALGLRSSSSLSPGSNKSSGSASGSNGKSKRPTTVGELMRIQMRVSEAVDSRVRRAFLRIAASQVGRKIESVVLPLELLQQLKSSDFTDQQEYDAWLKRSLKVLEAGLLLHPRVPLDKTNSSQRLRQIIHGALDRPLETGRNNEQMQSLRSAVMSLATRSDGSFSDSCHWADGSPFNLRLYELLLEACFDSNDATSMVEEVDDLMEHIKKTWVILGINQMLHNLCFTWLLFSRYVVTGQVEMDLLHACDSQLAEVAKDAKTTKDPEYSQVLSSTLSAILGWAEKRLLAYHDTFDRGNIHTMEGIVSLGVSAARILVEDISNEYRRRRKGEVDVARTRIETYIRSSLRTSFAQASICIVRMEKADSSRRASRNQKNPLPVLAILAKDIGELAIQEKRMFSPILKRWHPFAAGVAVATLHVCYGNEIKQFIAGISELTPDAVQILRAADKLEKDLVQIAVEDSVDSDDGGKAIIREMPPFEAETVIANLVKDWIKARIDRLKEWVDRNLQQEVWKPLENLEGGYAQSAAEVLRITDETLEAFFQLPIPMHPAVLPDLIIGLDKYLQYYVSKAKSGCGSRTTYMPTMPALTRCTTGSKFQWKKKEKTPTTQKRESQVSVMNGENSFGVTQICVRINSLHKIRSELDVVEKRVITHLRNCESAHTDDFSNGLEKKFELTPAACIEGVQQLSESLAYKVVFHDLSHTLWDGLYIGDLSSSRIDPFLKELEQNLTVIAETVHERVRTRIITDIMRASLDGFLLVLLAGGPSRAFTRQDSQIMEEDFKSMKDMFWANGDGLAMDLIDKFSTTVRGVLPLFSTDTDSLIERFKGTTLEAYGSSAKSRLPLPPTSGQWNGMEPNTLLRVLCYRNDESATRFLKKTYNLPKKL

SEQ ID NO: 107328 - DNA, 2568 bp, Arabidopsis thaliana
  misc_feature (1)..(2568): Ceres Seq. ID no. 13646430
  misc_feature (1)..(2568): Ortholog of  Ceres SEQ ID NO 14309755 as cited in SEQ ID NO 20741
aaataaaatcagttacagaggaggagcacatcatcgtgttcttcttcgactcggcgattccaaaaaaggacgcttgcttcatcgccggcgtcgctgtatcactctccggccgagtctttcactttttgtttcgaaggaatgcaaaactatggtgattgattaaatcgtgtgacaatcgaaaagttgaggaattgcaaggattcgagatagagtctaaaatggagcaccaagaccttacagattcgagaaaggatcctctttgcatttctcaattgaaaatttcttcttcttctctcgacccattgcctcaggccaacatggcagaggatttaacaaagagtcgtagacattcacctataaaagtggaagggagtgaagaaacttggggagtagaagatgatgatgaccttactgaccctatttttgataccattgagggcaatggacattcagatccaacaagctgcttcgatgctgatttaagtgagtacaaaaagaaggccacagtaatcgttgaggaatactttggcaccaatgatgttgtctctgttgttaatgaactaaaggagcttggaatggctgagtaccgttattattttgtcaagaagttagtctccatggctatggatagacatgacaaagagaaagaaatggctgcttttctcctctctaccctttatgccgacgtcattgatcccccagaagtttacagaggtttcaacaaactggtcgcttctgctgatgatttatctgttgatattcccgatgcagttgatgttcttgctgtctttgtggctcgggcaattgttgacgacattcttcctcctgcgtttctcaagaagcaaatgaaattgctgccagataactccaaaggtgttgaggttttgagaaaggctgagaagagctatctagcgactccgcttcatgctgaagttgttgagaagagatggggagggactgataattggactgctgaggatgtgaaagctagaattaacgacttgttgaaagagtatgtcatgagtggagacaaaaaagaagcttttagatgcatcaaaggattgaaagttcctttctttcatcatgagattgtcaaacgagcactgatcatggcaatggaaaggcgaaaagctcaagtcaggctgctagatctgttgaaagaaacgattgaggttggtctcataaactccactcaggtgacaaaagggtttagcagaatcattgattcaatcgaagatttgtctcttgacataccagacgcacgccgtattttacagtctttcatctctaaagcggcttctgaaggatggttatgtgcttcttctctgaaatcactctctgctgatgcaggagaaaagttacttgaaaactccagcgccaatgtttttaaagacaaggcgaagtcgatcatccgagagtatttcctttcaggtgacacttcagaggtcgtacattgtctagacaccgaattgaatgcatcttcgagtcagctacgcgcaatctttgtcaaatatctgataactctagcaatggacaggaagaaaagagagaaggagatggcttgtgtgctcgtctctactcttggtttccctcccaaagatgtcagaagcgcattctcgatgctcatagaatctgcagacgacactgctttggacaacccagtggttgttgaagaccttgccatgttcttagcaagagctgtggttgacgaggtgttagctccacgggatttggaagaagtgttaaatcagactcccgaggcaggctcaagtgtgggcgagaaagtgattcaaatggcgaaaacattgctgaaagcacgtctttccggtgaaaggatcttacgttgctggggaggaggaggaattgagacaaactcgccgggatccacagtgaaggaagtgaaagagaagatccagattcttctagaagagtatgtctctggtggagacctcagagaagctagtaggtgcgtaaaggaactaggaatgccgttttttcaccacgaagtagtgaagaagtcagtagtgaggatcatagaagagaaggagaacgaggaacggttatggaagctactaaaagtgtgttttgattcaggactagtgacgatatatcagatgactaaagggtttaaaagagttgatgaatcacttgaagatctgtctttggatgtccctgatgctgccaaaaagttttcaagttgcgttgaaagaggcaagcttgaagggttcttggacgaatcattcgcttctgaggattcgcaaagtaagaaacagaacggctcgtcttcttcctctggatgataacatttgagcaccatacctcaaacctcgagacgttggtttcacgcaaaatcaccttttggagttttttttttttttttcttataaacaaactaaaaaagttttggatactttttgatgacgtttcttacagaaaacaaatttatctttatcttagtgacgttttgttatagcacattattactttatgacctgttttttttgttcctttgtcaatgattacattgtcttgctaatattttcatacagaaattttattttatattct

SEQ ID NO: 107329 - protein, 693 aa, Arabidopsis thaliana
  peptide (1)..(693): Ceres Seq. ID no. 15218749
MEHQDLTDSRKDPLCISQLKISSSSLDPLPQANMAEDLTKSRRHSPIKVEGSEETWGVEDDDDLTDPIFDTIEGNGHSDPTSCFDADLSEYKKKATVIVEEYFGTNDVVSVVNELKELGMAEYRYYFVKKLVSMAMDRHDKEKEMAAFLLSTLYADVIDPPEVYRGFNKLVASADDLSVDIPDAVDVLAVFVARAIVDDILPPAFLKKQMKLLPDNSKGVEVLRKAEKSYLATPLHAEVVEKRWGGTDNWTAEDVKARINDLLKEYVMSGDKKEAFRCIKGLKVPFFHHEIVKRALIMAMERRKAQVRLLDLLKETIEVGLINSTQVTKGFSRIIDSIEDLSLDIPDARRILQSFISKAASEGWLCASSLKSLSADAGEKLLENSSANVFKDKAKSIIREYFLSGDTSEVVHCLDTELNASSSQLRAIFVKYLITLAMDRKKREKEMACVLVSTLGFPPKDVRSAFSMLIESADDTALDNPVVVEDLAMFLARAVVDEVLAPRDLEEVLNQTPEAGSSVGEKVIQMAKTLLKARLSGERILRCWGGGGIETNSPGSTVKEVKEKIQILLEEYVSGGDLREASRCVKELGMPFFHHEVVKKSVVRIIEEKENEERLWKLLKVCFDSGLVTIYQMTKGFKRVDESLEDLSLDVPDAAKKFSSCVERGKLEGFLDESFASEDSQSKKQNGSSSSSG

SEQ ID NO: 107330 - protein, 660 aa, Arabidopsis thaliana
  peptide (1)..(660): Ceres Seq. ID no. 15218750
MAEDLTKSRRHSPIKVEGSEETWGVEDDDDLTDPIFDTIEGNGHSDPTSCFDADLSEYKKKATVIVEEYFGTNDVVSVVNELKELGMAEYRYYFVKKLVSMAMDRHDKEKEMAAFLLSTLYADVIDPPEVYRGFNKLVASADDLSVDIPDAVDVLAVFVARAIVDDILPPAFLKKQMKLLPDNSKGVEVLRKAEKSYLATPLHAEVVEKRWGGTDNWTAEDVKARINDLLKEYVMSGDKKEAFRCIKGLKVPFFHHEIVKRALIMAMERRKAQVRLLDLLKETIEVGLINSTQVTKGFSRIIDSIEDLSLDIPDARRILQSFISKAASEGWLCASSLKSLSADAGEKLLENSSANVFKDKAKSIIREYFLSGDTSEVVHCLDTELNASSSQLRAIFVKYLITLAMDRKKREKEMACVLVSTLGFPPKDVRSAFSMLIESADDTALDNPVVVEDLAMFLARAVVDEVLAPRDLEEVLNQTPEAGSSVGEKVIQMAKTLLKARLSGERILRCWGGGGIETNSPGSTVKEVKEKIQILLEEYVSGGDLREASRCVKELGMPFFHHEVVKKSVVRIIEEKENEERLWKLLKVCFDSGLVTIYQMTKGFKRVDESLEDLSLDVPDAAKKFSSCVERGKLEGFLDESFASEDSQSKKQNGSSSSSG

SEQ ID NO: 107331 - protein, 574 aa, Arabidopsis thaliana
  peptide (1)..(574): Ceres Seq. ID no. 15218751
MAEYRYYFVKKLVSMAMDRHDKEKEMAAFLLSTLYADVIDPPEVYRGFNKLVASADDLSVDIPDAVDVLAVFVARAIVDDILPPAFLKKQMKLLPDNSKGVEVLRKAEKSYLATPLHAEVVEKRWGGTDNWTAEDVKARINDLLKEYVMSGDKKEAFRCIKGLKVPFFHHEIVKRALIMAMERRKAQVRLLDLLKETIEVGLINSTQVTKGFSRIIDSIEDLSLDIPDARRILQSFISKAASEGWLCASSLKSLSADAGEKLLENSSANVFKDKAKSIIREYFLSGDTSEVVHCLDTELNASSSQLRAIFVKYLITLAMDRKKREKEMACVLVSTLGFPPKDVRSAFSMLIESADDTALDNPVVVEDLAMFLARAVVDEVLAPRDLEEVLNQTPEAGSSVGEKVIQMAKTLLKARLSGERILRCWGGGGIETNSPGSTVKEVKEKIQILLEEYVSGGDLREASRCVKELGMPFFHHEVVKKSVVRIIEEKENEERLWKLLKVCFDSGLVTIYQMTKGFKRVDESLEDLSLDVPDAAKKFSSCVERGKLEGFLDESFASEDSQSKKQNGSSSSSG

SEQ ID NO: 107332 - DNA, 2390 bp, Arabidopsis thaliana
  misc_feature (1)..(2390): Ceres Seq. ID no. 13646599
  misc_feature (1)..(2390): Ortholog of  Ceres SEQ ID NO 13654989 as cited in SEQ ID NO 63117
  misc_feature (1)..(2390): Ortholog of  Ceres SEQ ID NO 13584744 as cited in SEQ ID NO 69137
atgtggctaccaaaagcaaatggggcaaagaaagaaacaggaagtggttcagtagcagttgcaatagacaaagacaaaggaagccaacatgctcttaaatggacaatcgacaatcttgcttctcgtggccaaaccatttctcttattcatgtcctctgcagatctcattcttcttcagatcttgaagaaggaacgccacaacagaaacagcaaatggagaagatagctaaagatctctttgtatccttccactgctattgttcccgtaaagagataaattgtcgagacattttgctggaagacgcagacaaagttcgagccattaccgaatatgtttcatcttctgcaattgagaacttagtcgttggatctgcatcacgtaatggcttcatgagaagattcaagacggatttgccaacaacagtgtcaaaatcagctccagatttctgcaatgtttatgtcatttcaaaaggcaaaattgcttcagtacgaaatgcatcacgtcctgctccttaccaaaattcgatgcagcaatgtgaaattgacaatcatcacccacatactcctgacaaagcaccaaagtaccatgaccatcccaattctgcaggtagtacaccatctagaccgcgcaaatcagttgaagcagataggtataggaattggaagcttgttgtgatgtctttaagtccgtcttctcatcgtgactctgacatttccttcatcagctcaggaagaccaagcgttgagcggtcttcctttagccttgattttcctgaatctgcaaggacttcaagaatgtcaacgagctcagagcaaagcattggctcaaatcgtttgggaattaagttcagtgatcctgatttccttaacgaatcctctacattctctgaagagagtggtagaacatcctcctattcatctcagagcttggatgatgttgaagctgaaatgaagaggctgcgtctagagctgaaacaaaccatggatatgtatagcacagcttgtaaagaagctttaagcgctagacaacaggcaacggagctgcaaaagctgagaaccgaagaggagagacggttggaagaagcaaaaagttcagaggaagcagcaatgtcaatagtggaaaaggagagagctaaagccaaagcagcgttggaagctgctgaagctgcaaagagattagcagaagtggaatctaaaagaaggttgactgcagagatgaagacaatgaaggaatcagattcattctctcgcggatttgttcggtataggaaatacacggttgacgaaatcgaagaagctacttcaaattttgcagagtctcaaaaggtaggagaaggaggctatggtcctgtctttagaggctttcttgatcacacaagtgttgctgttaaagttctacgcccagacgcagctcaagggagatcacagtttcagaaagaggttgaagtgttaagctgcataaggcatccaaacatggtgcttcttcttggagcttgtccagaatttgggattcttgtttatgaatacatggccaaaggaagtttagaagaccggcttttcatgcgaggaaacacaccgccgattacctggcagctacgtttcagaatcgctgctgagatcgccacgggactcctcttcctccaccagaccaaacctgaaccaattgtccacagagaccttaaaccaggaaatgttctgctcgattacaactatgtgagcaagatcagtgatgtcgggctagcgagattagtccctgcagtagcggaaaacgttacacagtacagagtcacttcagctgcaggaactttctgttacattgatcctgagtaccaacaaacaggaatgttgggtgtgaagtcagatgtttattctcttggaatcatgcttttgcagatcttaaccgcaaaacagccaatgggtttggcttattacgttgaacaagcgatcgaagaagggactcttaaggatatgcttgatccagcagtaccggactggcctatagaagaagctctatctttagcaaagctttcgcttcaatgcgcggaactaagaagaaaagatagacctgacctcgggaaagagatattgcctgagctcaatcggttaagagagataggtgaagagagtttagagagtgtgttttatgcaggaaatcaaggaaagtctccaaacactagccaagtctcgattccggaatctccagctgcagactctcaatcctagttttgatatgagggaagcaaatgtgctctaacactcaatttgcaggagttataaacaaaagcagagcaagtttctttgctgattagtgtatagcattagaggaatttggtattctgttaaataatcagttatgtaaccgcctttttgttaggcccataacggttttg

SEQ ID NO: 107333 - protein, 740 aa, Arabidopsis thaliana
  peptide (1)..(740): Ceres Seq. ID no. 13646600
MWLPKANGAKKETGSGSVAVAIDKDKGSQHALKWTIDNLASRGQTISLIHVLCRSHSSSDLEEGTPQQKQQMEKIAKDLFVSFHCYCSRKEINCRDILLEDADKVRAITEYVSSSAIENLVVGSASRNGFMRRFKTDLPTTVSKSAPDFCNVYVISKGKIASVRNASRPAPYQNSMQQCEIDNHHPHTPDKAPKYHDHPNSAGSTPSRPRKSVEADRYRNWKLVVMSLSPSSHRDSDISFISSGRPSVERSSFSLDFPESARTSRMSTSSEQSIGSNRLGIKFSDPDFLNESSTFSEESGRTSSYSSQSLDDVEAEMKRLRLELKQTMDMYSTACKEALSARQQATELQKLRTEEERRLEEAKSSEEAAMSIVEKERAKAKAALEAAEAAKRLAEVESKRRLTAEMKTMKESDSFSRGFVRYRKYTVDEIEEATSNFAESQKVGEGGYGPVFRGFLDHTSVAVKVLRPDAAQGRSQFQKEVEVLSCIRHPNMVLLLGACPEFGILVYEYMAKGSLEDRLFMRGNTPPITWQLRFRIAAEIATGLLFLHQTKPEPIVHRDLKPGNVLLDYNYVSKISDVGLARLVPAVAENVTQYRVTSAAGTFCYIDPEYQQTGMLGVKSDVYSLGIMLLQILTAKQPMGLAYYVEQAIEEGTLKDMLDPAVPDWPIEEALSLAKLSLQCAELRRKDRPDLGKEILPELNRLREIGEESLESVFYAGNQGKSPNTSQVSIPESPAADSQS

SEQ ID NO: 107334 - protein, 669 aa, Arabidopsis thaliana
  peptide (1)..(669): Ceres Seq. ID no. 13646601
MEKIAKDLFVSFHCYCSRKEINCRDILLEDADKVRAITEYVSSSAIENLVVGSASRNGFMRRFKTDLPTTVSKSAPDFCNVYVISKGKIASVRNASRPAPYQNSMQQCEIDNHHPHTPDKAPKYHDHPNSAGSTPSRPRKSVEADRYRNWKLVVMSLSPSSHRDSDISFISSGRPSVERSSFSLDFPESARTSRMSTSSEQSIGSNRLGIKFSDPDFLNESSTFSEESGRTSSYSSQSLDDVEAEMKRLRLELKQTMDMYSTACKEALSARQQATELQKLRTEEERRLEEAKSSEEAAMSIVEKERAKAKAALEAAEAAKRLAEVESKRRLTAEMKTMKESDSFSRGFVRYRKYTVDEIEEATSNFAESQKVGEGGYGPVFRGFLDHTSVAVKVLRPDAAQGRSQFQKEVEVLSCIRHPNMVLLLGACPEFGILVYEYMAKGSLEDRLFMRGNTPPITWQLRFRIAAEIATGLLFLHQTKPEPIVHRDLKPGNVLLDYNYVSKISDVGLARLVPAVAENVTQYRVTSAAGTFCYIDPEYQQTGMLGVKSDVYSLGIMLLQILTAKQPMGLAYYVEQAIEEGTLKDMLDPAVPDWPIEEALSLAKLSLQCAELRRKDRPDLGKEILPELNRLREIGEESLESVFYAGNQGKSPNTSQVSIPESPAADSQS

SEQ ID NO: 107335 - protein, 610 aa, Arabidopsis thaliana
  peptide (1)..(610): Ceres Seq. ID no. 13646602
MRRFKTDLPTTVSKSAPDFCNVYVISKGKIASVRNASRPAPYQNSMQQCEIDNHHPHTPDKAPKYHDHPNSAGSTPSRPRKSVEADRYRNWKLVVMSLSPSSHRDSDISFISSGRPSVERSSFSLDFPESARTSRMSTSSEQSIGSNRLGIKFSDPDFLNESSTFSEESGRTSSYSSQSLDDVEAEMKRLRLELKQTMDMYSTACKEALSARQQATELQKLRTEEERRLEEAKSSEEAAMSIVEKERAKAKAALEAAEAAKRLAEVESKRRLTAEMKTMKESDSFSRGFVRYRKYTVDEIEEATSNFAESQKVGEGGYGPVFRGFLDHTSVAVKVLRPDAAQGRSQFQKEVEVLSCIRHPNMVLLLGACPEFGILVYEYMAKGSLEDRLFMRGNTPPITWQLRFRIAAEIATGLLFLHQTKPEPIVHRDLKPGNVLLDYNYVSKISDVGLARLVPAVAENVTQYRVTSAAGTFCYIDPEYQQTGMLGVKSDVYSLGIMLLQILTAKQPMGLAYYVEQAIEEGTLKDMLDPAVPDWPIEEALSLAKLSLQCAELRRKDRPDLGKEILPELNRLREIGEESLESVFYAGNQGKSPNTSQVSIPESPAADSQS

SEQ ID NO: 107336 - DNA, 2278 bp, Arabidopsis thaliana
  misc_feature (1)..(2278): Ceres Seq. ID no. 13646608
  misc_feature (1)..(2278): Ortholog of  Ceres SEQ ID NO 12460981 as cited in SEQ ID NO 65146
agagcccaacattggattcctcttctttgaccattcctctctacctgaataacccgttaatctctctctgtccctttcttcttcttttttcaagaacaataaaaaaatgtctcaagattctgcaactactactccgccgccacctttaacctccgacgtttcaatgccttccggtgaagaagatgagccaaagcatgtaacatcggaagaagaggcaccggtgacttcggagacaaatctgaagctacctttgatgccggagctagaggagtcaaatcatacggcggaggttgtttcagagaaggtgacgccggagacgatgactttggagtcagaaggtctcaaccacgcggcggaggattcagagcagacacatgaagtgacgccggagacagagactgcgaagctagaggttctcaaccacacggcggaggattcagagcagacacatgaagtgacgccggagaaagagactgtgaaatcagagtttctcaaccacgtggcggaggattcagagcagacacatgaagtgacgccggagacagagactgtgaagtcagaggttctcaaccatgcggcggaggattcagagcagccacgtggagtgacaccgacgccggagacagaaacatcggaggcagacacgtcattgcttgtaacttccgagacagaagagcctaaccatgcggcggaggattattcagagacagagccatcacagaaactaatgttggagcagaggagaaagtacatggaagtagaagattggacagagccagaactaccagatgaagcggtgttagaagctgcagcgtcagtccctgagccaaagcaaccagagcctcagacaccaccaccaccaccatctactactacttccactgttgcatctagatctttagccgaaatgatgaacagagaagaagcagaagtagaagagaaacaaaagattcagattcctcgtagtctcggttcattcaaagaagaaacaaacaaaatctccgatctttcagaaacagagttaaacgcacttcaagagcttcgtcaccttcttcaagtatcacaagattcaagcaaaacctctatatggggtgtgccacttctcaaagacgacagaaccgacgtcgttttgttaaagtttctaagagcaagagactttaaacctcaagaagcttactcaatgctaaacaagacactccaatggagaatcgacttcaacatcgaagagcttctagacgaaaacctcggtgacgatttagacaaagttgtgttcatgcaaggacaagacaaggagaatcatcctgtctgttacaatgtctacggtgagtttcagaacaaagatctttatcagaaaacgttttcagatgaagagaagagagaacggttcttgagatggaggattcagtttcttgaaaagagtatcaggaatcttgattttgtagctggtggtgtttccacgatatgtcaagtaaatgatcttaagaattctccaggacctggtaagactgagcttaggttagctactaagcaagctcttcatcttcttcaagacaattaccctgagtttgtctctaaacagatattcatcaatgttccatggtggtaccttgcgttctatagaattattagtccttttatgtcacaaaggtcaaagagcaaactagttttcgcaggtccttcaagatctgcagaaacccttctcaagtacatatcacccgaacatgtcccggttcagtatggtggactaagtgtggataattgcgagtgtaactcggatttcacacacgatgatatcgctaccgagattactgttaaaccaactactaaacaaaccgtcgagattattgtttacgaggtgagaccattttgtataaagacattttatacaactttttcaaacgcccatttctgtgtttgtgtttggaagataactaattgtggtttcaatactaagtacttaagattcagctatgttttgaagtcttcttacatttgtgcctcaaaacacttttttcttcagaaatgtacaatcgtgtgggagataagagtagtgggatgggaggtttcgtatggagcggagtttgtgccggagaacaaagaagggtatacagtgatcattcagaaaccgaggaagatgactgcgaaaaatgaactggtggtgtctcatagcttcaaagttggagaagttggcaggattttgctaactgttgataacccgacttcgaccaagaaaatgcttatctacaggttcaaggttaagcctttagcttgtgagtaa

SEQ ID NO: 107337 - protein, 723 aa, Arabidopsis thaliana
  peptide (1)..(723): Ceres Seq. ID no. 13646609
MSQDSATTTPPPPLTSDVSMPSGEEDEPKHVTSEEEAPVTSETNLKLPLMPELEESNHTAEVVSEKVTPETMTLESEGLNHAAEDSEQTHEVTPETETAKLEVLNHTAEDSEQTHEVTPEKETVKSEFLNHVAEDSEQTHEVTPETETVKSEVLNHAAEDSEQPRGVTPTPETETSEADTSLLVTSETEEPNHAAEDYSETEPSQKLMLEQRRKYMEVEDWTEPELPDEAVLEAAASVPEPKQPEPQTPPPPPSTTTSTVASRSLAEMMNREEAEVEEKQKIQIPRSLGSFKEETNKISDLSETELNALQELRHLLQVSQDSSKTSIWGVPLLKDDRTDVVLLKFLRARDFKPQEAYSMLNKTLQWRIDFNIEELLDENLGDDLDKVVFMQGQDKENHPVCYNVYGEFQNKDLYQKTFSDEEKRERFLRWRIQFLEKSIRNLDFVAGGVSTICQVNDLKNSPGPGKTELRLATKQALHLLQDNYPEFVSKQIFINVPWWYLAFYRIISPFMSQRSKSKLVFAGPSRSAETLLKYISPEHVPVQYGGLSVDNCECNSDFTHDDIATEITVKPTTKQTVEIIVYEVRPFCIKTFYTTFSNAHFCVCVWKITNCGFNTKYLRFSYVLKSSYICASKHFFLQKCTIVWEIRVVGWEVSYGAEFVPENKEGYTVIIQKPRKMTAKNELVVSHSFKVGEVGRILLTVDNPTSTKKMLIYRFKVKPLACE

SEQ ID NO: 107338 - protein, 704 aa, Arabidopsis thaliana
  peptide (1)..(704): Ceres Seq. ID no. 13646610
MPSGEEDEPKHVTSEEEAPVTSETNLKLPLMPELEESNHTAEVVSEKVTPETMTLESEGLNHAAEDSEQTHEVTPETETAKLEVLNHTAEDSEQTHEVTPEKETVKSEFLNHVAEDSEQTHEVTPETETVKSEVLNHAAEDSEQPRGVTPTPETETSEADTSLLVTSETEEPNHAAEDYSETEPSQKLMLEQRRKYMEVEDWTEPELPDEAVLEAAASVPEPKQPEPQTPPPPPSTTTSTVASRSLAEMMNREEAEVEEKQKIQIPRSLGSFKEETNKISDLSETELNALQELRHLLQVSQDSSKTSIWGVPLLKDDRTDVVLLKFLRARDFKPQEAYSMLNKTLQWRIDFNIEELLDENLGDDLDKVVFMQGQDKENHPVCYNVYGEFQNKDLYQKTFSDEEKRERFLRWRIQFLEKSIRNLDFVAGGVSTICQVNDLKNSPGPGKTELRLATKQALHLLQDNYPEFVSKQIFINVPWWYLAFYRIISPFMSQRSKSKLVFAGPSRSAETLLKYISPEHVPVQYGGLSVDNCECNSDFTHDDIATEITVKPTTKQTVEIIVYEVRPFCIKTFYTTFSNAHFCVCVWKITNCGFNTKYLRFSYVLKSSYICASKHFFLQKCTIVWEIRVVGWEVSYGAEFVPENKEGYTVIIQKPRKMTAKNELVVSHSFKVGEVGRILLTVDNPTSTKKMLIYRFKVKPLACE

SEQ ID NO: 107339 - protein, 674 aa, Arabidopsis thaliana
  peptide (1)..(674): Ceres Seq. ID no. 13646611
MPELEESNHTAEVVSEKVTPETMTLESEGLNHAAEDSEQTHEVTPETETAKLEVLNHTAEDSEQTHEVTPEKETVKSEFLNHVAEDSEQTHEVTPETETVKSEVLNHAAEDSEQPRGVTPTPETETSEADTSLLVTSETEEPNHAAEDYSETEPSQKLMLEQRRKYMEVEDWTEPELPDEAVLEAAASVPEPKQPEPQTPPPPPSTTTSTVASRSLAEMMNREEAEVEEKQKIQIPRSLGSFKEETNKISDLSETELNALQELRHLLQVSQDSSKTSIWGVPLLKDDRTDVVLLKFLRARDFKPQEAYSMLNKTLQWRIDFNIEELLDENLGDDLDKVVFMQGQDKENHPVCYNVYGEFQNKDLYQKTFSDEEKRERFLRWRIQFLEKSIRNLDFVAGGVSTICQVNDLKNSPGPGKTELRLATKQALHLLQDNYPEFVSKQIFINVPWWYLAFYRIISPFMSQRSKSKLVFAGPSRSAETLLKYISPEHVPVQYGGLSVDNCECNSDFTHDDIATEITVKPTTKQTVEIIVYEVRPFCIKTFYTTFSNAHFCVCVWKITNCGFNTKYLRFSYVLKSSYICASKHFFLQKCTIVWEIRVVGWEVSYGAEFVPENKEGYTVIIQKPRKMTAKNELVVSHSFKVGEVGRILLTVDNPTSTKKMLIYRFKVKPLACE

SEQ ID NO: 107340 - DNA, 1698 bp, Arabidopsis thaliana
  misc_feature (1)..(1698): Ceres Seq. ID no. 13646617
  misc_feature (1)..(1698): Ortholog of  Ceres SEQ ID NO 15171446 as cited in SEQ ID NO 51590
atggcggttaagcacggcgtcgacggcgacggcagcgaaatcgaatcgagaactctggcggtagatcgaaaaagcggtttctgcgaatcaacatcgatattctacagcaaacgtgagccaatggctctcccgccaaaccaatttctcgacgtcacgtctttcattgcatcacagcctcatcgcggcaaaaccgtattcgtcgacgccgtaaccggtcgtcgactaagcttccctgagctctggctcggtgtcgaaagagtcgcgggttgtctttacgcattaggtgtacgcaaaggaaatgtcgtcattatactctctccaaactcaatcctcttcccgatcgtctccctctccgtaatgtcactcggcgcaatcataaccaccgctaatccgatcaacacgtccgacgaaatctccaaacagataggcgattcgcgtcctgttctcgccttcaccacatgcaaactcgtctccaaactcgccgccgcgtcgaattttaatctcccggtggttctcatggacgactaccacgttccttcgcaaagttacggtgaccgcgtgaaactagtcgggaggttagagacgatgattgaaacagaaccgagtgagtcacgagttaagcaacgagtcaaccaggacgacacggcggctctgttatactcatcaggtacgacggggacgagtaaaggagtaatgctgagtcaccgtaacctaatcgcattggtacaagcataccgggcccggttcggtttagagcagcgaaccatttgcacaatcccaatgtgtcacatcttcggattcggtggtttcgcgacggggctaatcgcgttaggatggacaatcgttgttcttcctaaattcgacatggctaagcttctctcggcggtggagactcatcgttcttcgtacctttctcttgtaccgccgattgtagtagctatggttaacggagcaaatgagattaattccaagtatgatctgagctcgttgcacactgtggtggctggaggagctccgttgagtagagaggtgacggagaagttcgttgagaattatcccaaggttaagatcctacaagggtatggtttgactgagtcaacggctatagctgcttctatgtttaataaagaggagactaagaggtatggagcttctggcttactggctccgaatgtggaaggtaagattgtggatccggatacgggtcgggttttgggtgtgaatcaaacgggtgagctgtggattcgaagtcctactgtgatgaaaggttatttcaagaataaagaagctactgcttctaccattgattcagaaggatggttgaaaactggagatttgtgttacattgacggtgatgggtttgtctttgttgttgatagattaaaggagctcatcaaatgcaatggttatcaggttgctccagctgaactagaggcattgttgcttgctcatccagagattgctgatgcagcagtaatacccatccctgacatgaaagctgggcaatatccaatggcatatatcgtaagaaaagttggaagtaacttatccgagagcgaaatcatgggatttgtcgcaaaacaggtatcaccgtacaagaagattcgcaaagtcacatttttggcttcaatccccaaaaatccttcgggcaagattttaagaagagaacttacaaagctcacaacttcaaaactctag

SEQ ID NO: 107341 - protein, 565 aa, Arabidopsis thaliana
  peptide (1)..(565): Ceres Seq. ID no. 13646618
MAVKHGVDGDGSEIESRTLAVDRKSGFCESTSIFYSKREPMALPPNQFLDVTSFIASQPHRGKTVFVDAVTGRRLSFPELWLGVERVAGCLYALGVRKGNVVIILSPNSILFPIVSLSVMSLGAIITTANPINTSDEISKQIGDSRPVLAFTTCKLVSKLAAASNFNLPVVLMDDYHVPSQSYGDRVKLVGRLETMIETEPSESRVKQRVNQDDTAALLYSSGTTGTSKGVMLSHRNLIALVQAYRARFGLEQRTICTIPMCHIFGFGGFATGLIALGWTIVVLPKFDMAKLLSAVETHRSSYLSLVPPIVVAMVNGANEINSKYDLSSLHTVVAGGAPLSREVTEKFVENYPKVKILQGYGLTESTAIAASMFNKEETKRYGASGLLAPNVEGKIVDPDTGRVLGVNQTGELWIRSPTVMKGYFKNKEATASTIDSEGWLKTGDLCYIDGDGFVFVVDRLKELIKCNGYQVAPAELEALLLAHPEIADAAVIPIPDMKAGQYPMAYIVRKVGSNLSESEIMGFVAKQVSPYKKIRKVTFLASIPKNPSGKILRRELTKLTTSKL

SEQ ID NO: 107342 - protein, 525 aa, Arabidopsis thaliana
  peptide (1)..(525): Ceres Seq. ID no. 13646619
MALPPNQFLDVTSFIASQPHRGKTVFVDAVTGRRLSFPELWLGVERVAGCLYALGVRKGNVVIILSPNSILFPIVSLSVMSLGAIITTANPINTSDEISKQIGDSRPVLAFTTCKLVSKLAAASNFNLPVVLMDDYHVPSQSYGDRVKLVGRLETMIETEPSESRVKQRVNQDDTAALLYSSGTTGTSKGVMLSHRNLIALVQAYRARFGLEQRTICTIPMCHIFGFGGFATGLIALGWTIVVLPKFDMAKLLSAVETHRSSYLSLVPPIVVAMVNGANEINSKYDLSSLHTVVAGGAPLSREVTEKFVENYPKVKILQGYGLTESTAIAASMFNKEETKRYGASGLLAPNVEGKIVDPDTGRVLGVNQTGELWIRSPTVMKGYFKNKEATASTIDSEGWLKTGDLCYIDGDGFVFVVDRLKELIKCNGYQVAPAELEALLLAHPEIADAAVIPIPDMKAGQYPMAYIVRKVGSNLSESEIMGFVAKQVSPYKKIRKVTFLASIPKNPSGKILRRELTKLTTSKL

SEQ ID NO: 107343 - protein, 446 aa, Arabidopsis thaliana
  peptide (1)..(446): Ceres Seq. ID no. 13646620
MSLGAIITTANPINTSDEISKQIGDSRPVLAFTTCKLVSKLAAASNFNLPVVLMDDYHVPSQSYGDRVKLVGRLETMIETEPSESRVKQRVNQDDTAALLYSSGTTGTSKGVMLSHRNLIALVQAYRARFGLEQRTICTIPMCHIFGFGGFATGLIALGWTIVVLPKFDMAKLLSAVETHRSSYLSLVPPIVVAMVNGANEINSKYDLSSLHTVVAGGAPLSREVTEKFVENYPKVKILQGYGLTESTAIAASMFNKEETKRYGASGLLAPNVEGKIVDPDTGRVLGVNQTGELWIRSPTVMKGYFKNKEATASTIDSEGWLKTGDLCYIDGDGFVFVVDRLKELIKCNGYQVAPAELEALLLAHPEIADAAVIPIPDMKAGQYPMAYIVRKVGSNLSESEIMGFVAKQVSPYKKIRKVTFLASIPKNPSGKILRRELTKLTTSKL

SEQ ID NO: 107344 - DNA, 2122 bp, Arabidopsis thaliana
  misc_feature (1)..(2122): Ceres Seq. ID no. 13646734
  misc_feature (1)..(2122): Ortholog of  Ceres SEQ ID NO 14307896 as cited in SEQ ID NO 66915
  misc_feature (1)..(2122): Ortholog of  Ceres SEQ ID NO 13657008 as cited in SEQ ID NO 69164
atgtcgacgatttgcagccacagagaacttaaagcttatcgtccgctgcaagataataatctacaggaggtgtatgcttcctcagctgctgcagtgcactacgatccagatctgaaactgttatctcaggatgtgaacatagttgcgacatacagtgaccattacggcaatatacgccttggtagggtgaaaatgggggatctttcaccttcttgggttttggagaatcctgcctatcaagttagccgcaaaacaaaaggttcgcagctagttataccacgggattcatttcaaaatgatactggaatggaagataatgcaagccattctacaactaatcagactgatgaaagcgaaaatcagtttccaaacgtggattttgcaagcccagcaaaactgaagcggcagattttacgtcaggaaaggagaggtcaacgaactttagagctgatccgacaagaaaaggaaactgatgagcagatgcaagaagcagccattcagaagtcaatgagctttgaaaactcagtcatagggaaatacagtatatggaggagagactatgagagcccaaatgctgatgctatcttgaagcttatgagagaccagatcataatggcaaaagcatatgcaaatattgccaaatcaaaaaatgtaaccaatctgtacgttttcttgatgcagcagtgtggagaaaataaacgtgttataggtaaagcaacctctgatgctgaccttccttcaagcgctcttgatcaagcaaaagccatgggccatgcactctctcttgcaaaagacgagttatatgactgccatgaacttgcaaaaaagttccgggccatccttcagtccactgaacgcaaagtagatggactgaagaaaaagggaaccttcttaattcagctagctgccaaaacatttcccaagccattgcattgcctgagtctgcagctagcggcagactattttattctaggtttcaatgaagaggatgcagtgaaagaggatgtcagtcaaaagaagcttgaagatccttcgctctatcactatgcgatcttttcggataacgttctggctacatcagtggtggtgaactccactgtcttgaatgcaaaggaaccgcagaggcatgtgttccatatagtaactgacaaactgaattttggtgcaatgaagatgtggtttcgcatcaatgctcctgctgatgcgacgattcaagttgaaaacataaatgatttcaagtggctgaactcctcttactgctctgttctacggcagcttgaatctgcaaggctgaaagaatactatttcaaagcaaatcatccttcatcaatctcagctggcgcagataatctaaagtaccgcaacccaaagtatctatcgatgctgaatcatctcagattctaccttcctgaggtttatccgaagctggagaagattctgtttctagacgatgacattgtggtgcagaaggacctggcaccactatgggaaatagacatgcaaggaaaagtgaatggtgcggtggagacgtgcaaggagagcttccacagatttgacaagtacctcaacttctcaaatccaaagatttcagagaattttgacgctggtgcttgtgggtgggcatttgggatgaatatgtttgacctgaaagagtggaggaaacggaacattacagggatatatcactattggcaagacttgaatgaagacagaacactgtggaagctgggatcgttgccaccggggctgataacattttacaacctgacgaatgcaatggagaggagctggcacgtactagggctgggatatgacccagcgctaaaccaaacagcaatagagaatgcagcggtagtgcattacaatgggaactacaagccatggctgggtttagcattcgccaagtacaaaccgtactggtccaagtacgttgagtacgacaacccttatctccgacggtgcgacatcaatgaatgaatgaagagatggtggaggtagtatacatgatgaagcactcaaaggaaactaaataagtaaaaattgttttcagtttaccataatactaggaatcagcagacaatcacacatgacgattaattaaatagaatctcttgtttttctc

SEQ ID NO: 107345 - protein, 658 aa, Arabidopsis thaliana
  peptide (1)..(658): Ceres Seq. ID no. 13646735
MSTICSHRELKAYRPLQDNNLQEVYASSAAAVHYDPDLKLLSQDVNIVATYSDHYGNIRLGRVKMGDLSPSWVLENPAYQVSRKTKGSQLVIPRDSFQNDTGMEDNASHSTTNQTDESENQFPNVDFASPAKLKRQILRQERRGQRTLELIRQEKETDEQMQEAAIQKSMSFENSVIGKYSIWRRDYESPNADAILKLMRDQIIMAKAYANIAKSKNVTNLYVFLMQQCGENKRVIGKATSDADLPSSALDQAKAMGHALSLAKDELYDCHELAKKFRAILQSTERKVDGLKKKGTFLIQLAAKTFPKPLHCLSLQLAADYFILGFNEEDAVKEDVSQKKLEDPSLYHYAIFSDNVLATSVVVNSTVLNAKEPQRHVFHIVTDKLNFGAMKMWFRINAPADATIQVENINDFKWLNSSYCSVLRQLESARLKEYYFKANHPSSISAGADNLKYRNPKYLSMLNHLRFYLPEVYPKLEKILFLDDDIVVQKDLAPLWEIDMQGKVNGAVETCKESFHRFDKYLNFSNPKISENFDAGACGWAFGMNMFDLKEWRKRNITGIYHYWQDLNEDRTLWKLGSLPPGLITFYNLTNAMERSWHVLGLGYDPALNQTAIENAAVVHYNGNYKPWLGLAFAKYKPYWSKYVEYDNPYLRRCDINE

SEQ ID NO: 107346 - protein, 594 aa, Arabidopsis thaliana
  peptide (1)..(594): Ceres Seq. ID no. 13646736
MGDLSPSWVLENPAYQVSRKTKGSQLVIPRDSFQNDTGMEDNASHSTTNQTDESENQFPNVDFASPAKLKRQILRQERRGQRTLELIRQEKETDEQMQEAAIQKSMSFENSVIGKYSIWRRDYESPNADAILKLMRDQIIMAKAYANIAKSKNVTNLYVFLMQQCGENKRVIGKATSDADLPSSALDQAKAMGHALSLAKDELYDCHELAKKFRAILQSTERKVDGLKKKGTFLIQLAAKTFPKPLHCLSLQLAADYFILGFNEEDAVKEDVSQKKLEDPSLYHYAIFSDNVLATSVVVNSTVLNAKEPQRHVFHIVTDKLNFGAMKMWFRINAPADATIQVENINDFKWLNSSYCSVLRQLESARLKEYYFKANHPSSISAGADNLKYRNPKYLSMLNHLRFYLPEVYPKLEKILFLDDDIVVQKDLAPLWEIDMQGKVNGAVETCKESFHRFDKYLNFSNPKISENFDAGACGWAFGMNMFDLKEWRKRNITGIYHYWQDLNEDRTLWKLGSLPPGLITFYNLTNAMERSWHVLGLGYDPALNQTAIENAAVVHYNGNYKPWLGLAFAKYKPYWSKYVEYDNPYLRRCDINE

SEQ ID NO: 107347 - protein, 556 aa, Arabidopsis thaliana; identical to SEQ ID NO: 45700
  peptide (1)..(556): Ceres Seq. ID no. 13646737

SEQ ID NO: 107348 - DNA, 1467 bp, Arabidopsis thaliana
  misc_feature (1)..(1467): Ceres Seq. ID no. 13646772
  misc_feature (1)..(1467): Ortholog of  Ceres SEQ ID NO 15226515 as cited in SEQ ID NO 58519
ggactgtccctgtggaagatataattttacatgtccgaattccggagaagaaaaagatgaagtgattgattaaattgaaatcgatcacatcaaccatctctttctctcgcctgcaaagttatctccttttcaaaccgaacgaatcaattcgggaatcttcatctttctacgtgttttctcagctatgtatctctgggttcgacttcagtaaaagcttcaccagccatggatttcgttaggggtttttggaggaagcatagaaggaaggtcttggtgacggctggttgtttgggaagtgggtatttactctacaaactatacaattcccatactcgtaggcttgctgatttggaacgagaactcgctcacgagcgtgaaaatgacgaaatcatcaaaacccaaatgaaagcacatttcgagagtattcagatgattgtggattcgaccacactgcctcacgcaatgcagtttttgagtatccgtatcagcgaggagatcgatgtctctcatgttatggacagactgaaccaagggaaaggaatgctgagtccacctgagaaacttcagctctgggatgagctcaagattttgagtttcacgaggatggttttgtctctgtggtctgtgacaatgcttagcttatacattagggttcaagtcaacattttaggcagacatttgtatgttgacaccgctcgagctcttggcagctctcatttacttgaagaggtagatctcattgatagagatgatgaacagaagtttttgtcgagtgctgattttcttgtcaccaatgcaatgccaagtttgatttcagatatgcagggttcagccgaggaagtccttaaaggaaagcagttaaaggatgtaattaccacaagagttcttcaagaaaccgtgatgcagattgtagatgtgtttatgagcactggaagcccacatcactgggttgattatttaatgatgcctcaagacacaaagctttcaagaaccacaagtgactcttctgatgaagctgtgtccaagtttcatcaactcatggttgagactcgagaagtactcatcagcactgaattcacaaatatagtcgaaatttcgctcaagtgcttcacggatgcgttggtagaggaaatggaaacgcagactgaagcaggcggtttggctacagggaaaccattggcaaaggtcttaccacagattgagaagacaatgaatgtgattacagctgaaccaagcaagaaccggttcttacaaatcatcagagatctgcctgaagttaaactcttttttactcttttatacgctaatatgccgcaatagcaacttttgtttgttctcttagaaattccccaaagtgttttgctatatgctttctttgtaggggggtcttttagcttgaaagaaatgcaggaattttcgtgttttgagcttgtagaaccaaagttgatttcatttatttgttttgat

SEQ ID NO: 107349 - protein, 364 aa, Arabidopsis thaliana; identical to SEQ ID NO: 45785
  peptide (1)..(364): Ceres Seq. ID no. 13646773

SEQ ID NO: 107350 - protein, 305 aa, Arabidopsis thaliana; identical to SEQ ID NO: 45786
  peptide (1)..(305): Ceres Seq. ID no. 13646774

SEQ ID NO: 107351 - protein, 296 aa, Arabidopsis thaliana; identical to SEQ ID NO: 45787
  peptide (1)..(296): Ceres Seq. ID no. 13646775

SEQ ID NO: 107352 - DNA, 3006 bp, Arabidopsis thaliana
  misc_feature (1)..(3006): Ceres Seq. ID no. 13646785
  misc_feature (1)..(3006): Ortholog of  Ceres SEQ ID NO 15168977 as cited in SEQ ID NO 20587
agctcactagtcccccccccccgacttttgaagctgtaataatattcttgaatctattcctttctttctctttctcatgtttaatcggtgaaggctttactctgtttctttcatcatgtttcaatcaaaagccttaactttttctttagctctttccattacaagagacctctagcttcatactttttataaaaattctctctttttctcagtttaatctcaagaaatggtttcaagatcgtattcaaatctgttggagttagcttcaggagactcaccaacgtttggacgcatgaaccgacaaatcccacgaatcatggccgttgctggaatcatgtcaaacatcgataatgactctaaagacactgatctgtctcctaaagatcgtatcatcattgtagccaatgaattacctatacgagctcagagaagggttgatggtaatggtagtggtagtagtagtagtagtacttgttgtagcaaaggttggaacttttcttgggatgagaattcacttcttctccaattgaaagatgggttaggagatgaagctattgaagttatctatgttggttgtttgaaagaagagattcctcttaatgagcaagaagaagtgtatcagattcttcttgagagtttcaagtgtgtgcctacgtttttgcctttggatttgtacactagatactaccatggattctgtaagcaacagctttggcctttgtttcattacatgttgccactttctcctgatcttggaggtaggtttgataggactttgtggcaagcttatgtctctgtgaacaagatttttgctgatagaattatggaggtgattaatcctgaggatgattttgtgtggatacatgattatcatttgatggttttgcctactttcttgaggaagaggtttaacagagtcaagcttggtttcttccttcatagtccatttccatcgtctgagatttacaaaactttgcctattcgtgaagagcttcttcgggctttgctaaactcggatttgatagggttccatacttttgactacgctaggcatttcttgtcttgttgtagtcgaatgcttggtcttacttatgaatctaagagaggatacattggacttgagtattatggtagaaccgtgagtatcaaaattctacctgttggaatccacatgggtcagcttcagtcggttttgagcttacccgagactgaaaggaaagtcggggaacttattgaacggtatggtcgaaaaggcaggacgatgctgcttggtgtggatgatatggacattttcaaagggattactttaaagctgttggctatggagcagctgcttatgcaacatcctgaatggcaagggaaggttgtgttggtgcagatagctaatccggcgagagggaaagggaaagatgttaaagagatgcaagctgagacgtattcaactgttaagcggattaatgaaacgtttgggagacccggttacgatcctatagtattgatcgatgcaccgttgaagttctatgaaagggttgcttattacgtagtagctgagtgttgtttggtgacagcggttagggatgggatgaatcttataccttatgagtacatagtttctcgtcaaggaaatgagaaactggacaaaattctgaagctggaggcgaataatcgtaacaagaaaagcatgctggtggtttctgagtttattggttgctctccatcgctaagcggagccattcgtgttaatccatggaatgttgatgcagtagctgatgcaatggatagtgcccttgaagtagctgaaccggagaagcagctaagacatgagaagcattacaagtatgtgagcacacatgatgttggctattgggctcgtagcttcctccaagatcttgagaggagttgtggtgagcatggacgaaggaggtgttggggaattgggtttggtctcagtttcagagttgtggcactagaccagagcttcaggaagctgtcaatggaacacatagtatcagcttataagaggacaaagacacgggctatccttttagactatgatgatactttaatgccacaaggctcgatcgataaaaggccttcatcgaagtcaatcgacatattgaacaccttgtgtagggacaagggcaatctggtgttcattgttagtgctaaaagccgagaaactctatcggactggtttagtccttgtgagaagcttggtattgctgctgaacatggctattttctgaggtattcaaccaaaactttttattttctagcattacctttatatcttataactcaagctccatctaactactacacaggctaaggaaggcagtagagtgggaaaactgtgtggcagcagtagattgttcttggaagcaaattgccgagcctgtgatggaactctacaccgagacaaccgatggctcaacaattgaagacaaggagactgctcttgtttggagttatgaggatgctgaccctgattttggctcatgtcaagctaaggaacttctagatcatcttgaaagtgtccttgccaatgaacctgtaacagtgaaacgaggacagaactatgttgaggtcaagccacagggcgtgagcaagggacttatagcgagaaggatgctttcgatgatgcaagaaagaggaacacttcctgagtttgttctatgtattggagatgaccggtctgacgaagacatgtttgaggtgatctgcagttccactgaaggcccttcgattgccccaagagctgagattttcgcttgtactgtcggtcaaaagcctagcaaggccaagtattacctggatgacactactgagattgtcaggttaatgcatggtttagcttctgttacagaccagatcactcctgtttaaacaatcacagagaaagtatcagagactagagatcttatgtttgtatatctaccacggaaaattgtaacaaagagagatcttatgtttgttgacaatcttagaatatatgagtaaggcttt

SEQ ID NO: 107353 - protein, 700 aa, Arabidopsis thaliana
  peptide (1)..(700): Ceres Seq. ID no. 13646786
MVSRSYSNLLELASGDSPTFGRMNRQIPRIMAVAGIMSNIDNDSKDTDLSPKDRIIIVANELPIRAQRRVDGNGSGSSSSSTCCSKGWNFSWDENSLLLQLKDGLGDEAIEVIYVGCLKEEIPLNEQEEVYQILLESFKCVPTFLPLDLYTRYYHGFCKQQLWPLFHYMLPLSPDLGGRFDRTLWQAYVSVNKIFADRIMEVINPEDDFVWIHDYHLMVLPTFLRKRFNRVKLGFFLHSPFPSSEIYKTLPIREELLRALLNSDLIGFHTFDYARHFLSCCSRMLGLTYESKRGYIGLEYYGRTVSIKILPVGIHMGQLQSVLSLPETERKVGELIERYGRKGRTMLLGVDDMDIFKGITLKLLAMEQLLMQHPEWQGKVVLVQIANPARGKGKDVKEMQAETYSTVKRINETFGRPGYDPIVLIDAPLKFYERVAYYVVAECCLVTAVRDGMNLIPYEYIVSRQGNEKLDKILKLEANNRNKKSMLVVSEFIGCSPSLSGAIRVNPWNVDAVADAMDSALEVAEPEKQLRHEKHYKYVSTHDVGYWARSFLQDLERSCGEHGRRRCWGIGFGLSFRVVALDQSFRKLSMEHIVSAYKRTKTRAILLDYDDTLMPQGSIDKRPSSKSIDILNTLCRDKGNLVFIVSAKSRETLSDWFSPCEKLGIAAEHGYFLRYSTKTFYFLALPLYLITQAPSNYYTG

SEQ ID NO: 107354 - protein, 678 aa, Arabidopsis thaliana
  peptide (1)..(678): Ceres Seq. ID no. 13646787
MNRQIPRIMAVAGIMSNIDNDSKDTDLSPKDRIIIVANELPIRAQRRVDGNGSGSSSSSTCCSKGWNFSWDENSLLLQLKDGLGDEAIEVIYVGCLKEEIPLNEQEEVYQILLESFKCVPTFLPLDLYTRYYHGFCKQQLWPLFHYMLPLSPDLGGRFDRTLWQAYVSVNKIFADRIMEVINPEDDFVWIHDYHLMVLPTFLRKRFNRVKLGFFLHSPFPSSEIYKTLPIREELLRALLNSDLIGFHTFDYARHFLSCCSRMLGLTYESKRGYIGLEYYGRTVSIKILPVGIHMGQLQSVLSLPETERKVGELIERYGRKGRTMLLGVDDMDIFKGITLKLLAMEQLLMQHPEWQGKVVLVQIANPARGKGKDVKEMQAETYSTVKRINETFGRPGYDPIVLIDAPLKFYERVAYYVVAECCLVTAVRDGMNLIPYEYIVSRQGNEKLDKILKLEANNRNKKSMLVVSEFIGCSPSLSGAIRVNPWNVDAVADAMDSALEVAEPEKQLRHEKHYKYVSTHDVGYWARSFLQDLERSCGEHGRRRCWGIGFGLSFRVVALDQSFRKLSMEHIVSAYKRTKTRAILLDYDDTLMPQGSIDKRPSSKSIDILNTLCRDKGNLVFIVSAKSRETLSDWFSPCEKLGIAAEHGYFLRYSTKTFYFLALPLYLITQAPSNYYTG

SEQ ID NO: 107355 - protein, 670 aa, Arabidopsis thaliana
  peptide (1)..(670): Ceres Seq. ID no. 13646788
MAVAGIMSNIDNDSKDTDLSPKDRIIIVANELPIRAQRRVDGNGSGSSSSSTCCSKGWNFSWDENSLLLQLKDGLGDEAIEVIYVGCLKEEIPLNEQEEVYQILLESFKCVPTFLPLDLYTRYYHGFCKQQLWPLFHYMLPLSPDLGGRFDRTLWQAYVSVNKIFADRIMEVINPEDDFVWIHDYHLMVLPTFLRKRFNRVKLGFFLHSPFPSSEIYKTLPIREELLRALLNSDLIGFHTFDYARHFLSCCSRMLGLTYESKRGYIGLEYYGRTVSIKILPVGIHMGQLQSVLSLPETERKVGELIERYGRKGRTMLLGVDDMDIFKGITLKLLAMEQLLMQHPEWQGKVVLVQIANPARGKGKDVKEMQAETYSTVKRINETFGRPGYDPIVLIDAPLKFYERVAYYVVAECCLVTAVRDGMNLIPYEYIVSRQGNEKLDKILKLEANNRNKKSMLVVSEFIGCSPSLSGAIRVNPWNVDAVADAMDSALEVAEPEKQLRHEKHYKYVSTHDVGYWARSFLQDLERSCGEHGRRRCWGIGFGLSFRVVALDQSFRKLSMEHIVSAYKRTKTRAILLDYDDTLMPQGSIDKRPSSKSIDILNTLCRDKGNLVFIVSAKSRETLSDWFSPCEKLGIAAEHGYFLRYSTKTFYFLALPLYLITQAPSNYYTG

SEQ ID NO: 107356 - DNA, 2458 bp, Arabidopsis thaliana
  misc_feature (1)..(2458): Ceres Seq. ID no. 13646820
  misc_feature (1)..(2458): Ortholog of  Ceres SEQ ID NO 13598023 as cited in SEQ ID NO 66487
gaagtaagtaaccaaaaacgcttctaatctttcgtttacaacaaatatctctctctctctcgctctctctttcttcttcttcatcttctttcatggctgttactggctgggcaatcacaatctgaattctttcttcctccttgtctctctgattttcgccgagttttgggggctcttgttggtacacgatgagtctggtggttggtcagtctctgggtttaactctagtcggtgatggtctttcgttacgcaattccaaaataaatgtcggaaaatcaaagtttttctcggtaaatcggaggagattggcgcgtgcggccctggtacaagctaggcctaaggaagacggagcggcggcaagtccttccccatcgtcgagaccggcgtcagttgtgcagtaccgacgagctgatctcgcggatgatcttcaagccgaggcacgagctttgggtcgtgctattgatgcttctatttactctccggagctcatcgccaggaaacatggctctcagcctttcaaggctttgcggagaagtttggagatattgggagctttgggtggtttcgctttgaaattggggattgaccagaagcagggcaacttagagaagaacatgaagaagagagcaatcgagctccggcggatcttcactcgtctcggacctacttttgttaaattgggtcaaggtttgtccacccgacccgacctctgtccacccgattaccttgaagaacttgcagagcttcaggatgctttgccaaccttccctgatgcagaggcatttgcttgcattgagagagagttggatttgtcgctagagaccattttctcgtctgtatctcctgagccaatcgcagcagctagtcttggccaggtttacaaagctcagctgaggtattcaggtcaggttgttgctgtcaaagttcaacgccctgggatcgaagaagccattggccttgatttttaccttattagaggagttgggaaactcattaacaagtatgtagacttcatcactaccgatgtccttacccttatcgatgagttcgcctgcagagtttatcaggagctaaactatgtccaggaggcccaaaatgccagaaggtttaaaaaattgtatgcagataaagcagatgttcttgtgcctgatatattctgggattacacgagccgcaaggtgctaacaatggaatgggttgagggaactaaactgaatgagcaacttgccattgagagtcagggattgaaggttctggatctcgtgaatacaggaatccagtgtagcctaaggcaactcttggagtatggctttttccatgctgaccctcatcctggtaatctcttggcaacacctgatggaaaacttgcctttctagactttggcatgatgagtgagacaccagaggaagctagatttgctatcataggccatgttgtccatttagtgaaccgagattatgaagccatggcacgagattactatgctctgaagttcttgtcccctgatgtggatgttactcctatcataccagctctcagagacttctttgacgatgcacttaattataccgtgagcgagctcaatttcaaaactttggttgatggtctaggtgctgtcttctaccagtatccatttaatgtcccgccctactatgctttgattttgaggtcgcttactgtgcttgaaggtttggcactctacgcagatcctaatttcaaagtactagctgcttcatacccatattttgccaaaaggcttctcactgatccaaacccgtatctaagagatgcccttatcgagctactattcaaagacggaaaatttaggtggaatagactcgagaaccttctacaacagggaagtaaagatagagacttctcagcaaaggatgctctacaaccagttttgaagcttttgctggatccaaatggcgaagaacttcgattgttagtaattaaagaagctgtacgagtcagtgaagcaattgcgctgggcactgttgttgatacatacaattcccttcctgagtttctgagatctcttgtcttcaatggaaatgggaatggccctcttacaatgagtaccgcggaacttcaaagtacgcttgagcttcgggatcaggtctccagaatctggggccttcttcaatcttcagaaagctttgatcctgctattttgcaaccaatactacaggtgttacaacaaccagaggcacgaagacttggaggacgtgttgcaggcggtgtaggccaacgtcttgcagctcggtttctgcaacaacttcttcgagccacaacaccatcttctgcaccatcccaataggtcctcttttcttctcagtgaaatggtaaattgtatattaaggcgagacactcgcaaaccacagaattgtttcatgttacagtaatatagtatcattctttctctttgtatgtactagtgaaaaaggaccaaag

SEQ ID NO: 107357 - protein, 711 aa, Arabidopsis thaliana; identical to SEQ ID NO: 45709
  peptide (1)..(711): Ceres Seq. ID no. 13646821

SEQ ID NO: 107358 - protein, 569 aa, Arabidopsis thaliana; identical to SEQ ID NO: 45710
  peptide (1)..(569): Ceres Seq. ID no. 13646822

SEQ ID NO: 107359 - protein, 378 aa, Arabidopsis thaliana; identical to SEQ ID NO: 45711
  peptide (1)..(378): Ceres Seq. ID no. 13646823

SEQ ID NO: 107360 - DNA, 2335 bp, Arabidopsis thaliana
  misc_feature (1)..(2335): Ceres Seq. ID no. 13646852
  misc_feature (1)..(2335): Ortholog of  Ceres SEQ ID NO 14309779 as cited in SEQ ID NO 229
atctcctttctctttcaatgtccgttggtaaaagacgaaagtttcagacataacatctcttcccatctctctcccctctaagcaattaagcagacaagacactgatgatatgagacgaagagaaagaagtcttatcactcatcctttcctcttatgaatctctccgccgaccaagctcccgtcaccgccgtcgacgaactagctccgccttctcaaccgcatcgcttatctacatcatgtgatctccacccagaagagcgtttctccggtttctgtccttcttgtctttgcgaccgcctctccgtcttagatcacaacgccgctccgccaccgtcttcttcttcccggaaacctccctctatctccgctgtttcgttaaaagctctcttcaagccctcctctagtggtaccaacaactccaacggaaacggtcgggtcagacccggtttcttcccggagctccgacgtacaaagtccttttccgcaaagaacaacgaaggattttccggtgggtttgagccacagcgtcggtcttgtgacgtcagacttcgtgacgacgaaagaaaccttcccatcaatgaagctgcctccgtcgataaaatcgaggaggaggctagggagtctagcgtgagtgagatagttttagaggtgactgaagaagctgaaattgaggaggatgaagaaaacggtgagaacgatcccggcgagatagttgaggaaaaaagcagcgaaattggtgaggaagaagaggaattgaagccaatgaaggattacatggatctctactcacaaacaaagaaaccgtcggtgaaagatttcgccgggagtttcttttcggcggcctctgttttcagcaagaagcttcagaaatggaagcagaagcagaaggtgaagaagccgagaaacggtgtcggcggaggacggccacagtctgaaatcggagtaggccggagatcaagcgacaccgacccgagattctctcttgacgccgggagattctccgtcgatataggtcggatttcaatggacgattctcgctactcattagatgagccaagagcgtcgtgggatggacacttaatcggcaggacaacggcggctagggttcctctgccgccatcgatgttatcagttgtggaaaatgctccgttgaatcgatcagacatgcagattccatcgtctccgtcaattaaaccgattagcggtgactccgacccgattatcataatcccaggcggatccaatcaaactcgagactactacactggacctccgtcgtcacggagacggaagagcctcgacagatccaattctattagaaaaattgtaacggagctagaggatgtcaaatcggtatcaaattcgacaacaacaatagactcaaattccatggaaacagcggagaacaaagggaatcaaaacggcgataagaaatcgagacggtggggaaaatggagcattttagggtttatatacagaaaaggtaaggacgatgaagaagaagataggtacagcagatccaacagcgccggaatggttgagaggtctttatcggaatcatggccggagatgaggaatggagaaggaggaggaccgaagatgaggaggagtaacagcaatgtgagctggcgaagctccggtggaggatcggcgaggaataagagttcgaggtattcgtccaaagatggagagaacggaatgttgaggttttatttgactccgatgaggagaagctggaagaccagcggtggtagtggtggaggcggaggcggtggtggtggtggtgggtgggagaagacggcggctaaggcgaatagtcacggccactctatagcgaggagggttatgaggctgtattgaccaaagtgtccctcttcattttaattattgggagcaatgtgaggttttggtttggggttctctaattatctttgtgaataaattggatatctacttaaccggagttaatcggaccaaattggaaccgggtcgttttcaaaaacctaaacttatagacactcggagttttgagttatgctctctctcactcactccgccgccgtccctgcttccaccacatcctccgatttatgattggatgggatcatcgagctgattcgattgcaagaatgcaagtaagaacaagagactgattgagaattgtaaaaaccggaaatttgggtgatgctttgaaagtgtttgacgaaatgtctaagagagaagaacaacttgaggtatggaacaactgaattagtcaaggctggataatgactaaggtaacatctttatagtctctggctagcttttgttctctctgtttctcgtactttgcatc

SEQ ID NO: 107361 - protein, 568 aa, Arabidopsis thaliana
  peptide (1)..(568): Ceres Seq. ID no. 13646853
MNLSADQAPVTAVDELAPPSQPHRLSTSCDLHPEERFSGFCPSCLCDRLSVLDHNAAPPPSSSSRKPPSISAVSLKALFKPSSSGTNNSNGNGRVRPGFFPELRRTKSFSAKNNEGFSGGFEPQRRSCDVRLRDDERNLPINEAASVDKIEEEARESSVSEIVLEVTEEAEIEEDEENGENDPGEIVEEKSSEIGEEEEELKPMKDYMDLYSQTKKPSVKDFAGSFFSAASVFSKKLQKWKQKQKVKKPRNGVGGGRPQSEIGVGRRSSDTDPRFSLDAGRFSVDIGRISMDDSRYSLDEPRASWDGHLIGRTTAARVPLPPSMLSVVENAPLNRSDMQIPSSPSIKPISGDSDPIIIIPGGSNQTRDYYTGPPSSRRRKSLDRSNSIRKIVTELEDVKSVSNSTTTIDSNSMETAENKGNQNGDKKSRRWGKWSILGFIYRKGKDDEEEDRYSRSNSAGMVERSLSESWPEMRNGEGGGPKMRRSNSNVSWRSSGGGSARNKSSRYSSKDGENGMLRFYLTPMRRSWKTSGGSGGGGGGGGGGGWEKTAAKANSHGHSIARRVMRLY

SEQ ID NO: 107362 - protein, 365 aa, Arabidopsis thaliana
  peptide (1)..(365): Ceres Seq. ID no. 13646854
MKDYMDLYSQTKKPSVKDFAGSFFSAASVFSKKLQKWKQKQKVKKPRNGVGGGRPQSEIGVGRRSSDTDPRFSLDAGRFSVDIGRISMDDSRYSLDEPRASWDGHLIGRTTAARVPLPPSMLSVVENAPLNRSDMQIPSSPSIKPISGDSDPIIIIPGGSNQTRDYYTGPPSSRRRKSLDRSNSIRKIVTELEDVKSVSNSTTTIDSNSMETAENKGNQNGDKKSRRWGKWSILGFIYRKGKDDEEEDRYSRSNSAGMVERSLSESWPEMRNGEGGGPKMRRSNSNVSWRSSGGGSARNKSSRYSSKDGENGMLRFYLTPMRRSWKTSGGSGGGGGGGGGGGWEKTAAKANSHGHSIARRVMRLY

SEQ ID NO: 107363 - protein, 361 aa, Arabidopsis thaliana
  peptide (1)..(361): Ceres Seq. ID no. 13646855
MDLYSQTKKPSVKDFAGSFFSAASVFSKKLQKWKQKQKVKKPRNGVGGGRPQSEIGVGRRSSDTDPRFSLDAGRFSVDIGRISMDDSRYSLDEPRASWDGHLIGRTTAARVPLPPSMLSVVENAPLNRSDMQIPSSPSIKPISGDSDPIIIIPGGSNQTRDYYTGPPSSRRRKSLDRSNSIRKIVTELEDVKSVSNSTTTIDSNSMETAENKGNQNGDKKSRRWGKWSILGFIYRKGKDDEEEDRYSRSNSAGMVERSLSESWPEMRNGEGGGPKMRRSNSNVSWRSSGGGSARNKSSRYSSKDGENGMLRFYLTPMRRSWKTSGGSGGGGGGGGGGGWEKTAAKANSHGHSIARRVMRLY

SEQ ID NO: 107364 - DNA, 1562 bp, Arabidopsis thaliana
  misc_feature (1)..(1562): Ceres Seq. ID no. 13646902
  misc_feature (1)..(1562): Ortholog of  Ceres SEQ ID NO 13596090 as cited in SEQ ID NO 68377
gaacacactcttctctctcttcttcttcctcctctgtactctctctttctcacataaccagagcctctctctctctctctgtttctcttcagtctctgtgtatacccctttctctcctcctctgtccctctctctagcggcggactgatgcacatacctttgtattctccgccgtaactaacttacataatggggtgcatgttctctcacctcgccgccaaattcgccttcttcccaccctctcctcccacttaccacctcaccaaaacccccgacggcaaactctccgccgtatcctccgcttcctcctcctcctccacttttccctccgccggagacccatctctcgacgtcaaagtagtaaagacaagacgcggcaacaaagtcacagctttttaccttagaaaccctaacgcaagactcacacttctctactctcatggaaatgctgcagatttgggacaactcttcgatctctttgttcaactcaaagtcaatctccgagtcaatctcatggggtatgattattcaggctatggagcttctactggtaagccgagtgagtacgatacatatgcagatatagaggcggcgtatgagtgtttgcagacggattatggggtagggcaagaagatttgatcttgtatggtcaatctgttggcagcggtccaacgctgcaccttgcctctaagcttccacggcttagaggtgtcgttcttcatagcggcattctctctggtcttcgtgttctatgtcatgtcaagttcaagttttgttgtgacatttattcgaacgtaaacaagatcaagaaggtgaaatgcccggttcttgtcatacacggaacagaggatgatgtggtgaattggttacacggaaacaggctttggaaaatggcaaaggaaccgtatgaaccgctctggattaaaggcggtggacattgcaaccttgagatatatccggactacattagacacctataccggtttatacaagacatggaaaatacaaccactaagtctcgtctcaaaacgatttggcaagaaatccgtcggcgagatgaatccacaggatgttgttgttccggactgtgcagacctagctgcagttgtcccaaacctcggtgtcccaaacctagttgcagttgcggctgcggttgtggcgactgcggttgtttcaagtgttcgtgtccgactttgaagggatgtttctcttgctgcaagaaaccgagctgtgttagtagttgttgctgtcccacgttcaaatgcagcagctgctttgggaagccaaaatgtccgaaatgctcttgttggaaatgtctaaaatgccccgacaccgagtgttgccggagtagttgttgttgttccggttgttttagctggttgtgttgctgcggtggagggaggaggaaagagggggagaggagaggatctactacgttggagaagagtgaagggtgatattggtaatttgtatagattttgttcaaagatttggtaaaaaacattagaagattcatggaaagagactgagattttgaagctaaaagttcatttattattcc

SEQ ID NO: 107365 - protein, 422 aa, Arabidopsis thaliana; identical to SEQ ID NO: 46862
  peptide (1)..(422): Ceres Seq. ID no. 13646903

SEQ ID NO: 107366 - protein, 419 aa, Arabidopsis thaliana; identical to SEQ ID NO: 46863
  peptide (1)..(419): Ceres Seq. ID no. 13646904

SEQ ID NO: 107367 - protein, 314 aa, Arabidopsis thaliana; identical to SEQ ID NO: 46864
  peptide (1)..(314): Ceres Seq. ID no. 13646905

SEQ ID NO: 107368 - DNA, 1942 bp, Arabidopsis thaliana
  misc_feature (1)..(1942): Ceres Seq. ID no. 13646960
  misc_feature (1)..(1942): Ortholog of  Ceres SEQ ID NO 14314220 as cited in SEQ ID NO 57321
gatcatttcctgaaaactagaaaacacagtttaaagggaacataaaaagcaactctttgagagatcagagaaaccctaatttgctaagaaccctaatctcaatttccatcttccaaagttcagattctgtatgtaaatgcatctgaagaattctactgtagcagaacggcggtacatcggaaaagaaaccgccggttatttaacttcttcctccgatttggatccgaaacctaagattaaacatcatcgtcctcttcaggtacctgagattttgactccagacattggtgctggtgctggattcagtgtgtataataatcaagttcaagctcagagtcgtcatcatctgacggttgaaatcccagattcatcgtctcacaatcttacatctaagagacctgtggtggttcaatcttctaatccgttcaacgttgacgatttccgaagacaacaacgcgcaagcttgggtccgatttcatcttattgtccgtcgtatcttttatcgtggttttcttcttctcttccatcgatccatcggccactaatcagaagcttctccgtcatgttcttagaattcttccttctctttgtcttctcgattatcgctttttctttcgtcctttcgatctctctcaaattcgctcttcctcacttaccatcgattcgtttgattatcgctcggttactttctctcaagcttacccctaccagatcatcctcttcatctcaggagaacactaaacatgttatttggtcaattgggtctaagcctgtgactgagaagaagaccagctctggctcatgggttcagaagtacagctctggtgatgtatacgagggagagtttcatagggggaagtgttcaggaagtggagtttattactattctatgaagggtaaatacgaaggggattggattgatgggaagtatgatggatatggagttgaaacttgggctaaagggagtaggtaccgaggtcaatacaggcaagggatgagacatggaactggtatctacagattttatacaggggatgtatatgctggtgagtggtctaatggacagagccatggctgtggtgtgtatacctctgaggatggtagtcgttttgttggagagtttaaatggggtgtcaaacatggccttggtcattatcatttcaggatgcatggttttggagtgtatcaatttggaaacgggcatcggtatgaaggagcctggcatgaggggagaaggcaaggacttggtatgtacacgttcaggaatggtgagacacaggcaggccattgggaagacggagttcttaactgtcctaccgagcagaccactcgccctgattcatcgttttccatcagtcattccaaggttgtcgacactgtccagcaagcaaggaaagcagccaagaaagcacgcgaagttgtgaaagttgaagagagagtgaacagagcagtgatggtcgcaaaccgagcagcaaatgctgctagagttgctgctacaaaggctgtccaaacccaaacatttcattgtagtagtggtgacgatcccttgtgaattcctgcggcaaagattttgacataatcgcagtcatgaccttacctcaaacttctacgaagacagaagagtgaaagagagatgtttagagaacagagtcagaattcgcaatctccgttgagattttcttgaaggtgaaccacttggaaccaatatcgagatctcataagtaataagtaagagatctggctatggagcaagtattactggtttactttttcttttctcccacttgttttatgagcaggctggtttaaaactgtacataggttgttgaagagtaagcaatgtgtgttaacaaaagatctttgtaacaagcgtaatccatgtaagagaagtaacaaaacattgttttacttttacaacgtgttgaaaataacaccttttttt

SEQ ID NO: 107369 - protein, 471 aa, Arabidopsis thaliana
  peptide (1)..(471): Ceres Seq. ID no. 13646961
MHLKNSTVAERRYIGKETAGYLTSSSDLDPKPKIKHHRPLQVPEILTPDIGAGAGFSVYNNQVQAQSRHHLTVEIPDSSSHNLTSKRPVVVQSSNPFNVDDFRRQQRASLGPISSYCPSYLLSWFSSSLPSIHRPLIRSFSVMFLEFFLLFVFSIIAFSFVLSISLKFALPHLPSIRLIIARLLSLKLTPTRSSSSSQENTKHVIWSIGSKPVTEKKTSSGSWVQKYSSGDVYEGEFHRGKCSGSGVYYYSMKGKYEGDWIDGKYDGYGVETWAKGSRYRGQYRQGMRHGTGIYRFYTGDVYAGEWSNGQSHGCGVYTSEDGSRFVGEFKWGVKHGLGHYHFRMHGFGVYQFGNGHRYEGAWHEGRRQGLGMYTFRNGETQAGHWEDGVLNCPTEQTTRPDSSFSISHSKVVDTVQQARKAAKKAREVVKVEERVNRAVMVANRAANAARVAATKAVQTQTFHCSSGDDPL

SEQ ID NO: 107370 - protein, 329 aa, Arabidopsis thaliana
  peptide (1)..(329): Ceres Seq. ID no. 13646962
MFLEFFLLFVFSIIAFSFVLSISLKFALPHLPSIRLIIARLLSLKLTPTRSSSSSQENTKHVIWSIGSKPVTEKKTSSGSWVQKYSSGDVYEGEFHRGKCSGSGVYYYSMKGKYEGDWIDGKYDGYGVETWAKGSRYRGQYRQGMRHGTGIYRFYTGDVYAGEWSNGQSHGCGVYTSEDGSRFVGEFKWGVKHGLGHYHFRMHGFGVYQFGNGHRYEGAWHEGRRQGLGMYTFRNGETQAGHWEDGVLNCPTEQTTRPDSSFSISHSKVVDTVQQARKAAKKAREVVKVEERVNRAVMVANRAANAARVAATKAVQTQTFHCSSGDDPL

SEQ ID NO: 107371 - DNA, 1533 bp, Arabidopsis thaliana
  misc_feature (1)..(1533): Ceres Seq. ID no. 13646978
  misc_feature (1)..(1533): Ortholog of  Ceres SEQ ID NO 13585382 as cited in SEQ ID NO 63889
agtggtgtcaaaaacccatcaatggcttcacttcttattttcccccaccttcaccattttgattcttcactggaccgtagagaggtactagtagttcgccattcacaagcatcaaggcgatttctcactccgaaagcttcaattaatggcagcggaatcacaaacggagctgcagcggaaaccacctctaaacctagtcgcaaagggaggaagaagaagcaaacatcgacggtaattgagaaagataacaccgagactgatcctgaattgaatccggagttagctgattacgacgacgggatcgagtttccgtacgacgatccgcctcttgtgtgttgcttcggagctgtacagaaggagtttgttccggtggtgcgagtccatgataatccgatgcatcctgatatgtactcgcagtggaagatgctacagtgggatccaccggagtttgggagagctccgggaggtccgccgtcgaatgtggcgatctctcatgtacggttaggtgggagagctgcgtttatggggaaagtaggtgaagatgattttggagatgagcttgttctgatgatgaatcaggagagagttcagacgagagctgtgaaattcgatgagaattcgaaaactgcttgtactcgtgtcaagatcaagtttaaggacgggaaaatgatggcggagactgtgaaagaaccacctgaggactcgctatttgcttcagaactcaatttagctgtgcttaaagaggcgaggatttttcatttcaattcagaagtgttgacgtctcctacaatgcaatcaactctttttacggcaatacaatggtctaagaagtttggtgggcttattttctttgacttgaatctcccattaccgctgtggagatcgcgcaatgagactaggaagttgatcaagaaagcatggaatgaagcaaacatcattgaagtttcacagcaagagcttgagtttctacttgatgaagattactacgagaggagaagaaactacacaccacagtacttcgctgaggattttgatcagacgaaaaacagaagagactattaccattacacaccagaggaaatcaagtcattgtggcatgacaagctgaagctattggttgtgactgatggaacacttcggcttcattactatactcctacttttgatggtgttgtgattggaacagaagatgtgcttataactcctttcacctgtgataggaccggttctggtgatgctgttgttgcagggataatgagaaagctaacaacttgtcctgagatgtttgaggatcaggatgtgatggagcgacagctcaggtttgcagttgctgctgggatcatagcgcagtggacaattggtgcagttagaggtttccctactgaaagcgcgacacagaatttgaaagaacaagtttatgttccatcaatgtggtagaatagaagatgaagaactgaacttgtgtactcaatgtttttgaacaatgtgtgagttgtatactgattcagatttgtaatccagagaaatgtacaa

SEQ ID NO: 107372 - protein, 478 aa, Arabidopsis thaliana
  peptide (1)..(478): Ceres Seq. ID no. 13646979
SGVKNPSMASLLIFPHLHHFDSSLDRREVLVVRHSQASRRFLTPKASINGSGITNGAAAETTSKPSRKGRKKKQTSTVIEKDNTETDPELNPELADYDDGIEFPYDDPPLVCCFGAVQKEFVPVVRVHDNPMHPDMYSQWKMLQWDPPEFGRAPGGPPSNVAISHVRLGGRAAFMGKVGEDDFGDELVLMMNQERVQTRAVKFDENSKTACTRVKIKFKDGKMMAETVKEPPEDSLFASELNLAVLKEARIFHFNSEVLTSPTMQSTLFTAIQWSKKFGGLIFFDLNLPLPLWRSRNETRKLIKKAWNEANIIEVSQQELEFLLDEDYYERRRNYTPQYFAEDFDQTKNRRDYYHYTPEEIKSLWHDKLKLLVVTDGTLRLHYYTPTFDGVVIGTEDVLITPFTCDRTGSGDAVVAGIMRKLTTCPEMFEDQDVMERQLRFAVAAGIIAQWTIGAVRGFPTESATQNLKEQVYVPSMW

SEQ ID NO: 107373 - protein, 471 aa, Arabidopsis thaliana
  peptide (1)..(471): Ceres Seq. ID no. 13646980
MASLLIFPHLHHFDSSLDRREVLVVRHSQASRRFLTPKASINGSGITNGAAAETTSKPSRKGRKKKQTSTVIEKDNTETDPELNPELADYDDGIEFPYDDPPLVCCFGAVQKEFVPVVRVHDNPMHPDMYSQWKMLQWDPPEFGRAPGGPPSNVAISHVRLGGRAAFMGKVGEDDFGDELVLMMNQERVQTRAVKFDENSKTACTRVKIKFKDGKMMAETVKEPPEDSLFASELNLAVLKEARIFHFNSEVLTSPTMQSTLFTAIQWSKKFGGLIFFDLNLPLPLWRSRNETRKLIKKAWNEANIIEVSQQELEFLLDEDYYERRRNYTPQYFAEDFDQTKNRRDYYHYTPEEIKSLWHDKLKLLVVTDGTLRLHYYTPTFDGVVIGTEDVLITPFTCDRTGSGDAVVAGIMRKLTTCPEMFEDQDVMERQLRFAVAAGIIAQWTIGAVRGFPTESATQNLKEQVYVPSMW

SEQ ID NO: 107374 - protein, 347 aa, Arabidopsis thaliana; identical to SEQ ID NO: 46900
  peptide (1)..(347): Ceres Seq. ID no. 13646981

SEQ ID NO: 107375 - DNA, 1318 bp, Arabidopsis thaliana
  misc_feature (1)..(1318): Ceres Seq. ID no. 13646999
  misc_feature (1)..(1318): Ortholog of  Ceres SEQ ID NO 15178027 as cited in SEQ ID NO 55634
  misc_feature (1)..(1318): Ortholog of  Ceres SEQ ID NO 13597537 as cited in SEQ ID NO 64962
ggagcaaaacaccaggaggaaaccaaaaagctagaggctttgtggagtgagaagaagagtctcagtgaaaacagaaagcagcatttgagattccactgttaatctttgaatcaaaaatgagtgcagcagctacaatgcctatgccccgagaagcgtctaattacgatgagatctctatgcaacagagcatgctcttctctgatagtctcaaggatctgaagaatctgagaacacagttgtattcagcagctgagtatttcgaactatcctacacaaacgatgaacaaaaacagatagtcgtggagacactgaaagattatgcaataaaggctctggtgaatacagttgaccatttggggtctgttacatataaagtaaatgactttgtagatgaaaaagtcgatgaagtagcaggaaccgaactgcgagtatcttgcattgaacagaggctacggatgtgccaagagtacatggatcatgaaggtcgttcccagcaatcacttgtgatcgacactccaaagttccacaagcggtacttcttgccttctggtgaaatcaaaagaggtggcaacctcgcaaagcttaagaatgttgaaggtagttttgatggagaagatgactggaaccaattcagaaatgctgttcgcgctacaattcgtgaaacgcctccaccacctgttaggtatagtccagtactcataaaaaccgatacttcagtctccctctcaacggaaacctcaacgttcagcaaccttttcgttctcctctatcgccaccgcaccaaagaaagaacaagtgtgcatggtaaaatagataagcgagcagtatcaccacatcggtttccgctgctaagatctggttcggttgctatccgaccgtcatcaatcagccggccaacaaccccgagcaagagtagagcggtaactccaactcctaaacggtatccgtcagaaccaagaagatcggcttcggttcgggttgcgttcgagaaagaagctcagaaagaaccagagcatcaacaacaaccgagcaagagcaaacggctgctaaaggcgctacttagccgacgcaaaacaaagaaggacgatacgctctacacttatttggacgaatattaaaccgaaagctggttttgtatgttgactggtaaaccggaaattacattccagttttaattgcatttacgtaatgtcaaattgtcaaaatatgtgttacaaaatatgtccatgattctatgattttgtgtataccttatgactgtcagagtgtgaatgcagttttgtttacaagcgtagtaaaatttgctgtgaattatttt

SEQ ID NO: 107376 - protein, 333 aa, Arabidopsis thaliana
  peptide (1)..(333): Ceres Seq. ID no. 13647000
MSAAATMPMPREASNYDEISMQQSMLFSDSLKDLKNLRTQLYSAAEYFELSYTNDEQKQIVVETLKDYAIKALVNTVDHLGSVTYKVNDFVDEKVDEVAGTELRVSCIEQRLRMCQEYMDHEGRSQQSLVIDTPKFHKRYFLPSGEIKRGGNLAKLKNVEGSFDGEDDWNQFRNAVRATIRETPPPPVRYSPVLIKTDTSVSLSTETSTFSNLFVLLYRHRTKERTSVHGKIDKRAVSPHRFPLLRSGSVAIRPSSISRPTTPSKSRAVTPTPKRYPSEPRRSASVRVAFEKEAQKEPEHQQQPSKSKRLLKALLSRRKTKKDDTLYTYLDEY

SEQ ID NO: 107377 - protein, 327 aa, Arabidopsis thaliana
  peptide (1)..(327): Ceres Seq. ID no. 13647001
MPMPREASNYDEISMQQSMLFSDSLKDLKNLRTQLYSAAEYFELSYTNDEQKQIVVETLKDYAIKALVNTVDHLGSVTYKVNDFVDEKVDEVAGTELRVSCIEQRLRMCQEYMDHEGRSQQSLVIDTPKFHKRYFLPSGEIKRGGNLAKLKNVEGSFDGEDDWNQFRNAVRATIRETPPPPVRYSPVLIKTDTSVSLSTETSTFSNLFVLLYRHRTKERTSVHGKIDKRAVSPHRFPLLRSGSVAIRPSSISRPTTPSKSRAVTPTPKRYPSEPRRSASVRVAFEKEAQKEPEHQQQPSKSKRLLKALLSRRKTKKDDTLYTYLDEY

SEQ ID NO: 107378 - protein, 325 aa, Arabidopsis thaliana
  peptide (1)..(325): Ceres Seq. ID no. 13647002
MPREASNYDEISMQQSMLFSDSLKDLKNLRTQLYSAAEYFELSYTNDEQKQIVVETLKDYAIKALVNTVDHLGSVTYKVNDFVDEKVDEVAGTELRVSCIEQRLRMCQEYMDHEGRSQQSLVIDTPKFHKRYFLPSGEIKRGGNLAKLKNVEGSFDGEDDWNQFRNAVRATIRETPPPPVRYSPVLIKTDTSVSLSTETSTFSNLFVLLYRHRTKERTSVHGKIDKRAVSPHRFPLLRSGSVAIRPSSISRPTTPSKSRAVTPTPKRYPSEPRRSASVRVAFEKEAQKEPEHQQQPSKSKRLLKALLSRRKTKKDDTLYTYLDEY

SEQ ID NO: 107379 - DNA, 1667 bp, Arabidopsis thaliana
  misc_feature (1)..(1667): Ceres Seq. ID no. 13647244
  misc_feature (1)..(1667): Ortholog of  Ceres SEQ ID NO 13596921 as cited in SEQ ID NO 62368
gacggcaaaggatctctctctttcccagcatcaccatctcttgtaccagtttctgattagattcaacaatgaacggcgcattaggtaactcctccgcctccgttagcggcggagaaggagccggaggaccagcgcctttcttggtgaaaacctacgagatggtcgacgattcatcaacggaccagatcgtatcgtggagcgctaacaacaacagcttcatcgtttggaatcatgccgaattttcacgcctccttcttccaacctacttcaaacacaataacttctcttccttcattcgtcagctcaatacctatgggtttaggaagattgatccagagaggtgggagtttttgaatgatgattttattaaggatcagaagcatcttctcaagaatatacatagaaggaaacctatacacagccacagtcatccacctgcttcgtcgactgatcaagaaagagcagtgttgcaagagcaaatggacaagctttcacgtgagaaagctgcaattgaagctaagcttttaaagttcaaacaacagaaggttgtagcaaagcatcagtttgaagaaatgactgagcatgttgatgatatggagaataggcagaagaagctgctgaattttttggaaactgcgattcggaatcctacttttgttaagaattttggtaagaaagtcgagcagttggatatttcagcttacaacaaaaagcgaaggctccctgaagttgagcaatcaaagccaccttcagaagattctcatctggataatagtagtggtagctcgagacgcgagtctggaaacatttttcatcaaaatttctctaataaattgcgactagagctttctccagctgattcagatatgaacatggtttcacacagtatacaaagttccaatgaagaaggtgcgagtcccaaagggatactgtcaggaggtgatccaaatactacactaacaaaaagagaaggcctaccatttgcacctgaagctctagagcttgcggataccgggacatgcccgaggagattactgttaaatgataatacaagggtggagaccttgcagcagaggctaacttcttcagaggagactgatggtagcttttcatgtcatttaaatctaaccctggcttctgctccgttaccggacaaaacagcttcacagatagctaagacgactcttaaaagtcaggagttaaactttaactcaatagaaacaagtgcaagtgagaaaaatcggggtagacaagagattgcagttggaggtagccaagcaaatgcagctcctccagcaagagtgaatgatgtattctgggaacagttcctaacagaaaggccagggtcttcagataatgaggaggcaagttcgacttatagaggtaacccatacgaagagcaagaggagaaaagaaacgggagtatgatgttacgtaatacaaagaatatcgagcagctgaccttataaactatttggacggttacatcaacgagagtacgaactgtggttttggtaagaagtatgggtgagtaagtaatgaaacattggactgaaaaagcgtaagtagctttgttgtaaacacttgcgtctctgtctacacaagtaatttgactgtaaatgtaagtgtacaggatttaaattgaataagcatttttttcgtgtcgt

SEQ ID NO: 107380 - protein, 466 aa, Arabidopsis thaliana
  peptide (1)..(466): Ceres Seq. ID no. 15218829
MNGALGNSSASVSGGEGAGGPAPFLVKTYEMVDDSSTDQIVSWSANNNSFIVWNHAEFSRLLLPTYFKHNNFSSFIRQLNTYGFRKIDPERWEFLNDDFIKDQKHLLKNIHRRKPIHSHSHPPASSTDQERAVLQEQMDKLSREKAAIEAKLLKFKQQKVVAKHQFEEMTEHVDDMENRQKKLLNFLETAIRNPTFVKNFGKKVEQLDISAYNKKRRLPEVEQSKPPSEDSHLDNSSGSSRRESGNIFHQNFSNKLRLELSPADSDMNMVSHSIQSSNEEGASPKGILSGGDPNTTLTKREGLPFAPEALELADTGTCPRRLLLNDNTRVETLQQRLTSSEETDGSFSCHLNLTLASAPLPDKTASQIAKTTLKSQELNFNSIETSASEKNRGRQEIAVGGSQANAAPPARVNDVFWEQFLTERPGSSDNEEASSTYRGNPYEEQEEKRNGSMMLRNTKNIEQLTL

SEQ ID NO: 107381 - protein, 436 aa, Arabidopsis thaliana
  peptide (1)..(436): Ceres Seq. ID no. 15218830
MVDDSSTDQIVSWSANNNSFIVWNHAEFSRLLLPTYFKHNNFSSFIRQLNTYGFRKIDPERWEFLNDDFIKDQKHLLKNIHRRKPIHSHSHPPASSTDQERAVLQEQMDKLSREKAAIEAKLLKFKQQKVVAKHQFEEMTEHVDDMENRQKKLLNFLETAIRNPTFVKNFGKKVEQLDISAYNKKRRLPEVEQSKPPSEDSHLDNSSGSSRRESGNIFHQNFSNKLRLELSPADSDMNMVSHSIQSSNEEGASPKGILSGGDPNTTLTKREGLPFAPEALELADTGTCPRRLLLNDNTRVETLQQRLTSSEETDGSFSCHLNLTLASAPLPDKTASQIAKTTLKSQELNFNSIETSASEKNRGRQEIAVGGSQANAAPPARVNDVFWEQFLTERPGSSDNEEASSTYRGNPYEEQEEKRNGSMMLRNTKNIEQLTL

SEQ ID NO: 107382 - protein, 329 aa, Arabidopsis thaliana
  peptide (1)..(329): Ceres Seq. ID no. 15218831
MDKLSREKAAIEAKLLKFKQQKVVAKHQFEEMTEHVDDMENRQKKLLNFLETAIRNPTFVKNFGKKVEQLDISAYNKKRRLPEVEQSKPPSEDSHLDNSSGSSRRESGNIFHQNFSNKLRLELSPADSDMNMVSHSIQSSNEEGASPKGILSGGDPNTTLTKREGLPFAPEALELADTGTCPRRLLLNDNTRVETLQQRLTSSEETDGSFSCHLNLTLASAPLPDKTASQIAKTTLKSQELNFNSIETSASEKNRGRQEIAVGGSQANAAPPARVNDVFWEQFLTERPGSSDNEEASSTYRGNPYEEQEEKRNGSMMLRNTKNIEQLTL

SEQ ID NO: 107383 - DNA, 1285 bp, Arabidopsis thaliana
  misc_feature (1)..(1285): Ceres Seq. ID no. 13647652
  misc_feature (1)..(1285): Ortholog of  Ceres SEQ ID NO 14309794 as cited in SEQ ID NO 20350
tcttcatacaacattttagctttactttttctctttactcttctctctctctttctctttctctttctctttcactcgttctctctcactcactctcttcacacacagatccaagatggcctcttcaatggctagcaatgatttccagctccctccacgtttcttcactgttttcgtctcccatttcagctcagagttcatggtgatcccagtttcctactacgatcacattccacatcgtttccccaagactgtgattctccgaggacctggtggatgctcctggaaggtagcgacggagataaaggatgatgaagtgcttttttcacaaggatggcccaaatttgttcgggataatactcttaacgatggagactttttgacctttgcctataatggagctcacatattcgaggtcagtatctttcgcggctacgacgcatgtaaagagattagcgaagtcactgaattggaagaggaagaagaagacagtgttatatctctgagcagtgaagacacagacactggtgctaaatctgagatgaagaatacagtcccggaaggcagagacaaaggaaagtcaaaagtggaagttgtggaggattctgatgacgatgaggaggaggatagtgtttattctgaaagcagtgaagaaacagagacagacactgattctgaattcaaggtggccaagccaacaataccaaaaagccagaagaaaggaaagaagaaagaacaagttgtggagtcctctgatgacgaggaagacgaagaggaggacagtgacagtgattacattgaaacgtttggtcaattggatattgaagagaattccatcagtgaggaggacagttcttatgctcctgataaagaagacacagccactgcctcttttgtcaaaccaaaggttgcaaataaggttgctaatctgaagaggaaagtcgatcccatgatcaagaatcctgagagatacctcgatgatcctaagaatatccatttcgagacaaacgtgaagaataggttatacgagctgttggttcatgcacaactggtgaaagactattgcttgaggtttggagactatgttaactacatcgacaggttcgggaaactaagtgctaaaacagccaaatggaaggatcagcgtgtttgtatcaaaagatggatgcgcatatgcaagaggaacaagttgaagaaagaagaccgcattttgtgtgagctcttgcgcaagggaactttcgtttacgcaatcaaactccatgtcatccgcggtaaggatctgtag

SEQ ID NO: 107384 - protein, 389 aa, Arabidopsis thaliana
  peptide (1)..(389): Ceres Seq. ID no. 13647653
MASSMASNDFQLPPRFFTVFVSHFSSEFMVIPVSYYDHIPHRFPKTVILRGPGGCSWKVATEIKDDEVLFSQGWPKFVRDNTLNDGDFLTFAYNGAHIFEVSIFRGYDACKEISEVTELEEEEEDSVISLSSEDTDTGAKSEMKNTVPEGRDKGKSKVEVVEDSDDDEEEDSVYSESSEETETDTDSEFKVAKPTIPKSQKKGKKKEQVVESSDDEEDEEEDSDSDYIETFGQLDIEENSISEEDSSYAPDKEDTATASFVKPKVANKVANLKRKVDPMIKNPERYLDDPKNIHFETNVKNRLYELLVHAQLVKDYCLRFGDYVNYIDRFGKLSAKTAKWKDQRVCIKRWMRICKRNKLKKEDRILCELLRKGTFVYAIKLHVIRGKDL

SEQ ID NO: 107385 - protein, 385 aa, Arabidopsis thaliana
  peptide (1)..(385): Ceres Seq. ID no. 13647654
MASNDFQLPPRFFTVFVSHFSSEFMVIPVSYYDHIPHRFPKTVILRGPGGCSWKVATEIKDDEVLFSQGWPKFVRDNTLNDGDFLTFAYNGAHIFEVSIFRGYDACKEISEVTELEEEEEDSVISLSSEDTDTGAKSEMKNTVPEGRDKGKSKVEVVEDSDDDEEEDSVYSESSEETETDTDSEFKVAKPTIPKSQKKGKKKEQVVESSDDEEDEEEDSDSDYIETFGQLDIEENSISEEDSSYAPDKEDTATASFVKPKVANKVANLKRKVDPMIKNPERYLDDPKNIHFETNVKNRLYELLVHAQLVKDYCLRFGDYVNYIDRFGKLSAKTAKWKDQRVCIKRWMRICKRNKLKKEDRILCELLRKGTFVYAIKLHVIRGKDL

SEQ ID NO: 107386 - protein, 361 aa, Arabidopsis thaliana
  peptide (1)..(361): Ceres Seq. ID no. 13647655
MVIPVSYYDHIPHRFPKTVILRGPGGCSWKVATEIKDDEVLFSQGWPKFVRDNTLNDGDFLTFAYNGAHIFEVSIFRGYDACKEISEVTELEEEEEDSVISLSSEDTDTGAKSEMKNTVPEGRDKGKSKVEVVEDSDDDEEEDSVYSESSEETETDTDSEFKVAKPTIPKSQKKGKKKEQVVESSDDEEDEEEDSDSDYIETFGQLDIEENSISEEDSSYAPDKEDTATASFVKPKVANKVANLKRKVDPMIKNPERYLDDPKNIHFETNVKNRLYELLVHAQLVKDYCLRFGDYVNYIDRFGKLSAKTAKWKDQRVCIKRWMRICKRNKLKKEDRILCELLRKGTFVYAIKLHVIRGKDL

SEQ ID NO: 107387 - DNA, 960 bp, Arabidopsis thaliana
  misc_feature (1)..(960): Ceres Seq. ID no. 13647665
  misc_feature (1)..(960): Ortholog of  Ceres SEQ ID NO 13595844 as cited in SEQ ID NO 51300
  misc_feature (1)..(960): Ortholog of  Ceres SEQ ID NO 13596593 as cited in SEQ ID NO 62448
  misc_feature (1)..(960): Ortholog of  Ceres SEQ ID NO 13586031 as cited in SEQ ID NO 0
gaaaaaaagcgactaacagaagaaaaaaacgaaaaggattattccgccgtagaatccatattctctccctcatcactttgataaacaagagtctcatttttcgcttttccaaagggaacaacttcttcggattattatctatggcagagaagcttgagccggtgaaggttttgtactgcggagtttgctctcttccagcggaatactgcgaattcggtcccgatttcgctagatgtaagccctggctcgtcgaaaacgccccagatctctatcctgatctcctcaaagaagcaaatgagaaggcagcagataatgtttctgacaaactccagtcggtgggaatctcttcaggtggtgctgatggggcaccatcttcagctcagactggagggacatccaagaaggaggaagtgaagcgcctacctggggggaaagttaaaaagaaagatcgacaggaagttatcattgaaaaggttgtacgcaacaaacgcaagtgtatcaccattgtgaaaggactagaactgtttgggataaaactcagtgatgcctctaaaaagcttggtaagaagtttgccactggagcatcagttgtcaagggaccaactgaaaaggagcaaattgatgttcaaggggatataatctatgatatcgttgaattcattacagacacttggcccgacgtacctgaaagatccattttcttcatcgaagatgggaagaaggttcaggctggttgatgatcacctttgtcctcgttttttggcatggcgggttcatgtagacgagctagttcctgagttttcctatgtgtttggaggaaatcgcatcatgattataactttcaacgtaacgtatagttggatttatcatactattttcttattcgggttgcgatagttccagacatgtttctccaaacatttctctttttgggggtcttaatatttaaaatgtgtcttg

SEQ ID NO: 107388 - protein, 244 aa, Arabidopsis thaliana; identical to SEQ ID NO: 86832
  peptide (1)..(244): Ceres Seq. ID no. 13647666

SEQ ID NO: 107389 - protein, 198 aa, Arabidopsis thaliana; identical to SEQ ID NO: 49606
  peptide (1)..(198): Ceres Seq. ID no. 13647667

SEQ ID NO: 107390 - DNA, 1128 bp, Arabidopsis thaliana
  misc_feature (1)..(1128): Ceres Seq. ID no. 13647815
  misc_feature (1)..(1128): Ortholog of  Ceres SEQ ID NO 14307589 as cited in SEQ ID NO 20466
  misc_feature (1)..(1128): Ortholog of  Ceres SEQ ID NO 13584238 as cited in SEQ ID NO 64216
gaaaccagttgagaagtaaaattttctattgcagagagaaagagagttagagaaagagagagagagatgaaacttgtgcaagaagaataccgtaaaggaccgtggacagaacaggaggacatcctcttggtcaactttgtccacttgttcggagatcgaagatgggattttgtagcgaaagtttcaggtttgaaggtggagggagaaacataagaataggtataggtttgttttggaaaaatgggcggtctttggaaaggaccttccatttaaagaaatgacctggttttggttgtaggtttaaacagaacaggaaagagttgcaggytaagrtgggttaattacctrcatcctggtctcaaacgtggyaagatgackccwcaagaagagcgyytmgtccttgagcttcacgcyaartggggaaacaggtggtcraaaatwgcccgraaattrccggggacgaacagataatgagataaagaactactggaggactcatatgaggaagaaggctcaagagaagaagcgacctatgtctcctacttcctcatcttcaaactgttgctcatcatctatgaccactactactactcaagacactggaggctccaacgggaaaatgaatcaagaaggcgaagacgggtactactccatggatgacatatggagagagattgatcagtctggagcaaacgttattaagccggtaaaagacaactactactcagagcaaagttgttacttgaatttccctcctctgggttgtccaacatgggaaagttccttggagtctatatggaacatggatgcagatgaaagtaagatgtcttcttttgctattgatcagtttcctctaagttttgaacatggtaggtggtcgcctttagtctaggatttgattcatttggaatgtttatatgtgcagcatatatatgttrtcaaacgacgactgtagtagttttcctatgacttacatcaaaaarcaccacccactgtastaatctcataagtagtcatcatcctatgcctttgtttagtttgtagagtgagtgaaaagatgtgtaatacaagtcagaactctaattccaaaataaatagactttkgaagcttctgtgaaagttkgtaag

SEQ ID NO: 107391 - protein, 130 aa, Arabidopsis thaliana
  peptide (1)..(130): Ceres Seq. ID no. 15219493
MRKKAQEKKRPMSPTSSSSNCCSSSMTTTTTQDTGGSNGKMNQEGEDGYYSMDDIWREIDQSGANVIKPVKDNYYSEQSCYLNFPPLGCPTWESSLESIWNMDADESKMSSFAIDQFPLSFEHGRWSPLV

SEQ ID NO: 107392 - protein, 119 aa, Arabidopsis thaliana
  peptide (1)..(119): Ceres Seq. ID no. 15219494
MSPTSSSSNCCSSSMTTTTTQDTGGSNGKMNQEGEDGYYSMDDIWREIDQSGANVIKPVKDNYYSEQSCYLNFPPLGCPTWESSLESIWNMDADESKMSSFAIDQFPLSFEHGRWSPLV

SEQ ID NO: 107393 - protein, 105 aa, Arabidopsis thaliana
  peptide (1)..(105): Ceres Seq. ID no. 15219495
MTTTTTQDTGGSNGKMNQEGEDGYYSMDDIWREIDQSGANVIKPVKDNYYSEQSCYLNFPPLGCPTWESSLESIWNMDADESKMSSFAIDQFPLSFEHGRWSPLV

SEQ ID NO: 107394 - DNA, 1447 bp, Arabidopsis thaliana
  misc_feature (1)..(1447): Ceres Seq. ID no. 13647835
  misc_feature (1)..(1447): Ortholog of  Ceres SEQ ID NO 13596465 as cited in SEQ ID NO 62133
gaaattcgtttaccagtcatcaccaccacaacctccggcgaaaatggacgtgcgtgaatcaatctcactgcaaaaccaagtctccatgaatctcgcaaaacacgtaatcaccaccgtctctcaaaactccaacgtcatcttctcaccggcttcaatcaacgtcgtactcagtataatcgccgctggatccgccggcgctaccaaagatcagatcctctcgtttctcaaattctcttccactgatcaacttaattcattctcttccgaaatcgtctccgctgttctcgctgacggtagtgctaacggtggtcctaagctctcggtggctaatggcgcctggatcgataagtctctctcctttaaaccttcctttaaacagctcttggaagattcgtataaagctgcttcgaatcaagctgattttcaatcgaaggctgtggaggtgattgctgaagtgaattcatgggctgaaaaggagacaaatggtctcatcactgaggttcttccagaaggatcagctgatagtatgaccaaactgatatttgcaaatgcattgtacttcaagggaacatggaacgagaaattcgatgagtcgttaacacaagaaggcgagtttcaccttcttgacggtaacaaagtgactgcaccattcatgaccagcaagaagaaacaatacgtaagtgcttacgatggtttcaaagttttgggacttccttacttacaaggacaggataagcgacaattctccatgtacttttatcttcccgatgcaaacaacggactgtctgatcttctggacaaaatagtttccactcctgggttcttagacaaccacatcccacgcagacaagttaaagtccgcgaattcaagattccaaagtttaaattctctttcgggttcgatgcttcaaatgttttaaaaggattgggactgacttcgcctttcagcggtgaagaaggtttaactgagatggttgaatctcctgagatggggaagaatctatgcgtatcgaacattttccataaagcgtgtatcgaagtgaatgaagaaggaacagaagctgcagctgcatcagctggagttataaagctaagaggattgcttatggaggaagatgaaatagattttgttgcagaccatccgtttctattggtggtcacagagaacataacaggagtggttctgttcattggccaagttgttgatccgttgcattaatctaaagctaatgtggaagtttttggttttacttaaaataaatgagtcattggttttgaggactcatctttatgtaacatcctttgtcttgactctttgatgtgtgtaagaataatagtgatacataacagcttttcttctgtatttgggtcacatgtactgaactgatagacatacatacatgtgatgcatcttaatgattcactgtattgggtcattcatggttac

SEQ ID NO: 107395 - protein, 405 aa, Arabidopsis thaliana
  peptide (1)..(405): Ceres Seq. ID no. 13647836
KFVYQSSPPQPPAKMDVRESISLQNQVSMNLAKHVITTVSQNSNVIFSPASINVVLSIIAAGSAGATKDQILSFLKFSSTDQLNSFSSEIVSAVLADGSANGGPKLSVANGAWIDKSLSFKPSFKQLLEDSYKAASNQADFQSKAVEVIAEVNSWAEKETNGLITEVLPEGSADSMTKLIFANALYFKGTWNEKFDESLTQEGEFHLLDGNKVTAPFMTSKKKQYVSAYDGFKVLGLPYLQGQDKRQFSMYFYLPDANNGLSDLLDKIVSTPGFLDNHIPRRQVKVREFKIPKFKFSFGFDASNVLKGLGLTSPFSGEEGLTEMVESPEMGKNLCVSNIFHKACIEVNEEGTEAAAASAGVIKLRGLLMEEDEIDFVADHPFLLVVTENITGVVLFIGQVVDPLH

SEQ ID NO: 107396 - protein, 391 aa, Arabidopsis thaliana
  peptide (1)..(391): Ceres Seq. ID no. 13647837
MDVRESISLQNQVSMNLAKHVITTVSQNSNVIFSPASINVVLSIIAAGSAGATKDQILSFLKFSSTDQLNSFSSEIVSAVLADGSANGGPKLSVANGAWIDKSLSFKPSFKQLLEDSYKAASNQADFQSKAVEVIAEVNSWAEKETNGLITEVLPEGSADSMTKLIFANALYFKGTWNEKFDESLTQEGEFHLLDGNKVTAPFMTSKKKQYVSAYDGFKVLGLPYLQGQDKRQFSMYFYLPDANNGLSDLLDKIVSTPGFLDNHIPRRQVKVREFKIPKFKFSFGFDASNVLKGLGLTSPFSGEEGLTEMVESPEMGKNLCVSNIFHKACIEVNEEGTEAAAASAGVIKLRGLLMEEDEIDFVADHPFLLVVTENITGVVLFIGQVVDPLH

SEQ ID NO: 107397 - protein, 377 aa, Arabidopsis thaliana
  peptide (1)..(377): Ceres Seq. ID no. 13647838
MNLAKHVITTVSQNSNVIFSPASINVVLSIIAAGSAGATKDQILSFLKFSSTDQLNSFSSEIVSAVLADGSANGGPKLSVANGAWIDKSLSFKPSFKQLLEDSYKAASNQADFQSKAVEVIAEVNSWAEKETNGLITEVLPEGSADSMTKLIFANALYFKGTWNEKFDESLTQEGEFHLLDGNKVTAPFMTSKKKQYVSAYDGFKVLGLPYLQGQDKRQFSMYFYLPDANNGLSDLLDKIVSTPGFLDNHIPRRQVKVREFKIPKFKFSFGFDASNVLKGLGLTSPFSGEEGLTEMVESPEMGKNLCVSNIFHKACIEVNEEGTEAAAASAGVIKLRGLLMEEDEIDFVADHPFLLVVTENITGVVLFIGQVVDPLH

SEQ ID NO: 107398 - DNA, 1274 bp, Arabidopsis thaliana
  misc_feature (1)..(1274): Ceres Seq. ID no. 13647883
  misc_feature (1)..(1274): Ortholog of  Ceres SEQ ID NO 14315915 as cited in SEQ ID NO 57583
attatcgctckgtagaaaagcttccccattttcgtagaycactctcactgasaagatgaattctcttcatcgtgtagtaggattgatcagcagaacgacgactacatctccaatttctcatacccgtttcaatctcccatcgattctcgtcaatttgatgtccacaaaatctggaaacgatgaagacaaatggaacgacgcttgggaatcagcttggttaccagatgatctcacagataaaatccgagcaccatgggagagagatgtgaacttccctgtaaaagaatcaacggcgacggcgattgaagaaatcgatgtggaagcaaaagcgttcgtagaggatatgaatgagcattgggacgagaggagagggaagagtgggaaagtggagaagagagaagagaagaagaaagagattggagatggagaagatgaatcatcatcatcgctttatagtttggagacgatgaagaaggattataggttgaagaaacaaagagttcatgcttctctgtgggttaaagagattgagaaattggaagaagctaaattggatgattctggatctggtggtggagctgatgatattgataggcttcttgatagttgctcagagattttcgattcggtagaccatgattttgacaaattagaggtttcgagtggatctgaattgaagaataagcctgatggttgggaatcaacagcaaaggaacaagatggaaacctctgggagatgtcacaaagagaagaagacattcttctccaagaatttgatcgtcgcactgccttctgcaaatttcagatagctagttttataaagcaacacatattcagtaggagaagaccgattgatgggtggaaatacatgattgaagtgattggtccaaatgcgaggaaagggaaaggaagtgtttctaggctcccggctttatcggatgtgtcgactcagccgtttaaagaagaaaccagcagtctcactaccttgaagcgtcggtagaagaaactagaggagttcacaatgtttgttagattgttaaatgatcttcaactacttgcacttgttaaaggccggccatgtcctctgttcctacagttctaccatttcgggttttatattagcatcagttcttcaatcatgcaatttcttgttagcttagttttgaaacgttgaaacaatgggtcttgtcttagatgttgatcaagaacagaggacaaatctcacccagtagaaactaacaatgttgaaaattaaagccaaatataatcagatg

SEQ ID NO: 107399 - protein, 314 aa, Arabidopsis thaliana
  peptide (1)..(314): Ceres Seq. ID no. 15220522
MNSLHRVVGLISRTTTTSPISHTRFNLPSILVNLMSTKSGNDEDKWNDAWESAWLPDDLTDKIRAPWERDVNFPVKESTATAIEEIDVEAKAFVEDMNEHWDERRGKSGKVEKREEKKKEIGDGEDESSSSLYSLETMKKDYRLKKQRVHASLWVKEIEKLEEAKLDDSGSGGGADDIDRLLDSCSEIFDSVDHDFDKLEVSSGSELKNKPDGWESTAKEQDGNLWEMSQREEDILLQEFDRRTAFCKFQIASFIKQHIFSRRRPIDGWKYMIEVIGPNARKGKGSVSRLPALSDVSTQPFKEETSSLTTLKRR

SEQ ID NO: 107400 - protein, 280 aa, Arabidopsis thaliana; identical to SEQ ID NO: 49984
  peptide (1)..(280): Ceres Seq. ID no. 15220523

SEQ ID NO: 107401 - protein, 218 aa, Arabidopsis thaliana; identical to SEQ ID NO: 49985
  peptide (1)..(218): Ceres Seq. ID no. 15220524

SEQ ID NO: 107402 - DNA, 1227 bp, Arabidopsis thaliana
  misc_feature (1)..(1227): Ceres Seq. ID no. 13647890
  misc_feature (1)..(1227): Ortholog of  Ceres SEQ ID NO 13623732 as cited in SEQ ID NO 0
ggttcaatcatcatcatcactcatctgtcaaattaaaccactccactcgaccactccaattcaaaactcgccattgatacacgagagatagagagagagatttgtgtgagagaaatccatggcggaatcttgcagagtgaggaggataaagctaggaagtcaaggcctagaggtatcggcgcaaggccttggttgcatgggactcaccggtcattacggtgcttccaagccggaaactgaagccatcgctctcatccaccacgctattcactccggtgttactttccttgacacttctgacatgtatggtcctgaaaccaatgaaattctcctcggaaaggctcttaaggatggtgtgagggagaaagtggagcttgcgaccaaatttggaatcagttatgcagagggaaacagagagattaagggagatcctgcttatgttagagctgcctgtgaggctagtttaaagagactagatgttacctgcattgatctgtattatcagcatcggattgatactcgtgttcctattgaaatcactatgggagaactgaagaagctaattgaagagggtaaaataaagtacataggtttgtctgaggcctctgcctcaactatcagaagagcgcatactgttcacccaatcaccgccgtgcagttagagtggtccttgtggacaagagacgtggaagaagaaattgtcccaacctgcagggaacttggaattgggattgtttcttacagtcctctaggaagaggtttctttgcatcaggacctaagcttgttgagaacctagacaataatgacttcagaaaggctctaccaagattccaacaggaaaacttggatcacaacaagattctctatgagaaagtttctgcaatgtctgagaagaaagggtgcactcccgcacaactagccctcgcttgggttcaccaccagggagatgatgtttgtcccattccaggaaccactaagattgaaaacctcaaccagaacattagagctttatcagtgaaactcactcctgaagagatgtctgagcttgagaccattgcccaaccagagtctgtgaaaggagaaagatacatggccacagtgccaaccttcaaaaactccgacactccaccattgtcttcttggaatgctgtgtaaaactgtctgagagtttctctggccaaaggatgatttatgtatagaatatttattttcttctacccatctta

SEQ ID NO: 107403 - protein, 345 aa, Arabidopsis thaliana; identical to SEQ ID NO: 50605
  peptide (1)..(345): Ceres Seq. ID no. 13647891

SEQ ID NO: 107404 - protein, 319 aa, Arabidopsis thaliana; identical to SEQ ID NO: 50606
  peptide (1)..(319): Ceres Seq. ID no. 13647892

SEQ ID NO: 107405 - protein, 284 aa, Arabidopsis thaliana; identical to SEQ ID NO: 50607
  peptide (1)..(284): Ceres Seq. ID no. 13647893

SEQ ID NO: 107406 - DNA, 1321 bp, Arabidopsis thaliana
  misc_feature (1)..(1321): Ceres Seq. ID no. 13647913
  misc_feature (1)..(1321): Ortholog of  Ceres SEQ ID NO 15168500 as cited in SEQ ID NO 57041
ttctgttaccgcttttacgttcgactccagattcctcctttgccggaatattccatacgtaagagatattgaaatcgccgatgatggaaagttcgattccgtctgagaacggctccgttacctctgatcgtgatagatcggctctaatattcctaggaactggatgttcaagcgcggtacctaacgcaatgtgcttgatccagcgatctgataatccctgctatgtttgttcccagtctctttcaatcccgcctgagaaaaatcctaattacagggggaatacttcactgctcattgattattgccaaagtgatggcaaacataaatacattcaaatcgatgttggcaagactttcagagaacaagtccttcgttggtttactcttcacaagattcctcaagttgattctataattttgactcatgaacatgctgatgcagtacttggcctggatgatatacgttcagtgcaaccatttagtcctactaatgatattgatcctactccaatttttgtaagccaatacgctatggaaagccttgctgtgaagttcccgtatttggttcagaagaaacttaaagaaggccaagaagttaggcgagtagcacagctagattggagagtaattgaagaagattgtgagaagccatttgtagcttcaggtttatcattcacgccacttccagtgatgcatggagaagactatgtatgtcttggcttcctttttggtgaaaaatcaagagtggcttatatatccgatgtttcacggtttcctccaaacaccgagtatgctatatcaaaatctggtggtggacaattggatctccttattttggatacattatataagacaggatcccacaacactcacttatgtttcccgcagacactagacacaatcaaaagactgagtccaaaaagggctcttctgattggaatgactcacgagtttgatcatcacaaggacaacgagtttcttgaagaatggtctaaaagggaagggatttcagtaaaactcgctcatgatggcttgagagtcccaatagacctatgaagaggtgaaaatgattacttggctttctcattaacgaaactaagatcattgccttattttttatctgacttctgattcactcaatgaggaagcttgtaggtctccttgtgttatagagagatagagagcggagtgaaacggttttgttcaagatgcataatgctcgcatggcttcatatcaacattatcactaatgtttttgtttcttcttcaagttttagctaggatttctgactaaacgacgattttttaatattatcagatat

SEQ ID NO: 107407 - protein, 324 aa, Arabidopsis thaliana; identical to SEQ ID NO: 50633
  peptide (1)..(324): Ceres Seq. ID no. 13647914

SEQ ID NO: 107408 - protein, 323 aa, Arabidopsis thaliana; identical to SEQ ID NO: 50634
  peptide (1)..(323): Ceres Seq. ID no. 13647915

SEQ ID NO: 107409 - protein, 288 aa, Arabidopsis thaliana; identical to SEQ ID NO: 50635
  peptide (1)..(288): Ceres Seq. ID no. 13647916

SEQ ID NO: 107410 - DNA, 1756 bp, Arabidopsis thaliana
  misc_feature (1)..(1756): Ceres Seq. ID no. 13647953
  misc_feature (1)..(1756): Ortholog of  Ceres SEQ ID NO 15171438 as cited in SEQ ID NO 51665
  misc_feature (1)..(1756): Ortholog of  Ceres SEQ ID NO 15170804 as cited in SEQ ID NO 52653
  misc_feature (1)..(1756): Ortholog of  Ceres SEQ ID NO 15170203 as cited in SEQ ID NO 53291
  misc_feature (1)..(1756): Ortholog of  Ceres SEQ ID NO 14303083 as cited in SEQ ID NO 66573
aaatctaattttaaatctaccttttcttttgtttttttctctcctcacaaattactcaatttatagttgttaattttttgaggagaacaagaaggtggtagtattatttcaaaatgtttacggaagctgatagcattcctagggcaaaatatgccaacatgatgcattctgatccgaatctttcctccacgatgacccaacaaacagaggaagagtacggtatacgcaatagcagtgcatctgcggttggcacggggatgtatgatagaatgagttgcgaaggttctccaatgatgatgtctccttggaaccaagcaactccatttactcaaacacaatggtctactgtagaagaaaacctaccccaaaatggccttattggctcgcttgtccgtgaagaaggtcacatctattcattagcggccacaaaagatcttctttatactggctctgatagcaaaaacatacgtgtgtggaagaatctaaaggagttcagtgcattcaaatgtaacagtggattggttaaggccattgtgatttcaggggagaagattttcacaggtcaccaagacggaaagattcgagtttggaaagtctcccctaagaaccagagcttgcacaaacgttctggaacattaccaactttgaaagatatattcaaggcatctctcaaaccaagaaactatgttgaggtgaagaaacaccgcactgctctctggatcaaacacgccgatgctgtttcatgtttaagcctaaatgatgagcaagggttgttgtattctgcttcatgggaccggaccattaaggtgtggaggattgctgattcaaaatgtctagaatcaatcccagctcatgatgatgctgtaaactcggtggtatcaacaacggaagcgattgttttctctggatcagccgatgggacagtcaaggcatggaagagagaccaacaaggaaaatacacaaagcatacactaatgcaaacattaacaaagcaagaaagcgcagtcacagctttggctgtaagcaagaatggtgcggcagtgtactttggttcgagtgatggtttggtcaatttttgggagagggagaaacagttgaactacggtggtattctcaagggccacaagcttgctgttctttgcctagaagtggcagggagtcttgtttttagcggatctgctgataagacaatatgtgtgtggaagagagatggaaatattcatacatgcctctctgtactaacaggtcacacaggtcctgtgaaatgtttggcagtagaagcagaccgtgaagcctccgaacgtcgggacaaaaaatggattgtatatagtggaagcttggataagtcagtaaaagtatggggagtttcagaatctttcattgacatgaaccagatgagtatgatgcaacagcaacaacagcaacatgttatatcacattctgaaccattcatgtctgatggcagtttctcttcatcagctggtggagctagcagccatcgaagacactaatcatggtttgtgatttgaccatcaaataccaactgtgtctgaattattcatttgtttgttgttaaatttgaatggaaagaaaaagaaagaaaaatctagttatgatgcagtgttgtacaatatggaggtgaatttgaactaattttttctttttcttttttatcataaaggtttgttgtaatttttttatattttgtgatgaaaacctgtaactctatcaaacttcataataattaattttgtgc

SEQ ID NO: 107411 - protein, 465 aa, Arabidopsis thaliana; identical to SEQ ID NO: 50216
  peptide (1)..(465): Ceres Seq. ID no. 13647954

SEQ ID NO: 107412 - protein, 450 aa, Arabidopsis thaliana; identical to SEQ ID NO: 50217
  peptide (1)..(450): Ceres Seq. ID no. 13647955

SEQ ID NO: 107413 - protein, 449 aa, Arabidopsis thaliana; identical to SEQ ID NO: 50218
  peptide (1)..(449): Ceres Seq. ID no. 13647956

SEQ ID NO: 107414 - DNA, 1696 bp, Arabidopsis thaliana
  misc_feature (1)..(1696): Ceres Seq. ID no. 13647998
  misc_feature (1)..(1696): Ortholog of  Ceres SEQ ID NO 13596021 as cited in SEQ ID NO 62020
gttcttctcttctctcttcttcttttcgcttcgttgctgctctcttctcsgctccgccggagaagtcgtgaaatctctgcgacttcatcaatgaagaaatcgtctcatctctctactgaakctamgcagacctraaatatctctgtataatcyttctttaagattgatttcgtacgatcttcgtgtcttttyttctttaagagatgcgttccaaggacaaaatctcttacttttatgatggggatgtggggagtgtctattttggtccgaatcacccgatgaaacctcacaggctttgtatgacccatcatcttatccttgcatatggcctgcatagcaagatggaagtttatcgtccacacaaagcatatcctatcgagatggctcagttccattctcctgactatgtagagttcctgcaacgaattaatccagaaaaccagaacttgttccccaatgaaatggctagatataatctgggagaggattgtcctgtctttgaagatttgtttgaattttgtcaactttacgccggcggaaccatagatgctgcacgcaggttaaacaacaaactctgtgacattgctataaattgggcgggcgggttgcaccatgccaaaaaatgtgatgcatctgggttttgctacatcaacgatctcgtgctaggaattcttgagttgttaaaacaccatccccgtgttctatacatagatatagatgttcatcatggtgatggggttgaagaagcgttttacttcactgacagagtaatgactgttagctttcataagtttggggataagttctttccagggacaggcgatgttaaggaaataggagaaagagaagggaaattttacgccattaatgtgccgctgaaggatggtatcgatgacagtagtttcaaccgtcttttcaggactataatatccaaggttgttgagatatatcaaccgggtgcaattgttcttcaatgcggggcagattcactagccagggatcgactaggatgctttaatctctctattgatggacatgctgaatgtgttaaattcgtgaagaagttcaatcttcccttactggttacaggaggtggaggatacacaaaggagaatgtagctcgttgttggaccgttgagactggcattcttttggacacagaacttcctaatgagattcctgaaaacgactacataaagtattttgcgccggatttttctttgaagataccgggtggtcacattgagaatcttaataccaaatcgtacatcagttccatcaaagtgcagattttggagaatttgcgatacattcaacacgctccaagcgtacaaatgcaggaggttccaccggatttctacataccggattttgatgaagacgaacaaaacccggatgtacgtgcggatcagcgttcacgggataagcagatccagagggatgatgaatatttcgatggagacaacgataacgatgcgtcataaaacatcgattcttagaaattgttggttaatttttttgtttagttatgagatttgtaatgatatcaacactttaacggctactggggcaccaaaaccacttctgattgattccatcttcttcatsttttcgtcttggtgtatatgaatgaagctttttggttcactttctcatcattgtgacttatatagtgatcaaattcgttatatattgt

SEQ ID NO: 107415 - protein, 426 aa, Arabidopsis thaliana
  peptide (1)..(426): Ceres Seq. ID no. 15219517
MRSKDKISYFYDGDVGSVYFGPNHPMKPHRLCMTHHLILAYGLHSKMEVYRPHKAYPIEMAQFHSPDYVEFLQRINPENQNLFPNEMARYNLGEDCPVFEDLFEFCQLYAGGTIDAARRLNNKLCDIAINWAGGLHHAKKCDASGFCYINDLVLGILELLKHHPRVLYIDIDVHHGDGVEEAFYFTDRVMTVSFHKFGDKFFPGTGDVKEIGEREGKFYAINVPLKDGIDDSSFNRLFRTIISKVVEIYQPGAIVLQCGADSLARDRLGCFNLSIDGHAECVKFVKKFNLPLLVTGGGGYTKENVARCWTVETGILLDTELPNEIPENDYIKYFAPDFSLKIPGGHIENLNTKSYISSIKVQILENLRYIQHAPSVQMQEVPPDFYIPDFDEDEQNPDVRADQRSRDKQIQRDDEYFDGDNDNDAS

SEQ ID NO: 107416 - protein, 401 aa, Arabidopsis thaliana
  peptide (1)..(401): Ceres Seq. ID no. 15219518
MKPHRLCMTHHLILAYGLHSKMEVYRPHKAYPIEMAQFHSPDYVEFLQRINPENQNLFPNEMARYNLGEDCPVFEDLFEFCQLYAGGTIDAARRLNNKLCDIAINWAGGLHHAKKCDASGFCYINDLVLGILELLKHHPRVLYIDIDVHHGDGVEEAFYFTDRVMTVSFHKFGDKFFPGTGDVKEIGEREGKFYAINVPLKDGIDDSSFNRLFRTIISKVVEIYQPGAIVLQCGADSLARDRLGCFNLSIDGHAECVKFVKKFNLPLLVTGGGGYTKENVARCWTVETGILLDTELPNEIPENDYIKYFAPDFSLKIPGGHIENLNTKSYISSIKVQILENLRYIQHAPSVQMQEVPPDFYIPDFDEDEQNPDVRADQRSRDKQIQRDDEYFDGDNDNDAS

SEQ ID NO: 107417 - protein, 394 aa, Arabidopsis thaliana
  peptide (1)..(394): Ceres Seq. ID no. 15219519
MTHHLILAYGLHSKMEVYRPHKAYPIEMAQFHSPDYVEFLQRINPENQNLFPNEMARYNLGEDCPVFEDLFEFCQLYAGGTIDAARRLNNKLCDIAINWAGGLHHAKKCDASGFCYINDLVLGILELLKHHPRVLYIDIDVHHGDGVEEAFYFTDRVMTVSFHKFGDKFFPGTGDVKEIGEREGKFYAINVPLKDGIDDSSFNRLFRTIISKVVEIYQPGAIVLQCGADSLARDRLGCFNLSIDGHAECVKFVKKFNLPLLVTGGGGYTKENVARCWTVETGILLDTELPNEIPENDYIKYFAPDFSLKIPGGHIENLNTKSYISSIKVQILENLRYIQHAPSVQMQEVPPDFYIPDFDEDEQNPDVRADQRSRDKQIQRDDEYFDGDNDNDAS

SEQ ID NO: 107418 - DNA, 785 bp, Arabidopsis thaliana
  misc_feature (1)..(785): Ceres Seq. ID no. 13648289
  misc_feature (1)..(785): Ortholog of  Ceres SEQ ID NO 13581971 as cited in SEQ ID NO 56006
  misc_feature (1)..(785): Ortholog of  Ceres SEQ ID NO 15175208 as cited in SEQ ID NO 57966
ggcttagatatcatcgaacttgctccaactgctctatctcaggatctctctcagacacagtttcttccatccatggcgtctctttcttctacctctctctctctccccaagaattctcaccaactccatccttcatctggtttttctctgaatccaaatgctcgttgtgtcagtgtttcatttggactgaatcactccaacaaacttcatatttctgctcctagaaccaaaaggatcctaaccattcaatctgcatacagagatgatgatggttcaggcagcacaggcctattcgtcggagggtttattttgggcggacttatagtcggtgccctcggatgtgtatatgcaccacagatcagcaaggctatagctggagcagaccgaaaggatctcatgaggaagttgcctaaattcatatatgacgaggaaaaagctttggagaaaacacgtaaggtactagctgagaaaattgctcagcttaactctgctatcgacgatgtctcctctcagctcaaatcagaagatactccgaatggtgcagctctaagcaccgatgaaatcgaggctacagcctgaaatcatctgtttttaggatttgaaattgaatcatgggagattacttactatgatcccaataattgttttcctttctgtgtaatgttgtacaacttttcgtctactatcttcaaatgactgctttcttccttctttttttttttctcgaaatcgcggtgttgaaggatatatcccagttatatgcgaaaccagacgttatgaaggct

SEQ ID NO: 107419 - protein, 192 aa, Arabidopsis thaliana; identical to SEQ ID NO: 47589
  peptide (1)..(192): Ceres Seq. ID no. 13648290

SEQ ID NO: 107420 - protein, 168 aa, Arabidopsis thaliana; identical to SEQ ID NO: 47590
  peptide (1)..(168): Ceres Seq. ID no. 13648291

SEQ ID NO: 107421 - DNA, 760 bp, Arabidopsis thaliana
  misc_feature (1)..(760): Ceres Seq. ID no. 13648299
  misc_feature (1)..(760): Ortholog of  Ceres SEQ ID NO 15179952 as cited in SEQ ID NO 1063
ctctctctcctctaagaaacacgaaaatctctgaaagtctttttgtttgaagaagatgacgcatgttgaagatgataaggaattcaaggagaaacctttggttcaggttctgagcgacgacgacagtgaagtgaaggaagccaaagacggaggaggtgaagaagttaccggcggcgacggtgaaggagaggctaatgtagaagaggaagacgacgaagcagaaaatgaagacgatgatgatgatgatgatgatgatgacgacgacgaggacgaggacgatgaagaaggggaggaggatcttgggacagagtacctagtgaggccggttggtgaggttgaagatgaggatgatgcaagtgattttgaccctgaggagaatggcttggatgaagaagaaggtgatgaagagattgaagaagatgatgttgatgaggacatcagcttgagtgctggcaaatctgagcctctgtccaagaggaagagggttgctaaggaccacagtgagcaaggagatgtcactggtgataacattaggccttctaaacggtagttcttctaacttcgaactgatctcaatccaagaagaaagtcagaaattgattcgaattctcagtattttgaatcattcgttgggttgatatagtttttaatctaatggtagtagtgttgcttagagcttaatggattgttgtttcttctttatgttccttgagactgctttcaaacaagtttaagtattcaacgcttttcttttcaaggg

SEQ ID NO: 107422 - protein, 164 aa, Arabidopsis thaliana; identical to SEQ ID NO: 49656
  peptide (1)..(164): Ceres Seq. ID no. 13648300

SEQ ID NO: 107423 - DNA, 1411 bp, Arabidopsis thaliana
  misc_feature (1)..(1411): Ceres Seq. ID no. 13648309
  misc_feature (1)..(1411): Ortholog of  Ceres SEQ ID NO 14305026 as cited in SEQ ID NO 52980
  misc_feature (1)..(1411): Ortholog of  Ceres SEQ ID NO 15175670 as cited in SEQ ID NO 55204
  misc_feature (1)..(1411): Ortholog of  Ceres SEQ ID NO 13655712 as cited in SEQ ID NO 63394
ggttcatatggaaaacgctcatcaacctcaacaatctctctcctctctctctctgtatatagaagaatctccattgtctttaatttctctccatttctctttctctcttccttcaaagttttctcttttcttgatgggtttaagagagtaaagatcatcaagtactatgcattaaattgagaagttattaaaaatttcgattaattaaagattgttgatgatgaagagattaagtagttcagattcagtgggtggtctcatctctttatgtcctacaacttccacagatgagcagagtccgaggagatacggtgggagagagtttcagtcgatgcttgaaggatacgaggaagaagaagaagctatagtagaagaaagaggacacgtgggcttgtcggagaagaagagaaggttaagcattaaccaagttaaagctttggagaagaattttgagttagagaataagcttgagcctgagaggaaagttaagttagctcaagaacttggtcttcaacctcgtcaagttgctgtttggtttcaaaaccgtcgtgctcggtggaagacaaaacagcttgagaaagattatggtgttcttaaaacccagtacgattctctccgtcataactktgattccctccgccgtgacaatgaatctctccttcaagagattagtaaactgaaaacgaagcttgatggaggaggagaagaagaagaagaagaagagaacaacgcggcggtgacaacggagagtgatatttcggtcaaggaggaagaagtttcgttgccggagaagattacagaggcaccgtcgtctcctccacagtttcttgaacattctgatggtcttaattaccggagtttcacagatctacgtgatcttcttccattaaaggcggcggcttcttcattcgccgccgcagctggatcttcagacagtagcgattcaagcgcactgctgaatgaagaaagcagctctaatgtcactgtggcggctccggtgacggttccaggaggtaatttcttccagtttgtgaaaatggagcagacggaggatcatgaggactttctgagtggagaagaagcttgtgaattcttttccgatgaacagccgccgtctctacactggtactccaccgttgatcattggaattgaagctgaaaacaccaccggaagagattttggattggattagatgctcttttcttctctgtggaaaaaacagaggagggcaaaatgggaataargttaaaaattgaagggtgaaagggcaattaaggaagggttaartctgggcgggaataatgatttagggtgaatttgtaattatgctttttctctagtgrttttcgtgcacttcttgtaattaaggatcatcagatcaaagagaaattsagaaggggttamcatgtc

SEQ ID NO: 107424 - protein, 311 aa, Arabidopsis thaliana
  peptide (1)..(311): Ceres Seq. ID no. 15219541
  misc_feature (137)..(137): Xaa is any aa, unknown or other
MMKRLSSSDSVGGLISLCPTTSTDEQSPRRYGGREFQSMLEGYEEEEEAIVEERGHVGLSEKKRRLSINQVKALEKNFELENKLEPERKVKLAQELGLQPRQVAVWFQNRRARWKTKQLEKDYGVLKTQYDSLRHNXDSLRRDNESLLQEISKLKTKLDGGGEEEEEEENNAAVTTESDISVKEEEVSLPEKITEAPSSPPQFLEHSDGLNYRSFTDLRDLLPLKAAASSFAAAAGSSDSSDSSALLNEESSSNVTVAAPVTVPGGNFFQFVKMEQTEDHEDFLSGEEACEFFSDEQPPSLHWYSTVDHWN

SEQ ID NO: 107425 - protein, 310 aa, Arabidopsis thaliana
  peptide (1)..(310): Ceres Seq. ID no. 15219542
  misc_feature (136)..(136): Xaa is any aa, unknown or other
MKRLSSSDSVGGLISLCPTTSTDEQSPRRYGGREFQSMLEGYEEEEEAIVEERGHVGLSEKKRRLSINQVKALEKNFELENKLEPERKVKLAQELGLQPRQVAVWFQNRRARWKTKQLEKDYGVLKTQYDSLRHNXDSLRRDNESLLQEISKLKTKLDGGGEEEEEEENNAAVTTESDISVKEEEVSLPEKITEAPSSPPQFLEHSDGLNYRSFTDLRDLLPLKAAASSFAAAAGSSDSSDSSALLNEESSSNVTVAAPVTVPGGNFFQFVKMEQTEDHEDFLSGEEACEFFSDEQPPSLHWYSTVDHWN

SEQ ID NO: 107426 - protein, 273 aa, Arabidopsis thaliana
  peptide (1)..(273): Ceres Seq. ID no. 15219543
  misc_feature (99)..(99): Xaa is any aa, unknown or other
MLEGYEEEEEAIVEERGHVGLSEKKRRLSINQVKALEKNFELENKLEPERKVKLAQELGLQPRQVAVWFQNRRARWKTKQLEKDYGVLKTQYDSLRHNXDSLRRDNESLLQEISKLKTKLDGGGEEEEEEENNAAVTTESDISVKEEEVSLPEKITEAPSSPPQFLEHSDGLNYRSFTDLRDLLPLKAAASSFAAAAGSSDSSDSSALLNEESSSNVTVAAPVTVPGGNFFQFVKMEQTEDHEDFLSGEEACEFFSDEQPPSLHWYSTVDHWN

SEQ ID NO: 107427 - DNA, 1404 bp, Arabidopsis thaliana
  misc_feature (1)..(1404): Ceres Seq. ID no. 13648336
  misc_feature (1)..(1404): Ortholog of  Ceres SEQ ID NO 14310350 as cited in SEQ ID NO 20670
  misc_feature (1)..(1404): Ortholog of  Ceres SEQ ID NO 15177648 as cited in SEQ ID NO 58917
gaaggaaagagcgagagagagagagagagagagagaaaaaagaagaagaagaatttgaggcgattgggtaagcgatgcacatcgtcttctctgtcgatgatttgaccgaatccttctggcctgttcccgctccggcgccgtcgccgggatcgtcatcgactccgtcaccgacgcagaacgtggcggatgggatgactcgaagtcaatcggagtgggcgttccacaggcttatcaatgagttgtctggttccgattcgagccctacgactaacacaatcgagagatcacctccaccggttcagtctctttcgagattagaagaaaccgttgacgaaaccgaagatgttgttgagattcagaaaccgcagaatcatcgacggctccctgttgatgatcaagggaagaatcggaatcgtgctccgtcgtctgatccggttgattcttcagctcctgttgttgttgatcctaatcagtatcatgcgattcttaagagcaagctcgagcttgcttgcgctgctgttgctcgtcgtgtgggaactgtgaaaccggaagattcgagtgcttcagctagcaatcaaaaacaagctcaaggctccattgtggcacaaacctcacctggtgcttcatctgttagattttctcccacaacaagcacgcaaaagaaacctgatgttccagccagacaaactagtatttcatcacgagatgattctgatgacgatgatcttgatggagacgcagataatggagatcctactgatgtgaagcgtgctaggaggatgctctcaaaccgagaatccgctaggcgctctaggagaagaaagcaagaacaaatgaatgaatttgatacacaggccaattaagagccgagcattcaactttaattaatcgtcttagtgacatgaatcataagtatgatgcagctgctgttgacaacagaattctaagagctgatatcgaaactttgagaacaaaggttaagatggcagaggaaactgtgaaaagagtgacaggagtgaaccctttgcattggtcaagaccaaacatgggcataccattcagcaacacaccgagtgcttcctctagtattccgccaaactctaaccacattttgaaaccagcaaattcaagtaccaacaccagtgctggtttagcacaaaatcagagagtggagacggcaaatttcttgccggaacaggtgaaccgtgaaggcatgcagaatccatttgctcctgattctaatctgtacgaaaccctaccccattggaatcacaagcattaaccagaaaaagagtcattggttttgtgattttgattgaggtaactattgtctgtatttttatttactgtatgactcagcgacggtaaactcttaatattatatatatgattggacatgatgga

SEQ ID NO: 107428 - protein, 262 aa, Arabidopsis thaliana
  peptide (1)..(262): Ceres Seq. ID no. 13648337
MHIVFSVDDLTESFWPVPAPAPSPGSSSTPSPTQNVADGMTRSQSEWAFHRLINELSGSDSSPTTNTIERSPPPVQSLSRLEETVDETEDVVEIQKPQNHRRLPVDDQGKNRNRAPSSDPVDSSAPVVVDPNQYHAILKSKLELACAAVARRVGTVKPEDSSASASNQKQAQGSIVAQTSPGASSVRFSPTTSTQKKPDVPARQTSISSRDDSDDDDLDGDADNGDPTDVKRARRMLSNRESARRSRRRKQEQMNEFDTQAN

SEQ ID NO: 107429 - protein, 223 aa, Arabidopsis thaliana
  peptide (1)..(223): Ceres Seq. ID no. 13648338
MTRSQSEWAFHRLINELSGSDSSPTTNTIERSPPPVQSLSRLEETVDETEDVVEIQKPQNHRRLPVDDQGKNRNRAPSSDPVDSSAPVVVDPNQYHAILKSKLELACAAVARRVGTVKPEDSSASASNQKQAQGSIVAQTSPGASSVRFSPTTSTQKKPDVPARQTSISSRDDSDDDDLDGDADNGDPTDVKRARRMLSNRESARRSRRRKQEQMNEFDTQAN

SEQ ID NO: 107430 - DNA, 485 bp, Arabidopsis thaliana
  misc_feature (1)..(485): Ceres Seq. ID no. 13650139
  misc_feature (1)..(485): Ortholog of  Ceres SEQ ID NO 15176349 as cited in SEQ ID NO 58789
ttttggctcttcagggaaaggatatgtaagagggggtttagagtgtagccattccatgaaaacctatgatgtgggtcatgtacctgggaggtttccaagggcaaaacggctccttgccggtattaacaagaatttgttctctctagccttatgcagacgttatttggaccgccggggtgaggcaagatccttgatgcctttaaagaatcttggtgattctggcataattgaaccatgtcctaccagtgtgtgatgtcaaaggaagctatatttctcagtttgagcatgcgatcctgttgcgatcgacttgcaaagagattatttccacaggnnnnngttnnnnaaatagggattttcgcagagcttgaagcagttgttcttcctgagttcgtataatagttttggaaggctttttaagtcttgtgctcaactatttgtatgttcttcgaagacgattctaagtataagagcttagggggtccttc

SEQ ID NO: 107431 - protein, 83 aa, Arabidopsis thaliana
  peptide (1)..(83): Ceres Seq. ID no. 13650140
FGSSGKGYVRGGLECSHSMKTYDVGHVPGRFPRAKRLLAGINKNLFSLALCRRYLDRRGEARSLMPLKNLGDSGIIEPCPTSV

SEQ ID NO: 107432 - protein, 65 aa, Arabidopsis thaliana
  peptide (1)..(65): Ceres Seq. ID no. 13650141
MKTYDVGHVPGRFPRAKRLLAGINKNLFSLALCRRYLDRRGEARSLMPLKNLGDSGIIEPCPTSV

SEQ ID NO: 107433 - protein, 53 aa, Arabidopsis thaliana
  peptide (1)..(53): Ceres Seq. ID no. 13650142
  misc_feature (33)..(33): Xaa is any aa, unknown or other
  misc_feature (34)..(34): Xaa is any aa, unknown or other
  misc_feature (36)..(36): Xaa is any aa, unknown or other
  misc_feature (37)..(37): Xaa is any aa, unknown or other
MSYQCVMSKEAIFLSLSMRSCCDRLAKRLFPQXXVXXIGIFAELEAVVLPEFV

SEQ ID NO: 107434 - DNA, 772 bp, Arabidopsis thaliana
  misc_feature (1)..(772): Ceres Seq. ID no. 13650164
  misc_feature (1)..(772): Ortholog of  Ceres SEQ ID NO 15179194 as cited in SEQ ID NO 0
aagtaaacgagcaaaagaagaagagaaacaacaagaagtagtaatggcttcctctatgctctcctccgccgctgtggttacatccccggctcaggccaccatggtcgctccattcaccggcttgaagtcatccgctgcattcccggtcacccgcaagaccaacaaggacatcacttccatcgcaagcaacgggggaagagttagctgcatgaaggtgtggccaccaattggaaagaagaagtttgagactctatcttacctccctgaccttagtgacgtcgaattggctaaggaagttgactaccttctccgcaacaagtggattccttgtgttgaattcgagttagagcacggatttgtgtaccgtgagcacggaaacactcccggatactacgatggacggtactggacaatgtggaagcttccattgttcggatgcaccgactccgctcaagtgttgaaggaagttgaagaatgcaagaaggagtacccgggcgccttcattaggatcatcggattcgacaacacccgtcaagtccaatgcatcagtttcattgcctacaagcccccaagcttcaccgaagcttaatttcttttctaaaacattcttatgaattatctctgctcatttcatttcctattgtctgtgttctttttctctttatgagacaatttctatcggattgtcaaatgtctgatttatgaatatgtaatttatatatccgtgcgtcttgattttttccgatggttaactagtttgaaaatttccgat

SEQ ID NO: 107435 - protein, 195 aa, Arabidopsis thaliana
  peptide (1)..(195): Ceres Seq. ID no. 13650165
SKRAKEEEKQQEVVMASSMLSSAAVVTSPAQATMVAPFTGLKSSAAFPVTRKTNKDITSIASNGGRVSCMKVWPPIGKKKFETLSYLPDLSDVELAKEVDYLLRNKWIPCVEFELEHGFVYREHGNTPGYYDGRYWTMWKLPLFGCTDSAQVLKEVEECKKEYPGAFIRIIGFDNTRQVQCISFIAYKPPSFTEA

SEQ ID NO: 107436 - protein, 181 aa, Arabidopsis thaliana; identical to SEQ ID NO: 36039
  peptide (1)..(181): Ceres Seq. ID no. 13650166

SEQ ID NO: 107437 - protein, 177 aa, Arabidopsis thaliana; identical to SEQ ID NO: 36040
  peptide (1)..(177): Ceres Seq. ID no. 13650167

SEQ ID NO: 107438 - DNA, 2142 bp, Arabidopsis thaliana
  misc_feature (1)..(2142): Ceres Seq. ID no. 13650190
  misc_feature (1)..(2142): Ortholog of  Ceres SEQ ID NO 12460981 as cited in SEQ ID NO 65146
atgtctcaagattctgcaactactactccgccgccacctttaacctccgacgtttcaatgccttccggtgaagaagatgagccaaagcatgtaacatcggaagaagaggcaccggtgacttcggagacaaatctgaagctacctttgatgccggagctagaggagtcaaatcatacggcggaggttgtttcagagaaggtgacgccggagacgatgactttggagtcagaaggtctcaaccacgcggcggaggattcagagcagacacatgaagtgacgccggagacagagactgcgaagctagaggttctcaaccacacggcggaggattcagagcagacacatgaagtgacgccggagaaagagactgtgaaatcagagtttctcaaccacgtggcggaggattcagagcagacacatgaagtgacgccggagacagagactgtgaagtcagaggttctcaaccatgcggcggaggattcagagcagccacgtggagtgacaccgacgccggagacagaaacatcggaggcagacacgtcattgcttgtaacttccgagacagaagagcctaaccatgcggcggaggattattcagagacagagccatcacagaaactaatgttggagcagaggagaaagtacatggaagtagaagattggacagagccagaactaccagatgaagcggtgttagaagctgcagcgtcagtccctgagccaaagcaaccagagcctcagacaccaccaccaccaccatctactactacttccactgttgcatctagatctttagccgaaatgatgaacagagaagaagcagaagtagaagagaaacaaaagattcagattcctcgtagtctcggttcattcaaagaagaaacaaacaaaatctccgatctttcagaaacagagttaaacgcacttcaagagcttcgtcaccttcttcaagtatcacaagattcaagcaaaacctctatatggggtgtgccacttctcaaagacgacagaaccgacgtcgttttgttaaagtttctaagagcaagagactttaaacctcaagaagcttactcaatgctaaacaagacactccaatggagaatcgacttcaacatcgaagagcttctagacgaaaacctcggtgacgatttagacaaagttgtgttcatgcaaggacaagacaaggagaatcatcctgtctgttacaatgtctacggtgagtttcagaacaaagatctttatcagaaaacgttttcagatgaagagaagagagaacggttcttgagatggaggattcagtttcttgaaaagagtatcaggaatcttgattttgtagctggtggtgtttccacgatatgtcaagtaaatgatcttaagaattctccaggacctggtaagactgagcttaggttagctactaagcaagctcttcatcttcttcaagacaattaccctgagtttgtctctaaacagatattcatcaatgttccatggtggtaccttgcgttctatagaattattagtccttttatgtcacaaaggtcaaagagcaaactagttttcgcaggtccttcaagatctgcagaaacccttctcaagtacatatcacccgaacatgtcccggttcagtatggtggactaagtgtggataattgcgagtgtaactcggatttcacacacgatgatatcgctaccgagattactgttaaaccaactactaaacaaaccgtcgagattattgtttacgagaaatgtacaatcgtgtgggagataagagtagtgggatgggaggtttcgtatggagcggagtttgtgccggagaacaaagaagggtatacagtgatcattcagaaaccgaggaagatgactgcgaaaaatgaactggtggtgtctcatagcttcaaagttggagaagttggcaggattttgctaactgttgataacccgacttcgaccaagaaaatgcttatctacaggttcaaggttaagcctttagcttgtgagtaacaaaagtgcgcatctttcttcgagtgtttcttagtttagaacttgatcatatgattgttgattgtgttttgtttttctctcttttaccgacttatatgtttgtgtggttctgtttgctaaattcttttgttttat

SEQ ID NO: 107439 - protein, 668 aa, Arabidopsis thaliana
  peptide (1)..(668): Ceres Seq. ID no. 15220544
MSQDSATTTPPPPLTSDVSMPSGEEDEPKHVTSEEEAPVTSETNLKLPLMPELEESNHTAEVVSEKVTPETMTLESEGLNHAAEDSEQTHEVTPETETAKLEVLNHTAEDSEQTHEVTPEKETVKSEFLNHVAEDSEQTHEVTPETETVKSEVLNHAAEDSEQPRGVTPTPETETSEADTSLLVTSETEEPNHAAEDYSETEPSQKLMLEQRRKYMEVEDWTEPELPDEAVLEAAASVPEPKQPEPQTPPPPPSTTTSTVASRSLAEMMNREEAEVEEKQKIQIPRSLGSFKEETNKISDLSETELNALQELRHLLQVSQDSSKTSIWGVPLLKDDRTDVVLLKFLRARDFKPQEAYSMLNKTLQWRIDFNIEELLDENLGDDLDKVVFMQGQDKENHPVCYNVYGEFQNKDLYQKTFSDEEKRERFLRWRIQFLEKSIRNLDFVAGGVSTICQVNDLKNSPGPGKTELRLATKQALHLLQDNYPEFVSKQIFINVPWWYLAFYRIISPFMSQRSKSKLVFAGPSRSAETLLKYISPEHVPVQYGGLSVDNCECNSDFTHDDIATEITVKPTTKQTVEIIVYEKCTIVWEIRVVGWEVSYGAEFVPENKEGYTVIIQKPRKMTAKNELVVSHSFKVGEVGRILLTVDNPTSTKKMLIYRFKVKPLACE

SEQ ID NO: 107440 - protein, 649 aa, Arabidopsis thaliana
  peptide (1)..(649): Ceres Seq. ID no. 15220545
MPSGEEDEPKHVTSEEEAPVTSETNLKLPLMPELEESNHTAEVVSEKVTPETMTLESEGLNHAAEDSEQTHEVTPETETAKLEVLNHTAEDSEQTHEVTPEKETVKSEFLNHVAEDSEQTHEVTPETETVKSEVLNHAAEDSEQPRGVTPTPETETSEADTSLLVTSETEEPNHAAEDYSETEPSQKLMLEQRRKYMEVEDWTEPELPDEAVLEAAASVPEPKQPEPQTPPPPPSTTTSTVASRSLAEMMNREEAEVEEKQKIQIPRSLGSFKEETNKISDLSETELNALQELRHLLQVSQDSSKTSIWGVPLLKDDRTDVVLLKFLRARDFKPQEAYSMLNKTLQWRIDFNIEELLDENLGDDLDKVVFMQGQDKENHPVCYNVYGEFQNKDLYQKTFSDEEKRERFLRWRIQFLEKSIRNLDFVAGGVSTICQVNDLKNSPGPGKTELRLATKQALHLLQDNYPEFVSKQIFINVPWWYLAFYRIISPFMSQRSKSKLVFAGPSRSAETLLKYISPEHVPVQYGGLSVDNCECNSDFTHDDIATEITVKPTTKQTVEIIVYEKCTIVWEIRVVGWEVSYGAEFVPENKEGYTVIIQKPRKMTAKNELVVSHSFKVGEVGRILLTVDNPTSTKKMLIYRFKVKPLACE

SEQ ID NO: 107441 - protein, 619 aa, Arabidopsis thaliana
  peptide (1)..(619): Ceres Seq. ID no. 15220546
MPELEESNHTAEVVSEKVTPETMTLESEGLNHAAEDSEQTHEVTPETETAKLEVLNHTAEDSEQTHEVTPEKETVKSEFLNHVAEDSEQTHEVTPETETVKSEVLNHAAEDSEQPRGVTPTPETETSEADTSLLVTSETEEPNHAAEDYSETEPSQKLMLEQRRKYMEVEDWTEPELPDEAVLEAAASVPEPKQPEPQTPPPPPSTTTSTVASRSLAEMMNREEAEVEEKQKIQIPRSLGSFKEETNKISDLSETELNALQELRHLLQVSQDSSKTSIWGVPLLKDDRTDVVLLKFLRARDFKPQEAYSMLNKTLQWRIDFNIEELLDENLGDDLDKVVFMQGQDKENHPVCYNVYGEFQNKDLYQKTFSDEEKRERFLRWRIQFLEKSIRNLDFVAGGVSTICQVNDLKNSPGPGKTELRLATKQALHLLQDNYPEFVSKQIFINVPWWYLAFYRIISPFMSQRSKSKLVFAGPSRSAETLLKYISPEHVPVQYGGLSVDNCECNSDFTHDDIATEITVKPTTKQTVEIIVYEKCTIVWEIRVVGWEVSYGAEFVPENKEGYTVIIQKPRKMTAKNELVVSHSFKVGEVGRILLTVDNPTSTKKMLIYRFKVKPLACE

SEQ ID NO: 107442 - DNA, 1711 bp, Arabidopsis thaliana
  misc_feature (1)..(1711): Ceres Seq. ID no. 13650221
  misc_feature (1)..(1711): Ortholog of  Ceres SEQ ID NO 13656177 as cited in SEQ ID NO 64997
atgattcataaacatatcataaataagatcaatattaataaaataaatagttttttttacgggacggattgtcagagatttcgaaaccctagtcgatttcgagatccaactaactctgctccttatctcagcttgttgaatttgcgaagtatgggagacgctagagacaacgaagcctacgaggaggagctcttggactatgaagaagaagacgagaaggtcccagattctggaaacaaagttaacggcgaagctgtgaaaaaagggtacgtgggaatacacagttctggattcagagacttccttttgaaaccggagcttctcagagctattgttgactcaggatttgaacatccatctgaagtgcaacacgaatgtatccctcaagctatcttgggtatggatgttatctgccaagcaaagtctggtatggggaagactgctgtgtttgtcctgtctactctacaacagattgaaccatctcctggccaggtttctgcacttgtcttgtgccatacaagagagctagcttaccagatctgcaatgagtttgtgcgattcagtacctatctgcctgatacaaaagtttcggtgttctatggtggagtcaacattaaaattcacaaagacttgctgaagaatgaatgtcctcacattgttgttggtacccctggtcgagtgcttgcacttgccagggagaaagatctctctttgaagaatgtgaggcattttattcttgatgagtgtgataaaatgctcgagtcacttgacatgcgaagggatgtgcaggagattttcaagatgactcctcatgacaaacaagtaatgatgttctcagcaacgctcagcaaagagatacgcccagtctgcaagaagtttatgcaagatccaatggaaatatatgttgatgatgaagccaagttgactcttcatggacttgtccagcactacatcaaactgagcgagatggagaaaaatcgcaagttgaatgaccttcttgatgcgttggacttcaatcaagttgtcatttttgtgaagagcgtgagcagggctgcggagctgaacaagttactggtggaatgcaatttcccctcaatatgcatacactctggcatgtctcaagaagagaggttgactcgatacaaaagtttcaaggaagggcacaagaggatccttgtggcgactgacttggtaggaagagggattgacatagagcgtgtcaacattgttatcaactatgacatgccagattctgcggatacctatcttcatagggttgggagagctggtagatttggaaccaagggtcttgcaatcacatttgttgcatctgcttcagattcagaggtccttaatcaggttcaagagaggtttgaggtcgatataaaggagcttcctgagcagattgatacatcgacttacatgccgtcttaaacaagtagcatcatctctgaggaacgaacctcttcagatttcaaccttttaggtgttcaaaggggtcatggaggtccacaactatctctcacaccgtttgttgcttcgctattttagacttttctatgaggacaagtttttccatatatttagaccgttttgtaactcttgaaaaatgagattgagctactctccaaatcgcgcacagttgagagctctcctgttttttgtactagtgatggttatctttaaaatattaagatttcaggatttattc

SEQ ID NO: 107443 - protein, 477 aa, Arabidopsis thaliana
  peptide (1)..(477): Ceres Seq. ID no. 13650222
MIHKHIINKININKINSFFYGTDCQRFRNPSRFRDPTNSAPYLSLLNLRSMGDARDNEAYEEELLDYEEEDEKVPDSGNKVNGEAVKKGYVGIHSSGFRDFLLKPELLRAIVDSGFEHPSEVQHECIPQAILGMDVICQAKSGMGKTAVFVLSTLQQIEPSPGQVSALVLCHTRELAYQICNEFVRFSTYLPDTKVSVFYGGVNIKIHKDLLKNECPHIVVGTPGRVLALAREKDLSLKNVRHFILDECDKMLESLDMRRDVQEIFKMTPHDKQVMMFSATLSKEIRPVCKKFMQDPMEIYVDDEAKLTLHGLVQHYIKLSEMEKNRKLNDLLDALDFNQVVIFVKSVSRAAELNKLLVECNFPSICIHSGMSQEERLTRYKSFKEGHKRILVATDLVGRGIDIERVNIVINYDMPDSADTYLHRVGRAGRFGTKGLAITFVASASDSEVLNQVQERFEVDIKELPEQIDTSTYMPS

SEQ ID NO: 107444 - protein, 427 aa, Arabidopsis thaliana; identical to SEQ ID NO: 20810
  peptide (1)..(427): Ceres Seq. ID no. 13650223

SEQ ID NO: 107445 - protein, 344 aa, Arabidopsis thaliana; identical to SEQ ID NO: 20811
  peptide (1)..(344): Ceres Seq. ID no. 13650224

SEQ ID NO: 107446 - DNA, 1371 bp, Arabidopsis thaliana
  misc_feature (1)..(1371): Ceres Seq. ID no. 13650244
  misc_feature (1)..(1371): Ortholog of  Ceres SEQ ID NO 14309794 as cited in SEQ ID NO 20350
atggcctcttcaatggctagcaatgatttccagctccctccacgtttcttcactgttttcgtctcccatttcagctcagagttcatggtgatcccagtttcctactacgatcacattccacatcgtttccccaagactgtgattctccgaggacctggtggatgctcctggaaggtagcgacggagataaaggatgatgaagtgcttttttcacaaggatggcccaaatttgttcgggataatactcttaacgatggagactttttgacctttgcctataatggagctcacatattcgaggtcagtatctttcgcggctacgacgcatgtaaagagattagcgaagtcactgaattggaagaggaagaagaagacagtgttatatctctgagcagtgaagacacagacactggtgctaaatctgagatgaagaatacagtcccggaaggcagagacaaaggaaagtcaaaagtggaagttgtggaggattctgatgacgatgaggaggaggatagtgtttattctgaaagcagtgaagaaacagagacagacactgattctgaattcaaggtggccaagccaacaataccaaaaagccagaagaaaggaaagaagaaagaacaagttgtggagtcctctgatgacgaggaagacgaagaggaggacagtgacagtgattacattgaaacgtttggtcaattggatattgaagagaattccatcagtgaggaggacagttcttatgctcctgataaagaagacacagccactgcctcttttgtcaaaccaaaggttgcaaataaggttgctaatctgaagaggaaagaggcggcaaagaagaggaagaaagtcgatcccatgatcaagaatcctgagagatacctcgatgatcctaagaatatccatttcgagacaaacgtgaagaataggttatacgagctgttggttcatgcacaactggtgaaagactattgcttgaggtttggagactatgttaactacatcgacaggttcgggaaactaagtgctaaaacagccaaatggaaggatcagcgtgtttgtatcaaaagatggatgcgcatatgcaagaggaacaagttgaagaaagaagaccgcattttgtgtgagctcttgcgcaagggaactttcgtttacgcaatcaaactccatgtcatccgcggtaaggatctgtagacgctagcagtatgagtagaggaagagatttggctacttaattatctctctgatttccatcttgttgtgtgatcaagcaaacttatgtgtttcattattgtctacttcagattgtatgaccttctctcttgttctctcatgaatctatttctgaatacaatatctaatctttgagct

SEQ ID NO: 107447 - protein, 397 aa, Arabidopsis thaliana; identical to SEQ ID NO: 20351
  peptide (1)..(397): Ceres Seq. ID no. 13650245

SEQ ID NO: 107448 - protein, 393 aa, Arabidopsis thaliana; identical to SEQ ID NO: 20352
  peptide (1)..(393): Ceres Seq. ID no. 13650246

SEQ ID NO: 107449 - protein, 369 aa, Arabidopsis thaliana; identical to SEQ ID NO: 20353
  peptide (1)..(369): Ceres Seq. ID no. 13650247

SEQ ID NO: 107450 - DNA, 1527 bp, Arabidopsis thaliana
  misc_feature (1)..(1527): Ceres Seq. ID no. 13650280
  misc_feature (1)..(1527): Ortholog of  Ceres SEQ ID NO 13596807 as cited in SEQ ID NO 62275
ctccagtttcatagtcactaacctaaaagaattaatggaggaaactcggaggaggtttgtcatatcctctgttctaagtgtttctttgatctacttatgtctttcgacatgtcacgtttccgccttcgacttcggtagaaggcagctccggtttaatactgatggtcggttcaagatactgcaagtgtcagatatgcactacggttttggcaaagagacgcaatgctcagacgtttcacctgcagaatttccttactgctccgatctcaatactacctcctttttacagcgaactatcgcttccgagaagcccgatctcatcgtcttctctggagacaatgtatatggattgtgcgagacaagtgacgtggcaaaatcgatggacatggcatttgctcctgcgatcgaatcggggattccatgggtggctattttggggaatcacgaccaagaatccgacatgactagagaaacaatgatgaaatacatcatgaaactcccaaactcgttgtctcaagtaaaccctcccgatgcttggctataccaaatcgacggttttggtaattacaatctacaaatcgagggtccttttggctcccctctcttcttcaaatccattctcaatctctatctactagacggtggatcttacacgaagcttgatggttttggttacaaatatgattgggtcaaaacctctcaacagaattggtatgaacacacttctaaatggcttgagatggaacacaagaggtggccatttccacagaatagtacggcaccaggattggtttacctccacattccgatgccggaatttgcattgttcaacaaatcgacggagatgactggagtaagacaagaatctacttgttctccacctatcaactctggtttctttaccaaacttgtcgaaagaggtgaagtcaaaggtgttttcagtggtcacgaccacgtcaacgacttctgtgccgaactccatgggatcaacctttgttacgcaggcggagccgggtaaattgtaccacacgctacttttctcataaaagccttacttgtaacacacgcttcttttaattgttttaggtatcatgggtacggacgggttggttgggcaaggagagtaagagtagttgaggctcagcttgagaagactatgtagggacgttggggagctgttgatacaatcaaaacttggaaacggctcgatgataagaatcattctttgattgatactcaacttctctggaccaagaacacaactcttgagccaaattttgggtttagttgctctactataccacaacactgatcattaagcagagttgttgtacaatgatatgatattttcattttctttatttatgctttactatctattattttgtttagaataagaattaaggaagacaatgtcagcttataattgtctgctttgtttagaataagaaggaagacaatgtcagcttataattgtctgctttgttacgttcgttttatttttctcaatagagtatcattttatct

SEQ ID NO: 107451 - protein, 338 aa, Arabidopsis thaliana
  peptide (1)..(338): Ceres Seq. ID no. 13650281
SSFIVTNLKELMEETRRRFVISSVLSVSLIYLCLSTCHVSAFDFGRRQLRFNTDGRFKILQVSDMHYGFGKETQCSDVSPAEFPYCSDLNTTSFLQRTIASEKPDLIVFSGDNVYGLCETSDVAKSMDMAFAPAIESGIPWVAILGNHDQESDMTRETMMKYIMKLPNSLSQVNPPDAWLYQIDGFGNYNLQIEGPFGSPLFFKSILNLYLLDGGSYTKLDGFGYKYDWVKTSQQNWYEHTSKWLEMEHKRWPFPQNSTAPGLVYLHIPMPEFALFNKSTEMTGVRQESTCSPPINSGFFTKLVERGEVKGVFSGHDHVNDFCAELHGINLCYAGGAG

SEQ ID NO: 107452 - protein, 327 aa, Arabidopsis thaliana
  peptide (1)..(327): Ceres Seq. ID no. 13650282
MEETRRRFVISSVLSVSLIYLCLSTCHVSAFDFGRRQLRFNTDGRFKILQVSDMHYGFGKETQCSDVSPAEFPYCSDLNTTSFLQRTIASEKPDLIVFSGDNVYGLCETSDVAKSMDMAFAPAIESGIPWVAILGNHDQESDMTRETMMKYIMKLPNSLSQVNPPDAWLYQIDGFGNYNLQIEGPFGSPLFFKSILNLYLLDGGSYTKLDGFGYKYDWVKTSQQNWYEHTSKWLEMEHKRWPFPQNSTAPGLVYLHIPMPEFALFNKSTEMTGVRQESTCSPPINSGFFTKLVERGEVKGVFSGHDHVNDFCAELHGINLCYAGGAG

SEQ ID NO: 107453 - protein, 274 aa, Arabidopsis thaliana
  peptide (1)..(274): Ceres Seq. ID no. 13650283
MHYGFGKETQCSDVSPAEFPYCSDLNTTSFLQRTIASEKPDLIVFSGDNVYGLCETSDVAKSMDMAFAPAIESGIPWVAILGNHDQESDMTRETMMKYIMKLPNSLSQVNPPDAWLYQIDGFGNYNLQIEGPFGSPLFFKSILNLYLLDGGSYTKLDGFGYKYDWVKTSQQNWYEHTSKWLEMEHKRWPFPQNSTAPGLVYLHIPMPEFALFNKSTEMTGVRQESTCSPPINSGFFTKLVERGEVKGVFSGHDHVNDFCAELHGINLCYAGGAG

SEQ ID NO: 107454 - DNA, 1649 bp, Arabidopsis thaliana
  misc_feature (1)..(1649): Ceres Seq. ID no. 13650284
  misc_feature (1)..(1649): Ortholog of  Ceres SEQ ID NO 12608463 as cited in SEQ ID NO 60238
tacataattattcattacaatctattagtaactcaaatgggtttccctcaaaaattgttctttcttacatagtttttaatcggtggaggtagaatcaaagtgacaccaatatttacaagaaacaccaacgcaactatccccaaggaaaaactcactacaccactgaacttcacattgcaatgctcactagaccagaacatagcaacccagacgtgtcctgcaagcaacccggagaaatcacaacctagtaaggacgagccagagacttgtccagactacttcaggtggatccacaaggatcttgaagcatggcgtgagactggaatcactcgagagacgttagagagagcaagtgataaagctcacttccggctgataataaaaggaggaagagtgtatgtgcatcaatacaagaaatcttttcagacaagagatgttttcactatatggggaatagtacagctgctaaggatgtatcctggtcaagtccctgatcttgagcttctcttcatgtgccatgactcacctgaaatctggagaagagactataggccaagaccaggagtcaatgtgacgtggccacctcctccactcttccactattgtggacattccggtgctttcgacattgtcttccctgactggagcttttggggctggccggagattaacataaaggagtggaataaacagtcggagttgataagtgaagggataaagaaggtgaagtgggaagagagagagccttacgcatattggaaggggaatcctggagttgccatggtcagaagagacctcatgcattgtcatgaccctatggttcatctctatcgccaggattggagcagagagggcaggattgggtataggacatcaaacctagaagatcaatgcacccacaggtacaagatttatgtagaaggaagggcttggtcagtgagtgagaagtatatattagcttgtgacagcatgactcttcttgtgaagccattttactttgacttcttcactagaagcttagttccaatggagcattattggcccataagacctcaagaaaaatgtagtgacattgtctttgctgtccattggggcaacaacaataccaaaaaggccagagctatagggagaaatggaagtgggtatgtgcgaaagaatctaaagatgaagtatgtgtatgattacatgttgcatctactgcaaagctatgggaagttgatgaagatgaatgtagaagtgcctcaaggagccaaggaagtgtgtccggagacaatggcttgtccaatcaatggaggccgaatgagacaatctatggatgactcattggttatgtctccgagcgttaaggctacttgtgagatgcctccaccttttgaagaagatgagctcaaaaagtttcttgagaagaaagaaagtgttgagaaagaagttgagaagtggactaatgagtattggcaggaacagaagaagattyttaaacattgagctattataaaaaacaaaattaattatgtactaatacaaatttgatgaaaataaattggatcatatgaaggcccawgaaatgcccaattttcaggttcccatgtaaacttctacacaatgtactgaatttaagctgtagaatcagaattgcaagcaaattcccc

SEQ ID NO: 107455 - protein, 337 aa, Arabidopsis thaliana
  peptide (1)..(337): Ceres Seq. ID no. 13650285
  misc_feature (335)..(335): Xaa is any aa, unknown or other
MYPGQVPDLELLFMCHDSPEIWRRDYRPRPGVNVTWPPPPLFHYCGHSGAFDIVFPDWSFWGWPEINIKEWNKQSELISEGIKKVKWEEREPYAYWKGNPGVAMVRRDLMHCHDPMVHLYRQDWSREGRIGYRTSNLEDQCTHRYKIYVEGRAWSVSEKYILACDSMTLLVKPFYFDFFTRSLVPMEHYWPIRPQEKCSDIVFAVHWGNNNTKKARAIGRNGSGYVRKNLKMKYVYDYMLHLLQSYGKLMKMNVEVPQGAKEVCPETMACPINGGRMRQSMDDSLVMSPSVKATCEMPPPFEEDELKKFLEKKESVEKEVEKWTNEYWQEQKKIXKH

SEQ ID NO: 107456 - protein, 324 aa, Arabidopsis thaliana
  peptide (1)..(324): Ceres Seq. ID no. 13650286
  misc_feature (322)..(322): Xaa is any aa, unknown or other
MCHDSPEIWRRDYRPRPGVNVTWPPPPLFHYCGHSGAFDIVFPDWSFWGWPEINIKEWNKQSELISEGIKKVKWEEREPYAYWKGNPGVAMVRRDLMHCHDPMVHLYRQDWSREGRIGYRTSNLEDQCTHRYKIYVEGRAWSVSEKYILACDSMTLLVKPFYFDFFTRSLVPMEHYWPIRPQEKCSDIVFAVHWGNNNTKKARAIGRNGSGYVRKNLKMKYVYDYMLHLLQSYGKLMKMNVEVPQGAKEVCPETMACPINGGRMRQSMDDSLVMSPSVKATCEMPPPFEEDELKKFLEKKESVEKEVEKWTNEYWQEQKKIXKH

SEQ ID NO: 107457 - protein, 234 aa, Arabidopsis thaliana
  peptide (1)..(234): Ceres Seq. ID no. 13650287
  misc_feature (232)..(232): Xaa is any aa, unknown or other
MVRRDLMHCHDPMVHLYRQDWSREGRIGYRTSNLEDQCTHRYKIYVEGRAWSVSEKYILACDSMTLLVKPFYFDFFTRSLVPMEHYWPIRPQEKCSDIVFAVHWGNNNTKKARAIGRNGSGYVRKNLKMKYVYDYMLHLLQSYGKLMKMNVEVPQGAKEVCPETMACPINGGRMRQSMDDSLVMSPSVKATCEMPPPFEEDELKKFLEKKESVEKEVEKWTNEYWQEQKKIXKH

SEQ ID NO: 107458 - DNA, 1597 bp, Arabidopsis thaliana
  misc_feature (1)..(1597): Ceres Seq. ID no. 13650290
  misc_feature (1)..(1597): Ortholog of  Ceres SEQ ID NO 14310024 as cited in SEQ ID NO 20634
  misc_feature (1)..(1597): Ortholog of  Ceres SEQ ID NO 15177184 as cited in SEQ ID NO 58157
atgcgacccaagaattattctcagatggagaaacccatctccatcacgacggggaagtttcggaccaacaacaacaacaatcataacaatgtctggttcgttgttccactcttctttatcctctgtttcgttctcctctgtttcgactactctgctctcttcaccgacacagacgaaaccgctttctcaattcccgacgttacccagaaatcaacatcctctgaattcacgaaagatgacaacttttctcgatttcccgacgacccatctcctgattcttcctgctccggtcggtatatttacgttcatgaacttccgtatagattcaatggtgatttgcttgataattgctttaagattactagaggaaccgagaaagatatttgtccttacatcgaaaactatggttttggtcctgtcattaagaattacgagaatgtgttgttgaaacaaagttggtttacgaccaatcagttcatgctcgaggtgatattccacaacaagatgataaattacagatgtttgactaatgattcgtcactagcgtctgcggttttcgtgccgttttacgcaggtcttgatatgagtaggtatctttggggtttcaacattacggttagagattcttcgtctcatgagctgatggattggcttgtggtacagaaagagtggggtcgaatgtctggtagagaccatttcttggtttcaggaaggattgcttgggatttcaggagacagactgataacgaatctgattggggaagcaagcttcggttcttacccgagtcgcggaacatgtcgatgttgtccatcgaatcgagttcttggaagaatgattacgctattccgtatccgacttgtttccatccaagatcagtggatgagattgtggagtggcaggagctaatgaggtctcgaaaacgcgagtatctattcacctttgcgggtgctccaaggcctgaatataaagactcggttcgagggaagattatagatgagtgtttggagtcaaagaagcaatgttacttgctagactgtaactatgggaatgtgaattgtgacaaccctgtcaatgtgatgaaggttttcaggaactcggtgttttgtcttcagccaccgggtgattcttacactagaaggtcaatgtttgattcaatattggcaggctgcattccggtgttcttccatccagggacagcgtacgctcaatacaagtggcatttgcccaagaatcactcgagttactcggtttatctaccggttaaggatgtgaaggagtggaatatcaaaatcaaggagaggttgattgagattccagaggaaagagtggtgaggttgagagaagaggttataaggttgataccgaaggttgtctacgctgatccgaagtacggatcggatgggagtgaagatgcatttgagttggctgtgaagggaatgttggagaggattgaagaagtgagagagatgatgagacaagggaaagatggtagtgatgggtttgatgatagagatgattataagtatactttttctccatatgaagaacctcaagttttggcttaaagtggaaaatatgtcattatagtggcctttt

SEQ ID NO: 107459 - protein, 521 aa, Arabidopsis thaliana
  peptide (1)..(521): Ceres Seq. ID no. 13650291
MRPKNYSQMEKPISITTGKFRTNNNNNHNNVWFVVPLFFILCFVLLCFDYSALFTDTDETAFSIPDVTQKSTSSEFTKDDNFSRFPDDPSPDSSCSGRYIYVHELPYRFNGDLLDNCFKITRGTEKDICPYIENYGFGPVIKNYENVLLKQSWFTTNQFMLEVIFHNKMINYRCLTNDSSLASAVFVPFYAGLDMSRYLWGFNITVRDSSSHELMDWLVVQKEWGRMSGRDHFLVSGRIAWDFRRQTDNESDWGSKLRFLPESRNMSMLSIESSSWKNDYAIPYPTCFHPRSVDEIVEWQELMRSRKREYLFTFAGAPRPEYKDSVRGKIIDECLESKKQCYLLDCNYGNVNCDNPVNVMKVFRNSVFCLQPPGDSYTRRSMFDSILAGCIPVFFHPGTAYAQYKWHLPKNHSSYSVYLPVKDVKEWNIKIKERLIEIPEERVVRLREEVIRLIPKVVYADPKYGSDGSEDAFELAVKGMLERIEEVREMMRQGKDGSDGFDDRDDYKYTFSPYEEPQVLA

SEQ ID NO: 107460 - protein, 513 aa, Arabidopsis thaliana
  peptide (1)..(513): Ceres Seq. ID no. 13650292
MEKPISITTGKFRTNNNNNHNNVWFVVPLFFILCFVLLCFDYSALFTDTDETAFSIPDVTQKSTSSEFTKDDNFSRFPDDPSPDSSCSGRYIYVHELPYRFNGDLLDNCFKITRGTEKDICPYIENYGFGPVIKNYENVLLKQSWFTTNQFMLEVIFHNKMINYRCLTNDSSLASAVFVPFYAGLDMSRYLWGFNITVRDSSSHELMDWLVVQKEWGRMSGRDHFLVSGRIAWDFRRQTDNESDWGSKLRFLPESRNMSMLSIESSSWKNDYAIPYPTCFHPRSVDEIVEWQELMRSRKREYLFTFAGAPRPEYKDSVRGKIIDECLESKKQCYLLDCNYGNVNCDNPVNVMKVFRNSVFCLQPPGDSYTRRSMFDSILAGCIPVFFHPGTAYAQYKWHLPKNHSSYSVYLPVKDVKEWNIKIKERLIEIPEERVVRLREEVIRLIPKVVYADPKYGSDGSEDAFELAVKGMLERIEEVREMMRQGKDGSDGFDDRDDYKYTFSPYEEPQVLA

SEQ ID NO: 107461 - protein, 362 aa, Arabidopsis thaliana
  peptide (1)..(362): Ceres Seq. ID no. 13650293
MLEVIFHNKMINYRCLTNDSSLASAVFVPFYAGLDMSRYLWGFNITVRDSSSHELMDWLVVQKEWGRMSGRDHFLVSGRIAWDFRRQTDNESDWGSKLRFLPESRNMSMLSIESSSWKNDYAIPYPTCFHPRSVDEIVEWQELMRSRKREYLFTFAGAPRPEYKDSVRGKIIDECLESKKQCYLLDCNYGNVNCDNPVNVMKVFRNSVFCLQPPGDSYTRRSMFDSILAGCIPVFFHPGTAYAQYKWHLPKNHSSYSVYLPVKDVKEWNIKIKERLIEIPEERVVRLREEVIRLIPKVVYADPKYGSDGSEDAFELAVKGMLERIEEVREMMRQGKDGSDGFDDRDDYKYTFSPYEEPQVLA

SEQ ID NO: 107462 - DNA, 1248 bp, Arabidopsis thaliana
  misc_feature (1)..(1248): Ceres Seq. ID no. 13650328
  misc_feature (1)..(1248): Ortholog of  Ceres SEQ ID NO 12614972 as cited in SEQ ID NO 61986
  misc_feature (1)..(1248): Ortholog of  Ceres SEQ ID NO 12625706 as cited in SEQ ID NO 64144
  misc_feature (1)..(1248): Ortholog of  Ceres SEQ ID NO 13584933 as cited in SEQ ID NO 65009
  misc_feature (1)..(1248): Ortholog of  Ceres SEQ ID NO 12634984 as cited in SEQ ID NO 0
  misc_feature (1)..(1248): Ortholog of  Ceres SEQ ID NO 13599377 as cited in SEQ ID NO 0
gttcacttaacaaaacaagaaccaaaaaaaatggatgagaaagatattctaaggaacttgagggaagaagaagaagaagaagaagaaaatcaaagcgaagaaaccaaaattttgatctcttcacttccttgggagatagattaccttgggaacaagcttttcaagtaccaaggatattggtactacgaagacgttctccaatcaatccccaatatacactcgagttttcagccacaagaaaccgatatagttgttgcttctttctacaaatcgggcacgacttggctcaaagcactcacatttgcactcgttcaacgatcaaaacactcgttagaagatcatcatcatcctctgctatctcataaccctcatgagatagtaccgtacctcgagctagatctgtatctcaacagctcaaaaccggacttgaccaagttcttatcatcatcatcatcatcatcatctccgagattgttctcaactcatatgtccttggacgcgcttaaactacccttgaagaagtctccttgcaaggtagtgtacgtgtgcaggaacgtgaaagacgtgttggtgtcactttggtgtttcctcaatgccaacaagggagtagaatggggagattttagccaaaatgaaaagatcattcgagcggagaattattctttcaaggctatatttgagtcattctgcaacggagttaccctacacggtcccttttgggaccatgcacagagctattggcgaggcagcttggaagatcctaagcattttcttttcatgaggtacgaggagttgaaagcggagcctcgtactcaggtcaagagacttgcagagttcttggattgtccattcactaaggaagaggaagatagcggaactgtagacaagatcttggaactttgctctctaagtaatttaagcagtttggagatcaacaaaactggatccttgggtggagtagattacaagacttatttccgtaaaggacaagttggtgactggaagagttatatgacctctgaaatggtaaataaaatcgatatgatcgtcgaggagaaactcaaaggttccggtttgaaattctagaattatgcgtgtgctttgtgaagaactgcagaaaaagtgttcttgaatgcgttatttaataataaaagttacattgtcatatatataactttgatgtatcattacaactgatgtgtggtttttgttctctttgatgttgcaataaaaaccttctttacttct

SEQ ID NO: 107463 - protein, 361 aa, Arabidopsis thaliana
  peptide (1)..(361): Ceres Seq. ID no. 13650329
VHLTKQEPKKMDEKDILRNLREEEEEEEENQSEETKILISSLPWEIDYLGNKLFKYQGYWYYEDVLQSIPNIHSSFQPQETDIVVASFYKSGTTWLKALTFALVQRSKHSLEDHHHPLLSHNPHEIVPYLELDLYLNSSKPDLTKFLSSSSSSSSPRLFSTHMSLDALKLPLKKSPCKVVYVCRNVKDVLVSLWCFLNANKGVEWGDFSQNEKIIRAENYSFKAIFESFCNGVTLHGPFWDHAQSYWRGSLEDPKHFLFMRYEELKAEPRTQVKRLAEFLDCPFTKEEEDSGTVDKILELCSLSNLSSLEINKTGSLGGVDYKTYFRKGQVGDWKSYMTSEMVNKIDMIVEEKLKGSGLKF

SEQ ID NO: 107464 - protein, 351 aa, Arabidopsis thaliana
  peptide (1)..(351): Ceres Seq. ID no. 13650330
MDEKDILRNLREEEEEEEENQSEETKILISSLPWEIDYLGNKLFKYQGYWYYEDVLQSIPNIHSSFQPQETDIVVASFYKSGTTWLKALTFALVQRSKHSLEDHHHPLLSHNPHEIVPYLELDLYLNSSKPDLTKFLSSSSSSSSPRLFSTHMSLDALKLPLKKSPCKVVYVCRNVKDVLVSLWCFLNANKGVEWGDFSQNEKIIRAENYSFKAIFESFCNGVTLHGPFWDHAQSYWRGSLEDPKHFLFMRYEELKAEPRTQVKRLAEFLDCPFTKEEEDSGTVDKILELCSLSNLSSLEINKTGSLGGVDYKTYFRKGQVGDWKSYMTSEMVNKIDMIVEEKLKGSGLKF

SEQ ID NO: 107465 - protein, 199 aa, Arabidopsis thaliana
  peptide (1)..(199): Ceres Seq. ID no. 13650331
MSLDALKLPLKKSPCKVVYVCRNVKDVLVSLWCFLNANKGVEWGDFSQNEKIIRAENYSFKAIFESFCNGVTLHGPFWDHAQSYWRGSLEDPKHFLFMRYEELKAEPRTQVKRLAEFLDCPFTKEEEDSGTVDKILELCSLSNLSSLEINKTGSLGGVDYKTYFRKGQVGDWKSYMTSEMVNKIDMIVEEKLKGSGLKF

SEQ ID NO: 107466 - DNA, 2224 bp, Arabidopsis thaliana
  misc_feature (1)..(2224): Ceres Seq. ID no. 13650348
  misc_feature (1)..(2224): Ortholog of  Ceres SEQ ID NO 12611726 as cited in SEQ ID NO 56740
  misc_feature (1)..(2224): Ortholog of  Ceres SEQ ID NO 13660693 as cited in SEQ ID NO 67411
catcgctgtctggaacagacaaagcctttaacacaaactcaaaaccagagtctactacattagaaattttcacaattacaattctccggcgaatccaacgtttccggcacaattctccactatattgacggcgatatacccttatacggcgtttcgtggttacaatttgtaacctaactactcatcgtctacccaattcaaaccagtcaggtttccgtacagtagtaaaatcacaattcctctctgtaacaacgatctcaacgacttcaacgagacacgttactattccaatccatttttccgacgccggcaactgaatcagaatcggaaaactctagagacatatggttgattggagtggcgatgcaccggcagggctcgtctccgattacgccttcaaactataacgccgccgtttcaattgcttctgatgtacctactggtttaaccaagtctcctttatctcacgcgattccagtttcgccgatttctgctgcttacccttccggtgatcctattttgatgatgtctgggactcctctcgctagggttcgattatctgaaattttgccttatgaaggagctccttctccggtgtatgcaaaagctgtggaggctttgtctgtgtctttgatgaggtataatgcgtctgtgatcgagatagggagtgaagacactgcactgatgcgatgtggccttgaagctgctcgtttgtattttagaactagaagccttactgtttctggtaaaggcaatcgtggcctctctatgtatagagccggaaggtctgttgaagatttagattcttcacctccatgcatggctgagattttcaggtgtttgggtaaagtagcacgagctgctttatctgcaatagcaaggcatctacgtttaagaagcgatgtttttaaccatatgcttgatgactttccactagctccgaacgaggtttcctcctcggtgctactggcttcctatgctcatgcatcgatacaaaatggaaaacatgcttctggaggtgggaacctatctgctaagattgaagttgagaagggtttgttgacactgttctgctcagatggcactggcattcaggtatgtgacccaaatggtcgttggtacacagcagataatggatgtggggtgggtgatctcttactgattaccggcaaagcgcttagtcatgctactgcaggtctccgtccagctgcctcttacagaactactaccgatcatttgtctgccactgacactcgaggaagggcatcattagcttttaggcttatgccgaaaagtaatgctatattagattgttccccaatagaagcagccggccatgtaattcctcaaagctatgtgccagtatctgttagtcagtttatggataacctcttagccgagaatgacactctagttaatccgcctgtgaaaaccaatgttccacgggatgatgtttgcaaagagccttccttaagaagtgttctctcggatccaatttctggtgcttttcttgaagatgcaatggttgtctcttgtggacattcatttggtggccttatgcttagaagagtccttgaaatgtctagatgtacgctctgcaatacagagatcgagtctgggtctctggttcctaaccatgcacttagagctgccgcttcagctatcaagcaacaggatgataaacgacttttccacaacgcagccatgagaaggcgtagaaaagaaatgagtgatcaaatggatgtggaaaatggagatccagctacggatgatggtatgcatcgagtggtgcattatccatttgctgtaaatgagaaagttcttatcaagggaaaccggcgaactccagaaaagtttgttggaaaagaagcaatcgtgacatctcagtgtctcaatggctggtatctattaaagattgtcgaaagcggagacaatgtacggctgcaataccgatccctaaaaaagatggtgaacgatgacagaggaggaggcctacaggctcaaccggttgagagcaatagcttgtagaatgtaatcatatttaacccttttcttttcttcttattctgtatctctagagctagagagaaaagaaaagataatgtggtttggggttttgagattctgcataaatttaaatcgtttggttagaaaaagaaagtagtggaagactattattgtaaactatattagcctcctaagtattagaggttttgtacagaac

SEQ ID NO: 107467 - protein, 554 aa, Arabidopsis thaliana
  peptide (1)..(554): Ceres Seq. ID no. 13650349
MHRQGSSPITPSNYNAAVSIASDVPTGLTKSPLSHAIPVSPISAAYPSGDPILMMSGTPLARVRLSEILPYEGAPSPVYAKAVEALSVSLMRYNASVIEIGSEDTALMRCGLEAARLYFRTRSLTVSGKGNRGLSMYRAGRSVEDLDSSPPCMAEIFRCLGKVARAALSAIARHLRLRSDVFNHMLDDFPLAPNEVSSSVLLASYAHASIQNGKHASGGGNLSAKIEVEKGLLTLFCSDGTGIQVCDPNGRWYTADNGCGVGDLLLITGKALSHATAGLRPAASYRTTTDHLSATDTRGRASLAFRLMPKSNAILDCSPIEAAGHVIPQSYVPVSVSQFMDNLLAENDTLVNPPVKTNVPRDDVCKEPSLRSVLSDPISGAFLEDAMVVSCGHSFGGLMLRRVLEMSRCTLCNTEIESGSLVPNHALRAAASAIKQQDDKRLFHNAAMRRRRKEMSDQMDVENGDPATDDGMHRVVHYPFAVNEKVLIKGNRRTPEKFVGKEAIVTSQCLNGWYLLKIVESGDNVRLQYRSLKKMVNDDRGGGLQAQPVESNSL

SEQ ID NO: 107468 - protein, 501 aa, Arabidopsis thaliana
  peptide (1)..(501): Ceres Seq. ID no. 13650350
MMSGTPLARVRLSEILPYEGAPSPVYAKAVEALSVSLMRYNASVIEIGSEDTALMRCGLEAARLYFRTRSLTVSGKGNRGLSMYRAGRSVEDLDSSPPCMAEIFRCLGKVARAALSAIARHLRLRSDVFNHMLDDFPLAPNEVSSSVLLASYAHASIQNGKHASGGGNLSAKIEVEKGLLTLFCSDGTGIQVCDPNGRWYTADNGCGVGDLLLITGKALSHATAGLRPAASYRTTTDHLSATDTRGRASLAFRLMPKSNAILDCSPIEAAGHVIPQSYVPVSVSQFMDNLLAENDTLVNPPVKTNVPRDDVCKEPSLRSVLSDPISGAFLEDAMVVSCGHSFGGLMLRRVLEMSRCTLCNTEIESGSLVPNHALRAAASAIKQQDDKRLFHNAAMRRRRKEMSDQMDVENGDPATDDGMHRVVHYPFAVNEKVLIKGNRRTPEKFVGKEAIVTSQCLNGWYLLKIVESGDNVRLQYRSLKKMVNDDRGGGLQAQPVESNSL

SEQ ID NO: 107469 - protein, 500 aa, Arabidopsis thaliana
  peptide (1)..(500): Ceres Seq. ID no. 13650351
MSGTPLARVRLSEILPYEGAPSPVYAKAVEALSVSLMRYNASVIEIGSEDTALMRCGLEAARLYFRTRSLTVSGKGNRGLSMYRAGRSVEDLDSSPPCMAEIFRCLGKVARAALSAIARHLRLRSDVFNHMLDDFPLAPNEVSSSVLLASYAHASIQNGKHASGGGNLSAKIEVEKGLLTLFCSDGTGIQVCDPNGRWYTADNGCGVGDLLLITGKALSHATAGLRPAASYRTTTDHLSATDTRGRASLAFRLMPKSNAILDCSPIEAAGHVIPQSYVPVSVSQFMDNLLAENDTLVNPPVKTNVPRDDVCKEPSLRSVLSDPISGAFLEDAMVVSCGHSFGGLMLRRVLEMSRCTLCNTEIESGSLVPNHALRAAASAIKQQDDKRLFHNAAMRRRRKEMSDQMDVENGDPATDDGMHRVVHYPFAVNEKVLIKGNRRTPEKFVGKEAIVTSQCLNGWYLLKIVESGDNVRLQYRSLKKMVNDDRGGGLQAQPVESNSL

SEQ ID NO: 107470 - DNA, 1258 bp, Arabidopsis thaliana
  misc_feature (1)..(1258): Ceres Seq. ID no. 13650383
  misc_feature (1)..(1258): Ortholog of  Ceres SEQ ID NO 15176333 as cited in SEQ ID NO 52787
  misc_feature (1)..(1258): Ortholog of  Ceres SEQ ID NO 15170403 as cited in SEQ ID NO 53457
  misc_feature (1)..(1258): Ortholog of  Ceres SEQ ID NO 14303479 as cited in SEQ ID NO 54254
  misc_feature (1)..(1258): Ortholog of  Ceres SEQ ID NO 14312047 as cited in SEQ ID NO 55656
  misc_feature (1)..(1258): Ortholog of  Ceres SEQ ID NO 13660872 as cited in SEQ ID NO 60830
  misc_feature (1)..(1258): Ortholog of  Ceres SEQ ID NO 12616221 as cited in SEQ ID NO 63291
  misc_feature (1)..(1258): Ortholog of  Ceres SEQ ID NO 14302355 as cited in SEQ ID NO 65830
gattacaatcttgagcagacgaagaaaacccaaaaaaaatccagatccagctgaaattgaattttcaaccaacgaagaagagatttttccaagagcaacagacaagaagaagagaatgaagtcggagctaaatttaccagctgggttccgattccatccaacggacgaggagcttgtgaaattctacttgtgccggaaatgtgcttccgagcagatctcggctccggttatcgccgagattgatctctacaagttcaatccttgggagcttccagagatgtctctgtacggagagaaagagtggtacttcttctcacctagagatcggaaatacccaaacggttcgcgtcctaaccgggcagcaggaaccggttattggaaagctaccggagcagataaaccgattggtaaaccgaagacgttgggtatcaagaaagcactcgtcttctacgcagggaaagctccaaaagggattaagaccaattggataatgcatgagtatcgtctcgctaatgttgatagatcagcttctgttaacaaaaagaacaacctacgagtaagttctgtttcttattaacttatgtatcatcttttcgtgaatgatgatttagattattaactttgttgtggtgggttttgctgtacagcttgatgattgggttttatgtcgaatatacaacaagaaaggaaccatggagaagtatttccccgcggatgagaagccgaggaccacgacaatggctgaacagtcatcatcaccttttgatacatcagactcgacttacccgacattgcaagaggatgattccagcagctcaggtggtcacggtcacgtggtgtcaccggatgttttggaggttcagagcgagcctaaatggggagagcttgaggatgctttggaagcttttgatacttcaatgtttggtagttccatggagttgttgcagcctgacgcttttgtccctcagttcttgtatcagtctgattatttcacttccttccaggatccgcctgagcagaaaccattcttgaattggagttttgctccacaggggtaaaaacggaagagaccaaaaaaggtgtttgctagtagtactgtgatgtgccagagagaagagtctcatctcaactcatccctggctcttagtagtaaaagaagattgtagaatgttaatagcttttagcatcaatgtctcattagcaggcacattcttgttctttcatgagaagtttatatgaaaactaaaaatttatatcc

SEQ ID NO: 107471 - protein, 191 aa, Arabidopsis thaliana
  peptide (1)..(191): Ceres Seq. ID no. 13650384
ITILSRRRKPKKNPDPAEIEFSTNEEEIFPRATDKKKRMKSELNLPAGFRFHPTDEELVKFYLCRKCASEQISAPVIAEIDLYKFNPWELPEMSLYGEKEWYFFSPRDRKYPNGSRPNRAAGTGYWKATGADKPIGKPKTLGIKKALVFYAGKAPKGIKTNWIMHEYRLANVDRSASVNKKNNLRVSSVSY

SEQ ID NO: 107472 - protein, 153 aa, Arabidopsis thaliana
  peptide (1)..(153): Ceres Seq. ID no. 13650385
MKSELNLPAGFRFHPTDEELVKFYLCRKCASEQISAPVIAEIDLYKFNPWELPEMSLYGEKEWYFFSPRDRKYPNGSRPNRAAGTGYWKATGADKPIGKPKTLGIKKALVFYAGKAPKGIKTNWIMHEYRLANVDRSASVNKKNNLRVSSVSY

SEQ ID NO: 107473 - protein, 126 aa, Arabidopsis thaliana
  peptide (1)..(126): Ceres Seq. ID no. 13650386
MIGFYVEYTTRKEPWRSISPRMRSRGPRQWLNSHHHLLIHQTRLTRHCKRMIPAAQVVTVTWCHRMFWRFRASLNGESLRMLWKLLILQCLVVPWSCCSLTLLSLSSCISLIISLPSRIRLSRNHS

SEQ ID NO: 107474 - DNA, 1694 bp, Arabidopsis thaliana
  misc_feature (1)..(1694): Ceres Seq. ID no. 13650395
  misc_feature (1)..(1694): Ortholog of  Ceres SEQ ID NO 13646595 as cited in SEQ ID NO 20561
  misc_feature (1)..(1694): Ortholog of  Ceres SEQ ID NO 15171614 as cited in SEQ ID NO 60106
  misc_feature (1)..(1694): Ortholog of  Ceres SEQ ID NO 13597574 as cited in SEQ ID NO 64677
  misc_feature (1)..(1694): Ortholog of  Ceres SEQ ID NO 13597843 as cited in SEQ ID NO 64850
  misc_feature (1)..(1694): Ortholog of  Ceres SEQ ID NO 13597678 as cited in SEQ ID NO 65375
  misc_feature (1)..(1694): Ortholog of  Ceres SEQ ID NO 13596180 as cited in SEQ ID NO 67941
  misc_feature (1)..(1694): Ortholog of  Ceres SEQ ID NO 13591190 as cited in SEQ ID NO 68044
  misc_feature (1)..(1694): Ortholog of  Ceres SEQ ID NO 13595961 as cited in SEQ ID NO 68223
acattggcattgccattgacaatcaataaaacatcttgtgagacaagaacgggtaagtgataagatcatggagcatcctcacgtgcttttagtcgctagccctggcttggggcaccttatccctgccctcgaactcggaaaccgtctctccttcgtcctcaacgtccacgtcaccattcttgcaatcacctccggctcctcttccctcacagaaaccgagaccatacatacagccgcggctagagggacctgtgaaattatcgaattaccctctgtcgatatagaccacctagtggagccagatgcgacagtggtcactaaatagtgagcaagatgcgagaaatgaagtccacggttcgtgatgccgtgaaatcaatgaagcaaaaaccgacggtcatgattgttgacttttttggtacagcgttgttgtccataaccgatgtaggtgtgacgagtaagtatgtgtacataccgtctcacgcgtggttcttggcattaattgtctacttgccggtattggataaggtaatggaaggtgagtatgttgatattaaggagcctatgaaaataccaggttgtaaaccggtcggaccaaaagagcttttggacacaatgttagaccggtccgaccaacaataccgtgattgtgtacagattgggttggagatacctatgagcgatggagttttggtaaatacttggggggagttacaagggaagactctagctgcgctaagagaggacatagatttgaaccgggttataaaagtaccggtttatcctattggacctattgttaggactaatgtgcttattgaaaaaccaaacagtacattcgagtggctagacaaacaagaggaaagatctgttgtatatgtgtgtttagggagtggtggaacattgtcgtttgagcaaacgatggaactagcttgggggttagagttaagttgtcaaagtttcttatgggttctacgtaagcctccttcttaccttggagcaagctcaaaagatgatgatcaagtaagtgacggtctaccagaaggtttcttggaccgcacacgtggtgtagggcttgtggtaacgcaatgggcaccgcaagttgagatcttaagccatagatcaatcggtgggtttttgtcacattgtggttggagctcggtgttggagagtttaactaaaggagttccgatcatcgcttggcctctttatgcggagcaatggatgaatgccacgttgctgacggaggagattggtatggctattcgtacgtcagagttaccgtcgaagaaagtgatcagccgggaagaagtggcgtctttggtgaagaagattgtagcggaagaggataaagaaggacgaaagataaagactaaagctgaagaggtgagggttagctccgaacgagcttggactcatggtgggtcgtctcatagttctctctttgaatgggcaaaacgatgtgggcttgtatcttaatttgagaatacatttataatatcctgaccaacaatttgcttaaaagatcaaactctctagtataacatatattttgctaaccagcaatttgcttaaaagatcaaagttctctagtatgaaatattaatgtatgttgtaatttgctatgcatgcatacaagatacatatgtagtttaatcatctttatgtacacaatgagataatcaatggattgtgtt

SEQ ID NO: 107475 - protein, 380 aa, Arabidopsis thaliana; identical to SEQ ID NO: 89780
  peptide (1)..(380): Ceres Seq. ID no. 13650396

SEQ ID NO: 107476 - protein, 377 aa, Arabidopsis thaliana; identical to SEQ ID NO: 89781
  peptide (1)..(377): Ceres Seq. ID no. 13650397

SEQ ID NO: 107477 - protein, 366 aa, Arabidopsis thaliana
  peptide (1)..(366): Ceres Seq. ID no. 13650398
MKQKPTVMIVDFFGTALLSITDVGVTSKYVYIPSHAWFLALIVYLPVLDKVMEGEYVDIKEPMKIPGCKPVGPKELLDTMLDRSDQQYRDCVQIGLEIPMSDGVLVNTWGELQGKTLAALREDIDLNRVIKVPVYPIGPIVRTNVLIEKPNSTFEWLDKQEERSVVYVCLGSGGTLSFEQTMELAWGLELSCQSFLWVLRKPPSYLGASSKDDDQVSDGLPEGFLDRTRGVGLVVTQWAPQVEILSHRSIGGFLSHCGWSSVLESLTKGVPIIAWPLYAEQWMNATLLTEEIGMAIRTSELPSKKVISREEVASLVKKIVAEEDKEGRKIKTKAEEVRVSSERAWTHGGSSHSSLFEWAKRCGLVS

SEQ ID NO: 107478 - DNA, 1421 bp, Arabidopsis thaliana
  misc_feature (1)..(1421): Ceres Seq. ID no. 13650399
  misc_feature (1)..(1421): Ortholog of  Ceres SEQ ID NO 13580053 as cited in SEQ ID NO 63559
cgtgtctctctcaaagaataaggaagacgcagacgaagaaggtgacaatggcgtacgttagtatgggtgaagctcaccggagaatcactgaatacctaaaccgattctgcgacgccgtttcgtaccaagactcttctacactttgccgtctcctctctttctcttccaattctccacctcttctctcactcgccgacgcactcaacgtcttccaggattctagcagtttgattagacagtctgatagattctctgaatatggcgagattctggctcatgtgtttcgttctctacaaagttaccgagttgggaatctagtcgaagcataccttgctttcgataagtttgccaatgcatttgttcaggagtttcgtaattgggaatctgcttgggcattggaagctctgtatgtagtttgttatgaaattcgagttcttgcggaaaaggctgataaagatttaacttctaatggaaagtctccagagaaattaaaagcagctgggtctcttctcatgaaagtttttggagttcttgctgggaaaggtccaaaacgagtcggagcattatatgtgacttgccaattgttcaagacctactttaagcttggaaccgtcaatctttgtcgaagtgtaataagaagtatcgaaactgctcggatatttgactttgaggagtttccaagaagagataaggttacatacatgtattataccggccgattagaagtcttcaacgaaaattttcctgctgatacaaagctatcatatgccttgcaaaattgcaaccccaaaagagaacgaaatataaggatgatattaaagtatttggtaccggtgaagctttctttaggaattataccaaaagatgagctcctgcgaaattataatctgcatgagtacacaaagattgtgcaagctctgagaaagggtgatctaaggcttctccggcatgctcttcaagaacatgaagatcggttcttgaggtcgggtgtgtatcttgtcttggaaaagctagagctccaagtctaccagagactcatgaagaaaatttatataaaccagaagctgagtgatccagcgagagctcaccagctgaagcttgaagggattgccaaagcactaagatggctagatatggacatggatctggacgaggtggaatgtataatgacgatattgatatacaaaaaccttgtgaaaggttatttagctcacaagagcaaagtggtagttctaagcaagcaagatcctttccctaaactaaacgggaagcctgttagctcataagtcttcacgtgttattttttttgttgtatcaacaaacactttttattttctaattgtgtgtaaaattcattcaaacaaaaaacaaaaactgtttttacaatagaaatgtgactttaaaactgtggagttttcacc

SEQ ID NO: 107479 - protein, 427 aa, Arabidopsis thaliana
  peptide (1)..(427): Ceres Seq. ID no. 13650400
CLSQRIRKTQTKKVTMAYVSMGEAHRRITEYLNRFCDAVSYQDSSTLCRLLSFSSNSPPLLSLADALNVFQDSSSLIRQSDRFSEYGEILAHVFRSLQSYRVGNLVEAYLAFDKFANAFVQEFRNWESAWALEALYVVCYEIRVLAEKADKDLTSNGKSPEKLKAAGSLLMKVFGVLAGKGPKRVGALYVTCQLFKTYFKLGTVNLCRSVIRSIETARIFDFEEFPRRDKVTYMYYTGRLEVFNENFPADTKLSYALQNCNPKRERNIRMILKYLVPVKLSLGIIPKDELLRNYNLHEYTKIVQALRKGDLRLLRHALQEHEDRFLRSGVYLVLEKLELQVYQRLMKKIYINQKLSDPARAHQLKLEGIAKALRWLDMDMDLDEVECIMTILIYKNLVKGYLAHKSKVVVLSKQDPFPKLNGKPVSS

SEQ ID NO: 107480 - protein, 412 aa, Arabidopsis thaliana
  peptide (1)..(412): Ceres Seq. ID no. 13650401
MAYVSMGEAHRRITEYLNRFCDAVSYQDSSTLCRLLSFSSNSPPLLSLADALNVFQDSSSLIRQSDRFSEYGEILAHVFRSLQSYRVGNLVEAYLAFDKFANAFVQEFRNWESAWALEALYVVCYEIRVLAEKADKDLTSNGKSPEKLKAAGSLLMKVFGVLAGKGPKRVGALYVTCQLFKTYFKLGTVNLCRSVIRSIETARIFDFEEFPRRDKVTYMYYTGRLEVFNENFPADTKLSYALQNCNPKRERNIRMILKYLVPVKLSLGIIPKDELLRNYNLHEYTKIVQALRKGDLRLLRHALQEHEDRFLRSGVYLVLEKLELQVYQRLMKKIYINQKLSDPARAHQLKLEGIAKALRWLDMDMDLDEVECIMTILIYKNLVKGYLAHKSKVVVLSKQDPFPKLNGKPVSS

SEQ ID NO: 107481 - protein, 407 aa, Arabidopsis thaliana
  peptide (1)..(407): Ceres Seq. ID no. 13650402
MGEAHRRITEYLNRFCDAVSYQDSSTLCRLLSFSSNSPPLLSLADALNVFQDSSSLIRQSDRFSEYGEILAHVFRSLQSYRVGNLVEAYLAFDKFANAFVQEFRNWESAWALEALYVVCYEIRVLAEKADKDLTSNGKSPEKLKAAGSLLMKVFGVLAGKGPKRVGALYVTCQLFKTYFKLGTVNLCRSVIRSIETARIFDFEEFPRRDKVTYMYYTGRLEVFNENFPADTKLSYALQNCNPKRERNIRMILKYLVPVKLSLGIIPKDELLRNYNLHEYTKIVQALRKGDLRLLRHALQEHEDRFLRSGVYLVLEKLELQVYQRLMKKIYINQKLSDPARAHQLKLEGIAKALRWLDMDMDLDEVECIMTILIYKNLVKGYLAHKSKVVVLSKQDPFPKLNGKPVSS

SEQ ID NO: 107482 - DNA, 767 bp, Arabidopsis thaliana
  misc_feature (1)..(767): Ceres Seq. ID no. 13650411
  misc_feature (1)..(767): Ortholog of  Ceres SEQ ID NO 14302047 as cited in SEQ ID NO 54849
  misc_feature (1)..(767): Ortholog of  Ceres SEQ ID NO 14307427 as cited in SEQ ID NO 59405
gcccgtttcaaccttggcagccattgcgaagcacctaacctatttcgtttactgaatcttaattttagtttcttctatctccgtgggtgggttttcagctttctttgagtgtagtatcctctgcaatatcaacccgtcgtgctctagccatcgatttccaggtggttgcagatataatgttgaagcaagtggttgccaagtattctataggtaaagcggcgatttatggaagtaacagagaaaagcttagacctttcatgtgccaaaccagttgtcgattccacaatggacggactgtttttgcaccaagaagcttctttggtgtagaagactacgtggatgacgacacaagccggccatacacataccaaaaagagaaaaagtcgaagaatccagacaagcatgtgtcgttcaagcaacgaacagttgcatacatggagccgttcactctagatgtcttcatctcaaagcgctttgtttcggcatctctcacgcaccgtgttacatgtaggcaagttgctgttgcgggaacaaactctaaagacgtaaaagctgttctgaggtcaagatgtgatatcccggcatgtatgtccatagggaggatcttgtctgagcgtgcaaaagaagctgatgtgtacacggcttcttatacgccaagggaccaagacaagtttgaagggaaaatcagagctgttgtccagtcccttattgataacggaattgatgttaaaatttatctcgattagaaaacaaatgtttgttgtgtc

SEQ ID NO: 107483 - protein, 189 aa, Arabidopsis thaliana; identical to SEQ ID NO: 82054
  peptide (1)..(189): Ceres Seq. ID no. 13650412

SEQ ID NO: 107484 - protein, 162 aa, Arabidopsis thaliana; identical to SEQ ID NO: 82055
  peptide (1)..(162): Ceres Seq. ID no. 13650413

SEQ ID NO: 107485 - protein, 103 aa, Arabidopsis thaliana
  peptide (1)..(103): Ceres Seq. ID no. 13650414
MEPFTLDVFISKRFVSASLTHRVTCRQVAVAGTNSKDVKAVLRSRCDIPACMSIGRILSERAKEADVYTASYTPRDQDKFEGKIRAVVQSLIDNGIDVKIYLD

SEQ ID NO: 107486 - DNA, 868 bp, Arabidopsis thaliana
  misc_feature (1)..(868): Ceres Seq. ID no. 13650415
  misc_feature (1)..(868): Ortholog of  Ceres SEQ ID NO 14309248 as cited in SEQ ID NO 0
ataaatgctattcagacgaagcagccaccaaccactactcgagccgccgtagatccagattccttaacagtagatgtcgccgtttgtgaagttttatctcttcagttacaattttctccaagcttctgcatgggcgatttcgcttctgattattcttaacagctttttatcgaacaagacgatcatttctgcttacgcttctgctggattcctgattagtctgtttcaaactgctgctattcttgaagttcttcatggagctattggaattgtcccgagtggattcttgtctccactgatgcaatggagtggaaggactcacttcatattggctattgttggacagatcaaggaggtccaggattcgccgtggctgtctataacacttgtggcttggtgtatcggtgagatgatcagatatcctcattatgcttttacttgcctcggtagatgtccctattggctaacctacctcaggtacacgggattcatcgtgatttatccaacgggactagtgggtgaattgttgatcatgtacaaagcacttccatatgttaaagaaaggaatctttacgctaatttcttctctgttttccccttcagttactacgatttcctttgggccgtcctcttggtctacccattcctttggttgaagctttatctccagcttttcaaacaaagaaagtctaagcttggaaaatcgaagaagcttcacggcaagagaaagagaatgtgaactccattcaatcttacatatatgtatctcatctgtgattcacaatattctggtctaaacaaccataacaactgaaaataaaaatttggcccaaagctttttaaatggagtaattataatgggttgatt

SEQ ID NO: 107487 - protein, 221 aa, Arabidopsis thaliana
  peptide (1)..(221): Ceres Seq. ID no. 13650416
MSPFVKFYLFSYNFLQASAWAISLLIILNSFLSNKTIISAYASAGFLISLFQTAAILEVLHGAIGIVPSGFLSPLMQWSGRTHFILAIVGQIKEVQDSPWLSITLVAWCIGEMIRYPHYAFTCLGRCPYWLTYLRYTGFIVIYPTGLVGELLIMYKALPYVKERNLYANFFSVFPFSYYDFLWAVLLVYPFLWLKLYLQLFKQRKSKLGKSKKLHGKRKRM

SEQ ID NO: 107488 - protein, 146 aa, Arabidopsis thaliana
  peptide (1)..(146): Ceres Seq. ID no. 13650417
MQWSGRTHFILAIVGQIKEVQDSPWLSITLVAWCIGEMIRYPHYAFTCLGRCPYWLTYLRYTGFIVIYPTGLVGELLIMYKALPYVKERNLYANFFSVFPFSYYDFLWAVLLVYPFLWLKLYLQLFKQRKSKLGKSKKLHGKRKRM

SEQ ID NO: 107489 - DNA, 908 bp, Arabidopsis thaliana
  misc_feature (1)..(908): Ceres Seq. ID no. 13650422
  misc_feature (1)..(908): Ortholog of  Ceres SEQ ID NO 13595187 as cited in SEQ ID NO 56052
  misc_feature (1)..(908): Ortholog of  Ceres SEQ ID NO 13662053 as cited in SEQ ID NO 61547
  misc_feature (1)..(908): Ortholog of  Ceres SEQ ID NO 13624283 as cited in SEQ ID NO 0
attacataattcttcagatccataaaacaaattgatcccttaaccttcttcaccaacatctctcttacactcaacaagagatcatatcatgtcctctccaagagaaagaggaaagagtttgatggaatcatcaggatcagagccaccggtgacaccaagccgttacgagtcgcagaagagacgtgactggaacactttcggacagtacttgaagaatcagagaccgcctgtgccgatgtctcactgcagctgtaaccacgtgcttgatttcctcaggtacttagaccagttcggtaagacaaaggtgcacgtgcctggctgtatgttctacggccagcctgagccaccagctccttgcacgtgccctctcagacaagcttggggaagtcttgacgctttgatcggacggctgagagcggcttacgaggagaacggtggacctccggagactaaccctttcgctagcggagcgataagggtttatctgagggaggttagggagtgtcaggctaaggctagagggattccttacaagaagaagaagaagaagaagccaacgccggagatgggaggtgggagagaggactcttcttcctcctcctcttccttcagcttctcttaagagattctccatcgtcgtgaaagactttgtggatcagtaagtctcaaagagggatcaaatgtaaaagagacctcaaatctatctactggtatcttcaacatatctttcgggaccatttttgcagctcttcgtcccctcctcttcatttccgcagatctccgtcgtcataaatatcttcatctattctcttattaagctctattcatatttattctcttattaagcacttttcttttgaataaagtaagtgtaaagagtttatatattgaattcaggtgtgttttgc

SEQ ID NO: 107490 - protein, 177 aa, Arabidopsis thaliana; identical to SEQ ID NO: 106285
  peptide (1)..(177): Ceres Seq. ID no. 13650423

SEQ ID NO: 107491 - protein, 166 aa, Arabidopsis thaliana; identical to SEQ ID NO: 106286
  peptide (1)..(166): Ceres Seq. ID no. 13650424

SEQ ID NO: 107492 - protein, 128 aa, Arabidopsis thaliana; identical to SEQ ID NO: 106287
  peptide (1)..(128): Ceres Seq. ID no. 13650425

SEQ ID NO: 107493 - DNA, 1333 bp, Arabidopsis thaliana
  misc_feature (1)..(1333): Ceres Seq. ID no. 13650443
  misc_feature (1)..(1333): Ortholog of  Ceres SEQ ID NO 13595351 as cited in SEQ ID NO 55934
  misc_feature (1)..(1333): Ortholog of  Ceres SEQ ID NO 13639645 as cited in SEQ ID NO 57488
tgggaacgaaaaaacagagaagttagaattacaatttacagagcaaatcaaaggatctcaatttctttagtcaacaggtgttccttctcttcttcctcgattcggaggtagagaagaaaaatggcagctccggcgatcctaaacggcggcgatgcgacggagagagaaacacgaatggctcactctgcaatgacattggttcaggtcataaatggaggataccatgtggttacgaaagtagctcttaacgttggtgtaaatcagctcgttttttgtgtctttcgcgatcttcttgctctctccattctcgcacctctcgcttttttccgtgaaagaacgatcagacctcctatgaatagaagcatcttcttttcactcttctttcttggtttagcagggatatttgggaaccagttactatttcttatgggtttatcttacacgaatccaacttatgctgctgctatacaaccatcaatccctgtctttacatttctcttggctgtcttgatgggtacagaaaaagtgaacttgttgaaagtcgagggccaaacgaaagttggaggtactcttgtttgtgtttcgggtgctatagcgatggctttgtttcgtggtccagccttgtttggagtctctagttttcttggtcttgggtttgatcaatggcacattggagttttatgtttgattggaaactgtatgtgtatggctgcttttctcgctgtccaagcaccggttttgaagaagtatcctgcctacctttcggttgctgcgtattcatacttcttcggtgcatcaataatgatcacaacagctatcttgtttgttagagagcctaaagattggagcttaacacaatctgaggttcttgctgttatattcgcaggagtgtttgcctcagctctaaactatggactcttgacttggtccaataaaattcttggagctgctttggtttccctatacaatcctcttcagcctgcaacatcggcctttttatcgacaattttcctcggcagcccgatctatcttggaagcgttttgggtggaatcctcatcatttgcgggctttatatggttacttgggcatcttacagagagcaacaaacaacatcagctgggaatgagattgcttcttctagtgatgtaagaatctcggaacctttcatttacagagatgagactggtaaataaataagaaaaggtaaagaaaggatacttgtaccgttgtacgtagttaatatcagacaaaaacttgacaaatcatacaattttttcgagttcaaacattgattctttaaacggtaaataattcaaaataattacttcgccc

SEQ ID NO: 107494 - protein, 357 aa, Arabidopsis thaliana
  peptide (1)..(357): Ceres Seq. ID no. 13650444
MAAPAILNGGDATERETRMAHSAMTLVQVINGGYHVVTKVALNVGVNQLVFCVFRDLLALSILAPLAFFRERTIRPPMNRSIFFSLFFLGLAGIFGNQLLFLMGLSYTNPTYAAAIQPSIPVFTFLLAVLMGTEKVNLLKVEGQTKVGGTLVCVSGAIAMALFRGPALFGVSSFLGLGFDQWHIGVLCLIGNCMCMAAFLAVQAPVLKKYPAYLSVAAYSYFFGASIMITTAILFVREPKDWSLTQSEVLAVIFAGVFASALNYGLLTWSNKILGAALVSLYNPLQPATSAFLSTIFLGSPIYLGSVLGGILIICGLYMVTWASYREQQTTSAGNEIASSSDVRISEPFIYRDETGK

SEQ ID NO: 107495 - protein, 339 aa, Arabidopsis thaliana
  peptide (1)..(339): Ceres Seq. ID no. 13650445
MAHSAMTLVQVINGGYHVVTKVALNVGVNQLVFCVFRDLLALSILAPLAFFRERTIRPPMNRSIFFSLFFLGLAGIFGNQLLFLMGLSYTNPTYAAAIQPSIPVFTFLLAVLMGTEKVNLLKVEGQTKVGGTLVCVSGAIAMALFRGPALFGVSSFLGLGFDQWHIGVLCLIGNCMCMAAFLAVQAPVLKKYPAYLSVAAYSYFFGASIMITTAILFVREPKDWSLTQSEVLAVIFAGVFASALNYGLLTWSNKILGAALVSLYNPLQPATSAFLSTIFLGSPIYLGSVLGGILIICGLYMVTWASYREQQTTSAGNEIASSSDVRISEPFIYRDETGK

SEQ ID NO: 107496 - protein, 334 aa, Arabidopsis thaliana
  peptide (1)..(334): Ceres Seq. ID no. 13650446
MTLVQVINGGYHVVTKVALNVGVNQLVFCVFRDLLALSILAPLAFFRERTIRPPMNRSIFFSLFFLGLAGIFGNQLLFLMGLSYTNPTYAAAIQPSIPVFTFLLAVLMGTEKVNLLKVEGQTKVGGTLVCVSGAIAMALFRGPALFGVSSFLGLGFDQWHIGVLCLIGNCMCMAAFLAVQAPVLKKYPAYLSVAAYSYFFGASIMITTAILFVREPKDWSLTQSEVLAVIFAGVFASALNYGLLTWSNKILGAALVSLYNPLQPATSAFLSTIFLGSPIYLGSVLGGILIICGLYMVTWASYREQQTTSAGNEIASSSDVRISEPFIYRDETGK

SEQ ID NO: 107497 - DNA, 1028 bp, Arabidopsis thaliana
  misc_feature (1)..(1028): Ceres Seq. ID no. 13650455
  misc_feature (1)..(1028): Ortholog of  Ceres SEQ ID NO 12562983 as cited in SEQ ID NO 53309
tcgctgtcgtcttacctcagcccgacgcgccttctagaaggctacctccgccgttgtctcagggcggcaggactgacgtcgcagacgctttccatagactctgaaacaaccatccacttctggggcccaccacctctagaccaccggagcgacgatgacagaccggttatgcttctcctccacggcttcggtccgtcgtccatgtggcagtggcggcgacagatgcaagccttctctccctccgctttcagggtttattctcccgatcttgtcttcttcggcgactctacctcttcctccaccaatcgcaccgaagtcttccaggaatagggaagtataatgtggctggaacaagctacggggggtttgttgcgtaccacatggccaaaatgtggccggaaaaagtggagaaagtggtgattgcaagctccggcatcaacatgcgaaagtgtgacggtgaaagtttattgcaaagatccaattgtgagtgcatcgagaaggttatgttaccatccactgcaactgagtttcgcacacttatggctttggcatcttcatggcggttagttcgtatgtttcctgatgctctctggaacgacgtaatcaataatagaaaagagaagatagaattgttgaagggagtgactttcggccggagcgaaaatttaaacatcgattctctttctcaggaggtcctaattgtatggggagacaaagatcagatatttcctgtgaagatggcttacgaattaaaagagattcttggagacaaaacgaaactagaaatcattgacaacacttcacatgttcctcagattgaatgtgctcaagagttcaacaatattgttttgagatttttgaagggttcttaagagccgtaattttattccatgctacatgattcttcagttttttttaagtgttaaactattggttacgtaattttgcgactttacttgccatgctttctcatttttcatgtaagaactttatccattactgtcattgtagagaactctatttataac

SEQ ID NO: 107498 - protein, 163 aa, Arabidopsis thaliana
  peptide (1)..(163): Ceres Seq. ID no. 13650456
MAKMWPEKVEKVVIASSGINMRKCDGESLLQRSNCECIEKVMLPSTATEFRTLMALASSWRLVRMFPDALWNDVINNRKEKIELLKGVTFGRSENLNIDSLSQEVLIVWGDKDQIFPVKMAYELKEILGDKTKLEIIDNTSHVPQIECAQEFNNIVLRFLKGS

SEQ ID NO: 107499 - protein, 160 aa, Arabidopsis thaliana
  peptide (1)..(160): Ceres Seq. ID no. 13650457
MWPEKVEKVVIASSGINMRKCDGESLLQRSNCECIEKVMLPSTATEFRTLMALASSWRLVRMFPDALWNDVINNRKEKIELLKGVTFGRSENLNIDSLSQEVLIVWGDKDQIFPVKMAYELKEILGDKTKLEIIDNTSHVPQIECAQEFNNIVLRFLKGS

SEQ ID NO: 107500 - protein, 143 aa, Arabidopsis thaliana
  peptide (1)..(143): Ceres Seq. ID no. 13650458
MRKCDGESLLQRSNCECIEKVMLPSTATEFRTLMALASSWRLVRMFPDALWNDVINNRKEKIELLKGVTFGRSENLNIDSLSQEVLIVWGDKDQIFPVKMAYELKEILGDKTKLEIIDNTSHVPQIECAQEFNNIVLRFLKGS

SEQ ID NO: 107501 - DNA, 1672 bp, Arabidopsis thaliana
  misc_feature (1)..(1672): Ceres Seq. ID no. 13650484
  misc_feature (1)..(1672): Ortholog of  Ceres SEQ ID NO 13600310 as cited in SEQ ID NO 5086
agatttcgagtttcttctttcccgcccgtaagagaaaccctactctgactctccactccatttgagagactgagctcgttccgataaggagaggagatgtctaacgtaaccgtctgtgcgcgattcaggccgcgaagctctaaagagatgcgcgatcccagcagagatggtgtctgtgctcgacccatcgacgctgaaaccttcgttttccaagatgacaaggaagatgaatttacatttagcctcgatagagttttttatgaggactctacccaagctgcggtttatgagtttctggctctccccatcatgagagacgctgtaaatggtataaacggaacaatcatcacttatggacagacaggggctgggaagacttattccatggagggaccaggcatccaggactgtgatgagcacaataaaggacttcttccaagagtggtccatgggatgtttgagcaaatcagctcttccaatgatattgcaagatacactgttaaattgtctatggttgagatctacatggagaaagtcagggacctgttggacttatcaaaagcaaacatacagatcaaggagaacaaaacacaaggaatactcttgtcaggcgttacagaggtgcctgtatcagattcggtggaggcattacaacatctatgcaccggtttagctaaccgcgcagttggggaaacccaaatgaatatgtccagcagtagaagccactgcgcctacttgttcacaatccagcaggattcagttaaagataaaagggtaaaaacaggaaaactgattcttgtcgacctggctggctcagagaaagcagacaaaactggagcagaaggtagggttcttgaagaagcgaagacgatcaataaatcgctctcagccttggggaacgtgataaacgctctcactagtgggccatctagcaaagggaatcacataccatatcgtgactccaagcttactcgcatcttacaggatgccctgggtggaaattctcgaatggcgctgctttgctgttgctcaccaagcactttaaatgcatctgagacgctctcaactctcaggtttggcatgagggcaaaacacataaaagcatcaccacgtgctagtgaagtgaaatctgcgaaggcacaggaggaaccctcctcggttaccaaagatgaaaaatgtgggaggatcctagaaaagatgaaagagaggatgagcaacgaagacatcaaaatgctagaagatgtgtttatacaggaagggatcattttcagcctagattcgatggctgaagtggaaaccgtatacgaagatattgtatcaaaaactatacaatccttacagcaggctgttgatgaactccaacagaaagtcaaaaagttagaagcagaaaacataggtattcaggaacaagcattgcgcaatcacgaacctggttcggtcggaaagatgtcaaggttcatcagttcttggtatgcatcgttctttacgtcctaaagatgataaaatgaatatactatcttggtaatgtagtagatgtggacaagtagatggtaaagagataagtttctctttttaggtcgtgagagcaaaacagatattaacattcaaaggtatgtaatgaaatagtagataaaaaatggatgggaggatgaataaaagctaattaagagag

SEQ ID NO: 107502 - protein, 465 aa, Arabidopsis thaliana
  peptide (1)..(465): Ceres Seq. ID no. 13650485
MSNVTVCARFRPRSSKEMRDPSRDGVCARPIDAETFVFQDDKEDEFTFSLDRVFYEDSTQAAVYEFLALPIMRDAVNGINGTIITYGQTGAGKTYSMEGPGIQDCDEHNKGLLPRVVHGMFEQISSSNDIARYTVKLSMVEIYMEKVRDLLDLSKANIQIKENKTQGILLSGVTEVPVSDSVEALQHLCTGLANRAVGETQMNMSSSRSHCAYLFTIQQDSVKDKRVKTGKLILVDLAGSEKADKTGAEGRVLEEAKTINKSLSALGNVINALTSGPSSKGNHIPYRDSKLTRILQDALGGNSRMALLCCCSPSTLNASETLSTLRFGMRAKHIKASPRASEVKSAKAQEEPSSVTKDEKCGRILEKMKERMSNEDIKMLEDVFIQEGIIFSLDSMAEVETVYEDIVSKTIQSLQQAVDELQQKVKKLEAENIGIQEQALRNHEPGSVGKMSRFISSWYASFFTS

SEQ ID NO: 107503 - protein, 448 aa, Arabidopsis thaliana
  peptide (1)..(448): Ceres Seq. ID no. 13650486
MRDPSRDGVCARPIDAETFVFQDDKEDEFTFSLDRVFYEDSTQAAVYEFLALPIMRDAVNGINGTIITYGQTGAGKTYSMEGPGIQDCDEHNKGLLPRVVHGMFEQISSSNDIARYTVKLSMVEIYMEKVRDLLDLSKANIQIKENKTQGILLSGVTEVPVSDSVEALQHLCTGLANRAVGETQMNMSSSRSHCAYLFTIQQDSVKDKRVKTGKLILVDLAGSEKADKTGAEGRVLEEAKTINKSLSALGNVINALTSGPSSKGNHIPYRDSKLTRILQDALGGNSRMALLCCCSPSTLNASETLSTLRFGMRAKHIKASPRASEVKSAKAQEEPSSVTKDEKCGRILEKMKERMSNEDIKMLEDVFIQEGIIFSLDSMAEVETVYEDIVSKTIQSLQQAVDELQQKVKKLEAENIGIQEQALRNHEPGSVGKMSRFISSWYASFFTS

SEQ ID NO: 107504 - protein, 394 aa, Arabidopsis thaliana
  peptide (1)..(394): Ceres Seq. ID no. 13650487
MRDAVNGINGTIITYGQTGAGKTYSMEGPGIQDCDEHNKGLLPRVVHGMFEQISSSNDIARYTVKLSMVEIYMEKVRDLLDLSKANIQIKENKTQGILLSGVTEVPVSDSVEALQHLCTGLANRAVGETQMNMSSSRSHCAYLFTIQQDSVKDKRVKTGKLILVDLAGSEKADKTGAEGRVLEEAKTINKSLSALGNVINALTSGPSSKGNHIPYRDSKLTRILQDALGGNSRMALLCCCSPSTLNASETLSTLRFGMRAKHIKASPRASEVKSAKAQEEPSSVTKDEKCGRILEKMKERMSNEDIKMLEDVFIQEGIIFSLDSMAEVETVYEDIVSKTIQSLQQAVDELQQKVKKLEAENIGIQEQALRNHEPGSVGKMSRFISSWYASFFTS

SEQ ID NO: 107505 - DNA, 1079 bp, Arabidopsis thaliana
  misc_feature (1)..(1079): Ceres Seq. ID no. 13650523
  misc_feature (1)..(1079): Ortholog of  Ceres SEQ ID NO 12616669 as cited in SEQ ID NO 63669
ctctcttaacctaaccaatccaaagttgccgctagggtcaccggaaaacttcagagttgtgtcttctattgaattctccgggaagtattagtgatggggctttctcttggggaacaacatttcattaaaggtgggattgctcaagatcttcgaactgatggtcggaaaagattgacttaccgtcctatctacgtcgaaaccggtgttattccgcaggctaatggttcagcgagagttagaattggtggaaccgatgtgattgctagtgtaaaggctgaaattgggaggccaagttcacttcaacccgataaaggaaaggttgcagttttcattgattgcagtccaacagctgaaccgacatttggggggagaggaggtgaggaattgtcttctgagcttgctttggctcttcaaagatgtcttctgggtggcaaaagtggagcaggagctggaataaatttatcttcgcttttaatcaaagaaggaaaagtttgctgggacctttatattgatggtcttgtcattagttcggatgggaatctattggatgccctgggtgctgccattaaggctgctttaaccaacacggccatcccaaaagtcaatgtttcagctgaagtagcagatgatgagcaaccagagattgacatcagcgacgaggaatatcttcaatttgacacttccagtgtcccggtcatagtcacgttaacaaaagtgggaacgcattacatagttgatgcaacagcagaagaggagtctcagatgagctcagctgtatctatatctgtgaatcggacaggccatatatgtgggttaaccaaacgaagcgggtctggcttagacccaagcgtcatccttgacatgatctctgttgccaagcatgtgacagagactctgatgagcaaacttgattcagagatttcagccgcagaggcctgcgaagacgaatcttgactcttgagtctcagagaatcaaagtttcaagatgaaacatgttagcaagggatcaacaatatttgtatctgtggaaaatcttatacgaagtcagaacagattaagctaatcaaaatcctttttcc

SEQ ID NO: 107506 - protein, 286 aa, Arabidopsis thaliana
  peptide (1)..(286): Ceres Seq. ID no. 13650524
MGLSLGEQHFIKGGIAQDLRTDGRKRLTYRPIYVETGVIPQANGSARVRIGGTDVIASVKAEIGRPSSLQPDKGKVAVFIDCSPTAEPTFGGRGGEELSSELALALQRCLLGGKSGAGAGINLSSLLIKEGKVCWDLYIDGLVISSDGNLLDALGAAIKAALTNTAIPKVNVSAEVADDEQPEIDISDEEYLQFDTSSVPVIVTLTKVGTHYIVDATAEEESQMSSAVSISVNRTGHICGLTKRSGSGLDPSVILDMISVAKHVTETLMSKLDSEISAAEACEDES

SEQ ID NO: 107507 - DNA, 1145 bp, Arabidopsis thaliana
  misc_feature (1)..(1145): Ceres Seq. ID no. 13650529
  misc_feature (1)..(1145): Ortholog of  Ceres SEQ ID NO 13596944 as cited in SEQ ID NO 68910
ctcaaaccaaccaaccaatatatcagatggcttccatggatcacaatcattttctttttcctctcctcttcatcatcatcatctcttccttgcacgttttgcgtgcttcgaccacaccttcacactcacacaaactaaaatccgccactaccattagaaaaatcaaccgtagaggaccttacattggccttgtgacggtctttgagaccgaagaagatgcttttctcggcagtgttgatttcagactcgatcctacgcatcctttcctcgatctctctggaagacgttttcgtatagggaagattcatggaaagaaggttgtgtatgtcagatgtgggataggaatggtgaacgcagcagcagcaacacaacaaatgatagatgtgttcagtgtgaaagggattgtgcattttgggattgctggaaatataaacaactcgatgtccataggagatgtgagcatccctaagcaaatcacgaatgctggcttgtgggattggctgaatccaggcaaagcaaaaggaaatgaggatgtagcgtacttagatgtcgggaactataatgttccacaaggaaacaataagttaggaactattggatacagttacgaggaattatattcagtcagtggtcacatcaattcaccaaagaaagtgttttggattaatacaactcaagagtggcttcatcttgcagctgatcttgagaagatggagctattgcagtgtgtgaatgcaagtctgtgtcttccaaataaacccaaagtagtagttggattaaaagcagccactgctgacatatttgtggataatgcagcctatagaaatttcttatacgatacttttggagtttcctcctcagacatggagagttctgctgtggccatgacttgcgtgtcaaatgggtatcccctaattgtgataagaggattatcagatttagcaggagtaggagataacactgttcgaaagtttggatctttggctgccactaacactgccaaagctgttttagagttcattaaaaagctcccaccgtcataattcctacgtgtaacctatcattatggatgtttgaatctgtattttccctagtttttctacgtacgttaaaaataaaattaataaaatctgtttttcttttcc

SEQ ID NO: 107508 - protein, 346 aa, Arabidopsis thaliana
  peptide (1)..(346): Ceres Seq. ID no. 13650530
QTNQPIYQMASMDHNHFLFPLLFIIIISSLHVLRASTTPSHSHKLKSATTIRKINRRGPYIGLVTVFETEEDAFLGSVDFRLDPTHPFLDLSGRRFRIGKIHGKKVVYVRCGIGMVNAAAATQQMIDVFSVKGIVHFGIAGNINNSMSIGDVSIPKQITNAGLWDWLNPGKAKGNEDVAYLDVGNYNVPQGNNKLGTIGYSYEELYSVSGHINSPKKVFWINTTQEWLHLAADLEKMELLQCVNASLCLPNKPKVVVGLKAATADIFVDNAAYRNFLYDTFGVSSSDMESSAVAMTCVSNGYPLIVIRGLSDLAGVGDNTVRKFGSLAATNTAKAVLEFIKKLPPS

SEQ ID NO: 107509 - protein, 338 aa, Arabidopsis thaliana; identical to SEQ ID NO: 101930
  peptide (1)..(338): Ceres Seq. ID no. 13650531

SEQ ID NO: 107510 - protein, 335 aa, Arabidopsis thaliana; identical to SEQ ID NO: 87862
  peptide (1)..(335): Ceres Seq. ID no. 13650532

SEQ ID NO: 107511 - DNA, 673 bp, Arabidopsis thaliana
  misc_feature (1)..(673): Ceres Seq. ID no. 13650533
  misc_feature (1)..(673): Ortholog of  Ceres SEQ ID NO 12609177 as cited in SEQ ID NO 55753
  misc_feature (1)..(673): Ortholog of  Ceres SEQ ID NO 14309346 as cited in SEQ ID NO 0
aacgtaaaaacataagaaaaacagagtaaataaagtaatgcgccgatcgtcgacggagagtatgagatgagaagagaaattgatattgatattgtttgatatctactgtagatgattcgtcttgacaaagaggaaggaggctgcttgacatcgaccaccctgaaagtccttttggtacaaaggaatctcctgctgtcgtacagtcctactttgacaagagaaatatcggatgccgtggtggtgaaggcgaggatggacacgacgtcgtttggttctggctagataaaggaaagtcatttgaatgtccagtgtgctcccaatactttgagcacggaccaccagacggtcatggtgacgatgaagaccaccaccattgattccggtcttttcttaacggcgaaatgttttcttctattgtagtgagtggaataaatatttctcgttggtgaaaacacttaaatatgttttttttgatcctcgagaagacaccaccactttatttgcctcaggctctaaccctttttgctttcttgagacttttgtttttatgaatgattctcgagtcagaatcattcttctttttttgaattatataatatatagtttttggtgttcacggtgtgtatgttttgtggtaaaaagtaaaagcctagagaatgttcttccccccttt

SEQ ID NO: 107512 - protein, 56 aa, Arabidopsis thaliana
  peptide (1)..(56): Ceres Seq. ID no. 13650534
MIRLDKEEGGCLTSTTLKVLLVQRNLLLSYSPTLTREISDAVVVKARMDTTSFGSG

SEQ ID NO: 107513 - protein, 42 aa, Arabidopsis thaliana
  peptide (1)..(42): Ceres Seq. ID no. 13650535
MNDSRVRIILLFLNYIIYSFWCSRCVCFVVKSKSLENVLPPF

SEQ ID NO: 107514 - DNA, 1109 bp, Arabidopsis thaliana
  misc_feature (1)..(1109): Ceres Seq. ID no. 13650556
  misc_feature (1)..(1109): Ortholog of  Ceres SEQ ID NO 13599348 as cited in SEQ ID NO 0
aattccccagaagaaaagatgaaagctgtagcttttcccgctaaaatcgcaaatcttagcttcccttctaactgttgctcactattcttccgatcaccggcgacgtttttatcgccggcattgccttgtcggaagctgacgaaaggaataagaggtctcgaaggcttgatgtctcagtgtttatcatcatcgtcacaatcattgtcattttcatcgaattcattctcctctcaaccggaatcagagttacttcaagctttaccttcttcgaagccaaaatctccgccactgcagctgccatggctcattgttggtttgggtaatcccggcaagaagtaccagggcacgcgccacaacgttggttttgagatggtggacgctttggctgatgcagaaggcatctccatgaacactgttaacttcaaggccttgtttgggaaaggcgttattggaaatataccgattatgctggctaaaccacaaactttcatggacctaagtggtgagtctgttggacaaatcgtttcattttacaagatcccgttaaagcaagtacttgtggtttacgatgatttagatttgccctttggtaaactacgtttattgccaaaaggtggtcacggaggccacaatgggatgagaagtattatagaccgcctcaaaggtagccgtgattttcctcgactaagaatagggatcggacgtcctccagggaagatggatacagccaattttgttctccgccagttcaatagacaggaacaggaagagttggatcacacattccaaaccgggttagaggcaataaggattcttttgcttgaggggttcaacaaaagtgcaacatttgtcaacactcgaaaatctatggagcaactcagttagaagtgacattgttacattacatatattcatataacaaactacaaagtgttcttgctgattcattaataatttttttttggttccatacttgaatcctttttgagcaaattgtacatcaaaagataaccagattatttgtttatcataatttctattatgtaactcgaaaatatggatttcagtatttgttcggctgtaatttaaattatacactttcattaaac

SEQ ID NO: 107515 - protein, 294 aa, Arabidopsis thaliana
  peptide (1)..(294): Ceres Seq. ID no. 13650557
NSPEEKMKAVAFPAKIANLSFPSNCCSLFFRSPATFLSPALPCRKLTKGIRGLEGLMSQCLSSSSQSLSFSSNSFSSQPESELLQALPSSKPKSPPLQLPWLIVGLGNPGKKYQGTRHNVGFEMVDALADAEGISMNTVNFKALFGKGVIGNIPIMLAKPQTFMDLSGESVGQIVSFYKIPLKQVLVVYDDLDLPFGKLRLLPKGGHGGHNGMRSIIDRLKGSRDFPRLRIGIGRPPGKMDTANFVLRQFNRQEQEELDHTFQTGLEAIRILLLEGFNKSATFVNTRKSMEQLS

SEQ ID NO: 107516 - protein, 288 aa, Arabidopsis thaliana
  peptide (1)..(288): Ceres Seq. ID no. 13650558
MKAVAFPAKIANLSFPSNCCSLFFRSPATFLSPALPCRKLTKGIRGLEGLMSQCLSSSSQSLSFSSNSFSSQPESELLQALPSSKPKSPPLQLPWLIVGLGNPGKKYQGTRHNVGFEMVDALADAEGISMNTVNFKALFGKGVIGNIPIMLAKPQTFMDLSGESVGQIVSFYKIPLKQVLVVYDDLDLPFGKLRLLPKGGHGGHNGMRSIIDRLKGSRDFPRLRIGIGRPPGKMDTANFVLRQFNRQEQEELDHTFQTGLEAIRILLLEGFNKSATFVNTRKSMEQLS

SEQ ID NO: 107517 - protein, 238 aa, Arabidopsis thaliana
  peptide (1)..(238): Ceres Seq. ID no. 13650559
MSQCLSSSSQSLSFSSNSFSSQPESELLQALPSSKPKSPPLQLPWLIVGLGNPGKKYQGTRHNVGFEMVDALADAEGISMNTVNFKALFGKGVIGNIPIMLAKPQTFMDLSGESVGQIVSFYKIPLKQVLVVYDDLDLPFGKLRLLPKGGHGGHNGMRSIIDRLKGSRDFPRLRIGIGRPPGKMDTANFVLRQFNRQEQEELDHTFQTGLEAIRILLLEGFNKSATFVNTRKSMEQLS

SEQ ID NO: 107518 - DNA, 1126 bp, Arabidopsis thaliana
  misc_feature (1)..(1126): Ceres Seq. ID no. 13650568
  misc_feature (1)..(1126): Ortholog of  Ceres SEQ ID NO 15179873 as cited in SEQ ID NO 66846
ttggggccgaatgtttacaaaaacttcttcgatcgaacacatactagagagattcaaagctctccttcgtagattcgtgtattgtacagatttgtagagaacgagagagagaggagaacaaaatggtaggcgaagaggagacgaagaagagagtagtcactgaatcgctaggatggttaacggaatcttcgattatgccaaagaagcatcgcgccatcgaaggtgttggtccttcctcaatcatggagcttaaagctcagctctataagtctcaggaggaagctaaacagacaaaggattttacgggatccgatgctcaataccatcgcgccaaagaaaggattgccgccaaagattctttcgccgcgaaaaactccggcgtcgaaagtcgcaatttaaaggacaagcttgagcacaaagctgtaaaagatggagcagttagttatgccgcattggagaaaaaggctcagttgtatgataaacttgctagaggagagctttctgatgaagaaggtgaagagaagtactgtgttgacttctttaggaaaggaattcaacatgaagatccaaaaccatcaagcacttacaacagttccatttcagcaccacctgaagatttcaagcaagatggtgaagatgatggttcgctttttagcaccaaatttgctggacttggacatgcaattgggacagctgatgtaggtcaacacgtgcgcatggtcagggaggttcatgaggaagtcaatcaagcgagagaaaaggcaaccgagttaaagcaaaggagacaagagcaagcaacaaatcgtcgggagaaactcaaacaagcttatcttcggaagcagctcgagaaactaaaggctcaacaacaacaacaagaagatgaacaaaaaacttgatttttcgcttcgccaagctattggattttgagttgcggcctgaacgcagagaagacaatgacagagttgtccaccgaacccgaatgagtaatatggctgcaacaagaacacgtaagccatcattaagggatgaagctgtatccatatgctcttaaaagcgatttatgtactgtggattgttgtcaatcaacagattctatacaaagttaccaatagataatccttataac

SEQ ID NO: 107519 - protein, 257 aa, Arabidopsis thaliana; identical to SEQ ID NO: 42493
  peptide (1)..(257): Ceres Seq. ID no. 13650569

SEQ ID NO: 107520 - protein, 233 aa, Arabidopsis thaliana; identical to SEQ ID NO: 42494
  peptide (1)..(233): Ceres Seq. ID no. 13650570

SEQ ID NO: 107521 - protein, 217 aa, Arabidopsis thaliana; identical to SEQ ID NO: 42495
  peptide (1)..(217): Ceres Seq. ID no. 13650571

SEQ ID NO: 107522 - DNA, 2984 bp, Arabidopsis thaliana
  misc_feature (1)..(2984): Ceres Seq. ID no. 13650576
  misc_feature (1)..(2984): Ortholog of  Ceres SEQ ID NO 13594958 as cited in SEQ ID NO 55996
  misc_feature (1)..(2984): Ortholog of  Ceres SEQ ID NO 15180204 as cited in SEQ ID NO 0
agctgaaaacgcctctgaaactcgcgagatctattttcaaatcgaagaagacagcaattcgagggtttacttgtcttgtcttgttgactcgattcgtagacttttggtctgaagcttcttcgtgttttatcttaacaatggcgggttttatcaatcttgaggattccccaatgtttcaaaaacaggtcttctccttggaagggacaagtgatgagcttaaagatcgttgtcagaagttatacaaaggtgttaagaagttcatgggagctttaggagaggcatctactggagttagtgcctttgcagattctcttgaagagtttggtgctggacatgatgatccagtcagtgtttcaattggaggtccagtaatatctaagttcataaatacacttcgagagctctcctcttataaggagtttcttcgctcacaggtggagcatgtattacttgagaggctgacaaactttatgactgttgatctacaagaagcaaaggagtctcggcgtcggttcgataaagctgtccattcttatgatcaggcacgcgaaaagtttgtgtcgctaaagaagaataccagaggagacattgttgctgagttggaagaggatttggagaactcgaagtcagcatttgagaaaagtcgtttcaatctagtatgctaagtctacgaatagaagcactactacgattgtcttttgacctttctgcatttaaatggttttctctttggtttaaggaatgcaggtaaattcactgatgaccattgaagcaaaaaagaagtacgagttcttggaatctataagtgcaattatggattcccatttcaaatattttaagcttgtatgtttcttctcttattttgcatttagagatgtaaccaagtgtgaccaactaagggaaacatcagtacctcgttgtactccttaatgtggtctctttgttctccagggttatgatctattaagtcaattggagccttacatccatcaggtattgacatacgcacaacagtcaaaagaacagtctaagattgaacaagatcgatttgcacaacgcattcaagaattcaggactcaatctgaattagacagccaacaggcctctgctaaagcagatccctccgatgttggtggaaaccatgtttatagagctatcccccgtaaaaacgtagaagcaaactcagtttcaacagcagacaaggaagtaactaaacaagggtatctattaaagcgatcagctagtttgagagctgattggaaaaggagattctttgtgcttgacaaccatggatccctatactattacagaaacaccggtaataaatcagcgaaatctcagcattactacagtggtttaggagagcatagtagcggcgtctttgggagatttcgtacaagacacaatcgatcagcttcacagggaagcctagattgcaatatgatcgatctccgtacttcactgataaaattggacgcagaggacacagatcttcgactctgttttagaattatatctcctcaaaagacttacacactacaggctgaaaatggagctgataggatggattgggtaaataagatcacagcagctataacaatacgtctgaattctcattttctgcagcagtcaccagcaagatacttggataaaaagaatactagttctggtcctgccactgaaaacctcaccctgaatcaaaaagaagattataatcaaagactaaatgtgggggatgacgtccttacaatactcagagaaattcctggaaataacacttgtgcagaatgcaatgcacctgaccccgattgggcatcattgaatcttggagttttgatgtgcattgaatgctctggtgttcacaggaatctcggcgttcatatatccaaggtgagatcgctcacattggatgtgaaagtatgggagcctacaatcttggacttatttcggaacttaggcaacggatactgtaattcagtctgggaggagctacttcatcaccttgacgatgacagtgaaaagggatcgacagacacacttgcatcagtttcgaaaccatcttcagaagattggtttactctgaaggagaaatatattaacggaaagtacctggagaaagcactagttgtcaaagatgaaagagaagcaaattctactgcctcaagtagaatatgggaagcggttcaaagcaggaacataagagacatctaccgactcattgtaaaagcagatgcaaatatcatcaataccaagttcgatgatattactgaccttgatgtatatcaccaccaccatgttgatgcaccagatgaagtaaagaaaaggcacgatccaaatgcgtgtcagagaatcaagaattcgaacgaagcaagaaactgtcttcaaggctgctcattgttgcatgtggcgtgtcaaagcggtgacccaatcttgcttgaactgctgttgcagttcggggctgacataaacatgagagattaccacggacgaactccattacaccattgcatcgcatcagggaacaacgcatttgcaaaggttttgctgagaagaggtgctcgtccatcaatagaggatggtggaggattaagtgtgttggaaagggcaatggagatgggagccataaccgatgaagagctcttccttctattagcagagtgtcagtaaattaccaatataccatttgctgattgattgctacgcaaaggaatgtaacttgtaactgttgtagtatttggtcatgacttgctcatcgcattgatgctccaatatttacctaattcccgaaggagatagaactctaggaaatgtcaagattccgacctactgtattagcctttgtaatgttatacataagatgatctcaaagattctaagcctgcacctcaaagtttttttttcttcttctgtatttgatatccgagatacaaatatgtgttttgtagccggaaactttattatagacaacattctcattgcccaac

SEQ ID NO: 107523 - protein, 408 aa, Arabidopsis thaliana
  peptide (1)..(408): Ceres Seq. ID no. 13650577
MIDLRTSLIKLDAEDTDLRLCFRIISPQKTYTLQAENGADRMDWVNKITAAITIRLNSHFLQQSPARYLDKKNTSSGPATENLTLNQKEDYNQRLNVGDDVLTILREIPGNNTCAECNAPDPDWASLNLGVLMCIECSGVHRNLGVHISKVRSLTLDVKVWEPTILDLFRNLGNGYCNSVWEELLHHLDDDSEKGSTDTLASVSKPSSEDWFTLKEKYINGKYLEKALVVKDEREANSTASSRIWEAVQSRNIRDIYRLIVKADANIINTKFDDITDLDVYHHHHVDAPDEVKKRHDPNACQRIKNSNEARNCLQGCSLLHVACQSGDPILLELLLQFGADINMRDYHGRTPLHHCIASGNNAFAKVLLRRGARPSIEDGGGLSVLERAMEMGAITDEELFLLLAECQ

SEQ ID NO: 107524 - protein, 367 aa, Arabidopsis thaliana
  peptide (1)..(367): Ceres Seq. ID no. 13650578
MDWVNKITAAITIRLNSHFLQQSPARYLDKKNTSSGPATENLTLNQKEDYNQRLNVGDDVLTILREIPGNNTCAECNAPDPDWASLNLGVLMCIECSGVHRNLGVHISKVRSLTLDVKVWEPTILDLFRNLGNGYCNSVWEELLHHLDDDSEKGSTDTLASVSKPSSEDWFTLKEKYINGKYLEKALVVKDEREANSTASSRIWEAVQSRNIRDIYRLIVKADANIINTKFDDITDLDVYHHHHVDAPDEVKKRHDPNACQRIKNSNEARNCLQGCSLLHVACQSGDPILLELLLQFGADINMRDYHGRTPLHHCIASGNNAFAKVLLRRGARPSIEDGGGLSVLERAMEMGAITDEELFLLLAECQ

SEQ ID NO: 107525 - protein, 276 aa, Arabidopsis thaliana
  peptide (1)..(276): Ceres Seq. ID no. 13650579
MCIECSGVHRNLGVHISKVRSLTLDVKVWEPTILDLFRNLGNGYCNSVWEELLHHLDDDSEKGSTDTLASVSKPSSEDWFTLKEKYINGKYLEKALVVKDEREANSTASSRIWEAVQSRNIRDIYRLIVKADANIINTKFDDITDLDVYHHHHVDAPDEVKKRHDPNACQRIKNSNEARNCLQGCSLLHVACQSGDPILLELLLQFGADINMRDYHGRTPLHHCIASGNNAFAKVLLRRGARPSIEDGGGLSVLERAMEMGAITDEELFLLLAECQ

SEQ ID NO: 107526 - DNA, 1046 bp, Arabidopsis thaliana
  misc_feature (1)..(1046): Ceres Seq. ID no. 13650610
  misc_feature (1)..(1046): Ortholog of  Ceres SEQ ID NO 15168580 as cited in SEQ ID NO 60279
agggttctccgtgcagaggataagatattctagggttttgtggtaaatggaatcgaatcacgaaggcaacgcgatacaagtgattgaccaagtaacaaccatgacccatctgtctgacccgaatccgaaaaccaaaccgggtatgatgctcatgaaacaagaagacgggtatttgcagccggtgaagactaaaccggctccgaagagaccgacttctaaagaccgtcacacgaaagtagaaggacgaggtcggaggatccgaatgccggcgggttgcgctgctcgggtctttcaattgacccgtgaacttggtcacaaatccgacggagaaacgatacggtggttattggaacgagctgaaccggcgataattgaagcaaccggaaccggaactgtaccggctattgctgtatcggttaacggaactttaaaaatcccgacgagctctccagtgttgaatgacggcggccgtgacggtgacggtgacctaataaagaaacggaggaagagaaactgtacgagcgatttcgtagacgttaatgacagctgtcatagctccgttacttctgggttagctccgataacggcgtcaaactacggcgttaatatcctgaacgttaatacacaggggtttgtgccgttttggcctatgggtatgggtactgcgtttgttactggtgggccggatcaaatgggccaaatgtgggctattcctaccgttgctacagctccgtttctgaatgttggtgctagaccggtgtctagttatgtctcaaacgcttcagacgctgaggcggagatggaaacgagcggtggcggaacgacgcaaccgctgagggatttttcgttggagatttatgataagagagagcttcagtttttgggtggctcagggaactcatctccgtcttcatgtcatgagacttaaggaattttaactcttagttctagtttctttttagtttttagtaagtttgattcctgatttaggttaagtaagatttgtaaaagaattgggagcacgatttcaattttatgtttctgtc

SEQ ID NO: 107527 - protein, 293 aa, Arabidopsis thaliana; identical to SEQ ID NO: 99479
  peptide (1)..(293): Ceres Seq. ID no. 13650611

SEQ ID NO: 107528 - protein, 275 aa, Arabidopsis thaliana; identical to SEQ ID NO: 99480
  peptide (1)..(275): Ceres Seq. ID no. 13650612

SEQ ID NO: 107529 - protein, 261 aa, Arabidopsis thaliana; identical to SEQ ID NO: 99481
  peptide (1)..(261): Ceres Seq. ID no. 13650613

SEQ ID NO: 107530 - DNA, 699 bp, Arabidopsis thaliana
  misc_feature (1)..(699): Ceres Seq. ID no. 13650614
  misc_feature (1)..(699): Ortholog of  Ceres SEQ ID NO 15171228 as cited in SEQ ID NO 56948
catcgctgtctggaacagcgataacggcttatgtaaccttcagagatgcgtatgctctggatatggctgtgttacttagcggagctacgatcgttgatcaaaccgtttggatatcggtctacggtgtctatttacatgaatctaacaatctcagacaagaagaagactatagtgttacggtgactcgttcagacgcgtttgcttcatcgcctggagaggccataaccgtggctcaacaagttgtgcagacgatgttagctaaaggctacgttttaagcaaagacgcgattggtaaagccaaagctttggatgagtctcagagattttcaagcttggtagcgaccaaattggcagagatcagccattaccttggcctcacacagaacattcagtcgagtatggaactcgtgagatcagcggacgagaagtatcatttctcggatttcactaaatccgcggttcttgtcacgggcacagctgctgtagccgcagccaccattacagggaaagtggctgcagctgcagcgactagtgtggtcaacagtcgttactttgctaatggggctttatggttctcagatgctttgggccgggctgcaaaagcagcggcccatatcggtggaggaggaagcaattgatgtaaaaagtctttgggcttccttggaaaacataaataaatgatatgtgaggttttaaagc

SEQ ID NO: 107531 - protein, 211 aa, Arabidopsis thaliana
  peptide (1)..(211): Ceres Seq. ID no. 13650615
SLSGTAITAYVTFRDAYALDMAVLLSGATIVDQTVWISVYGVYLHESNNLRQEEDYSVTVTRSDAFASSPGEAITVAQQVVQTMLAKGYVLSKDAIGKAKALDESQRFSSLVATKLAEISHYLGLTQNIQSSMELVRSADEKYHFSDFTKSAVLVTGTAAVAAATITGKVAAAAATSVVNSRYFANGALWFSDALGRAAKAAAHIGGGGSN

SEQ ID NO: 107532 - protein, 191 aa, Arabidopsis thaliana; identical to SEQ ID NO: 79741
  peptide (1)..(191): Ceres Seq. ID no. 13650616

SEQ ID NO: 107533 - protein, 128 aa, Arabidopsis thaliana; identical to SEQ ID NO: 79742
  peptide (1)..(128): Ceres Seq. ID no. 13650617

SEQ ID NO: 107534 - DNA, 2534 bp, Arabidopsis thaliana
  misc_feature (1)..(2534): Ceres Seq. ID no. 13650622
  misc_feature (1)..(2534): Ortholog of  Ceres SEQ ID NO 13599900 as cited in SEQ ID NO 531
  misc_feature (1)..(2534): Ortholog of  Ceres SEQ ID NO 15171402 as cited in SEQ ID NO 51174
  misc_feature (1)..(2534): Ortholog of  Ceres SEQ ID NO 13596509 as cited in SEQ ID NO 62004
  misc_feature (1)..(2534): Ortholog of  Ceres SEQ ID NO 13659971 as cited in SEQ ID NO 67565
  misc_feature (1)..(2534): Ortholog of  Ceres SEQ ID NO 13500385 as cited in SEQ ID NO 67583
aattcaaaataaacctttctttctttctttctttcttctctatcattttatctgaatccgcctcccaaattcaatcctttaattttcaactccaaatcgatccttcaatcaatttctgaaacttttagtcatcatcagctcaatttcggatctccggagttgtatttttactcctttgtcggaggtaaaatagctcagtcgtcgttggtggcggcggcggggagaagcggaagggttatcggcgattatgcggtgggtcgacaaatcgggtcggggtcgttttccgtggtttgggaagggaggcatcttgttcatggcaccgtcgttgctatcaaggagatcgctatggctcggcttaataagaagttgcaagagagtctcatgtcggagattatcatcttaaggaagattaatcatcctaacatcattcgctttatcgacatgatcgaggctcccgggaagataaatttggtgttggagtactgtaaaggtggtgatctgtctatgtatattcacaaacatggaagtgttcctgaagctactgctaagcattttatgctgcagttagcggctggcttacaagttcttcgtgacaataatatcattcaccgcgatttaaagcctcagaatcttcttctatccacagatgataatgatgcagctctgaagattgccgattttggatttgcaagatcgttgcagcctaggggtttggcagaaactttatgtggttcaccactgtatatggccccagagattatgcagcttcaaaaatatgatgcaaaggcagatctctggagtgttggtgctatattatttcaacttgtgacaggcagaaccccttttacaggaaacagccaaattcagttgctccagaacattataagatcaactgaattacattttccagcagactgtagagatttgagtaccgactgtaaagatctatgccagaagctactgcgtcgtaatccagtggaacgtttgacgtttgaagagttttttcatcatcctttcctttcagacaaacaatcatatgatttcacaaggagtagattagattcacgaactatgaacgattttcattcatcaggaagcagtccctcaagaaatatagaagaaatttctcaagaagacgggttgccgttctttttagatgatgattctagtggacctgagggaagcccttcatcttttaaacatacttccccgatgaagtcatcttacggatttagtgttgaaagaagggaggcagcattaagtcctttgaaaaacatggatctttcttccagatatagtagagtcagtcatagagcagaaaccaataatttcaagtttgagggccatagattatcagatagaagccaattcaaaccgtcaagcttacctgattccagatcatttagtacccaaggaagaggggattctccagactcaatggatcaagattatgttctgatatctggaccaccggttgatataccatcatcttcatctggttctccgaagcctttcaattacccattcaaatcacattctcctcctgtagagttcatcaagagaaatgtaactaatttaacggctcctatgccaatagctagtgctactggcaacaaccttagtcgatttggaagcttggagagtcagaattgtatcccgggtacttcccatgggtctctggatcttgtagatgcttttgaacagccatcaactaacagcttgacaagaatccggtctttgcaaaagtgtgcagctgcaatagcagaattggttcatgaaaggggtgaaaatggtaagcatttagaagctttctcgatccaactggtgattcttgcaatttggaatcaagcactacacatctgtcatactcaggcagtctcgggtatagaaggaagcctgctccaagacattaacagagtaggaagaaatatcagccacggaggatcagagaagttattgcctcagattcagaaagaatttgtccaggaagtggagcgtgctgaagaacttgccaagtttgttgaatctgataatgcaaagatgccggatgcaatggagatgatacttcaagcagctcttgctcttggcataagtggaggagtagatgaagtgatgggagacgcagagaacgcaggaaacctctactcaaaagcggtgcgtttgttagtcttccttgcagtggaggcgcagacgctgattctcaatccacctttaacactcacaaactcagtaaggtatcgactcagaacatatattgactcactcataaccagattgaaacatctgcaatcacatagaagaacttcatatcctcagaagcaatgaggaggaacaaaaaaatccgaaatggttctcgtgtttgttttgttcagtgtctgtaattgtaatcatttgattgtacagccaaaaccaaaaaacgtaattcttaattcttttggggttaatccggagggacttgtaacattctctttgctgtgacgctcatcaattgtttctatagatttaattttaatatatttgaaaagaatctggct

SEQ ID NO: 107535 - protein, 659 aa, Arabidopsis thaliana
  peptide (1)..(659): Ceres Seq. ID no. 13650623
MARLNKKLQESLMSEIIILRKINHPNIIRFIDMIEAPGKINLVLEYCKGGDLSMYIHKHGSVPEATAKHFMLQLAAGLQVLRDNNIIHRDLKPQNLLLSTDDNDAALKIADFGFARSLQPRGLAETLCGSPLYMAPEIMQLQKYDAKADLWSVGAILFQLVTGRTPFTGNSQIQLLQNIIRSTELHFPADCRDLSTDCKDLCQKLLRRNPVERLTFEEFFHHPFLSDKQSYDFTRSRLDSRTMNDFHSSGSSPSRNIEEISQEDGLPFFLDDDSSGPEGSPSSFKHTSPMKSSYGFSVERREAALSPLKNMDLSSRYSRVSHRAETNNFKFEGHRLSDRSQFKPSSLPDSRSFSTQGRGDSPDSMDQDYVLISGPPVDIPSSSSGSPKPFNYPFKSHSPPVEFIKRNVTNLTAPMPIASATGNNLSRFGSLESQNCIPGTSHGSLDLVDAFEQPSTNSLTRIRSLQKCAAAIAELVHERGENGKHLEAFSIQLVILAIWNQALHICHTQAVSGIEGSLLQDINRVGRNISHGGSEKLLPQIQKEFVQEVERAEELAKFVESDNAKMPDAMEMILQAALALGISGGVDEVMGDAENAGNLYSKAVRLLVFLAVEAQTLILNPPLTLTNSVRYRLRTYIDSLITRLKHLQSHRRTSYPQKQ

SEQ ID NO: 107536 - protein, 647 aa, Arabidopsis thaliana
  peptide (1)..(647): Ceres Seq. ID no. 13650624
MSEIIILRKINHPNIIRFIDMIEAPGKINLVLEYCKGGDLSMYIHKHGSVPEATAKHFMLQLAAGLQVLRDNNIIHRDLKPQNLLLSTDDNDAALKIADFGFARSLQPRGLAETLCGSPLYMAPEIMQLQKYDAKADLWSVGAILFQLVTGRTPFTGNSQIQLLQNIIRSTELHFPADCRDLSTDCKDLCQKLLRRNPVERLTFEEFFHHPFLSDKQSYDFTRSRLDSRTMNDFHSSGSSPSRNIEEISQEDGLPFFLDDDSSGPEGSPSSFKHTSPMKSSYGFSVERREAALSPLKNMDLSSRYSRVSHRAETNNFKFEGHRLSDRSQFKPSSLPDSRSFSTQGRGDSPDSMDQDYVLISGPPVDIPSSSSGSPKPFNYPFKSHSPPVEFIKRNVTNLTAPMPIASATGNNLSRFGSLESQNCIPGTSHGSLDLVDAFEQPSTNSLTRIRSLQKCAAAIAELVHERGENGKHLEAFSIQLVILAIWNQALHICHTQAVSGIEGSLLQDINRVGRNISHGGSEKLLPQIQKEFVQEVERAEELAKFVESDNAKMPDAMEMILQAALALGISGGVDEVMGDAENAGNLYSKAVRLLVFLAVEAQTLILNPPLTLTNSVRYRLRTYIDSLITRLKHLQSHRRTSYPQKQ

SEQ ID NO: 107537 - protein, 627 aa, Arabidopsis thaliana
  peptide (1)..(627): Ceres Seq. ID no. 13650625
MIEAPGKINLVLEYCKGGDLSMYIHKHGSVPEATAKHFMLQLAAGLQVLRDNNIIHRDLKPQNLLLSTDDNDAALKIADFGFARSLQPRGLAETLCGSPLYMAPEIMQLQKYDAKADLWSVGAILFQLVTGRTPFTGNSQIQLLQNIIRSTELHFPADCRDLSTDCKDLCQKLLRRNPVERLTFEEFFHHPFLSDKQSYDFTRSRLDSRTMNDFHSSGSSPSRNIEEISQEDGLPFFLDDDSSGPEGSPSSFKHTSPMKSSYGFSVERREAALSPLKNMDLSSRYSRVSHRAETNNFKFEGHRLSDRSQFKPSSLPDSRSFSTQGRGDSPDSMDQDYVLISGPPVDIPSSSSGSPKPFNYPFKSHSPPVEFIKRNVTNLTAPMPIASATGNNLSRFGSLESQNCIPGTSHGSLDLVDAFEQPSTNSLTRIRSLQKCAAAIAELVHERGENGKHLEAFSIQLVILAIWNQALHICHTQAVSGIEGSLLQDINRVGRNISHGGSEKLLPQIQKEFVQEVERAEELAKFVESDNAKMPDAMEMILQAALALGISGGVDEVMGDAENAGNLYSKAVRLLVFLAVEAQTLILNPPLTLTNSVRYRLRTYIDSLITRLKHLQSHRRTSYPQKQ

SEQ ID NO: 107538 - DNA, 1877 bp, Arabidopsis thaliana
  misc_feature (1)..(1877): Ceres Seq. ID no. 13650633
  misc_feature (1)..(1877): Ortholog of  Ceres SEQ ID NO 12616225 as cited in SEQ ID NO 68930
atatatcactgttcttcttctatattggagttcatctcttttgtttctaaagaaagagagagagagagagagagaagagaagatgttgccaggcatactattatgctcacttaatcccaggaatcacagcaaaaagaaaaagagtgagcgagagagcttagaaactgagcccaaagacattgactactggtactctgttcaattcaatcgagatcctccgagattcgctctcaaatctgagaataacaatcaccattcccgcagtaagagcggcggcgatttttgcaagaagaagaagagaggagaaatggcgaacaaggtttctaacttctcggatctgattcaacgagttacggcgtcttgtttgttgcatccactctccgccggccggcaagatctcgctgtgaatcgccgggaagagtacgatactgaagaagaggagaatgaggaggaaggtgagattcagtacgaagacgcattggagaaggagaatggtaaagatgagacaattagggctaagaacggaaggaacggtgtgagtgttgagacggtgcaggagatggagatggtgatggacgaagttttcacggcggctgctgctatgaagagagcttacgttgcgcttcaggaagctcattcgccgtgggatccggagaagatgcacgatgctgatatggcgatggtggctgagctgagaaggattggttcattgagggaaagattcaggaggatgagaggtaccggaagtggtggtcgaaggaaaaacggcgccggaagaggaatgctgagagaggccgtggcgccttatgaggcggttgtgaaggagctgaagaaagaagtgaaagtgaaagatactgagattgagaatctgaaggagaaagtcaaagtggcttctatggccaacggtaacggaggcaagaaacaccgattgctttcaagccggaaagttaactgtaccacacagattgctgcgtctccggtgccggagttatttgagatgacaatgattcaggtgaaagaagcatcaaagtctttcacagggattctattgtcactaatgcgagctgcacattgggacattgcagcggctgttcgatccattgaagccgcttcagcttcatccggcggaatgtctgcttcttcgtttgcatcctcggttcagtcatctgtcccgaaccagcacgcgaagtttgctcttgagtcttacatctgtaggaaaatcttccaaggatttgatcacgaaacgttttacatggatggaggcttatcttctcttatcaacccggatcagtaccgtcgtgactgctttgcgcagttcaaagatatgaaagcaatggatcctatggagttgctagggatcttaccaacttgccattttggtaaattctgctcgaagaagtacctttcgatcattcaccaaaaaatggaagagtcgttgttcggggactcggaacagcgggagttggttgtagccggtaaccacccaagaagtcagttctatggagagttcttggggctagctaaagcagtctggctgcttcatctcctggcattctcgctcgacccatccccgagtcactttgaagcaaacagaggagccgagtttcactctcagtacatggagagtgtcgtgaggttttcggatggccgtgttcctgcgggtcaagttgttggatttcctgtttgtccaggattcaagcttagccatcaagggaaaggatcaatcatcaaatccagagtttacttggttccaagggcttaaaaaggtttctttgagttcactgtttcttaggaatacattatgtcctcgtgtgttgtttaagactttaagacaatctagcttcggaaaaatcttgaaataaagagaccgttcgtat

SEQ ID NO: 107539 - protein, 586 aa, Arabidopsis thaliana
  peptide (1)..(586): Ceres Seq. ID no. 13650634
YITVLLLYWSSSLLFLKKEREREREEKMLPGILLCSLNPRNHSKKKKSERESLETEPKDIDYWYSVQFNRDPPRFALKSENNNHHSRSKSGGDFCKKKKRGEMANKVSNFSDLIQRVTASCLLHPLSAGRQDLAVNRREEYDTEEEENEEEGEIQYEDALEKENGKDETIRAKNGRNGVSVETVQEMEMVMDEVFTAAAAMKRAYVALQEAHSPWDPEKMHDADMAMVAELRRIGSLRERFRRMRGTGSGGRRKNGAGRGMLREAVAPYEAVVKELKKEVKVKDTEIENLKEKVKVASMANGNGGKKHRLLSSRKVNCTTQIAASPVPELFEMTMIQVKEASKSFTGILLSLMRAAHWDIAAAVRSIEAASASSGGMSASSFASSVQSSVPNQHAKFALESYICRKIFQGFDHETFYMDGGLSSLINPDQYRRDCFAQFKDMKAMDPMELLGILPTCHFGKFCSKKYLSIIHQKMEESLFGDSEQRELVVAGNHPRSQFYGEFLGLAKAVWLLHLLAFSLDPSPSHFEANRGAEFHSQYMESVVRFSDGRVPAGQVVGFPVCPGFKLSHQGKGSIIKSRVYLVPRA

SEQ ID NO: 107540 - protein, 559 aa, Arabidopsis thaliana
  peptide (1)..(559): Ceres Seq. ID no. 13650635
MLPGILLCSLNPRNHSKKKKSERESLETEPKDIDYWYSVQFNRDPPRFALKSENNNHHSRSKSGGDFCKKKKRGEMANKVSNFSDLIQRVTASCLLHPLSAGRQDLAVNRREEYDTEEEENEEEGEIQYEDALEKENGKDETIRAKNGRNGVSVETVQEMEMVMDEVFTAAAAMKRAYVALQEAHSPWDPEKMHDADMAMVAELRRIGSLRERFRRMRGTGSGGRRKNGAGRGMLREAVAPYEAVVKELKKEVKVKDTEIENLKEKVKVASMANGNGGKKHRLLSSRKVNCTTQIAASPVPELFEMTMIQVKEASKSFTGILLSLMRAAHWDIAAAVRSIEAASASSGGMSASSFASSVQSSVPNQHAKFALESYICRKIFQGFDHETFYMDGGLSSLINPDQYRRDCFAQFKDMKAMDPMELLGILPTCHFGKFCSKKYLSIIHQKMEESLFGDSEQRELVVAGNHPRSQFYGEFLGLAKAVWLLHLLAFSLDPSPSHFEANRGAEFHSQYMESVVRFSDGRVPAGQVVGFPVCPGFKLSHQGKGSIIKSRVYLVPRA

SEQ ID NO: 107541 - protein, 484 aa, Arabidopsis thaliana
  peptide (1)..(484): Ceres Seq. ID no. 13650636
MANKVSNFSDLIQRVTASCLLHPLSAGRQDLAVNRREEYDTEEEENEEEGEIQYEDALEKENGKDETIRAKNGRNGVSVETVQEMEMVMDEVFTAAAAMKRAYVALQEAHSPWDPEKMHDADMAMVAELRRIGSLRERFRRMRGTGSGGRRKNGAGRGMLREAVAPYEAVVKELKKEVKVKDTEIENLKEKVKVASMANGNGGKKHRLLSSRKVNCTTQIAASPVPELFEMTMIQVKEASKSFTGILLSLMRAAHWDIAAAVRSIEAASASSGGMSASSFASSVQSSVPNQHAKFALESYICRKIFQGFDHETFYMDGGLSSLINPDQYRRDCFAQFKDMKAMDPMELLGILPTCHFGKFCSKKYLSIIHQKMEESLFGDSEQRELVVAGNHPRSQFYGEFLGLAKAVWLLHLLAFSLDPSPSHFEANRGAEFHSQYMESVVRFSDGRVPAGQVVGFPVCPGFKLSHQGKGSIIKSRVYLVPRA

SEQ ID NO: 107542 - DNA, 1244 bp, Arabidopsis thaliana
  misc_feature (1)..(1244): Ceres Seq. ID no. 13650644
  misc_feature (1)..(1244): Ortholog of  Ceres SEQ ID NO 14311243 as cited in SEQ ID NO 20434
  misc_feature (1)..(1244): Ortholog of  Ceres SEQ ID NO 12609528 as cited in SEQ ID NO 51902
gggaagaagctttgaattaaaaaatagaagcaatagtttttgggggacaagcccggccgacgaatcggcggcgagacgttctttgtcaccgattgacatattcaaaaacgacgaagctaggtaaaggaacggagagaagagtcgataatagaagcgtagagatgggaaatcagaagctcaaatggacggcggaggaagaggaggcgttactcgccggagttaggaagcatggccctggaaagtggaagaatattctccgcgatcctgaattagctgagcagctctctagtcgctctaacatcgacctcaaggataaatggcgtaatttaagtgttgctcctggtattcaaggctctaaggataagatacggacaccaaaaatcaaagctgctgcttttcatctggctgccgctgctgctgccgctattgtaactcctactcatagtggtcactcttctccagttgctactcttccccgaagtggatcttctgatttgagcattgatgatagttttaacattgtagctgatccaaagaatgctcccaggtatgatggaatgatatttgaagctctttcaaacttgacggatgctaatggatctgatgtcagcgcaattttcaacttcattgagcaacgacaagaagtgccaccaaatttcaggaggatgcttagttcaagattgaggaggcttgcagctcagggaaagcttgaaaaggttagccacttaaaatcaacacagaacttctataagatgaatgataatagcttggtacaaagaacaccacatgtagcgagaccaaaagagagcaacacgaaatcccggcagcagacaaacagtcagggaccctctatttcacagcagattgttgaagcttcaataacagcagcttataagctcgtagaagtagagaacaaattagatgtgtcgaaaggagctgcagaagagatagagagactgatgaaactggcagaagaggctgatgagatgctagtgatagcgagagagatgcacgaagaatgtagtcagggaaagattatgtacttgaattgaggttgatggaacaaaagaagcagcacagaatctttggagtttcatcatcagagacgctctttgtttttggtatatattactaatagtaataggctattagcttgcattctcttcttcctatgtttttagtgatacgttacgaactcaggaactgtttggacaaaaaatgacactaactttctttcatttatc

SEQ ID NO: 107543 - protein, 296 aa, Arabidopsis thaliana
  peptide (1)..(296): Ceres Seq. ID no. 13650645
MGNQKLKWTAEEEEALLAGVRKHGPGKWKNILRDPELAEQLSSRSNIDLKDKWRNLSVAPGIQGSKDKIRTPKIKAAAFHLAAAAAAAIVTPTHSGHSSPVATLPRSGSSDLSIDDSFNIVADPKNAPRYDGMIFEALSNLTDANGSDVSAIFNFIEQRQEVPPNFRRMLSSRLRRLAAQGKLEKVSHLKSTQNFYKMNDNSLVQRTPHVARPKESNTKSRQQTNSQGPSISQQIVEASITAAYKLVEVENKLDVSKGAAEEIERLMKLAEEADEMLVIAREMHEECSQGKIMYLN

SEQ ID NO: 107544 - protein, 164 aa, Arabidopsis thaliana
  peptide (1)..(164): Ceres Seq. ID no. 13650646
MIFEALSNLTDANGSDVSAIFNFIEQRQEVPPNFRRMLSSRLRRLAAQGKLEKVSHLKSTQNFYKMNDNSLVQRTPHVARPKESNTKSRQQTNSQGPSISQQIVEASITAAYKLVEVENKLDVSKGAAEEIERLMKLAEEADEMLVIAREMHEECSQGKIMYLN

SEQ ID NO: 107545 - DNA, 926 bp, Arabidopsis thaliana
  misc_feature (1)..(926): Ceres Seq. ID no. 13650650
  misc_feature (1)..(926): Ortholog of  Ceres SEQ ID NO 12616324 as cited in SEQ ID NO 63414
attaaaaagctaatatggctactagggaagagagagataagtatagatcagtccttgaagatgcaggacaggttcaatggaggtatgataaccctccagacttcaatagtgtgaaccagctctttgaagaaggccagactaaggtccttcggttaatatatgtttcacttaaggtatgtgctatgtttatattttgtgaatctgattcgttgatagtatttgattttgagcgcaggtgtggccagaaggttcgttagaagagacagtgcaaaacgcgatcaagtcatgggagatggagttctcacataagatccgtttacaggacttcaagactataaaccctgagaagtttaagctctttgtcaatgggagagaaggtttatcagctgaagagacgcttaggcttgggagttacaatgctttgctcaagaactctttgcctgaagagtttcagtactataagcccgaggaagagagctttgagtcatcacatgacgcctttagatctgctttaccacgcgggtttgcgtgggaaatactctctgtgtactcggggcctcctgttatagccttcaaatttagacactggggatactttgaaggaactttcaaaggtcatgctcctactggggaaatggttcaattcctgggtctaggagttctaaaggttgacgaatcacttagagcagaggagattgagatttactatgatccaggagagctgttcgggggactactcaagggacctcctatatcagagaccaaaaccacagacagtggagacaacactgcagagaaacaaagctgcccattcacacactaagataataagaaaagtagaagtgtatttgaccctttaaagaatatattgtaacagtctcttggttattgatgcatggaataaattataagttatgttaggcgtc

SEQ ID NO: 107546 - protein, 176 aa, Arabidopsis thaliana; identical to SEQ ID NO: 25833
  peptide (1)..(176): Ceres Seq. ID no. 13650651

SEQ ID NO: 107547 - DNA, 660 bp, Arabidopsis thaliana
  misc_feature (1)..(660): Ceres Seq. ID no. 13650658
  misc_feature (1)..(660): Ortholog of  Ceres SEQ ID NO 15174240 as cited in SEQ ID NO 61866
attccccatcgcacagacccccctaagaatccgagagagaagaagagataatgcagatcttcgtcaaaaccctcaccggcaaaactataaccctagaagttgagagcagcgacaccatcgacaatgttaaagccaaaatccaggacaaagagggcataccacctgatcaacagaggctgatttttgctggtaagcaattggaagatggccggaccttagctgattacaacatccagaaagagtctactcttcatcttgtcctcaggctcagaggtggaaccatgatcaaggtgaagacactcactggaaaagaaatcgagattgatatcgaaccaaccgacactattgatcggatcaaagaacgtgttgaagagaaagaaggcatccctcctgttcaacaaaggctcatatatgccggaaaacagcttgctgatgacaaaacggccaaagattatgcgatagagggaggctctgttcttcatttggttcttgctcttaggggtggtcttctctgatcttaataaataagcttttcaacaaacatcttttccctcactattgtcctccttatgtggaattcatgacacaccaaaattgctatgggaaattggaatattatgctctgcttgtgtgtttggatcatattacttgtatttttct

SEQ ID NO: 107548 - protein, 154 aa, Arabidopsis thaliana; identical to SEQ ID NO: 99020
  peptide (1)..(154): Ceres Seq. ID no. 13650659

SEQ ID NO: 107549 - protein, 77 aa, Arabidopsis thaliana; identical to SEQ ID NO: 99021
  peptide (1)..(77): Ceres Seq. ID no. 13650660

SEQ ID NO: 107550 - DNA, 882 bp, Arabidopsis thaliana
  misc_feature (1)..(882): Ceres Seq. ID no. 13650661
  misc_feature (1)..(882): Ortholog of  Ceres SEQ ID NO 14315338 as cited in SEQ ID NO 60283
tctggaagagaggatgatggtgacatttgggagattttaatgcgaactcatagtgaggtcttaaacactcttcaatcacggttgacaaaattacagattgtaagacatttctgggaacgtagtgatattaaaggcgcgattgcggccttaagaaaactgtcagatcactctgttcaagcagatgtgatcaatattctaacagacaaaacagagattttaacattagatttattttctcaattagcacccgtcctcacaggcttattgggcagcaagactgagaggcctgtaaatgtctccttggaaatgctcttgaagcttgtagcagtgtttggcacagttatacaatcaactgtttcagcacgacgagttgtcggcgttgatcttcatgcagaggaaaggttacagatctgccaaagctgttctgcggaattgcaaaaggttcagaagattcttccactgctgacaagaagaggtggtcttatagcaagaaaggcacaagaactaaacctagttcttcaaacaccatagctcctggttcaaagtcaagaccactcggaatcacttgcgaactgtaaccccctcctgctgagttttccaatttgtacaatgtacattatcaagaaccatcttcatgttcctcccggtgcttttgtattgaagattcgctgaaaagtcgcaggttcttgtgcggggtttgatatagaattgtgccaggagaacatgaaaagtcactcggggaaaaactcggtatattgctgtaaatcaatctgtctgggattagagttgtatgtgcttcagattcttgattcagtgaatctcaaatgtgtagctgaaatggcaattacaatgtcgttctatgtgaatgtaatgtgcaatcct

SEQ ID NO: 107551 - protein, 176 aa, Arabidopsis thaliana
  peptide (1)..(176): Ceres Seq. ID no. 13650662
SGREDDGDIWEILMRTHSEVLNTLQSRLTKLQIVRHFWERSDIKGAIAALRKLSDHSVQADVINILTDKTEILTLDLFSQLAPVLTGLLGSKTERPVNVSLEMLLKLVAVFGTVIQSTVSARRVVGVDLHAEERLQICQSCSAELQKVQKILPLLTRRGGLIARKAQELNLVLQTP

SEQ ID NO: 107552 - protein, 163 aa, Arabidopsis thaliana
  peptide (1)..(163): Ceres Seq. ID no. 13650663
MRTHSEVLNTLQSRLTKLQIVRHFWERSDIKGAIAALRKLSDHSVQADVINILTDKTEILTLDLFSQLAPVLTGLLGSKTERPVNVSLEMLLKLVAVFGTVIQSTVSARRVVGVDLHAEERLQICQSCSAELQKVQKILPLLTRRGGLIARKAQELNLVLQTP

SEQ ID NO: 107553 - DNA, 1268 bp, Arabidopsis thaliana
  misc_feature (1)..(1268): Ceres Seq. ID no. 13650695
  misc_feature (1)..(1268): Ortholog of  Ceres SEQ ID NO 13654431 as cited in SEQ ID NO 67761
catcgctgttccagagctaaaaaaccctaatcttctcgggcttgtcatctccaaaattcagggttcaatttcttcaccatagaagatatagcgttatctccggcgtctaaggggactttagggacattcttgtggtggagaaatgggagacgaccagctagatttcgagctcccagaagaggttttgtcggtgattccgatggacccttttgagcagctggatctcgcgaggaagattacatcaatggcgatagcttcaagggtgtcgaatctggactctgaggtggttgaattgagacagaagcttctgggtaaggaaagtgttgtccgtgagcttgaggagaaagcgtctcgcctggagagagactgccgcgaggctgattcgagattgaaggtcgttctcgaagataatatgaacctgacaaaggagaaggattcactggcaatgactgtaacgaaactcacccgtgatttggctaagctggagacattcaagcggcagttaatcaaatccctgagcgatgagagtggtccgcaaacagaacctgttgatattaggacatgcgaccagccaggatcatatccaggcaaagatggaaggatcaatgcacactcaattaaacaagcttacagtggatctacagacacgaacaatccagttgttgaagcttcaaaatacactggaaacaaattttcaatgacatcatacatatctccacgtcttaccccaaccgcaacaccaaagatcatctccacaagtgtgtctcctcgaggctattctgcagcaggttctcctaaaagaacatcaggtgcagtttctcccacaaaggcaacactctggtacccgtcaagtcagcaatcatcggctgcgaattctcctcctcgcaaccgcacactcccagctcgtacaccgcggatggatggtaaagaattcttccggcaagccaggagccgattatcctatgaacaattcagttccttcttagctaacatcaaagagctcaacgcccagaagcaaacccgagaggaaactctgaggaaagcagatgagatatttggggaagagaacaaagatctttatttatctttccaaggtctccttaacagaaacatgcgttaaactttcataagccgttatcttgaatctgggccaatgtgataggatggatattaaccattgtagtatgtgtattccctacgggatttagtttgcaaagtgttttttttgtttcatcacaaacaaagaagaagaagtatctcgttttggg

SEQ ID NO: 107554 - protein, 325 aa, Arabidopsis thaliana
  peptide (1)..(325): Ceres Seq. ID no. 13650696
MGDDQLDFELPEEVLSVIPMDPFEQLDLARKITSMAIASRVSNLDSEVVELRQKLLGKESVVRELEEKASRLERDCREADSRLKVVLEDNMNLTKEKDSLAMTVTKLTRDLAKLETFKRQLIKSLSDESGPQTEPVDIRTCDQPGSYPGKDGRINAHSIKQAYSGSTDTNNPVVEASKYTGNKFSMTSYISPRLTPTATPKIISTSVSPRGYSAAGSPKRTSGAVSPTKATLWYPSSQQSSAANSPPRNRTLPARTPRMDGKEFFRQARSRLSYEQFSSFLANIKELNAQKQTREETLRKADEIFGEENKDLYLSFQGLLNRNMR

SEQ ID NO: 107555 - protein, 306 aa, Arabidopsis thaliana
  peptide (1)..(306): Ceres Seq. ID no. 13650697
MDPFEQLDLARKITSMAIASRVSNLDSEVVELRQKLLGKESVVRELEEKASRLERDCREADSRLKVVLEDNMNLTKEKDSLAMTVTKLTRDLAKLETFKRQLIKSLSDESGPQTEPVDIRTCDQPGSYPGKDGRINAHSIKQAYSGSTDTNNPVVEASKYTGNKFSMTSYISPRLTPTATPKIISTSVSPRGYSAAGSPKRTSGAVSPTKATLWYPSSQQSSAANSPPRNRTLPARTPRMDGKEFFRQARSRLSYEQFSSFLANIKELNAQKQTREETLRKADEIFGEENKDLYLSFQGLLNRNMR

SEQ ID NO: 107556 - protein, 291 aa, Arabidopsis thaliana
  peptide (1)..(291): Ceres Seq. ID no. 13650698
MAIASRVSNLDSEVVELRQKLLGKESVVRELEEKASRLERDCREADSRLKVVLEDNMNLTKEKDSLAMTVTKLTRDLAKLETFKRQLIKSLSDESGPQTEPVDIRTCDQPGSYPGKDGRINAHSIKQAYSGSTDTNNPVVEASKYTGNKFSMTSYISPRLTPTATPKIISTSVSPRGYSAAGSPKRTSGAVSPTKATLWYPSSQQSSAANSPPRNRTLPARTPRMDGKEFFRQARSRLSYEQFSSFLANIKELNAQKQTREETLRKADEIFGEENKDLYLSFQGLLNRNMR

SEQ ID NO: 107557 - DNA, 453 bp, Arabidopsis thaliana
  misc_feature (1)..(453): Ceres Seq. ID no. 13650699
  misc_feature (1)..(453): Ortholog of  Ceres SEQ ID NO 15179001 as cited in SEQ ID NO 0
gtgtctctctgtccagagagaaatggcagcatcatcagtactactctcgtgcttcaaatcccatcatcaaccaaaccttctccatggctgcaactactcatctaaccaaacactcctcagattcaacttttcaaccccaaaacctctcctgatctcctcacggagctgctcacgacgattcagagtcttgtcagagaccatcaccgtcaaattggaagatcacggggttatggctttgtatgttactcttccaaagcagaaatggaaaccgctcttgaatcgcttgacggatttgagctggagggtcgggcgattcgagtaaaccttgctcaagggaagaaattttgatatcatacaacaacattgtgtaatcatttagagttttatacattagagttatgtttatattgattgaactaattaactcaaaagatcaataaaactttttatgcc

SEQ ID NO: 107558 - protein, 106 aa, Arabidopsis thaliana
  peptide (1)..(106): Ceres Seq. ID no. 13650700
CLSVQREMAASSVLLSCFKSHHQPNLLHGCNYSSNQTLLRFNFSTPKPLLISSRSCSRRFRVLSETITVKLEDHGVMALYVTLPKQKWKPLLNRLTDLSWRVGRFE

SEQ ID NO: 107559 - protein, 99 aa, Arabidopsis thaliana
  peptide (1)..(99): Ceres Seq. ID no. 13650701
MAASSVLLSCFKSHHQPNLLHGCNYSSNQTLLRFNFSTPKPLLISSRSCSRRFRVLSETITVKLEDHGVMALYVTLPKQKWKPLLNRLTDLSWRVGRFE

SEQ ID NO: 107560 - DNA, 1546 bp, Arabidopsis thaliana
  misc_feature (1)..(1546): Ceres Seq. ID no. 13650705
acaaactctctctcttctctctctctcccacacacacgcttttatttattttggagctaatcggaaaacaaaaaagcaacggccaaagcaatgaggaaagatgatctctgcatcactgttcctaccttcttccgatgtcctatatctctcgacgttatgaaatctccggtgagtctttgcaccggcgttacctacgatcgagctagtatccaacggtggcttgacggcgggaataacacttgtccggcgacgatgcagattcttcagaataaagatttcataccgaatcggactcttcaacgtcttatcgagatttggtctgattctgttcgtcgtcgaacttgtgttgaatcggcggaattagctgctccgacgagagacgagatcgccgatgcgatcgatagagtgaagatcgagaaagaagaaagagatgatcgcgaggttttgtcgaagattgttcgattcgggagagaatctgatgataacagaggatttctcgccggaaaagatgatttcgtgaaacttctcgtggatctgattaatcaggtggatttcgaaaccacctccgccgcgaaatctctggttgttcaagaagcggtgaagattctgagtacgattcgaagcaaagtctcagatcggagacggttttcgaatctgattttaaccaacggtcgagatcggttatcggtgatcgtctacttgtttaaaaccgggaatgtcgaattgaaaattgattgcgccggtttacttgagttcatcgccgtcgacgctgaatcaaagctgttaatcgccgagagagatggattaatcacggagctaatgaaatcgattagtaaagattctgatttaagtttaatcgaatcgagtttatcgtgcttgatcgcgattagctcaccgaaacgtgtgaaactcaatctcctccgagagaaactcatcggagatgttacgaaactgttatcagattcaacgtcgtcgttgagcgtttcggtgacggagaaatgcttgaagcttctggagattttagcatctacaaaggaagggagatcggaaatttgcggcggagatggcgagtgtttgaagacggtggttaagaagctgatgaaagtgtcaacggcggcgacggagcacgccgtgacggtgctgtggagtgtttcttatctattcaaagaagataaagctttggaagctgttacaagtgttaacggagttacgaaaattctgttactgttacagagcaattgctctcccgccgttagacgtatgttaacggatcttcttaaggtcttcaaggtgaattcaagatcttgcctttcggcttacgacaccaaaacgacacatatcatgccgttttaaatcaattcttttactacttactagggttcgtttttaggatttgtttcttgggaaagaggtaagaacaattgtaaaactaaaatgaaatttttgaatagtgaatataaactaaaaaagaagattcaattcattgctcattgaatgtgtagtctattattctcttattaatgtaaagtaaaatcaattaatgacg

SEQ ID NO: 107561 - protein, 420 aa, Arabidopsis thaliana
  peptide (1)..(420): Ceres Seq. ID no. 13650706
MRKDDLCITVPTFFRCPISLDVMKSPVSLCTGVTYDRASIQRWLDGGNNTCPATMQILQNKDFIPNRTLQRLIEIWSDSVRRRTCVESAELAAPTRDEIADAIDRVKIEKEERDDREVLSKIVRFGRESDDNRGFLAGKDDFVKLLVDLINQVDFETTSAAKSLVVQEAVKILSTIRSKVSDRRRFSNLILTNGRDRLSVIVYLFKTGNVELKIDCAGLLEFIAVDAESKLLIAERDGLITELMKSISKDSDLSLIESSLSCLIAISSPKRVKLNLLREKLIGDVTKLLSDSTSSLSVSVTEKCLKLLEILASTKEGRSEICGGDGECLKTVVKKLMKVSTAATEHAVTVLWSVSYLFKEDKALEAVTSVNGVTKILLLLQSNCSPAVRRMLTDLLKVFKVNSRSCLSAYDTKTTHIMPF

SEQ ID NO: 107562 - protein, 398 aa, Arabidopsis thaliana
  peptide (1)..(398): Ceres Seq. ID no. 13650707
MKSPVSLCTGVTYDRASIQRWLDGGNNTCPATMQILQNKDFIPNRTLQRLIEIWSDSVRRRTCVESAELAAPTRDEIADAIDRVKIEKEERDDREVLSKIVRFGRESDDNRGFLAGKDDFVKLLVDLINQVDFETTSAAKSLVVQEAVKILSTIRSKVSDRRRFSNLILTNGRDRLSVIVYLFKTGNVELKIDCAGLLEFIAVDAESKLLIAERDGLITELMKSISKDSDLSLIESSLSCLIAISSPKRVKLNLLREKLIGDVTKLLSDSTSSLSVSVTEKCLKLLEILASTKEGRSEICGGDGECLKTVVKKLMKVSTAATEHAVTVLWSVSYLFKEDKALEAVTSVNGVTKILLLLQSNCSPAVRRMLTDLLKVFKVNSRSCLSAYDTKTTHIMPF

SEQ ID NO: 107563 - protein, 366 aa, Arabidopsis thaliana
  peptide (1)..(366): Ceres Seq. ID no. 13650708
MQILQNKDFIPNRTLQRLIEIWSDSVRRRTCVESAELAAPTRDEIADAIDRVKIEKEERDDREVLSKIVRFGRESDDNRGFLAGKDDFVKLLVDLINQVDFETTSAAKSLVVQEAVKILSTIRSKVSDRRRFSNLILTNGRDRLSVIVYLFKTGNVELKIDCAGLLEFIAVDAESKLLIAERDGLITELMKSISKDSDLSLIESSLSCLIAISSPKRVKLNLLREKLIGDVTKLLSDSTSSLSVSVTEKCLKLLEILASTKEGRSEICGGDGECLKTVVKKLMKVSTAATEHAVTVLWSVSYLFKEDKALEAVTSVNGVTKILLLLQSNCSPAVRRMLTDLLKVFKVNSRSCLSAYDTKTTHIMPF

SEQ ID NO: 107564 - DNA, 1265 bp, Arabidopsis thaliana
  misc_feature (1)..(1265): Ceres Seq. ID no. 13650709
  misc_feature (1)..(1265): Ortholog of  Ceres SEQ ID NO 15179824 as cited in SEQ ID NO 66250
  misc_feature (1)..(1265): Ortholog of  Ceres SEQ ID NO 13657872 as cited in SEQ ID NO 66357
gtctctctcaaagcctacacactcattctcactctgtttctacaaccctaaatctcttttcatttacagacagaaatggttagattcatagaagaaaacacaaaacttgtagaaaaagaaaccgggaacaaatcaaacaacgatgtaacaacaacgaagaagaaagctcttcaagatatcattatcaacaatggagtaggattgatcaattcatgggttgattcaatgagagcttgttcccctactcatcttaaatctttgttgaaacaaagctcttggctcacggaacatccatcagctttggatatgtttgaagagattcttcacctttctgaaggaaaacaaatcgttatgttcttggattatgatggcactttatctcccattgttgatgatccagatcgagctttcatgtctagaaagatgagaagaactgtgaggaaactagcaaactgtttcccgacggccatagttagtgggagatgcatagaaaaggtttataactttgtaaaactaactgagttgtactatgctggaagtcatggaatggacatcaaaggaccagagcaagggtccaaatatgagcaaattttacaggatagtaaatctcttctttgccaaccagctacagagttcctccccatgatcgacgaggtttatcataaattagtggagaaaacaaaatctactcccggagcccaagtagagaacaacaaattttgtgtctctgttcacttccgacgcgtagatgaaaataactggagtgatttggctaaccaagttcgatcagtaatgaaagactaccctaagctccgtcttactcaaggaagaaaagttttggaggttcgtccgattattaaatgggacaaaggcaaagcactcgagtttttattagagtcacttggatacgctaattgtaccgacgttttccctctttatatcggagatgatcgcaccgacgaagatgcattcaaggtattgagagaacgaagacaaggtcttggcattcttgtatctaaatttccaaaggagactagcgcgtcttattcactgcaagaacccgatgaggttatggagttcttgcaacgtttagtggaatggaaacaattgagatctggagcatgatgagagctataactacagaagaatcgtttcttcttaattagtaacttgttaattttattttattttcttgctctcatatattgtactcaacgcgtatgtaaaatgtttataagaaaattgtagatccatcattctcaagg

SEQ ID NO: 107565 - protein, 349 aa, Arabidopsis thaliana
  peptide (1)..(349): Ceres Seq. ID no. 13650710
MVRFIEENTKLVEKETGNKSNNDVTTTKKKALQDIIINNGVGLINSWVDSMRACSPTHLKSLLKQSSWLTEHPSALDMFEEILHLSEGKQIVMFLDYDGTLSPIVDDPDRAFMSRKMRRTVRKLANCFPTAIVSGRCIEKVYNFVKLTELYYAGSHGMDIKGPEQGSKYEQILQDSKSLLCQPATEFLPMIDEVYHKLVEKTKSTPGAQVENNKFCVSVHFRRVDENNWSDLANQVRSVMKDYPKLRLTQGRKVLEVRPIIKWDKGKALEFLLESLGYANCTDVFPLYIGDDRTDEDAFKVLRERRQGLGILVSKFPKETSASYSLQEPDEVMEFLQRLVEWKQLRSGA

SEQ ID NO: 107566 - protein, 299 aa, Arabidopsis thaliana
  peptide (1)..(299): Ceres Seq. ID no. 13650711
MRACSPTHLKSLLKQSSWLTEHPSALDMFEEILHLSEGKQIVMFLDYDGTLSPIVDDPDRAFMSRKMRRTVRKLANCFPTAIVSGRCIEKVYNFVKLTELYYAGSHGMDIKGPEQGSKYEQILQDSKSLLCQPATEFLPMIDEVYHKLVEKTKSTPGAQVENNKFCVSVHFRRVDENNWSDLANQVRSVMKDYPKLRLTQGRKVLEVRPIIKWDKGKALEFLLESLGYANCTDVFPLYIGDDRTDEDAFKVLRERRQGLGILVSKFPKETSASYSLQEPDEVMEFLQRLVEWKQLRSGA

SEQ ID NO: 107567 - protein, 272 aa, Arabidopsis thaliana
  peptide (1)..(272): Ceres Seq. ID no. 13650712
MFEEILHLSEGKQIVMFLDYDGTLSPIVDDPDRAFMSRKMRRTVRKLANCFPTAIVSGRCIEKVYNFVKLTELYYAGSHGMDIKGPEQGSKYEQILQDSKSLLCQPATEFLPMIDEVYHKLVEKTKSTPGAQVENNKFCVSVHFRRVDENNWSDLANQVRSVMKDYPKLRLTQGRKVLEVRPIIKWDKGKALEFLLESLGYANCTDVFPLYIGDDRTDEDAFKVLRERRQGLGILVSKFPKETSASYSLQEPDEVMEFLQRLVEWKQLRSGA

SEQ ID NO: 107568 - DNA, 2117 bp, Arabidopsis thaliana
  misc_feature (1)..(2117): Ceres Seq. ID no. 13650719
  misc_feature (1)..(2117): Ortholog of  Ceres SEQ ID NO 15174879 as cited in SEQ ID NO 53786
acattatctgaaacccagatcgaggaaaaggaaccatgtcttctctgatctctttcatcttccttttccttttctcatccatcacagcttctgctcaaaatactttctacctatatcataattgttcagtcacgacgactttctcaagtaacagcacttactccaccaatctcaaaacccttttgtcctctctctcttcccttaacgcttcttcttactccaccggattccaaaccgccacggcgggacaggcccccgacagggtcaccggacttttcctctgccgcgtcgacgtctcgtcggaagtttgccgtagctgcgtcacctttgccgtaaacgaaacgttgactcggtgtccaaaagataaagaaggcgtgttctattacgagcagtgtctgctcagatactctaacaggaatatagtagccactctaaacaccgatggaggaatgttcatgcagagcgctaggaatcctctatcagtcaaacaagatcagttcagagatttggtcttgacccccatgaacttagccgccgttgaagccgccaggagtttcaaaaaatgggctgtgagaaaaattgatttaaatgcatcccagagtttgtacggaatggttcggtgcactcctgatcttagggaacaagactgcttagactgtctgaaaataggcatcaatcaagtaacctatgacaaaattgggggaaggattcttctgccgagctgtgcttcaagatacgataattacgcgttttacaacgaatctaatgttggaacacctcaagattcatcaccacgtcctggaaaaggtggaaactcctctgtcataattattgcagttgttgttccaatcactgtactttttcttctattagtagctgtttttagtgtcagggctaaaaataagaggacgcttaatgagaaggaaccagtagctgaagttttcttttccagatgggaatgatattacgactgcaggatcacttcagtttgattttaaggcaattgaggcagcaacgaattgctttttgccaattaacaagctaggtcaaggtggtttcggcgaagtttacaagggtacattgagtagtggactacaagttgcggtgaagagactatcgaagacatcaggacaaggtgaaaaagagtttgaaaacgaagttgttgttgttgcaaagctccaacatagaaatttggtaaagctgcttggttattgtttggaaggagaagaaaaaatacttgtctacgagtttgtgcccaacaagagccttgatcacttcctctttgactctacgatgaaaatgaagctagactggacaagaaggtacaagatcataggaggaattgctagaggaattctttatcttcatcaagattcacgactcacaattatacatcgagacctcaaagcagggaacatcctcttggatgatgatatgaatcctaaaattgcagattttggaatggcgagaatatttgggatggaccaaacagaagccatgacaagaagagtagttggaacttatggatacatgtctcccgagtatgcgatgtacggccaattctccatgaaatcagatgtgtacagttttggcgtcttagtacttgagattataagcggcatgaagaatagtagtctctatcaaatggatgaaagtgttggcaacttggttacatatacttggagactatggagcaatgggtcgccatcagagcttgtagatccgtcatttggagataattatcaaacaagcgaaattactaggtgcatccatatcgctttactatgtgttcaggaagatgctgaagatcgtccaaccatgtcatcgatagttcaaatgctcactactagcttgatcgctctcgctgagcctagaccacctggatttttcttccgaagcaagcaggaacaagcaggtccacctattgattcatctacgcattgttcagtcgacgaagcttccattactcgtgtaactcctcgttgaagacaaaactattcgttaatctaaacatttgtgatatatgattttagactattaagatcgacagtgaacaaaaattcatgtaagttaaactggttttattgtttattttctttataaattctttaattaac

SEQ ID NO: 107569 - protein, 308 aa, Arabidopsis thaliana
  peptide (1)..(308): Ceres Seq. ID no. 13650720
MSSLISFIFLFLFSSITASAQNTFYLYHNCSVTTTFSSNSTYSTNLKTLLSSLSSLNASSYSTGFQTATAGQAPDRVTGLFLCRVDVSSEVCRSCVTFAVNETLTRCPKDKEGVFYYEQCLLRYSNRNIVATLNTDGGMFMQSARNPLSVKQDQFRDLVLTPMNLAAVEAARSFKKWAVRKIDLNASQSLYGMVRCTPDLREQDCLDCLKIGINQVTYDKIGGRILLPSCASRYDNYAFYNESNVGTPQDSSPRPGKGGNSSVIIIAVVVPITVLFLLLVAVFSVRAKNKRTLNEKEPVAEVFFSRWE

SEQ ID NO: 107570 - protein, 230 aa, Arabidopsis thaliana
  peptide (1)..(230): Ceres Seq. ID no. 13650721
MKMKLDWTRRYKIIGGIARGILYLHQDSRLTIIHRDLKAGNILLDDDMNPKIADFGMARIFGMDQTEAMTRRVVGTYGYMSPEYAMYGQFSMKSDVYSFGVLVLEIISGMKNSSLYQMDESVGNLVTYTWRLWSNGSPSELVDPSFGDNYQTSEITRCIHIALLCVQEDAEDRPTMSSIVQMLTTSLIALAEPRPPGFFFRSKQEQAGPPIDSSTHCSVDEASITRVTPR

SEQ ID NO: 107571 - protein, 228 aa, Arabidopsis thaliana
  peptide (1)..(228): Ceres Seq. ID no. 13650722
MKLDWTRRYKIIGGIARGILYLHQDSRLTIIHRDLKAGNILLDDDMNPKIADFGMARIFGMDQTEAMTRRVVGTYGYMSPEYAMYGQFSMKSDVYSFGVLVLEIISGMKNSSLYQMDESVGNLVTYTWRLWSNGSPSELVDPSFGDNYQTSEITRCIHIALLCVQEDAEDRPTMSSIVQMLTTSLIALAEPRPPGFFFRSKQEQAGPPIDSSTHCSVDEASITRVTPR

SEQ ID NO: 107572 - DNA, 1122 bp, Arabidopsis thaliana
  misc_feature (1)..(1122): Ceres Seq. ID no. 13650734
  misc_feature (1)..(1122): Ortholog of  Ceres SEQ ID NO 15175949 as cited in SEQ ID NO 58819
  misc_feature (1)..(1122): Ortholog of  Ceres SEQ ID NO 13596660 as cited in SEQ ID NO 63180
gaaggagagaagaagaagaaccttacaattgcttttgtaaatattgtaggtagtttaaggacgtcactacctacatacatggatttatgtggaactcagatgctgcgcctctcatcgcctcatttcaaaacccttcatttggtgaggcatgcacaaggagtccacaatatagcattagaagagaagggagagaaacctgaatcagaaaagctttttgacgcccacctttctccaaagggtttgcaacaggtttcggaaaggcgcaaccaaatccttgaatcaggattacttaacactgtcgagttagtgataacctctccgctgtgcagagcaatggaaacttcaataggaatatttaggggacaaggatatgtaaatatatccgaagactttgcaaaagctaacaacttccctccaattgtagcacttgagatctgtagagaacgcatgggactctatccatgtgatcgtagagcaagtataagtactcgccgcactttttttcctgagatcgactttacaatgatagagagtgatgaagacgctctatggcaagacaaggaaagggaaaaattagaagatgttgctactagaggtcttcactttgttaaatggttatgggagagaccagaaaaagagatagcaattgtaagccacgggattttcttgcaacaaacactttgtgcgctgcatggaaaagttggcatacctcttgaagatagtctccttacaaggtttgccaattgtgaactccggtcgattcggatagagaagagtgacatggaagcggatacattaatgacttgtaactgtagaaattacgttactccaccttcaacttccttccattcacacgcttgaatagaaggcatgcatatgttatatatggactgtgttttcttttccaagccacactcatggatcggagtttcagaaccaaggaaaatcgaagctactattcccatttgccattaccaagctaccagcaccaatacattgtaatcaatcactagtaacaaaaaaatctataatttcaaagatacgtttacatcgaaaaaaagaaagataacgtttgcaaatgatataaaagcttttcctttttttttttttttaattattatg

SEQ ID NO: 107573 - protein, 286 aa, Arabidopsis thaliana
  peptide (1)..(286): Ceres Seq. ID no. 13650735
EGEKKKNLTIAFVNIVGSLRTSLPTYMDLCGTQMLRLSSPHFKTLHLVRHAQGVHNIALEEKGEKPESEKLFDAHLSPKGLQQVSERRNQILESGLLNTVELVITSPLCRAMETSIGIFRGQGYVNISEDFAKANNFPPIVALEICRERMGLYPCDRRASISTRRTFFPEIDFTMIESDEDALWQDKEREKLEDVATRGLHFVKWLWERPEKEIAIVSHGIFLQQTLCALHGKVGIPLEDSLLTRFANCELRSIRIEKSDMEADTLMTCNCRNYVTPPSTSFHSHA

SEQ ID NO: 107574 - protein, 260 aa, Arabidopsis thaliana
  peptide (1)..(260): Ceres Seq. ID no. 13650736
MDLCGTQMLRLSSPHFKTLHLVRHAQGVHNIALEEKGEKPESEKLFDAHLSPKGLQQVSERRNQILESGLLNTVELVITSPLCRAMETSIGIFRGQGYVNISEDFAKANNFPPIVALEICRERMGLYPCDRRASISTRRTFFPEIDFTMIESDEDALWQDKEREKLEDVATRGLHFVKWLWERPEKEIAIVSHGIFLQQTLCALHGKVGIPLEDSLLTRFANCELRSIRIEKSDMEADTLMTCNCRNYVTPPSTSFHSHA

SEQ ID NO: 107575 - protein, 253 aa, Arabidopsis thaliana
  peptide (1)..(253): Ceres Seq. ID no. 13650737
MLRLSSPHFKTLHLVRHAQGVHNIALEEKGEKPESEKLFDAHLSPKGLQQVSERRNQILESGLLNTVELVITSPLCRAMETSIGIFRGQGYVNISEDFAKANNFPPIVALEICRERMGLYPCDRRASISTRRTFFPEIDFTMIESDEDALWQDKEREKLEDVATRGLHFVKWLWERPEKEIAIVSHGIFLQQTLCALHGKVGIPLEDSLLTRFANCELRSIRIEKSDMEADTLMTCNCRNYVTPPSTSFHSHA

SEQ ID NO: 107576 - DNA, 1181 bp, Arabidopsis thaliana
  misc_feature (1)..(1181): Ceres Seq. ID no. 13650738
  misc_feature (1)..(1181): Ortholog of  Ceres SEQ ID NO 12625452 as cited in SEQ ID NO 63642
gatctgcgtagatgatgaatgtttctggagaatgtgtaggccgtgaaagatgcgaggaattagccaagtcttcttcgttttaccggaaagtttactcggagatagaagaaattggatgggaaccaataaggagattaggtggagatttaacgttttttagctttcacattctagataagaagggaagagctcacaacttagaaattcaactgaacagagactatcctaattcaccaccttctgtttctgcggtttgttaatgtcaaatccttaagcttttttcattctccgtagcgaattaacttttgcttcgatgtaggatgtgccatatatgtttacactagaatggtcaacaagttcaagattgaaggatgtaatgcaccaattccaaaagcatttggactatcttcaagaattttggtctgtcttggacaatatcgataaatctctatgtgttgttgatgtcaagcaaccagctcgtgcctctgctattcgccggattgatgctgggaatgattgtatcatcattgttcatatcgacttcaaagaccctaaatccctaccagagtcccggtttattggtcctgtgccttcagctacgcatatgaacaacttgcatatgttatggagaagaaattgcaaaagatggtcaaatgaaagatcatttcctgagaaccttgaatgtattctaggtactgagcttccaaagcctctaggtctccaagtggaagacgatcaacaacaagttgaatgtgggatttgctatgcgcagtttctacccaccgatgaggagctcggagctagaagtgggacacgaacagattacacatgtgaaaacatcagttgcaacaagtctttccatagcctctgcctcacagactggttaaggtctatcacaacaacaagacagtcatttgatgttctgtttgggaactgcccttattgttcagacccagttgcagtcaaaaccagcaacaaatagagttagacaaaccatcatcctaattagctgatatctgaatgttgtaatgaaacgtgatacaaagagaagagttagtacagtaatgagtagtagtagtaagtgaggacaaaagttcctttttactatttttcttctgtacgtttaagataagactcatgtagctttcaaataagagatgtgaatgtaccttgtttttttc

SEQ ID NO: 107577 - protein, 216 aa, Arabidopsis thaliana
  peptide (1)..(216): Ceres Seq. ID no. 13650739
MFTLEWSTSSRLKDVMHQFQKHLDYLQEFWSVLDNIDKSLCVVDVKQPARASAIRRIDAGNDCIIIVHIDFKDPKSLPESRFIGPVPSATHMNNLHMLWRRNCKRWSNERSFPENLECILGTELPKPLGLQVEDDQQQVECGICYAQFLPTDEELGARSGTRTDYTCENISCNKSFHSLCLTDWLRSITTTRQSFDVLFGNCPYCSDPVAVKTSNK

SEQ ID NO: 107578 - protein, 201 aa, Arabidopsis thaliana
  peptide (1)..(201): Ceres Seq. ID no. 13650740
MHQFQKHLDYLQEFWSVLDNIDKSLCVVDVKQPARASAIRRIDAGNDCIIIVHIDFKDPKSLPESRFIGPVPSATHMNNLHMLWRRNCKRWSNERSFPENLECILGTELPKPLGLQVEDDQQQVECGICYAQFLPTDEELGARSGTRTDYTCENISCNKSFHSLCLTDWLRSITTTRQSFDVLFGNCPYCSDPVAVKTSNK

SEQ ID NO: 107579 - protein, 125 aa, Arabidopsis thaliana
  peptide (1)..(125): Ceres Seq. ID no. 13650741
MNNLHMLWRRNCKRWSNERSFPENLECILGTELPKPLGLQVEDDQQQVECGICYAQFLPTDEELGARSGTRTDYTCENISCNKSFHSLCLTDWLRSITTTRQSFDVLFGNCPYCSDPVAVKTSNK

SEQ ID NO: 107580 - DNA, 1530 bp, Arabidopsis thaliana
  misc_feature (1)..(1530): Ceres Seq. ID no. 13650750
  misc_feature (1)..(1530): Ortholog of  Ceres SEQ ID NO 13596816 as cited in SEQ ID NO 62287
atcaaacccaaaagcccaaaacccagaagaacaaaaaatctctcttttgaaaattctccttttgcaaatcattcaagtgaagcacaatcatcttcttcttcttctccagcttcatcaatctcttctagactttttgcgtttacctgaaaaactgttttgatcagtatcaagttgatggagcatttgttggaacatatgggataaattatggaaggatagctgacaacataccatctccggagaaagtagttttacttctaaagcaagctaaaattcggaatgtgcgtatatacgatgtagatcacactgttcttgaagcttttagtggaactggtttagaccttgttgttggacttcctaatgggtttttaaaagagatgagttcaaatgctgatcatgctttctcttgggttaaagaaaatattcagtctttcttacccaagactcggattcgcggtatcgctataggtaacgaagttcttggaggcggtgattctgagctcgcgggagctttacttggtgctgctaaaaatgtgtacaatgcgttgaagaaaatgaatctggaggacactgtgcagatcactacggctcattcacaggctgtgttttctgattcctacccgccttcgtcttgtgtgtttaaagaggatgttgttcagttcatgaagccattgttggagttttttcagcagattgggtctcctttttgtttgaatgcttacccttttttggcgtacacttataatccgaaggagattgatatcaactatgctcttttcaagccaacggaagggatatatgacccgaaaaccgatttgcattacgataacatgcttgatgctcagattgatgctgcttacatggcgttgcaagatgctgggtttaagaagatggaggttatgatcactgaaactgggtgggcttctaaaggggattcagatgaacctgcagcaacaccagagaacgcaagaacgtataactataacctcaggaagaggcttgctaagaagaaagggacacctcttagaccaaaaacggtgcttaaagcctatatctttgcattgttcaatgaaaactcaaaaccgggcaagagttctgagacacactttggactttttaaacctgatggaaccatatcatatgacattggattcaacaatctaaagtctgattctcccaagtcactcatttcatcatcaaagtcagctcgttactatgtggcattggtcatctctgtctcggctttcctcttgatgatataaatgcggaaatggtgtgagctttgacgatccttggatttggtcgtacattcgtagcactataatatatattactagggttgggacgctaacgaaatggtaggagcacaaatttactgcaattctcatatatgtagccaagagatatccagaaaagatatcaccagacactatcatatatacacatcttatgtaaaacaaatctaatacataaatttgggtctctgcttatattttgttggattggatactggggaaattaacggatatc

SEQ ID NO: 107581 - protein, 294 aa, Arabidopsis thaliana
  peptide (1)..(294): Ceres Seq. ID no. 13650751
MSSNADHAFSWVKENIQSFLPKTRIRGIAIGNEVLGGGDSELAGALLGAAKNVYNALKKMNLEDTVQITTAHSQAVFSDSYPPSSCVFKEDVVQFMKPLLEFFQQIGSPFCLNAYPFLAYTYNPKEIDINYALFKPTEGIYDPKTDLHYDNMLDAQIDAAYMALQDAGFKKMEVMITETGWASKGDSDEPAATPENARTYNYNLRKRLAKKKGTPLRPKTVLKAYIFALFNENSKPGKSSETHFGLFKPDGTISYDIGFNNLKSDSPKSLISSSKSARYYVALVISVSAFLLMI

SEQ ID NO: 107582 - protein, 235 aa, Arabidopsis thaliana
  peptide (1)..(235): Ceres Seq. ID no. 13650752
MNLEDTVQITTAHSQAVFSDSYPPSSCVFKEDVVQFMKPLLEFFQQIGSPFCLNAYPFLAYTYNPKEIDINYALFKPTEGIYDPKTDLHYDNMLDAQIDAAYMALQDAGFKKMEVMITETGWASKGDSDEPAATPENARTYNYNLRKRLAKKKGTPLRPKTVLKAYIFALFNENSKPGKSSETHFGLFKPDGTISYDIGFNNLKSDSPKSLISSSKSARYYVALVISVSAFLLMI

SEQ ID NO: 107583 - protein, 199 aa, Arabidopsis thaliana
  peptide (1)..(199): Ceres Seq. ID no. 13650753
MKPLLEFFQQIGSPFCLNAYPFLAYTYNPKEIDINYALFKPTEGIYDPKTDLHYDNMLDAQIDAAYMALQDAGFKKMEVMITETGWASKGDSDEPAATPENARTYNYNLRKRLAKKKGTPLRPKTVLKAYIFALFNENSKPGKSSETHFGLFKPDGTISYDIGFNNLKSDSPKSLISSSKSARYYVALVISVSAFLLMI

SEQ ID NO: 107584 - DNA, 987 bp, Arabidopsis thaliana
  misc_feature (1)..(987): Ceres Seq. ID no. 13650754
  misc_feature (1)..(987): Ortholog of  Ceres SEQ ID NO 13596891 as cited in SEQ ID NO 62868
  misc_feature (1)..(987): Ortholog of  Ceres SEQ ID NO 12617235 as cited in SEQ ID NO 63990
  misc_feature (1)..(987): Ortholog of  Ceres SEQ ID NO 13655371 as cited in SEQ ID NO 68945
aaggtactaactctgttctggtgaagaacctatacttgtcatgcgatccttacatgagaatttgcatggggaaacctaatccttccactgctgctcttgctcaagcttacactcccggccaaccaatagaagggtacggagtgtctacagtgatagaatctgggcattcagattacaaaaaaggagacctactctggggtatagttgcatgggaggagtacagtgttatcacttgactcacgagcatttcaagatccaacatactgatgttccattgtcttactacactggacttctcggtatgcctggtatgaccgcatatgttgggttttatgagatctgttctccaaagaaaggagagacagtttatgtgtcagctgcatctggtgctgttggtcagcttgtgggacaatttgctaagatgatgggctgttatgttgttggaagtgctggtagcaaagaaaaggttgatctcctgaagaccaagtttgggtttgattatgcatttaactacaaggaagaacctgaccttagtgctgcgctcaaaaggtgtttccctaatggcattgacatatactttgagaatgtaggaggcaaaatgctagatgcagtgcttatgaacatgaacatgcacgggcgtatcgctgtctgtggaatgatctcacagtacaatcttgagaaccaagaaggtgtacacaacctatccaacataatctacaaacgaatccgcattcaaggctttgtagtgtctgatttctacgacgaatactcaaagttcttggagtttctgcatccgcacattaaagaagggaagataacgtacgtggaagatgtagctgatgggctcgagaaaggtcctgaagctctcgtgggactcttccatggtaagaatgttgggaaacaagttgttgttattgctcgtgaatgatgaatactttaattgggagtaaggttttattgctcgtgagggaataatacttatttggg

SEQ ID NO: 107585 - protein, 239 aa, Arabidopsis thaliana
  peptide (1)..(239): Ceres Seq. ID no. 13650755
MGGVQCYHLTHEHFKIQHTDVPLSYYTGLLGMPGMTAYVGFYEICSPKKGETVYVSAASGAVGQLVGQFAKMMGCYVVGSAGSKEKVDLLKTKFGFDYAFNYKEEPDLSAALKRCFPNGIDIYFENVGGKMLDAVLMNMNMHGRIAVCGMISQYNLENQEGVHNLSNIIYKRIRIQGFVVSDFYDEYSKFLEFLHPHIKEGKITYVEDVADGLEKGPEALVGLFHGKNVGKQVVVIARE

SEQ ID NO: 107586 - protein, 208 aa, Arabidopsis thaliana
  peptide (1)..(208): Ceres Seq. ID no. 13650756
MPGMTAYVGFYEICSPKKGETVYVSAASGAVGQLVGQFAKMMGCYVVGSAGSKEKVDLLKTKFGFDYAFNYKEEPDLSAALKRCFPNGIDIYFENVGGKMLDAVLMNMNMHGRIAVCGMISQYNLENQEGVHNLSNIIYKRIRIQGFVVSDFYDEYSKFLEFLHPHIKEGKITYVEDVADGLEKGPEALVGLFHGKNVGKQVVVIARE

SEQ ID NO: 107587 - protein, 205 aa, Arabidopsis thaliana
  peptide (1)..(205): Ceres Seq. ID no. 13650757
MTAYVGFYEICSPKKGETVYVSAASGAVGQLVGQFAKMMGCYVVGSAGSKEKVDLLKTKFGFDYAFNYKEEPDLSAALKRCFPNGIDIYFENVGGKMLDAVLMNMNMHGRIAVCGMISQYNLENQEGVHNLSNIIYKRIRIQGFVVSDFYDEYSKFLEFLHPHIKEGKITYVEDVADGLEKGPEALVGLFHGKNVGKQVVVIARE

SEQ ID NO: 107588 - DNA, 2595 bp, Arabidopsis thaliana
  misc_feature (1)..(2595): Ceres Seq. ID no. 13650780
  misc_feature (1)..(2595): Ortholog of  Ceres SEQ ID NO 14315469 as cited in SEQ ID NO 57169
  misc_feature (1)..(2595): Ortholog of  Ceres SEQ ID NO 13657008 as cited in SEQ ID NO 69164
atggtcaagacaccaatttatttaattataattttagatcttgaaattttattattattatttttttcccttatagttttattatttgttttgcttagatccaccggcaaaatcactgagaacaaaaaaaaagctcgttgtgttgttattcctctcatttgtttcttcttcttcctcagctcctttgattttgaatcttgatctgtgaggaaggctctttgaaatatcttcacaagacgtgaatttgaggcgagcccttttggattctcgtgttcaattgtttgaagcaacaatctcccagaggagtaaggcgggaatctcaaaattcggattgggtggttctgatatccaaatgcggtctgggagaagaccacaaggaagaagaatagctataaggaacgaaacagagacggaattgagatcgagaatcggagagaaatcgggatcggagaagcggaatctgatcggatctgatgttgggtttgggattgttgttgttgttgttgtcaggaattaggtttttttcggaatcggtttctgttgtcactgtggtggggctgcactaccaaggaggatgcagcttcacatatcgccgagtatgagaagcattacgatttcgagcagcaatgagtttattgacttgatgaagatcaaggtcgcagctcgtcacatctcttaccgaactctcttccacaccatcttaatcctcgctttcttgttgccttttgttttcattctcaccgctgttgttacccttgagggtgtcaacaaatgctcctccattgattgtttagggaggcggataggtccacgtcttcttggtagggtagatgattcagagagactagctagagacttttataaaattctaaacgaagtaagcactcaagaaattccagatggtttgaagcttccaaattcttttagtcaacttgtttccgatatgaagaataaccactatgatgcaaaaacatttgctcttgtgctgcgagccatgatggagaagtttgaacgtgatatgagggaatcgaaatttgcagaacttatgaacaagcactttgcagcaagttccattcccaaaggcattcattgtctctctctaagactgacagatgaatattcctccaatgctcatgctcgaagacagcttccttcaccagagtttctccctgttctttcagataatgcttaccaccactttattttgtccacggacaatattttggctgcctcagttgtggtctcatccgctgttcagtcatcttcaaaacccgagaaaattgtctttcacatcattacagacaagaaaacctatgcgggtatgcattcatggtttgcgcttaattctgttgcaccagcaattgttgaggttaaaggtgttcatcagtttgactggttgacgagagagaatgttccggttttggaagctgtggaaagccataatggtgtcagggactattatcatgggaatcatgtcgctggggcaaacctcaccgaaacaactcctcgaacatttgcttcaaaattgcagtctagaagtccaaaatacatatctttgctcaaccatcttagaatatatataccagagcttttcccgaacttggacaaggtggttttcttagacgatgatatagttgtccagggagacttaactccactttgggatgttgacctcggtggtaaggtcaatggggcagtagagacttgcaggggtgaagatgaatgggtgatgtcaaagcgtttaaggaactacttcaatttctctcacccgctcatcgcaaagcatttagatcctgaagaatgtgcttgggcatatggtatgaatatcttcgatctacaagcttggaggaaaacaaatatcagagaaacgtatcactcttggcttagagagaatctaaagtcaaatctgacaatgtggaaacttggaaccttgcctcctgctcttatcgcgttcaagggtcacgtacacataatagactcgtcatggcatatgctaggattaggctaccagagcaagaccaacatagaaaatgtgaagaaagcagcagtgatccactacaatgggcagtcaaagccatggctggagattggtttcgagcatctgcggccattctggaccaaatacgtcaactactcaaatgatttcatcaagaactgtcacatattggagtaggaaaaccgaaactttgagatgatcatgaaggtaagagttacaggtgtatgatcatgaaggtagttacaggtgtaaaagaggagaagtagtaaaaaagacaaggcagtctgcagatattacactcagtctaaagaaggaagaatcagaaatttagtttgccacatacataagggaaacttggttgcagcgaagggaaggttgcataagagaaagagagagagagagataaagattcattctttctgtaaaatagaaggttacccttttttgaaattcttttggagaatccaattcttgaatctttttataagaatggggaaagaaagattgggtttataattcttttttggttattaagagagagagggagaggttatgaccagaaaagccagttgttgataaattgaggaacacacttatac

SEQ ID NO: 107589 - protein, 532 aa, Arabidopsis thaliana
  peptide (1)..(532): Ceres Seq. ID no. 13650781
MQLHISPSMRSITISSSNEFIDLMKIKVAARHISYRTLFHTILILAFLLPFVFILTAVVTLEGVNKCSSIDCLGRRIGPRLLGRVDDSERLARDFYKILNEVSTQEIPDGLKLPNSFSQLVSDMKNNHYDAKTFALVLRAMMEKFERDMRESKFAELMNKHFAASSIPKGIHCLSLRLTDEYSSNAHARRQLPSPEFLPVLSDNAYHHFILSTDNILAASVVVSSAVQSSSKPEKIVFHIITDKKTYAGMHSWFALNSVAPAIVEVKGVHQFDWLTRENVPVLEAVESHNGVRDYYHGNHVAGANLTETTPRTFASKLQSRSPKYISLLNHLRIYIPELFPNLDKVVFLDDDIVVQGDLTPLWDVDLGGKVNGAVETCRGEDEWVMSKRLRNYFNFSHPLIAKHLDPEECAWAYGMNIFDLQAWRKTNIRETYHSWLRENLKSNLTMWKLGTLPPALIAFKGHVHIIDSSWHMLGLGYQSKTNIENVKKAAVIHYNGQSKPWLEIGFEHLRPFWTKYVNYSNDFIKNCHILE

SEQ ID NO: 107590 - protein, 524 aa, Arabidopsis thaliana
  peptide (1)..(524): Ceres Seq. ID no. 13650782
MRSITISSSNEFIDLMKIKVAARHISYRTLFHTILILAFLLPFVFILTAVVTLEGVNKCSSIDCLGRRIGPRLLGRVDDSERLARDFYKILNEVSTQEIPDGLKLPNSFSQLVSDMKNNHYDAKTFALVLRAMMEKFERDMRESKFAELMNKHFAASSIPKGIHCLSLRLTDEYSSNAHARRQLPSPEFLPVLSDNAYHHFILSTDNILAASVVVSSAVQSSSKPEKIVFHIITDKKTYAGMHSWFALNSVAPAIVEVKGVHQFDWLTRENVPVLEAVESHNGVRDYYHGNHVAGANLTETTPRTFASKLQSRSPKYISLLNHLRIYIPELFPNLDKVVFLDDDIVVQGDLTPLWDVDLGGKVNGAVETCRGEDEWVMSKRLRNYFNFSHPLIAKHLDPEECAWAYGMNIFDLQAWRKTNIRETYHSWLRENLKSNLTMWKLGTLPPALIAFKGHVHIIDSSWHMLGLGYQSKTNIENVKKAAVIHYNGQSKPWLEIGFEHLRPFWTKYVNYSNDFIKNCHILE

SEQ ID NO: 107591 - protein, 509 aa, Arabidopsis thaliana
  peptide (1)..(509): Ceres Seq. ID no. 13650783
MKIKVAARHISYRTLFHTILILAFLLPFVFILTAVVTLEGVNKCSSIDCLGRRIGPRLLGRVDDSERLARDFYKILNEVSTQEIPDGLKLPNSFSQLVSDMKNNHYDAKTFALVLRAMMEKFERDMRESKFAELMNKHFAASSIPKGIHCLSLRLTDEYSSNAHARRQLPSPEFLPVLSDNAYHHFILSTDNILAASVVVSSAVQSSSKPEKIVFHIITDKKTYAGMHSWFALNSVAPAIVEVKGVHQFDWLTRENVPVLEAVESHNGVRDYYHGNHVAGANLTETTPRTFASKLQSRSPKYISLLNHLRIYIPELFPNLDKVVFLDDDIVVQGDLTPLWDVDLGGKVNGAVETCRGEDEWVMSKRLRNYFNFSHPLIAKHLDPEECAWAYGMNIFDLQAWRKTNIRETYHSWLRENLKSNLTMWKLGTLPPALIAFKGHVHIIDSSWHMLGLGYQSKTNIENVKKAAVIHYNGQSKPWLEIGFEHLRPFWTKYVNYSNDFIKNCHILE

SEQ ID NO: 107592 - DNA, 945 bp, Arabidopsis thaliana
  misc_feature (1)..(945): Ceres Seq. ID no. 13650792
  misc_feature (1)..(945): Ortholog of  Ceres SEQ ID NO 15173624 as cited in SEQ ID NO 60470
gagagagttaagtgagtagttggagatagaaagatcagagacgaggaatctctctcccactctcactttctctcctattcttagttcgtgtcagaaacacacagagaaattaagaaccctaatttaaaacagaagaatggtacattcgaagaagttccgaggtgtccgccagcgtcagtggggttcttgggtttctgagattcgtcatcctctcttagtgtggctaggaacattcgacacggcggaaacagcggctagagcctacgaccaagccgcggttctaatgaacggccagagcgcgaagactaacttccccgtcatcaaatcgaacggttcaaattccttggagattaactctgcgttaaggtctcccaaatcattatcggaactattgaacgctaagctaaggaagaactgtaaagaccagacaccgtatctgacgtgtctccgcctcgacaacgacagctcacacatcggcgtctggcagaaacgcgccgggtcaaaaacgagtccaaactgggtcaagcttgttgaactaggtgacaaagttaacgcacgtcccggtggtgatattgagactaataagatgaaggtacgaaacgaagacgttcaggaagatgatcaaatggcgatgcagatgatcgaggagttgcttaactggacctgtcctggatctggatccattgcacaggtctaaaggagaatcattgaattatatgatcaagataataatatagttgagggttaataataatcgagggtaagtaatttacgtgtagctaataattaatataattttcgaacatatatatgaatatatgatagctctagaaatgagtacgtatatatacgtaaacatttttcctcaaatatagtatatgtgttgtgattctaagacttgtaaactgatatggcctactgtttaaagagtagttgatattttct

SEQ ID NO: 107593 - protein, 186 aa, Arabidopsis thaliana
  peptide (1)..(186): Ceres Seq. ID no. 13650793
MVHSKKFRGVRQRQWGSWVSEIRHPLLVWLGTFDTAETAARAYDQAAVLMNGQSAKTNFPVIKSNGSNSLEINSALRSPKSLSELLNAKLRKNCKDQTPYLTCLRLDNDSSHIGVWQKRAGSKTSPNWVKLVELGDKVNARPGGDIETNKMKVRNEDVQEDDQMAMQMIEELLNWTCPGSGSIAQV

SEQ ID NO: 107594 - protein, 137 aa, Arabidopsis thaliana; identical to SEQ ID NO: 80216
  peptide (1)..(137): Ceres Seq. ID no. 13650794

SEQ ID NO: 107595 - DNA, 3029 bp, Arabidopsis thaliana
  misc_feature (1)..(3029): Ceres Seq. ID no. 13650817
  misc_feature (1)..(3029): Ortholog of  Ceres SEQ ID NO 14311371 as cited in SEQ ID NO 54002
  misc_feature (1)..(3029): Ortholog of  Ceres SEQ ID NO 14308339 as cited in SEQ ID NO 60396
gtacggagaattaagcttcctttggagatggcgtccatggcgaccggcgtcagtttttcgatgactagcggcataggagaaggaggatacgatgttcatcgagtagcgacggctgcacggacaactctgaagctgaatcagaagaactcactgagcgagagtacatgcatgcttttggggatgaataagtatcggggatccggagctatacgaaccgtctcgaaggctgtcggttacggacaagagatgagtaagagtctgagggtgggactcatttgcggaggtccgtcggcggagcgcgggatttctctcaactctgctagatcagttctcgatcatattcagggtgatggtataaacgtgagctgctattatatagatcctgatctcaaagcctttgcaatttcatccgctcaggtgtactcgaatactccttcagatttcgattttaagctggagagtcttgcacagggattctcgtcattatccgaattggccgagcatcttgtttctgctgtggacattgtttttccagtaattcatggtcgatttggtgaagatgggggcattcaggagctgttggaaagtcacaacattccatttgtggggactggatcccgtgaatgttttcgagcatttgacaagtatgaagcctctttggagctcaaggaacttggtttcatgacagtaccaaactacttggtgcagggaactggagtagacaaaagtgaaatagcactgtggtttacagataaccagctggatctcgagatgggaaaagttgtggtaaaaccagctaaagcaggttcaagcattggtgtcaaggttgcttttggcgtaaatgattcaattaaaaaggctactcttattctagagggaattgatgatagagttgttgttgaggtgtttattgaagatgcatatgagttcactgccatcgtcctggatgtgggttctggttctgtttgccatcctgttgttttgatgcctactgaggtgcaacttcagtttcatggcattggtgatccaaaggaaaacgcaatcttcgactatcggaggaagtatctgccgacacagcaggtcacctatcacactcctccacgtttccctatccatgttatcaaaagtattcgtgaagaggcatctcttatatttcaaaagcttggtttacgtgactttgctcgcattgatggatggtatttggctcccaattcaaatttatcatcacctgtaagtgaaacgcttggaggaaccaagtcaggagatattatattcacagacatcaacctgataagtggcatgaagcaaactagctttctcttccagcaggcatctaaggttggattttctcattcaaacattctgcgaacaatcgtccaccgtgcttgctcgaggtttccccatcttgattggtataattatgggtatagtcaattactccaaggttcaacaaccctggaagtctctgaggacccccagaaagtgtttgtcatatttggaggagatacttcagagcggcaggtgtccgtcatgagtggaacaaatgtctgggtcaatttgcaaagatatgtagatcttaatgtaactccctgtttgctttccccctcacttagcaactcattaggcgcatcttcgaacttggacaatagagaagtctgggttttgccctactcggttgtgctaaggcacactgctgaggaagttcttgcagcgtgcttagaagcagtcgagcctgttagggctttatttacatctctgctgcagaagcaagtgatggaggatcttatggatggttttaagaatcaaagctggtttgcagggtttgatataacagacgagctgcccagaaagtactcattgaaagagtggatcaagcatgccaaggaagctcaagcaactgtcttcattgcagtgcatggaggaattggtgaagatggtacactgcagggcttgctggaggatgaaggagtttcttatacaggtccaggcgtactagcttcaaggacttgtatggacaaggttatgacatctcaggctcttagtaatctttcagagtttggaattcataccataagcaaagatgtgaagagaacagaggatataatgcatgagaccttcccaaatgtttgggatgaattaatcaagaagcttcagtgtctcacactatgtgttaaaccagcaaaggatggatgttccactggcgttgcaagattatgttcctctgaagaccttgctgtatatgtacaagctttgaaagattgtataccaagaattcctccaaacactctttctaagacacatggaatgattgagatgccaaatcctactccagaattcttgatttttgaaccatttgtcgaaaccgatgaaatcatagtttcatccaaagccaagcagcagctctcttggaaaggtaggaggcggtgggtagagatgactgtgggtgtaattggaaagcatgggtcaatgcattcactgagtcctagtcttactgtcaaggaaagtggggatatattgtctctcgaggaaaagttccaagtggcatatgaaattaaatcttgaataggaggcactggcataaatcttactccacctccaccaacaatcatgagtaaggaagctttggagagatgcaaacaaggcattgagctgattgcagaaactctcggcttagaagggttttcacggatcgatgcttttgtgcatgttgaaaccggagaggtgctggttatagaggtaaacacagttcccggaatgactccttccactgttttaatccaacaggcattagcagagcagccgccaatgtaccctcctcaattctttcgcactctgctccatcttgctacgcagagagttgtgtaagcttttctttgtctttcgtatttacattattcccaagtttagtgtgttttttgtaaattcgatgccttcgtcatatgattaaaataaagtggatcccatatgtatgagctatgatttgaatttcatttcggtatatattttatgaattgtaaatttgcaatatc

SEQ ID NO: 107596 - protein, 853 aa, Arabidopsis thaliana
  peptide (1)..(853): Ceres Seq. ID no. 13650818
VRRIKLPLEMASMATGVSFSMTSGIGEGGYDVHRVATAARTTLKLNQKNSLSESTCMLLGMNKYRGSGAIRTVSKAVGYGQEMSKSLRVGLICGGPSAERGISLNSARSVLDHIQGDGINVSCYYIDPDLKAFAISSAQVYSNTPSDFDFKLESLAQGFSSLSELAEHLVSAVDIVFPVIHGRFGEDGGIQELLESHNIPFVGTGSRECFRAFDKYEASLELKELGFMTVPNYLVQGTGVDKSEIALWFTDNQLDLEMGKVVVKPAKAGSSIGVKVAFGVNDSIKKATLILEGIDDRVVVEVFIEDAYEFTAIVLDVGSGSVCHPVVLMPTEVQLQFHGIGDPKENAIFDYRRKYLPTQQVTYHTPPRFPIHVIKSIREEASLIFQKLGLRDFARIDGWYLAPNSNLSSPVSETLGGTKSGDIIFTDINLISGMKQTSFLFQQASKVGFSHSNILRTIVHRACSRFPHLDWYNYGYSQLLQGSTTLEVSEDPQKVFVIFGGDTSERQVSVMSGTNVWVNLQRYVDLNVTPCLLSPSLSNSLGASSNLDNREVWVLPYSVVLRHTAEEVLAACLEAVEPVRALFTSLLQKQVMEDLMDGFKNQSWFAGFDITDELPRKYSLKEWIKHAKEAQATVFIAVHGGIGEDGTLQGLLEDEGVSYTGPGVLASRTCMDKVMTSQALSNLSEFGIHTISKDVKRTEDIMHETFPNVWDELIKKLQCLTLCVKPAKDGCSTGVARLCSSEDLAVYVQALKDCIPRIPPNTLSKTHGMIEMPNPTPEFLIFEPFVETDEIIVSSKAKQQLSWKGRRRWVEMTVGVIGKHGSMHSLSPSLTVKESGDILSLEEKFQVAYEIKS

SEQ ID NO: 107597 - protein, 844 aa, Arabidopsis thaliana
  peptide (1)..(844): Ceres Seq. ID no. 13650819
MASMATGVSFSMTSGIGEGGYDVHRVATAARTTLKLNQKNSLSESTCMLLGMNKYRGSGAIRTVSKAVGYGQEMSKSLRVGLICGGPSAERGISLNSARSVLDHIQGDGINVSCYYIDPDLKAFAISSAQVYSNTPSDFDFKLESLAQGFSSLSELAEHLVSAVDIVFPVIHGRFGEDGGIQELLESHNIPFVGTGSRECFRAFDKYEASLELKELGFMTVPNYLVQGTGVDKSEIALWFTDNQLDLEMGKVVVKPAKAGSSIGVKVAFGVNDSIKKATLILEGIDDRVVVEVFIEDAYEFTAIVLDVGSGSVCHPVVLMPTEVQLQFHGIGDPKENAIFDYRRKYLPTQQVTYHTPPRFPIHVIKSIREEASLIFQKLGLRDFARIDGWYLAPNSNLSSPVSETLGGTKSGDIIFTDINLISGMKQTSFLFQQASKVGFSHSNILRTIVHRACSRFPHLDWYNYGYSQLLQGSTTLEVSEDPQKVFVIFGGDTSERQVSVMSGTNVWVNLQRYVDLNVTPCLLSPSLSNSLGASSNLDNREVWVLPYSVVLRHTAEEVLAACLEAVEPVRALFTSLLQKQVMEDLMDGFKNQSWFAGFDITDELPRKYSLKEWIKHAKEAQATVFIAVHGGIGEDGTLQGLLEDEGVSYTGPGVLASRTCMDKVMTSQALSNLSEFGIHTISKDVKRTEDIMHETFPNVWDELIKKLQCLTLCVKPAKDGCSTGVARLCSSEDLAVYVQALKDCIPRIPPNTLSKTHGMIEMPNPTPEFLIFEPFVETDEIIVSSKAKQQLSWKGRRRWVEMTVGVIGKHGSMHSLSPSLTVKESGDILSLEEKFQVAYEIKS

SEQ ID NO: 107598 - protein, 841 aa, Arabidopsis thaliana
  peptide (1)..(841): Ceres Seq. ID no. 13650820
MATGVSFSMTSGIGEGGYDVHRVATAARTTLKLNQKNSLSESTCMLLGMNKYRGSGAIRTVSKAVGYGQEMSKSLRVGLICGGPSAERGISLNSARSVLDHIQGDGINVSCYYIDPDLKAFAISSAQVYSNTPSDFDFKLESLAQGFSSLSELAEHLVSAVDIVFPVIHGRFGEDGGIQELLESHNIPFVGTGSRECFRAFDKYEASLELKELGFMTVPNYLVQGTGVDKSEIALWFTDNQLDLEMGKVVVKPAKAGSSIGVKVAFGVNDSIKKATLILEGIDDRVVVEVFIEDAYEFTAIVLDVGSGSVCHPVVLMPTEVQLQFHGIGDPKENAIFDYRRKYLPTQQVTYHTPPRFPIHVIKSIREEASLIFQKLGLRDFARIDGWYLAPNSNLSSPVSETLGGTKSGDIIFTDINLISGMKQTSFLFQQASKVGFSHSNILRTIVHRACSRFPHLDWYNYGYSQLLQGSTTLEVSEDPQKVFVIFGGDTSERQVSVMSGTNVWVNLQRYVDLNVTPCLLSPSLSNSLGASSNLDNREVWVLPYSVVLRHTAEEVLAACLEAVEPVRALFTSLLQKQVMEDLMDGFKNQSWFAGFDITDELPRKYSLKEWIKHAKEAQATVFIAVHGGIGEDGTLQGLLEDEGVSYTGPGVLASRTCMDKVMTSQALSNLSEFGIHTISKDVKRTEDIMHETFPNVWDELIKKLQCLTLCVKPAKDGCSTGVARLCSSEDLAVYVQALKDCIPRIPPNTLSKTHGMIEMPNPTPEFLIFEPFVETDEIIVSSKAKQQLSWKGRRRWVEMTVGVIGKHGSMHSLSPSLTVKESGDILSLEEKFQVAYEIKS

SEQ ID NO: 107599 - DNA, 2772 bp, Arabidopsis thaliana
  misc_feature (1)..(2772): Ceres Seq. ID no. 13650829
  misc_feature (1)..(2772): Ortholog of  Ceres SEQ ID NO 13654989 as cited in SEQ ID NO 63117
  misc_feature (1)..(2772): Ortholog of  Ceres SEQ ID NO 13584744 as cited in SEQ ID NO 69137
ataaactaattactatggcggagaattcgcggctacgagagctacggagacacagatgatgaaagagagaaagagagagagagagagagagaatgtgaggttaaaattatccattgttgttcttcagtgcaccactgaatcgaagttttctaatttggagaaagaggatttctctaaacccctaatttaggaagaccgcagatttctttagtattgagaatgagattctccgagaagatggattagtgaatcgagaggttgatatcgttaaatgcggggattttgcaatctagggttcttaagcattgtaatcgatgaaggctcaaaagggaagctcgaagaagaaaggtacgaattctgggttagtcgctgtagcagtggataacaataaaggaagccaacatgctctcaaatgggctgctgatcatcttgtctctaaaggacaaaccattatcctcctccatgttatccttaggtcatcctctgattcaggtgagattactgcagagaaacataagcaagctgaaaatctttttgtgacatttcattgctactgcagtcgaaaagagatacaatgccttgatgtcacgcttgaggatgacaacattgtcaagtcccttgcggaatatgtttcctctggtgtgattgagaatttgattcttggtgctccttcgaggcatggattcatgaggaaatttaagatttctgatacaccgagcaatgtagcgaaagcagcacctgatttctgtacagtttacgttatttcaaaagggaagatatcatctgtccgccatgcctcacgagctgctccatatcggtctccgcttatgggtcagattgaaaaccactctgaaatcataaactacgaaaagttcagaaacaccatgagctttagagatagggctcctcccaggtcttcgactgctagctccattgaagattatggaaagtcacctatggcaaggacgtcaaattacgcaaactcattctttgatttggaagattccgaaaacgacatatcatttgtttgctcaggcaggccaagtaccgcaagctcaggccggccaagtacaagtaccggaaggtctgacatatcttttgtgagctcaggcaggccgagtacaagcaccactggaagcccttccttcatctacgattttcctgattctggtttaactccgagagagtcgacgagctctggacactctatgcgtctaggaatcaggttcaatgacacaaatatccaacatgatttctcattcgtctcacaagatagcggtcggtcatcttgttcttgttcaccacaaaacttggaagaagtggaagctgagatgcggagattgaagcaggaactgaaacacgcaattgacatgtatggatcagcttgcagagaagcactagctgcaaagcaagaggcgaaggagctccaacgtcagaaaattgaagaggaagggtgggtgcaagaaggacagttatcagagaaatctacaaagtccatagtggaaaaagagagagcacataaagctgcgaaggatgcttctgaaacagcaggcaagatagcagagctcgaaacacaaagaagagctatagaagctgcaggttctttctctgattccagtttaaggtatcgaaggtatgtcattggtgagattgaagaagccacaaactcattcgacaaggctaataaaataggcgaaggcgggtatggtcctgtctataagggttatcttgatcatacccctgttgctattaaggctttgaaagcagatgcagttcaaggaagatctcaatttcaaagagaggtagaagttcttagctgcataagacacccacacatggtactactaattggagcatgtccagagtatggagtgcttgtatatgagtatatggccaaagggagtttagctgataggctctataagtatggaaacacaccaccactctcgtgggagctcaggttccgaattgcagccgaagttgcgacgggtctgctcttcctacaccagacgaaacccgagcctatagtgcaccgtgatcttaaacccggaaacattttgattgaccagaactacgtaagcaaaataggggacgttggattagccaaactagtgcctgcagttgctgaaaacgtcacgcagtgccacgtgtcatcaaccgctgggactttctgttacattgaccctgagtaccaacaaactggaatgctaggtgtgaaatctgatgtctactcttttggtatcttgcttctcgaactgctcacagcgaaaaggccgacgggtttggcttataccgttgagcaagcaatggagcaagggaaattcaaggatatgttagacccagcagtgcctaactggccggtggaagaagctatgtctttggcaaagattgctcttaaatgtgcacagctgagaaggaaagaccgaccagacctcggaaaagaggttttaccagagctcaataaattgagagctcgtgcagatacgaatatggaatggatgatgttcaacttaagtagaggtcgtctaacaccaaatcatagccaagtgtccttgccaccagttgatgaactaagtgtatgctcggataagtcttatacacattcaagcactgtatccgacacagagaagaactcagaccaaaacgaagaggattagcatattttgtgtgttgaaggaaatggagtgagaccattgttaaagcttatgtaattgtgaatattgttgtatgtatgtatgtatataattcgtaaaggaagaaaataactgaaag

SEQ ID NO: 107600 - protein, 780 aa, Arabidopsis thaliana
  peptide (1)..(780): Ceres Seq. ID no. 13650830
MKAQKGSSKKKGTNSGLVAVAVDNNKGSQHALKWAADHLVSKGQTIILLHVILRSSSDSGEITAEKHKQAENLFVTFHCYCSRKEIQCLDVTLEDDNIVKSLAEYVSSGVIENLILGAPSRHGFMRKFKISDTPSNVAKAAPDFCTVYVISKGKISSVRHASRAAPYRSPLMGQIENHSEIINYEKFRNTMSFRDRAPPRSSTASSIEDYGKSPMARTSNYANSFFDLEDSENDISFVCSGRPSTASSGRPSTSTGRSDISFVSSGRPSTSTTGSPSFIYDFPDSGLTPRESTSSGHSMRLGIRFNDTNIQHDFSFVSQDSGRSSCSCSPQNLEEVEAEMRRLKQELKHAIDMYGSACREALAAKQEAKELQRQKIEEEGWVQEGQLSEKSTKSIVEKERAHKAAKDASETAGKIAELETQRRAIEAAGSFSDSSLRYRRYVIGEIEEATNSFDKANKIGEGGYGPVYKGYLDHTPVAIKALKADAVQGRSQFQREVEVLSCIRHPHMVLLIGACPEYGVLVYEYMAKGSLADRLYKYGNTPPLSWELRFRIAAEVATGLLFLHQTKPEPIVHRDLKPGNILIDQNYVSKIGDVGLAKLVPAVAENVTQCHVSSTAGTFCYIDPEYQQTGMLGVKSDVYSFGILLLELLTAKRPTGLAYTVEQAMEQGKFKDMLDPAVPNWPVEEAMSLAKIALKCAQLRRKDRPDLGKEVLPELNKLRARADTNMEWMMFNLSRGRLTPNHSQVSLPPVDELSVCSDKSYTHSSTVSDTEKNSDQNEED

SEQ ID NO: 107601 - protein, 656 aa, Arabidopsis thaliana
  peptide (1)..(656): Ceres Seq. ID no. 13650831
MRKFKISDTPSNVAKAAPDFCTVYVISKGKISSVRHASRAAPYRSPLMGQIENHSEIINYEKFRNTMSFRDRAPPRSSTASSIEDYGKSPMARTSNYANSFFDLEDSENDISFVCSGRPSTASSGRPSTSTGRSDISFVSSGRPSTSTTGSPSFIYDFPDSGLTPRESTSSGHSMRLGIRFNDTNIQHDFSFVSQDSGRSSCSCSPQNLEEVEAEMRRLKQELKHAIDMYGSACREALAAKQEAKELQRQKIEEEGWVQEGQLSEKSTKSIVEKERAHKAAKDASETAGKIAELETQRRAIEAAGSFSDSSLRYRRYVIGEIEEATNSFDKANKIGEGGYGPVYKGYLDHTPVAIKALKADAVQGRSQFQREVEVLSCIRHPHMVLLIGACPEYGVLVYEYMAKGSLADRLYKYGNTPPLSWELRFRIAAEVATGLLFLHQTKPEPIVHRDLKPGNILIDQNYVSKIGDVGLAKLVPAVAENVTQCHVSSTAGTFCYIDPEYQQTGMLGVKSDVYSFGILLLELLTAKRPTGLAYTVEQAMEQGKFKDMLDPAVPNWPVEEAMSLAKIALKCAQLRRKDRPDLGKEVLPELNKLRARADTNMEWMMFNLSRGRLTPNHSQVSLPPVDELSVCSDKSYTHSSTVSDTEKNSDQNEED

SEQ ID NO: 107602 - protein, 609 aa, Arabidopsis thaliana
  peptide (1)..(609): Ceres Seq. ID no. 13650832
MGQIENHSEIINYEKFRNTMSFRDRAPPRSSTASSIEDYGKSPMARTSNYANSFFDLEDSENDISFVCSGRPSTASSGRPSTSTGRSDISFVSSGRPSTSTTGSPSFIYDFPDSGLTPRESTSSGHSMRLGIRFNDTNIQHDFSFVSQDSGRSSCSCSPQNLEEVEAEMRRLKQELKHAIDMYGSACREALAAKQEAKELQRQKIEEEGWVQEGQLSEKSTKSIVEKERAHKAAKDASETAGKIAELETQRRAIEAAGSFSDSSLRYRRYVIGEIEEATNSFDKANKIGEGGYGPVYKGYLDHTPVAIKALKADAVQGRSQFQREVEVLSCIRHPHMVLLIGACPEYGVLVYEYMAKGSLADRLYKYGNTPPLSWELRFRIAAEVATGLLFLHQTKPEPIVHRDLKPGNILIDQNYVSKIGDVGLAKLVPAVAENVTQCHVSSTAGTFCYIDPEYQQTGMLGVKSDVYSFGILLLELLTAKRPTGLAYTVEQAMEQGKFKDMLDPAVPNWPVEEAMSLAKIALKCAQLRRKDRPDLGKEVLPELNKLRARADTNMEWMMFNLSRGRLTPNHSQVSLPPVDELSVCSDKSYTHSSTVSDTEKNSDQNEED

SEQ ID NO: 107603 - DNA, 847 bp, Arabidopsis thaliana
  misc_feature (1)..(847): Ceres Seq. ID no. 13650837
  misc_feature (1)..(847): Ortholog of  Ceres SEQ ID NO 12608028 as cited in SEQ ID NO 57065
aaaggaaaagccatgaaagaggcgaaggagaagaagaatccagaaatctccgttagtatcacgatatcaacttggggggcttttgctgtttatgtgattactgggttatttctgatcttcggatttcacgtggtccgtaacaaatactctgtcgatctcatttctgatccaactctcactctgcgtctcctatggattattgagttcccgatcgtggtaatcatctacagcttgttccgacgaaacccagagaaatgctcgtactttagagctgttggccgaagcttagtcggactaattgccggtgctcttataaatgctttgggagctgtttctttgggtgcacctattggaatgcaatctctatcaaaaacaattcactggtcctttctaatgtctgttttcacggttgtaccagcaactgcagttttaggtgcatcatggatagattggcatcgtatctttgcttcactaaaaccaatcggaattatagaacatatgctcttagttccagcatatggagcaattattggaggatggtttggagcttggcctatgccacttgactgggaaagaccatggcaggaatggcctatatgtgtgtgttatggagctataggaggctacattggtggacaaatggtgagtttgttgactcttctcagcgaacacaagaatttgaagctagcctagaatagattgatcgtctctggatcggcagaatgagtgtcattttgttttgacttgattgctagatggagagacaacaatagggcaaaggtttttgttagcttggacaaattttgttatattccacatcgaatcaagtgttcaagagaattgcaac

SEQ ID NO: 107604 - protein, 230 aa, Arabidopsis thaliana
  peptide (1)..(230): Ceres Seq. ID no. 13650838
KGKAMKEAKEKKNPEISVSITISTWGAFAVYVITGLFLIFGFHVVRNKYSVDLISDPTLTLRLLWIIEFPIVVIIYSLFRRNPEKCSYFRAVGRSLVGLIAGALINALGAVSLGAPIGMQSLSKTIHWSFLMSVFTVVPATAVLGASWIDWHRIFASLKPIGIIEHMLLVPAYGAIIGGWFGAWPMPLDWERPWQEWPICVCYGAIGGYIGGQMVSLLTLLSEHKNLKLA

SEQ ID NO: 107605 - protein, 226 aa, Arabidopsis thaliana
  peptide (1)..(226): Ceres Seq. ID no. 13650839
MKEAKEKKNPEISVSITISTWGAFAVYVITGLFLIFGFHVVRNKYSVDLISDPTLTLRLLWIIEFPIVVIIYSLFRRNPEKCSYFRAVGRSLVGLIAGALINALGAVSLGAPIGMQSLSKTIHWSFLMSVFTVVPATAVLGASWIDWHRIFASLKPIGIIEHMLLVPAYGAIIGGWFGAWPMPLDWERPWQEWPICVCYGAIGGYIGGQMVSLLTLLSEHKNLKLA

SEQ ID NO: 107606 - DNA, 1009 bp, Arabidopsis thaliana
  misc_feature (1)..(1009): Ceres Seq. ID no. 13650840
  misc_feature (1)..(1009): Ortholog of  Ceres SEQ ID NO 12620190 as cited in SEQ ID NO 66274
catcgctgtctggaacagcgatgaatgaagccttcttctatcttcttcttcttcttcttcttcctcttctcatggccattctacttcactccctctctcttcatccaccaaaccctaaacctcaaaacccttataaacccaaaattctctcttcttctgctacctttcggagagatgtggtgcttagaacagcatcactctgtttcgtctccttcatctttcaaaaccaaattccagagtcattagctgatcctttgaagtctaccaaaccgttacgactcggcattgcgaacactaagtcttggttccagtactttggtagtgggttcgctattagggttcctcctgactttgaagacgtcaatgagcctgaggattactctgcgggattgtctctctatggtgacaaggcaaagccacaaactttcgccgcccggttccaaactcctgatggatcagaagttttgagtgtagtcattcgtccttcaaatcaacttaagatcactttcttagaggctaaagatatatctgatttgggatcattgaaggcagctgcaagactttttgttccaggtgcggcaacaatttactctgctcgtacaatcaaggtaaaggaagaagaaggtttaagaaattactacttctacgagtttggtagagatgaagaacgcatagctctagtagcctctgtgaacagagggaaggtttatatcgctggagcagctgcaccggaatccaaatggaaagacgatgagttgaagctccgatctgctgccatttctttcactattctatagtcaaaaggcagcttcttctaacagaaaactcgaaaatcgctctctagtcgactcgaaaatgtgggactaagaacaaactggccaaatgcgataaccagatattgttttgagacacatttgtcattccattttcgtttatctgtttatttttggttgatgtaatatgttcattgatgttctgtataatgagataacaaatcaagattctttgc

SEQ ID NO: 107607 - protein, 264 aa, Arabidopsis thaliana
  peptide (1)..(264): Ceres Seq. ID no. 13650841
SLSGTAMNEAFFYLLLLLLLPLLMAILLHSLSLHPPNPKPQNPYKPKILSSSATFRRDVVLRTASLCFVSFIFQNQIPESLADPLKSTKPLRLGIANTKSWFQYFGSGFAIRVPPDFEDVNEPEDYSAGLSLYGDKAKPQTFAARFQTPDGSEVLSVVIRPSNQLKITFLEAKDISDLGSLKAAARLFVPGAATIYSARTIKVKEEEGLRNYYFYEFGRDEERIALVASVNRGKVYIAGAAAPESKWKDDELKLRSAAISFTIL

SEQ ID NO: 107608 - protein, 258 aa, Arabidopsis thaliana
  peptide (1)..(258): Ceres Seq. ID no. 13650842
MNEAFFYLLLLLLLPLLMAILLHSLSLHPPNPKPQNPYKPKILSSSATFRRDVVLRTASLCFVSFIFQNQIPESLADPLKSTKPLRLGIANTKSWFQYFGSGFAIRVPPDFEDVNEPEDYSAGLSLYGDKAKPQTFAARFQTPDGSEVLSVVIRPSNQLKITFLEAKDISDLGSLKAAARLFVPGAATIYSARTIKVKEEEGLRNYYFYEFGRDEERIALVASVNRGKVYIAGAAAPESKWKDDELKLRSAAISFTIL

SEQ ID NO: 107609 - protein, 241 aa, Arabidopsis thaliana; identical to SEQ ID NO: 43398
  peptide (1)..(241): Ceres Seq. ID no. 13650843

SEQ ID NO: 107610 - DNA, 1824 bp, Arabidopsis thaliana
  misc_feature (1)..(1824): Ceres Seq. ID no. 13650852
  misc_feature (1)..(1824): Ortholog of  Ceres SEQ ID NO 14311553 as cited in SEQ ID NO 51462
  misc_feature (1)..(1824): Ortholog of  Ceres SEQ ID NO 13599003 as cited in SEQ ID NO 0
acccacactctctctctctctctctctctcaaagaagaagaagatgctgacgagtcccagtaacgcacttcatagtagtactccacacttctggccagttcgccggagcaggctttgccgttcccggaatttccctcgttttcactccggcgaacgcagcagcggcggaggaggaaaattgtgctcgctctctcttctctccggaagtggcgccggtaaattcagtgtcagagctctagttaggcctgatgataccaacgacgctgactccgtcggcgatgggtttctgtcaaaattccactcggaaatagagagattttagttgagactgatctcatggggagacaagcaagttctgcagtcacggtgacagatggagaaactattgtctacacatccgtgtttgtctagctgatgttccaagttagccatcagattttcttcccctttatgttcactatcaggagcgattctcagcttggtggattttttaagcgacaagggagaaccaaagatcacgaggaggacaggaatcgatgaataacaaccccgtcccctgtcaggtgtttcctctggtctctggtggtagttctggtgggaatttgttttcatcttcttccggattctgcaatggtgtctatgtttcatcttcctcccaggcacggccatctgtttctaccgtgccaagagacagaattactgttgctcacgtctctggtgaagggcagaggcaggaatgccctgtggaaacacattccttgcaattgatcaatcaacctcaagaacagaaaattatgacttggtcttcagaccagattcggggcttcttcgattttcctgttccagatccacaagcagcgagcagcagaactatggtttcatccaaggaagtgctttcaaaatgcgaatggccagactgggcggatcagttgatctctgatgatagtcttgaaccaaattggtcggagcttctaggtgatcctaatgtactcaatctatattcaaagatagaaacacagtcttctgatatagcaaggcaagagatcgtctttagaaatcagcatcaggtggatccatcaatggagccgtttaatgccaaaagcccaccagctagttcaatgacatctaagcaaagaatgcgttggacaccagaacttcatgaagcatttgtcgaagctatcaatcagctcggtggtagtgaacgagccacccctaaggctgttttgaagctcatcaatagccctgggttgaccgtttatcatgtcaaaagccatttgcagaaatacagaactgcaaggtataaaccagagctttccaaagatacagaagaacctctagtaaagaatttgaaaaccattgaagatatcaaatctcttgacttgaagacgagcattgaaatcactgaagctctccggttacagatgaaagttcaaaaacaactccacgagcaacttgagatccaaagatcactgcagttacaaatcgaagaacaaggtcggtatcttcagatgatgattgagaaacaacagaagatgcaagagaacaaaaaagactctacttcctcatcatcaatgccagaagctgacccttcagctccatcaccaaacctttcacaacctttcctccataaagcaaccaattcagaaccatcaataactcagaaactgcagaatggttctagcacaatggatcaaagtgaatctacttctgggactagtaatagaaaacgggttagagaagattagacatctcatgagtatgatccaaagatgttgcaaacatatgtaattgtgtatataaaattgaaaatatcacagcagcaag

SEQ ID NO: 107611 - protein, 402 aa, Arabidopsis thaliana; identical to SEQ ID NO: 72290
  peptide (1)..(402): Ceres Seq. ID no. 13650853

SEQ ID NO: 107612 - protein, 316 aa, Arabidopsis thaliana; identical to SEQ ID NO: 72291
  peptide (1)..(316): Ceres Seq. ID no. 13650854

SEQ ID NO: 107613 - protein, 290 aa, Arabidopsis thaliana
  peptide (1)..(290): Ceres Seq. ID no. 13650855
MVSSKEVLSKCEWPDWADQLISDDSLEPNWSELLGDPNVLNLYSKIETQSSDIARQEIVFRNQHQVDPSMEPFNAKSPPASSMTSKQRMRWTPELHEAFVEAINQLGGSERATPKAVLKLINSPGLTVYHVKSHLQKYRTARYKPELSKDTEEPLVKNLKTIEDIKSLDLKTSIEITEALRLQMKVQKQLHEQLEIQRSLQLQIEEQGRYLQMMIEKQQKMQENKKDSTSSSSMPEADPSAPSPNLSQPFLHKATNSEPSITQKLQNGSSTMDQSESTSGTSNRKRVRED

SEQ ID NO: 107614 - DNA, 695 bp, Arabidopsis thaliana
  misc_feature (1)..(695): Ceres Seq. ID no. 13650871
  misc_feature (1)..(695): Ortholog of  Ceres SEQ ID NO 15173047 as cited in SEQ ID NO 61816
  misc_feature (1)..(695): Ortholog of  Ceres SEQ ID NO 13591134 as cited in SEQ ID NO 63820
  misc_feature (1)..(695): Ortholog of  Ceres SEQ ID NO 15178530 as cited in SEQ ID NO 67823
  misc_feature (1)..(695): Ortholog of  Ceres SEQ ID NO 13599565 as cited in SEQ ID NO 0
gttagtattgtcaagttttcgccggagaattcatcacttaacacttcaacatctgaaattcaaaatgcctcgaggaagctccggaggaagatctagctaccgtccttctcgccctgcagctgcacgaagcccgcctcctcaatctgtgaaccgtgctcctcctccagcaacagctcagcctagtagcggtggttctttcttaggcaatattggtgcatccataactgaaggtctggcttggggtactggaactgcatttggacacagggttgtggattctgtgatgggtccacgaacctttaagcacgaaaccgttgtttctcaggttccatctgctgcaaataccatgactgcttgtgacattcactccaaggctttccaagattgcgtcaaccattttggaagcgacatcagtaagtgccagttctacatggacatgctgagtgaatgcaagaagaattctggttccgtggtggctgcttaatcaactagtcgagatgtctgtgctaagaacaactctggtgtctttaataattagttgttgaaatctaatggttttcttgttgaaagatttgggatcttttatgttattgtcttttggttttatgggatcttttatgatggagttattatatcacataattaacaagaaacctataatagcaattagatcaatatcaaccaattccttcatt

SEQ ID NO: 107615 - protein, 160 aa, Arabidopsis thaliana
  peptide (1)..(160): Ceres Seq. ID no. 13650872
LVLSSFRRRIHHLTLQHLKFKMPRGSSGGRSSYRPSRPAAARSPPPQSVNRAPPPATAQPSSGGSFLGNIGASITEGLAWGTGTAFGHRVVDSVMGPRTFKHETVVSQVPSAANTMTACDIHSKAFQDCVNHFGSDISKCQFYMDMLSECKKNSGSVVAA

SEQ ID NO: 107616 - protein, 139 aa, Arabidopsis thaliana; identical to SEQ ID NO: 72697
  peptide (1)..(139): Ceres Seq. ID no. 13650873

SEQ ID NO: 107617 - DNA, 1339 bp, Arabidopsis thaliana
  misc_feature (1)..(1339): Ceres Seq. ID no. 13650890
  misc_feature (1)..(1339): Ortholog of  Ceres SEQ ID NO 13596404 as cited in SEQ ID NO 61966
atcggaatccctagaacactcgatttcagcaaaatcaaatcggattcagtgatcaaaagtcaatttggtcgagaagaaattgagcgttgaagatgacggaggcgatgataggaaataagccaggaatggcgagtgtgaaggatatgccgctgcttcaggatggtccgccaccgggtgggttcgcaccggtccgatatgcccgccggatatccaatacgggtcctagtgcaatggccatgttccttgccgtttctggtgcctttgcttggggaatgtaccaggtcggccagggaaacaaaatccgcaggtaagaacgacttgtaatagctcgttcacatttcaatttttcctctaaaattcgagatcgccttggtaaaattagtgttgtggagtgattgatgaccatagtaatgtagtgaaggatacattttggttaataattgttgaaacttgagtatgtttatcgtaggaattggttaatattattaacctatggaaacataggcttgttgaatcactgttatgtattctgttattagtattccccgacattttggttgaagcttaatcagcatgagtttagccttaaacgaatataaagttcgtcaacaatttgtaaactcttaaagccacaattgcaaagatgtgagaatctgttatgatgaaagcaattatctagttgcatgttttgatagtagttatcgggatactgtttctatgtagatagattgttttagtattatatctggcttgatcattaacttcttatgcatttacaatggtcctaaacaagtctgatttgatatcagtaagtatcaagattaatgctcttatcaagattgatgtgatgtttagggcattgaaggaagagaaatatgctgctcgtagaacaatacttcccattcttcaagcagaagaagatgaaaggtaaaccatattctcaaatttaagtcaatgtgcctgcagcaaccttcagatagcaatcttgtttcaatccccgttttgcattctaggtttgtgtctgagtggaaaaagtatctggaatatgaggctgatgtaatgaaagatgttccgggatggaaagttggcgagaatgtgtacaattctggtcgctggatgcctccggccactggggaactccgtcctgatgtgtggtgatttcctagtttctctcaaatgcatatgatgatgatgaatgatgtttcgctgaggattgatatgttcttgttatatctttttttcttcgggtaataagagaatgattcaacagacagtattcttcttgtattggttttctcttaagtgtttcaatcgtaatatgaggcaaaaacagtttcat

SEQ ID NO: 107618 - protein, 72 aa, Arabidopsis thaliana
  peptide (1)..(72): Ceres Seq. ID no. 13650891
MTEAMIGNKPGMASVKDMPLLQDGPPPGGFAPVRYARRISNTGPSAMAMFLAVSGAFAWGMYQVGQGNKIRR

SEQ ID NO: 107619 - protein, 68 aa, Arabidopsis thaliana
  peptide (1)..(68): Ceres Seq. ID no. 13650892
MIGNKPGMASVKDMPLLQDGPPPGGFAPVRYARRISNTGPSAMAMFLAVSGAFAWGMYQVGQGNKIRR

SEQ ID NO: 107620 - protein, 67 aa, Arabidopsis thaliana
  peptide (1)..(67): Ceres Seq. ID no. 13650893
MCLQQPSDSNLVSIPVLHSRFVSEWKKYLEYEADVMKDVPGWKVGENVYNSGRWMPPATGELRPDVW

SEQ ID NO: 107621 - DNA, 1291 bp, Arabidopsis thaliana
  misc_feature (1)..(1291): Ceres Seq. ID no. 13650902
  misc_feature (1)..(1291): Ortholog of  Ceres SEQ ID NO 13637939 as cited in SEQ ID NO 54930
  misc_feature (1)..(1291): Ortholog of  Ceres SEQ ID NO 13584164 as cited in SEQ ID NO 63681
atcattctcggtttaactgtgaaacacataaataaaacaaagagaaagagagagaatatgggtgggtgggcaatcgcagtacacggtggtgccggtatcgaccctaatcttccggcggagagacaagaagaggctaaacagcttttaactcgttgtctcaacctcggcataatagctttgcgttccaatgtctccgccattgacgtcgttgagctcgtcattagagaattggagacggatcctctgtttaattcaggccgtggatctgctttgacggaaaaaggaacggttgagatggaagctagcattatggacggtacgaagagacgatgcggtgccgtttcggggataaccaccgtgaaaaatcctatatctcttgctcgtctcgtcatggacaaatctccccactcttaccttgctttctcaggtgcagaggatttcgcccgcaaacaggtgtttatttactattttacccttccactttttattctaaaccacttggttagataaatcttctgaccgaagccggtttaatgagaagggagttgaaattgtggacaacgagtactttgtcacggacgacaacgtaggaatgctcaagttggccaaggaagctaactccatcttgtttgattaccggattccgccgatgggatgtgccggtgcagctgcgaccgacagtccaatccaaatgaacggtcttccgatcagcatttacgcaccggagacagtcgggtgcgttgtggttgacgggaaaggacattgtgccgccgggacatccacgggtggtttaatgaacaagatgatgggaaggattggtgactcgccgctgataggagccgggacgtatgcgtcggagttttgtggtgtgtcgtgtaccggagaaggagaagccattataagagcaaccctagctcgtgatgtgtcagctgttatggagtataaaggacttaacctccaagaagcggttgattacgtcatcaagcatcgacttgacgaagggttcgctggactcattgctgtctcgaataaaggagaggtggtttgtggttttaactctaatgggatgttcaggggatgtgcaactgaggatggattcatggaggttgctatttgggagtgagaaatattttagattaagaaaatgtcttactagtatttaatcagtcatcgctctattaatttggttattcattatcataaagctggaggagtaaatttagttatgtcgttatcaccagtcctatattgatttgtgtttaatgcggtttcaaatggttagttcgtgtct

SEQ ID NO: 107622 - protein, 176 aa, Arabidopsis thaliana
  peptide (1)..(176): Ceres Seq. ID no. 13650903
MLKLAKEANSILFDYRIPPMGCAGAAATDSPIQMNGLPISIYAPETVGCVVVDGKGHCAAGTSTGGLMNKMMGRIGDSPLIGAGTYASEFCGVSCTGEGEAIIRATLARDVSAVMEYKGLNLQEAVDYVIKHRLDEGFAGLIAVSNKGEVVCGFNSNGMFRGCATEDGFMEVAIWE

SEQ ID NO: 107623 - protein, 169 aa, Arabidopsis thaliana
  peptide (1)..(169): Ceres Seq. ID no. 13650904
IILGLTVKHINKTKRKRENMGGWAIAVHGGAGIDPNLPAERQEEAKQLLTRCLNLGIIALRSNVSAIDVVELVIRELETDPLFNSGRGSALTEKGTVEMEASIMDGTKRRCGAVSGITTVKNPISLARLVMDKSPHSYLAFSGAEDFARKQVFIYYFTLPLFILNHLVR

SEQ ID NO: 107624 - protein, 157 aa, Arabidopsis thaliana
  peptide (1)..(157): Ceres Seq. ID no. 13650905
MGCAGAAATDSPIQMNGLPISIYAPETVGCVVVDGKGHCAAGTSTGGLMNKMMGRIGDSPLIGAGTYASEFCGVSCTGEGEAIIRATLARDVSAVMEYKGLNLQEAVDYVIKHRLDEGFAGLIAVSNKGEVVCGFNSNGMFRGCATEDGFMEVAIWE

SEQ ID NO: 107625 - DNA, 1077 bp, Arabidopsis thaliana
  misc_feature (1)..(1077): Ceres Seq. ID no. 13650914
  misc_feature (1)..(1077): Ortholog of  Ceres SEQ ID NO 13596163 as cited in SEQ ID NO 60864
  misc_feature (1)..(1077): Ortholog of  Ceres SEQ ID NO 15226347 as cited in SEQ ID NO 61639
aaaaataaaaatctctaattttcactgctccgtaattacattcgccggatctccccgtcatccacattccgttatcgccggcgttcatcttctctacagatcgattcggatcttgattattttttagcaagtagtggtttctgggaacgatgagtcaaggtttcgaaagatatgagagacaatactgtgagatttctgcaaatctctcaaagaaatgtacttcagctattgctcttgatggagtttcataggtcgcggactcgctgatgatggatcaccgatgaaaacacgaaacttttcttagtgtacttgaagatttcagagatagtgattgaagattcagttaacctagttatttagcttatgaatgtgactatgagaatgcagaagctttcactatagggttcagagattagttttctaacttgtacaagtctctgtctccttcatgcattaacaaaagaagcagaatctatctgaaataaaatctggggttgaggaagcagaagctttggttaagaaaatggacctcgaggcaagaaaccttccacccaatgttaaatccagtctccttgtcaaattaagggaatacaaatctgatcttaacaatttcaagacggaagtgaagagaatcacatctggaaacttaaacgctactgctcgagatgagttactagaagctggtatggctgacacattgacggcttcagctgatcaaagatcaagattgatgatgtcaacagaccatttaggccgaaccacagacagaatcaaggacagtaggagaacgatactggagacagaagagcttggtgtttcaatccttcaggatttgcacgggcagagacagtctctcttacgggcccatgaaacgcttcatggagtcgatgataacgtcggaaagagcaagaaaatattgacaacaatgactaggagaatgaatagaaacaaatggaccatcggtgcgataatcacagtccttgtcctcgccattatctttatcttgtacttcaaactcaccaggtgaagcctttttctcttcacctgcctgaccaatttctaactgaacaactttct

SEQ ID NO: 107626 - protein, 167 aa, Arabidopsis thaliana; identical to SEQ ID NO: 89257
  peptide (1)..(167): Ceres Seq. ID no. 13650915

SEQ ID NO: 107627 - protein, 113 aa, Arabidopsis thaliana; identical to SEQ ID NO: 89258
  peptide (1)..(113): Ceres Seq. ID no. 13650916

SEQ ID NO: 107628 - protein, 98 aa, Arabidopsis thaliana; identical to SEQ ID NO: 89259
  peptide (1)..(98): Ceres Seq. ID no. 13650917

SEQ ID NO: 107629 - DNA, 1134 bp, Arabidopsis thaliana
  misc_feature (1)..(1134): Ceres Seq. ID no. 13650922
  misc_feature (1)..(1134): Ortholog of  Ceres SEQ ID NO 13647648 as cited in SEQ ID NO 20346
  misc_feature (1)..(1134): Ortholog of  Ceres SEQ ID NO 15179852 as cited in SEQ ID NO 66623
ttgtctgtttcttcttcctgtggcttctgggtctttgtcaacatcaaagctctttactttttcaacttactttatcgtgcgtctgtacggaccacaaaaggctctctctttatttctctgtgagatttttttaggatctgagagagccaaagatcatggaggaaagccaagaacttgccttgacccagttgagaaaatcggtcgagaaactctcttcttctactgaggtttgagcctcccatcagaaaccctaacagtagagacagtttagtaaaagtgaatccataatcagaaaatctcatcaatggtttttgttgttgttgtttcctctgaaaagggatatgacaaaccaacattgatgaggttcctggtggcaagatcaatggacccagtcaaggcagcaaagatgtttgtagattggcaaaaatggagagcctccatggttcctccaactggattcatccctgagtcagaagtgcaggatgaattggaattcagaaaggtctgtcttcagggtccgaccaaatccggacacccattggtgcttgtcataacctctaagcattttgcttctaaggatccagctaacttcaagaagtttgttgtttatgcgctagacaaaacaatcgcaagtggcaacaatggcaaagaagttggaggtgagaaattagtagccgttattgatctggcaaacattacatacaagaaccttgatgctcgtggattgatcactggctttcaattcttacaatcttactacccggaacgccttgcaaaatgctacattttgcatatgcccggattcttcgtgaccgtttggaaattcgtctgccgttttctagagaaagcaactcaggaaaagattgtgatagttacggatggagaagaacagagaaaattcgaggaggagatcggagcagatgctttaccggaagagtacggtggccgagctaagctcacagcaatccaagatgttcttcttcctcaggctgctccagtaactctaacaaacaataatgtttagctctttatttttggaagcattaacctgaatatttgtaatggtcagaacataactagtggtacatctctaaatttccaaaagaagcaatgaaaacatgagaaagtaatgcg

SEQ ID NO: 107630 - protein, 239 aa, Arabidopsis thaliana
  peptide (1)..(239): Ceres Seq. ID no. 13650923
MVFVVVVSSEKGYDKPTLMRFLVARSMDPVKAAKMFVDWQKWRASMVPPTGFIPESEVQDELEFRKVCLQGPTKSGHPLVLVITSKHFASKDPANFKKFVVYALDKTIASGNNGKEVGGEKLVAVIDLANITYKNLDARGLITGFQFLQSYYPERLAKCYILHMPGFFVTVWKFVCRFLEKATQEKIVIVTDGEEQRKFEEEIGADALPEEYGGRAKLTAIQDVLLPQAAPVTLTNNNV

SEQ ID NO: 107631 - protein, 221 aa, Arabidopsis thaliana; identical to SEQ ID NO: 20348
  peptide (1)..(221): Ceres Seq. ID no. 13650924

SEQ ID NO: 107632 - protein, 213 aa, Arabidopsis thaliana; identical to SEQ ID NO: 20349
  peptide (1)..(213): Ceres Seq. ID no. 13650925

SEQ ID NO: 107633 - DNA, 1552 bp, Arabidopsis thaliana
  misc_feature (1)..(1552): Ceres Seq. ID no. 13650955
  misc_feature (1)..(1552): Ortholog of  Ceres SEQ ID NO 13639663 as cited in SEQ ID NO 57850
aaaaacctctccgttttttcctctctgtttagctttgaattcacaagagtcatgcgaagattcaactgggttctgcggcatgtacaagctcgaagaacttttgattccgcgatcggattgcgtcaagggtctcagaagccgttgttcgagcgatacattcacgctacaggtataaacaactccagtgctcgtaattactatgatgttctcggtgtttctcctaaagctacacgggaggagattaaaaaatcatttcatgagcttgcgaaaaaattccaccctgatacaaatagaaataatccgtcagcaaaaaggaagttccaggaaataagagaggcatatgagaccctgggaaattcggaaagaagagaagaatatgataagctgcagtatcggaattcggattatgtaaatagtgacggtggtgattcagagaggttcagacgtgcataccagtccaatttctcggatactttccacaagattttttctgagatatttgagaacaatcagataaaacctgatattcgggtggaactgtcgctttctctttccgaagctgcagaagggtgcacaaaacgtttgtcttttgatgcatatgtcttttgtgattcctgtgatgggcttggccaccctagcgatgctgccatgagcatttgtccaacatgcaggggggttggacgagtaactattcctccttttacagcatcatgccagacgtgcaaggggacgggacacattattaaggaatactgcatgtcttgtagaggatcaggtattgtggaaggcacaaagacagctgaacttgtgatccctggaggggtggagtctgaagctacaatcacaatcgtaggtgctggtaatgtaagttcaagaacaagtcaacctgggaacttgtatatcaaactaaaggttgctaatgattcaactttcactagggatggctcagatatatatgtggatgctaatattagctttacacaagctattttggggggcaaagttgtggtgccaacactttcaggcaagatacagctagatataccaaaggggactcagcctgatcaacttcttgttttaagaggcaaaggactaccgaagcaaggcttttttgtagatcatggagatcagtatgttcgcttccgcgttaactttcctactgaagtgaatgaacgtcagcgtgctatactggaagagtttgcaaaggaagaaatcaacaatgagttgagcgactctgctgaaggaagttggctttaccagaagctctctactggttgaacttacaggtggaatctaacgggtcctcagatcatccgcgacttctcgttaatggtgctgctggcgctattgttgagcaggttaatgggatgaagccaccacgagagatgaaagataaaagcattcaacagaagacaaatgaagactaatttcatctattgctggtagaacaaaaagctcaccagcataacagagagtgtcattgtttgacctcataattctattacaaactcatttgatgtgaataataagagacatcaaacaagttaagctg

SEQ ID NO: 107634 - protein, 425 aa, Arabidopsis thaliana
  peptide (1)..(425): Ceres Seq. ID no. 13650956
KNLSVFSSLFSFEFTRVMRRFNWVLRHVQARRTFDSAIGLRQGSQKPLFERYIHATGINNSSARNYYDVLGVSPKATREEIKKSFHELAKKFHPDTNRNNPSAKRKFQEIREAYETLGNSERREEYDKLQYRNSDYVNSDGGDSERFRRAYQSNFSDTFHKIFSEIFENNQIKPDIRVELSLSLSEAAEGCTKRLSFDAYVFCDSCDGLGHPSDAAMSICPTCRGVGRVTIPPFTASCQTCKGTGHIIKEYCMSCRGSGIVEGTKTAELVIPGGVESEATITIVGAGNVSSRTSQPGNLYIKLKVANDSTFTRDGSDIYVDANISFTQAILGGKVVVPTLSGKIQLDIPKGTQPDQLLVLRGKGLPKQGFFVDHGDQYVRFRVNFPTEVNERQRAILEEFAKEEINNELSDSAEGSWLYQKLSTG

SEQ ID NO: 107635 - protein, 408 aa, Arabidopsis thaliana
  peptide (1)..(408): Ceres Seq. ID no. 13650957
MRRFNWVLRHVQARRTFDSAIGLRQGSQKPLFERYIHATGINNSSARNYYDVLGVSPKATREEIKKSFHELAKKFHPDTNRNNPSAKRKFQEIREAYETLGNSERREEYDKLQYRNSDYVNSDGGDSERFRRAYQSNFSDTFHKIFSEIFENNQIKPDIRVELSLSLSEAAEGCTKRLSFDAYVFCDSCDGLGHPSDAAMSICPTCRGVGRVTIPPFTASCQTCKGTGHIIKEYCMSCRGSGIVEGTKTAELVIPGGVESEATITIVGAGNVSSRTSQPGNLYIKLKVANDSTFTRDGSDIYVDANISFTQAILGGKVVVPTLSGKIQLDIPKGTQPDQLLVLRGKGLPKQGFFVDHGDQYVRFRVNFPTEVNERQRAILEEFAKEEINNELSDSAEGSWLYQKLSTG

SEQ ID NO: 107636 - DNA, 2003 bp, Arabidopsis thaliana
  misc_feature (1)..(2003): Ceres Seq. ID no. 13651026
  misc_feature (1)..(2003): Ortholog of  Ceres SEQ ID NO 13594317 as cited in SEQ ID NO 57796
agtctctctctcggctttatccaaaggttccttcgtttactccgcttctatggaagaagcttgaatccttctctcttcttcttctccttcttcccttgacatttttgttctgagaagcaacatggccctcggtggcttgatttcaaatcggaacttcggttccttcatcggctcaggcaatggttgtcagagacttggaaaaagtggtgcagaggtttccaagctttttccaaatgcattgttgtgccgtaatcatcaacctctgcaagctagtttacatcatgaatcgggacacatgagaagaagttttggatgtttccttcaaccaagaatggacagtgtaattaggtttaggaacagtatcaagatcaacagatctcgtgcttactacaaatcagaggagtcagatatcacggaaggagttgtgccatcggctgatggctcagctgaagctattttagttgaaggaaatctacagaacgcatctccatggtggcagcagtttcctagacgctgggtgatcgtcttgttatgcttttcgtcttttcttctttgcaatatggaccgtgtgaacatgagcattgcaattcttcccatgtcacaagaatataactggagtagtgcaactgttggcttaattcagtcctctttcttctggggctatttacttactcagattctgggaggtatatgggcagataagtttggcgggaaggttgttttaggttttggtgttgtctggtggtcctttgccactattatgacacctattgctgctagacttggtcttccttttttgcttgtagtgcgggcgttcatgggcattggcgagggtgttgcaatgcctgctatgaacaacatgctttctaaatggatccctgtctcagagagaagcagatcgcttgcactggtctatagtggcatgtatcttggttccgtcacaggattggcattctctcctatgctaatcaccaagttcggatggccatctgttttctactcgtttggctccctcggaagtatatggtttttgctatggctaaaatttgcatatagctctcccaaggatgacccggacctaagtgaagaagaaaaaaaggttatactgggaggtagcaaaccaagggaacctgttacagtgattccatggaagctaatactgtctaaacccccagtctgggctctcataatttcccacttctgccataattggggaactttcatactattgacatggatgcccacatattacaatcaggtcttgaagttcaacctcactgaatccgggctactatgcgttttgccatggctaaccatggctgtttttgctaatattggaggttggattgctgatactcttgtgagcagaggtctttcaattacaaacgttcgaaagattatgcaatcaattggttttctaggccctgccttcttcctgagtcagctgagccatgtcaaaactccagcaatggcagttctctgcatggcatgcagtcagggctctgatgcattctctcagtcgggtctctactctaatcatcaagacattggcccacgatacgctggtgtactcttaggactatcaaacacagcaggagtcctagctggtgtctttggcactgcagctactggttacatcctccaacgaggttcatgggatgatgtgttcaaagtagcagttgcactgtatctaattggaactctggtctggaacttgttcgcaaccggagaaaaaattctcgactagaaccaagaaactaatagctgcagtgaaattgtgtgaggaagctttatatttgttctttctctgcttataaatttgatctgatagtgagatcaaaatggttcgctggtctgtttcataaagtaacatgttaaagaaaagatgtatttttttggaacttgactcttttgaagcttacaatttgatggggatggagaaaaagaaaccaaaacaaaaacaatcaaacttttttactttaggaagaagagtatttgcttac

SEQ ID NO: 107637 - protein, 541 aa, Arabidopsis thaliana
  peptide (1)..(541): Ceres Seq. ID no. 13651027
MALGGLISNRNFGSFIGSGNGCQRLGKSGAEVSKLFPNALLCRNHQPLQASLHHESGHMRRSFGCFLQPRMDSVIRFRNSIKINRSRAYYKSEESDITEGVVPSADGSAEAILVEGNLQNASPWWQQFPRRWVIVLLCFSSFLLCNMDRVNMSIAILPMSQEYNWSSATVGLIQSSFFWGYLLTQILGGIWADKFGGKVVLGFGVVWWSFATIMTPIAARLGLPFLLVVRAFMGIGEGVAMPAMNNMLSKWIPVSERSRSLALVYSGMYLGSVTGLAFSPMLITKFGWPSVFYSFGSLGSIWFLLWLKFAYSSPKDDPDLSEEEKKVILGGSKPREPVTVIPWKLILSKPPVWALIISHFCHNWGTFILLTWMPTYYNQVLKFNLTESGLLCVLPWLTMAVFANIGGWIADTLVSRGLSITNVRKIMQSIGFLGPAFFLSQLSHVKTPAMAVLCMACSQGSDAFSQSGLYSNHQDIGPRYAGVLLGLSNTAGVLAGVFGTAATGYILQRGSWDDVFKVAVALYLIGTLVWNLFATGEKILD

SEQ ID NO: 107638 - protein, 483 aa, Arabidopsis thaliana
  peptide (1)..(483): Ceres Seq. ID no. 13651028
MRRSFGCFLQPRMDSVIRFRNSIKINRSRAYYKSEESDITEGVVPSADGSAEAILVEGNLQNASPWWQQFPRRWVIVLLCFSSFLLCNMDRVNMSIAILPMSQEYNWSSATVGLIQSSFFWGYLLTQILGGIWADKFGGKVVLGFGVVWWSFATIMTPIAARLGLPFLLVVRAFMGIGEGVAMPAMNNMLSKWIPVSERSRSLALVYSGMYLGSVTGLAFSPMLITKFGWPSVFYSFGSLGSIWFLLWLKFAYSSPKDDPDLSEEEKKVILGGSKPREPVTVIPWKLILSKPPVWALIISHFCHNWGTFILLTWMPTYYNQVLKFNLTESGLLCVLPWLTMAVFANIGGWIADTLVSRGLSITNVRKIMQSIGFLGPAFFLSQLSHVKTPAMAVLCMACSQGSDAFSQSGLYSNHQDIGPRYAGVLLGLSNTAGVLAGVFGTAATGYILQRGSWDDVFKVAVALYLIGTLVWNLFATGEKILD

SEQ ID NO: 107639 - protein, 471 aa, Arabidopsis thaliana
  peptide (1)..(471): Ceres Seq. ID no. 13651029
MDSVIRFRNSIKINRSRAYYKSEESDITEGVVPSADGSAEAILVEGNLQNASPWWQQFPRRWVIVLLCFSSFLLCNMDRVNMSIAILPMSQEYNWSSATVGLIQSSFFWGYLLTQILGGIWADKFGGKVVLGFGVVWWSFATIMTPIAARLGLPFLLVVRAFMGIGEGVAMPAMNNMLSKWIPVSERSRSLALVYSGMYLGSVTGLAFSPMLITKFGWPSVFYSFGSLGSIWFLLWLKFAYSSPKDDPDLSEEEKKVILGGSKPREPVTVIPWKLILSKPPVWALIISHFCHNWGTFILLTWMPTYYNQVLKFNLTESGLLCVLPWLTMAVFANIGGWIADTLVSRGLSITNVRKIMQSIGFLGPAFFLSQLSHVKTPAMAVLCMACSQGSDAFSQSGLYSNHQDIGPRYAGVLLGLSNTAGVLAGVFGTAATGYILQRGSWDDVFKVAVALYLIGTLVWNLFATGEKILD

SEQ ID NO: 107640 - DNA, 1577 bp, Arabidopsis thaliana
  misc_feature (1)..(1577): Ceres Seq. ID no. 13651034
  misc_feature (1)..(1577): Ortholog of  Ceres SEQ ID NO 14314567 as cited in SEQ ID NO 52335
  misc_feature (1)..(1577): Ortholog of  Ceres SEQ ID NO 13595437 as cited in SEQ ID NO 56562
  misc_feature (1)..(1577): Ortholog of  Ceres SEQ ID NO 14315985 as cited in SEQ ID NO 57720
attgaaagaagctctggcatttctctgctacagtgttggttttcagctgcagaattggtgaaaaaagtttggtgaatttcaggagcagagtatttaagtaattttggggaattagtgagaaaatggaggagaaaggtgaaataagtccaagtggggtcgtcacagttaagggagatgaagctttggttccaagaacagagtttcaacaaaaccctagttttctccaattcgtgagtcccacaacggtagtgactcctctccctcctccaccagctccttcttcggctccggtaccaaccaccgtgactcctggctcagccacagcatcaaccggatcagatccgacgaaaaagaagagaggaagaccgaggaagtacgcaccagacggaagcctgaaccctaggtttttgcgaccaactctgtctccaactccaatctcatcttcgattccattgtctggagattatcaatggaaacgaggcaaagctcagcagcagcatcagcctcttgagttcgtcaagaaatctcacaaattcgagtatggaagcccagctcctactcctcctcttcctgggctctcatgctatgtgggtgcaaattttacgacccatcaatttactgtcaatggcggtgaggatgtgacaatgaaggttatgccgtattcgcaacaaggatctcgagctatctgcattctttctgcaactggttcgatctctaatgtcactcttggtcaacctaccaatgcaggtggcactcttacatatgagggtcggtttgagatactatcgctatctggttcctttatgcctactgaaaatggaggaacaaaaggtcgggctggtgggatgagcatttctttagccggaccaaatggcaatatatttggtggtggccttgccggtatgcttatagcagctggtcctgttcaggtggtaatgggaagtttcattgtgatgcatcaagcagaacaaaatcagaagaagaaacctagagttatggaggcttttgctccaccacaaccacaagcaccaccacaactgcaacaacaacaacctcctacttttaccataacaaccgtgaattcaacttctccttcggtgaacaccgtagaggagcagaaaccacaagcttatggtggtggtatagtgagaccgatggctcaaatgccttcttctttccaaaacgacaattcaactatgaacaatttcacaccggcctatcatggatacgggaatatgaacactggtactactcacaaagaagaacatgaagacgaagatggtggtgatgatgatgatgattcaggcgatactaggagccaatctcatagtggttgagcaattctctgatcaaagtcagaaagttttcttgtgtagaaaggaagggagcttaaaggagtgcttttttttagagggttgttttagttgtgtgagggttttcttcttttgtgtgcttttctaatttctagggttattcttctttgtgatcggtttagatttaatcatgtcgaagtcatagactaaacgatgttcttattgttgaggtcattgggattcaaatttagtaagacttttgcg

SEQ ID NO: 107641 - protein, 404 aa, Arabidopsis thaliana
  peptide (1)..(404): Ceres Seq. ID no. 13651035
MEEKGEISPSGVVTVKGDEALVPRTEFQQNPSFLQFVSPTTVVTPLPPPPAPSSAPVPTTVTPGSATASTGSDPTKKKRGRPRKYAPDGSLNPRFLRPTLSPTPISSSIPLSGDYQWKRGKAQQQHQPLEFVKKSHKFEYGSPAPTPPLPGLSCYVGANFTTHQFTVNGGEDVTMKVMPYSQQGSRAICILSATGSISNVTLGQPTNAGGTLTYEGRFEILSLSGSFMPTENGGTKGRAGGMSISLAGPNGNIFGGGLAGMLIAAGPVQVVMGSFIVMHQAEQNQKKKPRVMEAFAPPQPQAPPQLQQQQPPTFTITTVNSTSPSVNTVEEQKPQAYGGGIVRPMAQMPSSFQNDNSTMNNFTPAYHGYGNMNTGTTHKEEHEDEDGGDDDDDSGDTRSQSHSG

SEQ ID NO: 107642 - protein, 230 aa, Arabidopsis thaliana; identical to SEQ ID NO: 72979
  peptide (1)..(230): Ceres Seq. ID no. 13651036

SEQ ID NO: 107643 - protein, 227 aa, Arabidopsis thaliana; identical to SEQ ID NO: 72980
  peptide (1)..(227): Ceres Seq. ID no. 13651037

SEQ ID NO: 107644 - DNA, 1500 bp, Arabidopsis thaliana
  misc_feature (1)..(1500): Ceres Seq. ID no. 13651094
  misc_feature (1)..(1500): Ortholog of  Ceres SEQ ID NO 15170099 as cited in SEQ ID NO 66491
gattcacatttttatttatctttccatttagccattctgttccctgtctcttcctcctctctttttgacacatcacatcatcatcacatcatcattcaacatcaatcatcatcatatgcatacacatacatctgtgttctgcggatcgagttaattagttatggcttcttcgaatagacactggccaagcatgttcaagtccaaacctcatccccatcaatgacaacatgacatcaactctcctctcttgccttctgcttctcaccgatcttctcctttctcttcaggatgtgaagtggagaggagtccagagccaaaaccaagatggaatccaaagccagagcagattcggatacttgaagcaatctttaactccgggatggtgaatcctccaagagaggagatcaggaggattagggctcagcttcaagaatacggccaagtcggtgatgctaacgtcttctactggttccaaaaccgtaagtcccgtagtaaacacaaactccgcctcctccacaaccactccaaacactctctccctcaaacgcaaccgcagccgcagccgcaaccttcggcttcctcttcctcttcctcctcctcttcctcctccaaatccaccaaaccccgaaaaagcaagaacaagaacaacactaatctctctttgggtggtagtcaaatgatggggatgtttccaccggaaccggcgtttctcttcccggtctccactgtcggagggtttgaaggtatcaccgtctcatcccaattagggtttctctccggtgatatgattgagcaacaaaaaccggctccaacgtgtaccggactcctgctgagtgagatcatgaacggtagtgtgagttatggaactcatcatcaacaacacttgagtgagaaagaagttgaagaaatgaggatgaagatgttgcaacagccacagactcagatttgttacgctaccactaatcatcaaatagcttcttacaacaacaacaacaacaacaataacatcatgcttcatattcctcccactacttctactgccaccactattactacttcgcattctctcgctactgtcccatcaacttcggaccagcttcaagttcaagcggacgcacgaataagagttttcatcaatgaaatggagcttgaagtgagctcaggaccgttcaatgtgagggatgcatttggggaagaggttgttctgattaattccgcgggtcagcccattgtcaccgatgaatatggcgtcgctcttcaccctcttcaacacggagcctcgtactatctgatctagtcgtgtgggagatttgagtttgaagaagaaattaagacctgtctctttctttcaccatctctcgtacgtaggcttaaatgttaagattttataaagtattggtttcagttacctgttgtgacggtgtttatgtatgagtttcggacaacattcacaaaactctctcgttaaattgttgaccaataatatatgatgtgtgttcc

SEQ ID NO: 107645 - protein, 305 aa, Arabidopsis thaliana
  peptide (1)..(305): Ceres Seq. ID no. 13651095
MVNPPREEIRRIRAQLQEYGQVGDANVFYWFQNRKSRSKHKLRLLHNHSKHSLPQTQPQPQPQPSASSSSSSSSSSSKSTKPRKSKNKNNTNLSLGGSQMMGMFPPEPAFLFPVSTVGGFEGITVSSQLGFLSGDMIEQQKPAPTCTGLLLSEIMNGSVSYGTHHQQHLSEKEVEEMRMKMLQQPQTQICYATTNHQIASYNNNNNNNNIMLHIPPTTSTATTITTSHSLATVPSTSDQLQVQADARIRVFINEMELEVSSGPFNVRDAFGEEVVLINSAGQPIVTDEYGVALHPLQHGASYYLI

SEQ ID NO: 107646 - protein, 206 aa, Arabidopsis thaliana
  peptide (1)..(206): Ceres Seq. ID no. 13651096
MMGMFPPEPAFLFPVSTVGGFEGITVSSQLGFLSGDMIEQQKPAPTCTGLLLSEIMNGSVSYGTHHQQHLSEKEVEEMRMKMLQQPQTQICYATTNHQIASYNNNNNNNNIMLHIPPTTSTATTITTSHSLATVPSTSDQLQVQADARIRVFINEMELEVSSGPFNVRDAFGEEVVLINSAGQPIVTDEYGVALHPLQHGASYYLI

SEQ ID NO: 107647 - protein, 205 aa, Arabidopsis thaliana
  peptide (1)..(205): Ceres Seq. ID no. 13651097
MGMFPPEPAFLFPVSTVGGFEGITVSSQLGFLSGDMIEQQKPAPTCTGLLLSEIMNGSVSYGTHHQQHLSEKEVEEMRMKMLQQPQTQICYATTNHQIASYNNNNNNNNIMLHIPPTTSTATTITTSHSLATVPSTSDQLQVQADARIRVFINEMELEVSSGPFNVRDAFGEEVVLINSAGQPIVTDEYGVALHPLQHGASYYLI

SEQ ID NO: 107648 - DNA, 2320 bp, Arabidopsis thaliana
  misc_feature (1)..(2320): Ceres Seq. ID no. 13651145
  misc_feature (1)..(2320): Ortholog of  Ceres SEQ ID NO 13654989 as cited in SEQ ID NO 63117
  misc_feature (1)..(2320): Ortholog of  Ceres SEQ ID NO 13584744 as cited in SEQ ID NO 69137
atttttctttctaatcttcttcatcaggcagttgcgtcgtggatcaccggggagaaggtttctccaccgtttgagaaaccctaataacaacattcaaaatggcggactcaccggtggattcatctcctgcccctgaaacctcaaatgggacaccaccgtcaaacggaacatcgccgtctaatgagtcatcgccgccaacaccaccttcttcaccaccaccatcatcaatatctgctcctccgccagatatctccgcttctttttcaccgccgcctgcaccaccaacgcaagaaacgtcacctcctacatctccgtcctcatcgccgcctgttgtagctaatccgtcaccgcagactccagagaatccttctccacctgcacctgaaggctcaactcctgtaacgccacctgcaccaccacaaacaccgtcgaaccaatcaccggaaagaccaactcctccttctcctggtgccaatgatgaccgaaacagaaccaatggcggaaacaacaacagagacggctccacaccatcaccaccgtcgtcagggaacagaacttccggtgacggtggctcaccttcaccacctcggtcgataagccctcctcagaatagtggagattcagactcatcatcgggtaatcatccacaagccaacattggattgattattggagtccttgtaggagcagggcttttgcttctacttgcagtgtgtatttgcatctgttgcaacaggaagaagaagaagaaatctcctcaggtcaaccacatgcactactacaataacaatccttatggaggagcaccctcaggtaatggtggttattacaagggaacacctcaagatcatgtggtgaatatggctggtcaaggaggtgggaattggggtccacagcaacctgtgtctggtcctcacagtgatgcttccaacttaaccggtcgaactgctataccgtcacctcaagctgcaactcttggtcacaaccaaagcactttcacatacgatgaactgtccattgcaacagaaggtttcgctcagtcaaatttgctaggacaaggaggatttgggtatgttcataaaggagttctgcctagtggcaaagaagttgcagtgaagagtcttaaacttggaagtggacaaggggaacgcgagtttcaagcagaggttgatatcattagccgtgtccatcatcgtcatctcgtttctcttgttggatattgcatctctggtggtcaaagacttttggtttatgagtttatacctaacaacactcttgaatttcatcttcatggaaagggtcgtccggttttggattggcctacaagagtgaagattgcattgggatcagctagaggccttgcatatttgcatgaagactgtcaccctcgcattatccacagagatatcaaagctgcaaacattcttcttgatttcagttttgagaccaaggtggcagattttggattggctaagctatctcaagacaactatactcatgtctccactcgcgtcatgggaacttttggatacttagctccagagtatgcatcaagcggaaagttatccgacaaatctgatgttttctcatttggagtaatgcttcttgagctcataaccggaagacctcctctggatctaactggagaaatggaagatagcttggtagattgggcaaggcctttgtgtttgaaagcagctcaagatggagattacaaccaattggctgatccacgtctagagctaaactacagtcatcaagagatggttcaaatggcttcttgtgcagctgcagcaatcagacattcagcaagaagacggcctaagatgagccagattgtacgagcactagaaggagatatgtcaatggatgatctaagtgagggaacaagaccaggacaaagcacgtacttgagccccgggagcgtgagctcagagtatgacgcaagctcgtacacggcagacatgaaaaagttcaagaaactggcgttagagaataaagaatatcaaagcagtgaatatggtggaacaagtgagtatggcttaaacccttctgcttcaagtagtgaagaaatgaatagaggctcaatgaaacgcaatcctcagctttgaaagaagagacaacacttgtcataatatttcagttttcttctctgtttttctttcattgtttgttcattctgcatcaaagacgtgcagtttttgacagtcacaaaattatgatgtttgtaggagtaatttttgaccaaaagagattagagtgtggttttgttgaaatgtttagtacaaagccttaatccataaatacgtggaatttatct

SEQ ID NO: 107649 - protein, 670 aa, Arabidopsis thaliana
  peptide (1)..(670): Ceres Seq. ID no. 13651146
MADSPVDSSPAPETSNGTPPSNGTSPSNESSPPTPPSSPPPSSISAPPPDISASFSPPPAPPTQETSPPTSPSSSPPVVANPSPQTPENPSPPAPEGSTPVTPPAPPQTPSNQSPERPTPPSPGANDDRNRTNGGNNNRDGSTPSPPSSGNRTSGDGGSPSPPRSISPPQNSGDSDSSSGNHPQANIGLIIGVLVGAGLLLLLAVCICICCNRKKKKKSPQVNHMHYYNNNPYGGAPSGNGGYYKGTPQDHVVNMAGQGGGNWGPQQPVSGPHSDASNLTGRTAIPSPQAATLGHNQSTFTYDELSIATEGFAQSNLLGQGGFGYVHKGVLPSGKEVAVKSLKLGSGQGEREFQAEVDIISRVHHRHLVSLVGYCISGGQRLLVYEFIPNNTLEFHLHGKGRPVLDWPTRVKIALGSARGLAYLHEDCHPRIIHRDIKAANILLDFSFETKVADFGLAKLSQDNYTHVSTRVMGTFGYLAPEYASSGKLSDKSDVFSFGVMLLELITGRPPLDLTGEMEDSLVDWARPLCLKAAQDGDYNQLADPRLELNYSHQEMVQMASCAAAAIRHSARRRPKMSQIVRALEGDMSMDDLSEGTRPGQSTYLSPGSVSSEYDASSYTADMKKFKKLALENKEYQSSEYGGTSEYGLNPSASSSEEMNRGSMKRNPQL

SEQ ID NO: 107650 - protein, 446 aa, Arabidopsis thaliana
  peptide (1)..(446): Ceres Seq. ID no. 13651147
MHYYNNNPYGGAPSGNGGYYKGTPQDHVVNMAGQGGGNWGPQQPVSGPHSDASNLTGRTAIPSPQAATLGHNQSTFTYDELSIATEGFAQSNLLGQGGFGYVHKGVLPSGKEVAVKSLKLGSGQGEREFQAEVDIISRVHHRHLVSLVGYCISGGQRLLVYEFIPNNTLEFHLHGKGRPVLDWPTRVKIALGSARGLAYLHEDCHPRIIHRDIKAANILLDFSFETKVADFGLAKLSQDNYTHVSTRVMGTFGYLAPEYASSGKLSDKSDVFSFGVMLLELITGRPPLDLTGEMEDSLVDWARPLCLKAAQDGDYNQLADPRLELNYSHQEMVQMASCAAAAIRHSARRRPKMSQIVRALEGDMSMDDLSEGTRPGQSTYLSPGSVSSEYDASSYTADMKKFKKLALENKEYQSSEYGGTSEYGLNPSASSSEEMNRGSMKRNPQL

SEQ ID NO: 107651 - protein, 416 aa, Arabidopsis thaliana
  peptide (1)..(416): Ceres Seq. ID no. 13651148
MAGQGGGNWGPQQPVSGPHSDASNLTGRTAIPSPQAATLGHNQSTFTYDELSIATEGFAQSNLLGQGGFGYVHKGVLPSGKEVAVKSLKLGSGQGEREFQAEVDIISRVHHRHLVSLVGYCISGGQRLLVYEFIPNNTLEFHLHGKGRPVLDWPTRVKIALGSARGLAYLHEDCHPRIIHRDIKAANILLDFSFETKVADFGLAKLSQDNYTHVSTRVMGTFGYLAPEYASSGKLSDKSDVFSFGVMLLELITGRPPLDLTGEMEDSLVDWARPLCLKAAQDGDYNQLADPRLELNYSHQEMVQMASCAAAAIRHSARRRPKMSQIVRALEGDMSMDDLSEGTRPGQSTYLSPGSVSSEYDASSYTADMKKFKKLALENKEYQSSEYGGTSEYGLNPSASSSEEMNRGSMKRNPQL

SEQ ID NO: 107652 - DNA, 2668 bp, Arabidopsis thaliana
  misc_feature (1)..(2668): Ceres Seq. ID no. 13651152
  misc_feature (1)..(2668): Ortholog of  Ceres SEQ ID NO 14314423 as cited in SEQ ID NO 52352
catcgctgtctggaacagcgatccgagaaccgatcttctttctatagtttccatgaagtcttcttcttctcagagctacgatgttttccccaacttcagaggggaagatgtccgccactcattagtcagccaccttcgtaaggaacttgatcgcaaattcatcaatacattcaacgacaacaggatcgaaagaagccgcaaaataaccccagagctgttattggctatagaaaactcaaggatctcacttgtcgtcttctctaaaaactatgcttcttccacgtggtgcttagatgaattggtgaagatccaagagtgctatgagaaattggatcaaatggtgattcctattttctacaaagtagatccttctcatgttagaaaacagaccggagagtttggcatggtctttggggagacctgcaagggcagaacagagaatgagaagcgaaaatggatgcgagctctagcagaggtagcacatctagccggagaagatcttcggaactggcgtagcgaagcagaaatgcttgaaaatatcgccaaggatgtttcaaacaaactcttccccccatcaaataatttcagtgacttcgtcgggattgaagctcatatagaggcattgatatcaatgttgcgcttcgactccaagaaagcacgaatgatagggatttgtgggccttctgaaactggtaagactactataggaagagctttatacagcagactcaaaagcgacttccaccatcgggctttcgtagcatataagagaaaaatacggagcgactatgaccagaagctgtattgggaagaacaatttctatcagaaattctttgtcagaaggatataaagatagaggaatgtggtgcggtggaacaacgactaaagcacacgaaagttcttattgttcttgatgatgttgatgatatagagctactaaaaacgttggtaggacgtatcagatggtttggatctgagagcaaaattgttgtgattactcaaaaaagggaacttctcaaggctcacaacattgcacatgtttatgaagtgggattcccatcagaagaactggctcatcaaatgttttgtcgatatgcttttgggaaaaactctccacctcatggtttcaacgagcttgcagatgaagctgcaaagattgccggtaatcgtcctaaagctctcaagtacgttggttcgtcttttagaagactagacaaggaacaatgggtgaagatgctatcggagttccgtagtaatgggaataaactaaaaatcagctatgatgagttagatggtaaaggtcaagattacgttgcgtgtttaaccaatggttcaaattcccaggtgaaggcagagtggatccacttggcactaggcgtgtctatattacttaacatccgcagtgacggaacgacaattctcaaacatttgagctacaatcgaagcatggcgcaacaagcaaaaatatggtggtatgaaaatttggaaagagtgtgcaagaagtacaatatatgtggcatagatagctcaactgatggtggtggttcaacgtatggacaatgttcaaattcccaatttcaaagaaacatggacgcaagccccgggggaaacaaaaccagtaatcaatccacaaaagattcaccgagagcttctcaagtagagaaggaaaagatcgagtactgtgagccacatgtatatataacacctgccatcttcagtgacggaaccagagctcccaaatacgtggagtctaggattctatatcaatcaatctttcaacaagtggttgtttgtacttagtagccgaagagtaacccaagtgcaccacgccaaaacatggtggccggagaattgtgaaaaagtgtacgagaaccacaacaacatatatggcatagatagatcaattgacggtggtgataagtttgagggaaaaagtaaagttagtgacggtgggttagacggcaaagatcaaggttcaatgtatggacaaagttcaaattccgagcttcaaataaacatggacgcagacaataggagatgtgaacctgtgagtgagatgcttttcaaaaattacaatgtgtgttcgcctaatggtttaaccgatgtaaactgttcaaatccccagtctcaaagaaaattggacgcaagcctaaagaaagacaaaattgtgcatgagtggattcgaaccggtagtggcttcttttttgattttcagggcccaaaatctatagtgagtgctgctcaagtggacgagaaaaatttcgagtactgtgaacaaggtgtgtatataacacttggcatcctcagtggcggaattatagttctcaaacatttggagttcagccgaagaatggcgcaacaagcaaaagtttggtggtcggaaaattggataaaagtgtaccaggagcacaacatatgtggcatagataaatcatttgatggtaggtttgatgatagacgtgtcattcgtcaattaagaccaaactgaagcacggcctggcccttgtaaaagtcaggacttgagctagatacttaagccaagcagatctgtttggctaagtctggtcgggttagcgcgaaattgtcgaaatctgtttaataattgcattcagtgcaagtctttaatttgtacttcatggctttaatacactaattaaacattggacc

SEQ ID NO: 107653 - protein, 599 aa, Arabidopsis thaliana
  peptide (1)..(599): Ceres Seq. ID no. 13651153
IAVWNSDPRTDLLSIVSMKSSSSQSYDVFPNFRGEDVRHSLVSHLRKELDRKFINTFNDNRIERSRKITPELLLAIENSRISLVVFSKNYASSTWCLDELVKIQECYEKLDQMVIPIFYKVDPSHVRKQTGEFGMVFGETCKGRTENEKRKWMRALAEVAHLAGEDLRNWRSEAEMLENIAKDVSNKLFPPSNNFSDFVGIEAHIEALISMLRFDSKKARMIGICGPSETGKTTIGRALYSRLKSDFHHRAFVAYKRKIRSDYDQKLYWEEQFLSEILCQKDIKIEECGAVEQRLKHTKVLIVLDDVDDIELLKTLVGRIRWFGSESKIVVITQKRELLKAHNIAHVYEVGFPSEELAHQMFCRYAFGKNSPPHGFNELADEAAKIAGNRPKALKYVGSSFRRLDKEQWVKMLSEFRSNGNKLKISYDELDGKGQDYVACLTNGSNSQVKAEWIHLALGVSILLNIRSDGTTILKHLSYNRSMAQQAKIWWYENLERVCKKYNICGIDSSTDGGGSTYGQCSNSQFQRNMDASPGGNKTSNQSTKDSPRASQVEKEKIEYCEPHVYITPAIFSDGTRAPKYVESRILYQSIFQQVVVCT

SEQ ID NO: 107654 - protein, 582 aa, Arabidopsis thaliana
  peptide (1)..(582): Ceres Seq. ID no. 13651154
MKSSSSQSYDVFPNFRGEDVRHSLVSHLRKELDRKFINTFNDNRIERSRKITPELLLAIENSRISLVVFSKNYASSTWCLDELVKIQECYEKLDQMVIPIFYKVDPSHVRKQTGEFGMVFGETCKGRTENEKRKWMRALAEVAHLAGEDLRNWRSEAEMLENIAKDVSNKLFPPSNNFSDFVGIEAHIEALISMLRFDSKKARMIGICGPSETGKTTIGRALYSRLKSDFHHRAFVAYKRKIRSDYDQKLYWEEQFLSEILCQKDIKIEECGAVEQRLKHTKVLIVLDDVDDIELLKTLVGRIRWFGSESKIVVITQKRELLKAHNIAHVYEVGFPSEELAHQMFCRYAFGKNSPPHGFNELADEAAKIAGNRPKALKYVGSSFRRLDKEQWVKMLSEFRSNGNKLKISYDELDGKGQDYVACLTNGSNSQVKAEWIHLALGVSILLNIRSDGTTILKHLSYNRSMAQQAKIWWYENLERVCKKYNICGIDSSTDGGGSTYGQCSNSQFQRNMDASPGGNKTSNQSTKDSPRASQVEKEKIEYCEPHVYITPAIFSDGTRAPKYVESRILYQSIFQQVVVCT

SEQ ID NO: 107655 - protein, 487 aa, Arabidopsis thaliana
  peptide (1)..(487): Ceres Seq. ID no. 13651155
MVIPIFYKVDPSHVRKQTGEFGMVFGETCKGRTENEKRKWMRALAEVAHLAGEDLRNWRSEAEMLENIAKDVSNKLFPPSNNFSDFVGIEAHIEALISMLRFDSKKARMIGICGPSETGKTTIGRALYSRLKSDFHHRAFVAYKRKIRSDYDQKLYWEEQFLSEILCQKDIKIEECGAVEQRLKHTKVLIVLDDVDDIELLKTLVGRIRWFGSESKIVVITQKRELLKAHNIAHVYEVGFPSEELAHQMFCRYAFGKNSPPHGFNELADEAAKIAGNRPKALKYVGSSFRRLDKEQWVKMLSEFRSNGNKLKISYDELDGKGQDYVACLTNGSNSQVKAEWIHLALGVSILLNIRSDGTTILKHLSYNRSMAQQAKIWWYENLERVCKKYNICGIDSSTDGGGSTYGQCSNSQFQRNMDASPGGNKTSNQSTKDSPRASQVEKEKIEYCEPHVYITPAIFSDGTRAPKYVESRILYQSIFQQVVVCT

SEQ ID NO: 107656 - DNA, 2225 bp, Arabidopsis thaliana
  misc_feature (1)..(2225): Ceres Seq. ID no. 13651156
  misc_feature (1)..(2225): Ortholog of  Ceres SEQ ID NO 15178310 as cited in SEQ ID NO 1089
  misc_feature (1)..(2225): Ortholog of  Ceres SEQ ID NO 14303173 as cited in SEQ ID NO 66550
atacggtcatacccaatcactactaacctctctccattctcgaattaggtcactctatttgggttgaaaaaatctcatattttcgtctttggaaccttaagaactttctcttttggaatcggtggaatcagtgaaatgggtatctcgaattgggttttctctgtaatttctgtagctaccctttttgtctcctgctcctttgctctcactcttgatggatttgctctattggaattgaagagtggatttaatgatacgaggaactcactagagaactggaaagattcagatgagtctccttgttcttggactggtgtctcctgtaatcctcaagaccaaagagttgtttctataaacttaccatatatgcaattaggagggataatatctcctagcattgggaagcttagtcgattgcagagactggcacttcatcagaatagcttacatgggaacattcctaatgaaatcaccaactgcactgagctaagagctatgtacttgagggcgaattttctccaaggcgggattccaccggatttaggcaaccttacatttcttactatattggatctatcaagcaatacactcaagggtgctattccttcttcaattagtcgattgacgcggttacgctccttgaacttgtcaaccaactttttctctggtgaaataccggatattggagttctcagcagattcggggtcgaaactttcactggtaatttggatctctgtggccggcaaattcgcaagccatgtagatcatcaatgggtttccctgttgttcttcctcatgcagaaagtgctgatgaatcagattctccaaagcgatcatcacgcttgattaaaggaatcttgatcggcgcaatgtctacaatggctcttgcattcatcgtgatctttgttttcctatggatttggatgctctcaaagaaggaaagaaaagtaaagaagtacacagaagtcaagaaacaaaaggatccatccgaaacaagtaaaaagctgattactttccatggtgatcttccatactcttcaactgagctgattgagaagctagagtctcttgacgaggaagacattgtgggttcgggaggatttggcacggtttatcgaatggttatgaacgatcttggaacctttgcggttaaaaagatagataggagtcgacaaggatcagaccgagtttttgagcgagaagtagagattttaggtagtgtcaaacacatcaatctagtgaacctacgtggatactgccgtttaccatcttcaagacttctcatctatgattatctaaccttaggaagcttagacgatcttcttcacgaacgagctcaagaagacggtttgttgaactggaatgctcggttgaaaattgcgctaggttccgcgaggggtcttgcttatctacaccatgattgtagtcccaaaattgttcaccgtgacataaaatcgagcaatattctactcaatgataaactagaacctcgagtctcggactttggtcttgcaaagcttcttgttgacgaagatgctcatgttaccaccgtggtagctggcacctttggctatcttgctccagagtatctgcaaaatgggagagcgacggagaagtctgatgtgtacagctttggagttcttctccttgagctcgttaccggaaaaagaccaacagacccgatattcgttaaaagaggcttgaacgtcgtcggatggatgaacactgtgttgaaagagaatcgattagaggatgtaatagacaagagatgcaccgatgtcgacgaagagtctgttgaggcattgctcgagatagctgagagatgtacagatgctaacccggagaacaggccggctatgaaccaggtggctcagttgcttgagcaagaagtcatgtcaccttcttctggtatcgattactacgatgattctcattctgattactgttagggacttatgcacggctaaaagtaaccaggagatcattagcctgcgacggttttgttgttgttgctgctgcgttatgaatgttgtgatttaggagcgagggatttgtttgtatattagatatgaaggtggagtcaagattattgagcgtgcactgttcttgtgcactttatatttttgcaacaaaatgatcgatgttattgcgtatgcattgtactatgactctttcaaagggaagacacacatacgaattatcgatgttaatgtcgttaggctac

SEQ ID NO: 107657 - protein, 604 aa, Arabidopsis thaliana
  peptide (1)..(604): Ceres Seq. ID no. 13651157
MGISNWVFSVISVATLFVSCSFALTLDGFALLELKSGFNDTRNSLENWKDSDESPCSWTGVSCNPQDQRVVSINLPYMQLGGIISPSIGKLSRLQRLALHQNSLHGNIPNEITNCTELRAMYLRANFLQGGIPPDLGNLTFLTILDLSSNTLKGAIPSSISRLTRLRSLNLSTNFFSGEIPDIGVLSRFGVETFTGNLDLCGRQIRKPCRSSMGFPVVLPHAESADESDSPKRSSRLIKGILIGAMSTMALAFIVIFVFLWIWMLSKKERKVKKYTEVKKQKDPSETSKKLITFHGDLPYSSTELIEKLESLDEEDIVGSGGFGTVYRMVMNDLGTFAVKKIDRSRQGSDRVFEREVEILGSVKHINLVNLRGYCRLPSSRLLIYDYLTLGSLDDLLHERAQEDGLLNWNARLKIALGSARGLAYLHHDCSPKIVHRDIKSSNILLNDKLEPRVSDFGLAKLLVDEDAHVTTVVAGTFGYLAPEYLQNGRATEKSDVYSFGVLLLELVTGKRPTDPIFVKRGLNVVGWMNTVLKENRLEDVIDKRCTDVDEESVEALLEIAERCTDANPENRPAMNQVAQLLEQEVMSPSSGIDYYDDSHSDYC

SEQ ID NO: 107658 - protein, 527 aa, Arabidopsis thaliana
  peptide (1)..(527): Ceres Seq. ID no. 13651158
MQLGGIISPSIGKLSRLQRLALHQNSLHGNIPNEITNCTELRAMYLRANFLQGGIPPDLGNLTFLTILDLSSNTLKGAIPSSISRLTRLRSLNLSTNFFSGEIPDIGVLSRFGVETFTGNLDLCGRQIRKPCRSSMGFPVVLPHAESADESDSPKRSSRLIKGILIGAMSTMALAFIVIFVFLWIWMLSKKERKVKKYTEVKKQKDPSETSKKLITFHGDLPYSSTELIEKLESLDEEDIVGSGGFGTVYRMVMNDLGTFAVKKIDRSRQGSDRVFEREVEILGSVKHINLVNLRGYCRLPSSRLLIYDYLTLGSLDDLLHERAQEDGLLNWNARLKIALGSARGLAYLHHDCSPKIVHRDIKSSNILLNDKLEPRVSDFGLAKLLVDEDAHVTTVVAGTFGYLAPEYLQNGRATEKSDVYSFGVLLLELVTGKRPTDPIFVKRGLNVVGWMNTVLKENRLEDVIDKRCTDVDEESVEALLEIAERCTDANPENRPAMNQVAQLLEQEVMSPSSGIDYYDDSHSDYC

SEQ ID NO: 107659 - protein, 484 aa, Arabidopsis thaliana
  peptide (1)..(484): Ceres Seq. ID no. 13651159
MYLRANFLQGGIPPDLGNLTFLTILDLSSNTLKGAIPSSISRLTRLRSLNLSTNFFSGEIPDIGVLSRFGVETFTGNLDLCGRQIRKPCRSSMGFPVVLPHAESADESDSPKRSSRLIKGILIGAMSTMALAFIVIFVFLWIWMLSKKERKVKKYTEVKKQKDPSETSKKLITFHGDLPYSSTELIEKLESLDEEDIVGSGGFGTVYRMVMNDLGTFAVKKIDRSRQGSDRVFEREVEILGSVKHINLVNLRGYCRLPSSRLLIYDYLTLGSLDDLLHERAQEDGLLNWNARLKIALGSARGLAYLHHDCSPKIVHRDIKSSNILLNDKLEPRVSDFGLAKLLVDEDAHVTTVVAGTFGYLAPEYLQNGRATEKSDVYSFGVLLLELVTGKRPTDPIFVKRGLNVVGWMNTVLKENRLEDVIDKRCTDVDEESVEALLEIAERCTDANPENRPAMNQVAQLLEQEVMSPSSGIDYYDDSHSDYC

SEQ ID NO: 107660 - DNA, 963 bp, Arabidopsis thaliana
  misc_feature (1)..(963): Ceres Seq. ID no. 13651164
  misc_feature (1)..(963): Ortholog of  Ceres SEQ ID NO 13586635 as cited in SEQ ID NO 14217
  misc_feature (1)..(963): Ortholog of  Ceres SEQ ID NO 12616285 as cited in SEQ ID NO 63483
gggttttggatcatctcttcttcttctacgtcttcatcatcagtcatcactacgaatggatcttacgtttgatcatagttttgtgaaggttaatggaatcactatgcacgtcgccgagaaaagcccctccgtcgccgggaacggagctatccgacctccggtgatactattcctccacggatttccagaactttggtacacgtggcggcatcagatggtggcactatcttcgttaggttaccggactatagcgccggaccttcgtggttacggagacaccgacgcgccggagagtgtggacgcgtacacaagtctccacgtggttggagatctgattggattgatcgacgccgtggttggagatcgggaaaaggtgttcgtagtgggacatgattggggcgctattatcgcttggcatctctgtctttttcgaccggatagggttaaagctttggttaacatgagtgtggtgtttgatccttggaatcctaaacggaaaccaacctcgacgtttaaagctttctatggagatgactactacatctgcagattccagaacatgggagctgatggggtcactatcaaacgctaaagtgaaagttccggttaagttcataatcggcgaccaagatctgacatatcacattcccggtagcaagaagtacatccacgatggccggtttaagagccatgtcccgttgttggacgaagttgtggtaattaaaggcgtcggtcattttatccacgaggaaaggcctgacgagataagtaaacacattcacgactattttcttactttttagagctaaattgtatttagaaatcacaaacaaaaaggaataaagagttatatacatcttccttatcatgtgaaagggcagagcaaataaaacgctttatttgtcacaaacgaaaacgattaaagcgttatatttcttccttctatagaaatcgttttcttgc

SEQ ID NO: 107661 - protein, 196 aa, Arabidopsis thaliana
  peptide (1)..(196): Ceres Seq. ID no. 13651165
GFGSSLLLLRLHHQSSLRMDLTFDHSFVKVNGITMHVAEKSPSVAGNGAIRPPVILFLHGFPELWYTWRHQMVALSSLGYRTIAPDLRGYGDTDAPESVDAYTSLHVVGDLIGLIDAVVGDREKVFVVGHDWGAIIAWHLCLFRPDRVKALVNMSVVFDPWNPKRKPTSTFKAFYGDDYYICRFQNMGADGVTIKR

SEQ ID NO: 107662 - protein, 178 aa, Arabidopsis thaliana
  peptide (1)..(178): Ceres Seq. ID no. 13651166
MDLTFDHSFVKVNGITMHVAEKSPSVAGNGAIRPPVILFLHGFPELWYTWRHQMVALSSLGYRTIAPDLRGYGDTDAPESVDAYTSLHVVGDLIGLIDAVVGDREKVFVVGHDWGAIIAWHLCLFRPDRVKALVNMSVVFDPWNPKRKPTSTFKAFYGDDYYICRFQNMGADGVTIKR

SEQ ID NO: 107663 - protein, 162 aa, Arabidopsis thaliana
  peptide (1)..(162): Ceres Seq. ID no. 13651167
MHVAEKSPSVAGNGAIRPPVILFLHGFPELWYTWRHQMVALSSLGYRTIAPDLRGYGDTDAPESVDAYTSLHVVGDLIGLIDAVVGDREKVFVVGHDWGAIIAWHLCLFRPDRVKALVNMSVVFDPWNPKRKPTSTFKAFYGDDYYICRFQNMGADGVTIKR

SEQ ID NO: 107664 - DNA, 1567 bp, Arabidopsis thaliana
  misc_feature (1)..(1567): Ceres Seq. ID no. 13651180
  misc_feature (1)..(1567): Ortholog of  Ceres SEQ ID NO 13582281 as cited in SEQ ID NO 51014
  misc_feature (1)..(1567): Ortholog of  Ceres SEQ ID NO 15176795 as cited in SEQ ID NO 54453
  misc_feature (1)..(1567): Ortholog of  Ceres SEQ ID NO 14310508 as cited in SEQ ID NO 58965
  misc_feature (1)..(1567): Ortholog of  Ceres SEQ ID NO 12617417 as cited in SEQ ID NO 65089
aatagagatacaaagaaacaagaaaacgaaaagaaaatatacagaaatgggtggtttgaagtttcatgtacttatgtatccatggttcgcaacaggccatatgaccccgttcctttttcttgccaacaaattggctgagaaaggtcatacggtcactttcttgcttcccaagaaatctctgaaacagttggaacatttcaatctgtttccacacaacattgtctttcgctctgtcaccgtccctcatgtggatggtctccccgttggcacagagacagcctctgagatccctgtgacatcaactgatctcttgatgtctgctatggatctcacacgtgatcaagttgaagctgtggtccgagccgttgaaccggacctgatcttctttgactttgctcattggattccagaagtagctagggacttcggccttaagactgtaaagtacgtcgtggtgtctgcatcgactatagctagtatgcttgtcccaggtggtgagttaggtgttcctccaccgggatatccatcatcaaaggtgctgcttcgtaaacaagatgcttacactatgaagaaactggagcctacaaatacaatcgatgtcggaccaaacctcttggaacgagtcactacaagtcttatgaactctgatgtcattgcgataaggacagccagagaaatcgaaggaaacttttgcgactatatagaaaaacattgcaggaaaaaggttctcttgacaggtccggtgttccctgagccagacaagactagagagctagaggaacgatgggttaagtggctaagtgggtatgaaccagactcagtggtgttttgtgcactgggctcacaagtcattttagagaaagatcaattccaagaactctgcttaggaatggagctaacaggttcaccgtttcttgtagcggttaagccccctagaggctcatcaacgattcaagaagcacttcctgaaggattcgaagagcgggttaaaggaagaggccttgtttggggaggatgggttcaacaaccattgatattgtctcatccatcagtcgggtgctttgtgagccattgtgggtttggatcaatgtgggagtctttgctgagtgattgtcagatagtcttagtaccacagttgggtgatcaagtcctgaacacaagattgctgagtgacgaactcaaggtttcggttgaagtggcaagagaggaaacaggatggttctcgaaagagagcttgtgcgatgctgtcaatagtgtgatgaaaagggacagcgagctcgggaacctggtgaggaagaatcacaccaagtggagggagacagtagctagtcctggactaatgactggttatgtcgatgctttcgtagagtcattgcaggatcttgtctctgggaccacccatgactgaaagataggaacactatgacgtttctaagtagaagggggtgattaataaggttgatataaaccaaactatcttgaagtgcttatgtttccaagtgtgttttttcttgtttgtatggttcatttattgtttgatgtttctaagttgcagtgagtgatcatt

SEQ ID NO: 107665 - protein, 468 aa, Arabidopsis thaliana
  peptide (1)..(468): Ceres Seq. ID no. 13651181
IEIQRNKKTKRKYTEMGGLKFHVLMYPWFATGHMTPFLFLANKLAEKGHTVTFLLPKKSLKQLEHFNLFPHNIVFRSVTVPHVDGLPVGTETASEIPVTSTDLLMSAMDLTRDQVEAVVRAVEPDLIFFDFAHWIPEVARDFGLKTVKYVVVSASTIASMLVPGGELGVPPPGYPSSKVLLRKQDAYTMKKLEPTNTIDVGPNLLERVTTSLMNSDVIAIRTAREIEGNFCDYIEKHCRKKVLLTGPVFPEPDKTRELEERWVKWLSGYEPDSVVFCALGSQVILEKDQFQELCLGMELTGSPFLVAVKPPRGSSTIQEALPEGFEERVKGRGLVWGGWVQQPLILSHPSVGCFVSHCGFGSMWESLLSDCQIVLVPQLGDQVLNTRLLSDELKVSVEVAREETGWFSKESLCDAVNSVMKRDSELGNLVRKNHTKWRETVASPGLMTGYVDAFVESLQDLVSGTTHD

SEQ ID NO: 107666 - protein, 453 aa, Arabidopsis thaliana; identical to SEQ ID NO: 87386
  peptide (1)..(453): Ceres Seq. ID no. 13651182

SEQ ID NO: 107667 - protein, 444 aa, Arabidopsis thaliana; identical to SEQ ID NO: 87387
  peptide (1)..(444): Ceres Seq. ID no. 13651183

SEQ ID NO: 107668 - DNA, 1011 bp, Arabidopsis thaliana
  misc_feature (1)..(1011): Ceres Seq. ID no. 13651188
  misc_feature (1)..(1011): Ortholog of  Ceres SEQ ID NO 14311392 as cited in SEQ ID NO 58307
  misc_feature (1)..(1011): Ortholog of  Ceres SEQ ID NO 13599348 as cited in SEQ ID NO 0
agtgttactttccccaaatgtagaattaagggtttagggtttttagttccaaattcaattcttaacgaagcaatttcaaatctttttttcatttcagttacagcgatgttttgtgcatcatcttctccaattacatctcctctctacccaaaagcttataaattttctcaaacaaaatcgaattcgaagagattttcctctctgcgtgcttcgttgcctgtttctgataacaagcttcttaaatttgaatacacaccatggcttattgttgggcttggtaaccctggattaaagtattacggaacaaggcataatattggttttgagatgattgatcatatagctcgagcaacggatatttctatgaacacaattcagtccaaggctttagttgggataggttctgttggagaagttccgattttgttggttaaacctcaaggatacatgaatttcagtggtgaatcggttgggccgttagctgcttactaccaaatacccttacgtcacattcttatgatatatgatgacttgggtttgtctaatggtgtcttgagacttcaaccaaaaggtgggcatagccaacacaatggattgaagaatgtgacagaacatttaaatggttgtcgcggctatccccgcttatcaatcggaattggaaatccaccaggtaacatggacatgaaagcgtttcttctccagaaattcagccccttggagcgcaaacagatggatgagggactggaacaaggtgttgaaggtgtgaagacacttgttgaagaggggtttagtgactcaatatctcgattcaatttgggacagaaatacaagtttcataaagtttgattccttgacatttgcctcatcgtgatacctgtcacagtaacagtagcaacacccatagtccaacattgttcatttgttcttatccttgtggtctttgtttagctgataggtaatattgtaacatttgtattctctaagatcaattttattgatttatattttgtt

SEQ ID NO: 107669 - protein, 281 aa, Arabidopsis thaliana
  peptide (1)..(281): Ceres Seq. ID no. 13651189
SVTFPKCRIKGLGFLVPNSILNEAISNLFFISVTAMFCASSSPITSPLYPKAYKFSQTKSNSKRFSSLRASLPVSDNKLLKFEYTPWLIVGLGNPGLKYYGTRHNIGFEMIDHIARATDISMNTIQSKALVGIGSVGEVPILLVKPQGYMNFSGESVGPLAAYYQIPLRHILMIYDDLGLSNGVLRLQPKGGHSQHNGLKNVTEHLNGCRGYPRLSIGIGNPPGNMDMKAFLLQKFSPLERKQMDEGLEQGVEGVKTLVEEGFSDSISRFNLGQKYKFHKV

SEQ ID NO: 107670 - protein, 246 aa, Arabidopsis thaliana
  peptide (1)..(246): Ceres Seq. ID no. 13651190
MFCASSSPITSPLYPKAYKFSQTKSNSKRFSSLRASLPVSDNKLLKFEYTPWLIVGLGNPGLKYYGTRHNIGFEMIDHIARATDISMNTIQSKALVGIGSVGEVPILLVKPQGYMNFSGESVGPLAAYYQIPLRHILMIYDDLGLSNGVLRLQPKGGHSQHNGLKNVTEHLNGCRGYPRLSIGIGNPPGNMDMKAFLLQKFSPLERKQMDEGLEQGVEGVKTLVEEGFSDSISRFNLGQKYKFHKV

SEQ ID NO: 107671 - protein, 172 aa, Arabidopsis thaliana
  peptide (1)..(172): Ceres Seq. ID no. 13651191
MIDHIARATDISMNTIQSKALVGIGSVGEVPILLVKPQGYMNFSGESVGPLAAYYQIPLRHILMIYDDLGLSNGVLRLQPKGGHSQHNGLKNVTEHLNGCRGYPRLSIGIGNPPGNMDMKAFLLQKFSPLERKQMDEGLEQGVEGVKTLVEEGFSDSISRFNLGQKYKFHKV

SEQ ID NO: 107672 - DNA, 1396 bp, Arabidopsis thaliana
  misc_feature (1)..(1396): Ceres Seq. ID no. 13651192
  misc_feature (1)..(1396): Ortholog of  Ceres SEQ ID NO 15226389 as cited in SEQ ID NO 52992
  misc_feature (1)..(1396): Ortholog of  Ceres SEQ ID NO 14312152 as cited in SEQ ID NO 57197
  misc_feature (1)..(1396): Ortholog of  Ceres SEQ ID NO 13664395 as cited in SEQ ID NO 67508
  misc_feature (1)..(1396): Ortholog of  Ceres SEQ ID NO 13662335 as cited in SEQ ID NO 68440
tccagaaaaaaaaatgccggggaatttagagccgttggatctcggaatccaaataccataccatttcagatgcccaatctcacttgacctaatgtctgatcccgtaaccatctccaccggccaaacttacgaccgaaccagcatcgactcatggatcgctatgggcaacaccacttgtccagtcacacgtgtcgctctctccgacttcactctcatccctaaccacactctccgccgtcttatccaagaatggtgcgtcgctaaccgctctaacggcgtcgaacggattcctacacctaaacaaccggcggatccaatctccgttaggtcacttctcagtcaagcatccgcaattaccggaactcacgtctctgttcgttcacgcgccgccgctattcgtcgtttgagaggattagctagagatagtgagaagaatcgcgttttgatcgctggtcataacgcgggggagattttggtgaggattttgttcgccgatattgaaacgacgtcgttgtcttcggagcttgtttctgagtcgcttgctcttttggttttattgcatatgacggagacggagtgtgaagctgttgcgtcggatcctagtcgggtcgggtttatgacccgattgttgtttgattcttcgattgaaattagggttaacgccgccgcgttgattgagatggtgttgaccggagcgaaatccatggatctgaaattgatcatttccggatctgattcgatattcgaaggcgttctcgatcttctcaagaatccgatttcatcgcggcgagctttgaagatcggaatcaaagcgattttcgctctctgtctcgtgaaacaaacgagacatctagcgatctccgccggagttccggggattttaatcgaccgtctcgcggcggatttcgataggtgtgatacggagcgaggtttagcgacagtggagcttctttgccgattaccagaaggatgtgctgcgtttggtgagcatgctttgacggtgccgctaatggtgaagacgatattaagagtttcagatagagcgacggagtacgcggcgggagcgttgttggctttatgtacggcggaggaacggtgtagagatgaagctgcggcggcgggattggtgacgcagttgttgcttctggtgcagagtgattgtacggagagagcgaagagaaaagctcagatgcttttgaagcttctcagagactcttggcctgacgattctaccgttcattccgacgatttcaatcgtagcgaagtggcgccgttttgagttttttttttttttttggtttaacaagttatttattctttcttagaaaatttagagtagtcttaattgtgtaattaatttttaaaacaacaaaaattcatgagtctttttcttcgt

SEQ ID NO: 107673 - protein, 425 aa, Arabidopsis thaliana
  peptide (1)..(425): Ceres Seq. ID no. 13651193
PEKKMPGNLEPLDLGIQIPYHFRCPISLDLMSDPVTISTGQTYDRTSIDSWIAMGNTTCPVTRVALSDFTLIPNHTLRRLIQEWCVANRSNGVERIPTPKQPADPISVRSLLSQASAITGTHVSVRSRAAAIRRLRGLARDSEKNRVLIAGHNAGEILVRILFADIETTSLSSELVSESLALLVLLHMTETECEAVASDPSRVGFMTRLLFDSSIEIRVNAAALIEMVLTGAKSMDLKLIISGSDSIFEGVLDLLKNPISSRRALKIGIKAIFALCLVKQTRHLAISAGVPGILIDRLAADFDRCDTERGLATVELLCRLPEGCAAFGEHALTVPLMVKTILRVSDRATEYAAGALLALCTAEERCRDEAAAAGLVTQLLLLVQSDCTERAKRKAQMLLKLLRDSWPDDSTVHSDDFNRSEVAPF

SEQ ID NO: 107674 - protein, 421 aa, Arabidopsis thaliana
  peptide (1)..(421): Ceres Seq. ID no. 13651194
MPGNLEPLDLGIQIPYHFRCPISLDLMSDPVTISTGQTYDRTSIDSWIAMGNTTCPVTRVALSDFTLIPNHTLRRLIQEWCVANRSNGVERIPTPKQPADPISVRSLLSQASAITGTHVSVRSRAAAIRRLRGLARDSEKNRVLIAGHNAGEILVRILFADIETTSLSSELVSESLALLVLLHMTETECEAVASDPSRVGFMTRLLFDSSIEIRVNAAALIEMVLTGAKSMDLKLIISGSDSIFEGVLDLLKNPISSRRALKIGIKAIFALCLVKQTRHLAISAGVPGILIDRLAADFDRCDTERGLATVELLCRLPEGCAAFGEHALTVPLMVKTILRVSDRATEYAAGALLALCTAEERCRDEAAAAGLVTQLLLLVQSDCTERAKRKAQMLLKLLRDSWPDDSTVHSDDFNRSEVAPF

SEQ ID NO: 107675 - protein, 395 aa, Arabidopsis thaliana
  peptide (1)..(395): Ceres Seq. ID no. 13651195
MSDPVTISTGQTYDRTSIDSWIAMGNTTCPVTRVALSDFTLIPNHTLRRLIQEWCVANRSNGVERIPTPKQPADPISVRSLLSQASAITGTHVSVRSRAAAIRRLRGLARDSEKNRVLIAGHNAGEILVRILFADIETTSLSSELVSESLALLVLLHMTETECEAVASDPSRVGFMTRLLFDSSIEIRVNAAALIEMVLTGAKSMDLKLIISGSDSIFEGVLDLLKNPISSRRALKIGIKAIFALCLVKQTRHLAISAGVPGILIDRLAADFDRCDTERGLATVELLCRLPEGCAAFGEHALTVPLMVKTILRVSDRATEYAAGALLALCTAEERCRDEAAAAGLVTQLLLLVQSDCTERAKRKAQMLLKLLRDSWPDDSTVHSDDFNRSEVAPF

SEQ ID NO: 107676 - DNA, 2637 bp, Arabidopsis thaliana
  misc_feature (1)..(2637): Ceres Seq. ID no. 13651206
  misc_feature (1)..(2637): Ortholog of  Ceres SEQ ID NO 13600595 as cited in SEQ ID NO 629
atgattgggtcgcataaattcgagacgatggtgagatacactgcacagttagttgtgcatagtcccaaactataaaaactctctagaatcttcaaacgtcagtgtttacataagaaatgacgacttttcagtactcgctagtttttctcgttctcatggcggttatagttgccggagacgtcgcaaacgtaacatacgacggtcgctcgctgatcatcgacggcgaacataagatccttttctccggctcaatccattatactcgcagcactcctcagatgtggccgtccttgatagcaaaggcaaaatctggaggaatagatgtagtagacacatatgtgttctggaacgttcacgagccgcaacaaggccagttcgatttcagtggaagccgtgatatcgtgaagtttatcaaggaagtaaaaaatcatggcttatatgtctgtcttcggattggaccttttatccaaggggaatggtcttatgggggtttgcctttctggttgcataatgtccaagggattgtcttcaggacagataatgagccattcaagtatcacatgaagagatatgcgaaaatgattgttaagctgatgaaatcggaaaacttgtatgcttcccaaggaggacctatcatactctcacagattgagaacgagtatgggatggttggtagagcttttcgacaagaagggaaatcatatgtcaaatggacagcaaaattggctgttgagcttgacacaggagtgccatgggttatgtgcaagcaagatgatgcccctgatcctttggttaatgcttgcaatgggaggcaatgtggagaaacattcaaaggacccaattcacccaacaaacctgcaatatggactgagaactggacgagtttttatcaaacatatggtgaggaaccattgataaggtcagctgaggatatagcgtttcatgttgctcttttcatcgctaagaatggaagctttgtaaactactacatgtatcatggaggaaccaacttcgggagaaatgcttcacagttcgtaatcaccagttattatgatcaggctccacttgatgaatatgggttacttaggcaaccaaaatggggacaccttaaggaattacatgctgcagttaagttgtgtgaagagcctctactttcaggactgcaaactacaatatcattggggaagctacaaactgcttttgtgtttgggaagaaggcgaacctatgcgctgccattctggtgaatcaagacaaatgcgagtctactgtacagtttcgtaattcttcatatcgtttgtctccaaaatctgtaagtgtcctgccagactgcaagaatgtagccttcaacactgccaaggtcaatgcacaatacaacacgagaacaaggaaagcaagacaaaatttgtcgtctcctcaaatgtgggaggaatttacagaaacagtcccaagtttcagtgaaacgtcaataagatcagaatccttgcttgagcacatgaataccacacaggatacttccgactatctgtggcaaacaactaggtttcagcaatctgaaggagctccatcagttcttaaagtcaaccatctcggacatgctctacacgcctttgttaatgggagattcataggttctatgcatggaactttcaaagcgcacagatttttgctggagaaaaatatgtcattgaataatggcacaaataacttggcattactcagcgtaatggtaggattaccgaattcaggagcacatctagaaaggagagtcgttggatcacggagcgtaaagatttggaatggaagatatcaactgtacttcaacaactatagttggggatatcaggttggcctgaaaggggagaaattccatgtttacactgaagatgggtccgcaaaagttcagtggaagcagtacagagactccaaaagtcagcctctaacttggtacaaggcctcatttgacacaccagagggggaagatccggtggccttgaacttaggatcaatgggaaaaggagaagcttgggtgaatggccagagtataggtcggtactgggtctcatttcacacttacaaggggaacccttctcagatatggtaccatataccgagatcttttcttaaaccaaacagtaacttactagtcattttggaagaagaaagagaagggaatcctcttggtataactatagacacagtgtcggtcactgaagtctgtggtcatgtctccaatacaaatcctcatcctgtcatatctccaagaaagaaaggcctcaaccgaaaaaatctaacataccggtatgataggaagcctaaggttcagctccagtgtcctactggcaggaaaatttcaaagatattgtttgcaagctttggcactccaaatggaagttgcgggagctattctattggaagctgtcactcacccaactctttagctgttgtacagaaggcttgtctgaaaaaaagtaggtgttctgtacctgtatggagcaaaacatttggtgtgattcatgtccacacactgttaaatctctgcttgttcgtgcacaatgctcatgagagtccaattcgttagtatagatttctgttccctttttctttcttattatgaacaaataacaaaagtttttgtg

SEQ ID NO: 107677 - protein, 820 aa, Arabidopsis thaliana
  peptide (1)..(820): Ceres Seq. ID no. 13651207
MTTFQYSLVFLVLMAVIVAGDVANVTYDGRSLIIDGEHKILFSGSIHYTRSTPQMWPSLIAKAKSGGIDVVDTYVFWNVHEPQQGQFDFSGSRDIVKFIKEVKNHGLYVCLRIGPFIQGEWSYGGLPFWLHNVQGIVFRTDNEPFKYHMKRYAKMIVKLMKSENLYASQGGPIILSQIENEYGMVGRAFRQEGKSYVKWTAKLAVELDTGVPWVMCKQDDAPDPLVNACNGRQCGETFKGPNSPNKPAIWTENWTSFYQTYGEEPLIRSAEDIAFHVALFIAKNGSFVNYYMYHGGTNFGRNASQFVITSYYDQAPLDEYGLLRQPKWGHLKELHAAVKLCEEPLLSGLQTTISLGKLQTAFVFGKKANLCAAILVNQDKCESTVQFRNSSYRLSPKSVSVLPDCKNVAFNTAKVNAQYNTRTRKARQNLSSPQMWEEFTETVPSFSETSIRSESLLEHMNTTQDTSDYLWQTTRFQQSEGAPSVLKVNHLGHALHAFVNGRFIGSMHGTFKAHRFLLEKNMSLNNGTNNLALLSVMVGLPNSGAHLERRVVGSRSVKIWNGRYQLYFNNYSWGYQVGLKGEKFHVYTEDGSAKVQWKQYRDSKSQPLTWYKASFDTPEGEDPVALNLGSMGKGEAWVNGQSIGRYWVSFHTYKGNPSQIWYHIPRSFLKPNSNLLVILEEEREGNPLGITIDTVSVTEVCGHVSNTNPHPVISPRKKGLNRKNLTYRYDRKPKVQLQCPTGRKISKILFASFGTPNGSCGSYSIGSCHSPNSLAVVQKACLKKSRCSVPVWSKTFGVIHVHTLLNLCLFVHNAHESPIR

SEQ ID NO: 107678 - protein, 807 aa, Arabidopsis thaliana
  peptide (1)..(807): Ceres Seq. ID no. 13651208
MAVIVAGDVANVTYDGRSLIIDGEHKILFSGSIHYTRSTPQMWPSLIAKAKSGGIDVVDTYVFWNVHEPQQGQFDFSGSRDIVKFIKEVKNHGLYVCLRIGPFIQGEWSYGGLPFWLHNVQGIVFRTDNEPFKYHMKRYAKMIVKLMKSENLYASQGGPIILSQIENEYGMVGRAFRQEGKSYVKWTAKLAVELDTGVPWVMCKQDDAPDPLVNACNGRQCGETFKGPNSPNKPAIWTENWTSFYQTYGEEPLIRSAEDIAFHVALFIAKNGSFVNYYMYHGGTNFGRNASQFVITSYYDQAPLDEYGLLRQPKWGHLKELHAAVKLCEEPLLSGLQTTISLGKLQTAFVFGKKANLCAAILVNQDKCESTVQFRNSSYRLSPKSVSVLPDCKNVAFNTAKVNAQYNTRTRKARQNLSSPQMWEEFTETVPSFSETSIRSESLLEHMNTTQDTSDYLWQTTRFQQSEGAPSVLKVNHLGHALHAFVNGRFIGSMHGTFKAHRFLLEKNMSLNNGTNNLALLSVMVGLPNSGAHLERRVVGSRSVKIWNGRYQLYFNNYSWGYQVGLKGEKFHVYTEDGSAKVQWKQYRDSKSQPLTWYKASFDTPEGEDPVALNLGSMGKGEAWVNGQSIGRYWVSFHTYKGNPSQIWYHIPRSFLKPNSNLLVILEEEREGNPLGITIDTVSVTEVCGHVSNTNPHPVISPRKKGLNRKNLTYRYDRKPKVQLQCPTGRKISKILFASFGTPNGSCGSYSIGSCHSPNSLAVVQKACLKKSRCSVPVWSKTFGVIHVHTLLNLCLFVHNAHESPIR

SEQ ID NO: 107679 - protein, 766 aa, Arabidopsis thaliana
  peptide (1)..(766): Ceres Seq. ID no. 13651209
MWPSLIAKAKSGGIDVVDTYVFWNVHEPQQGQFDFSGSRDIVKFIKEVKNHGLYVCLRIGPFIQGEWSYGGLPFWLHNVQGIVFRTDNEPFKYHMKRYAKMIVKLMKSENLYASQGGPIILSQIENEYGMVGRAFRQEGKSYVKWTAKLAVELDTGVPWVMCKQDDAPDPLVNACNGRQCGETFKGPNSPNKPAIWTENWTSFYQTYGEEPLIRSAEDIAFHVALFIAKNGSFVNYYMYHGGTNFGRNASQFVITSYYDQAPLDEYGLLRQPKWGHLKELHAAVKLCEEPLLSGLQTTISLGKLQTAFVFGKKANLCAAILVNQDKCESTVQFRNSSYRLSPKSVSVLPDCKNVAFNTAKVNAQYNTRTRKARQNLSSPQMWEEFTETVPSFSETSIRSESLLEHMNTTQDTSDYLWQTTRFQQSEGAPSVLKVNHLGHALHAFVNGRFIGSMHGTFKAHRFLLEKNMSLNNGTNNLALLSVMVGLPNSGAHLERRVVGSRSVKIWNGRYQLYFNNYSWGYQVGLKGEKFHVYTEDGSAKVQWKQYRDSKSQPLTWYKASFDTPEGEDPVALNLGSMGKGEAWVNGQSIGRYWVSFHTYKGNPSQIWYHIPRSFLKPNSNLLVILEEEREGNPLGITIDTVSVTEVCGHVSNTNPHPVISPRKKGLNRKNLTYRYDRKPKVQLQCPTGRKISKILFASFGTPNGSCGSYSIGSCHSPNSLAVVQKACLKKSRCSVPVWSKTFGVIHVHTLLNLCLFVHNAHESPIR

SEQ ID NO: 107680 - DNA, 899 bp, Arabidopsis thaliana
  misc_feature (1)..(899): Ceres Seq. ID no. 13651216
  misc_feature (1)..(899): Ortholog of  Ceres SEQ ID NO 12623816 as cited in SEQ ID NO 61298
gtctctattgtgcgccacgtagacttcaccgctacaattcatcatcatcatcatctcagtttctgaatctcaatctctctcgcttctccggtgctctcttcttccacatggagagtggaactggctcgagcggcaagagagggatggtggaaaatttgaagcggtacggtgtgatatcgtcgaaaagagtagctcaagttatggaggctttagatagaggtctctttgtaccagttggttcttcagcttatgttgatactcctgtacctataggttataatgctaccatttctgctccgcatatgcatgctacttgcttgcagctcttggaagataagctccaccccgggatgcgcgctttagatgtcggctcaggaaccgggtacttgactggctgttttgctttgatggttggagctgagggacgtgttgttggcgtggatcatatccctgaattggttgatatgtctatcaagaatatcgaaaagagtgttgctgcttcctttcttaagaaaggatctctctccttacatgttggggatggaagaaaaggttggcaagagtttgcaccgtatgatgcaatacacgtaggagcagcggcatcagaaatccctcagccccttttggatcagctaaaacccggtggacgaatggtgattccactaggaacctattttcaagagctcaaggtaatcgacaaaaacgaggatggttcaatcaaggtacataccgaaacttcagtccggtatgtgcccctcactagccgtgtcgaacagttaggaggattttgacaacaacaacaaagagaaaactctacatcccacgtcttagtgtacatataaaaggttgtgtaatgttttgtaatatgttttgatgggtaataaagaaaatatgtttac

SEQ ID NO: 107681 - protein, 262 aa, Arabidopsis thaliana
  peptide (1)..(262): Ceres Seq. ID no. 13651217
LYCAPRRLHRYNSSSSSSQFLNLNLSRFSGALFFHMESGTGSSGKRGMVENLKRYGVISSKRVAQVMEALDRGLFVPVGSSAYVDTPVPIGYNATISAPHMHATCLQLLEDKLHPGMRALDVGSGTGYLTGCFALMVGAEGRVVGVDHIPELVDMSIKNIEKSVAASFLKKGSLSLHVGDGRKGWQEFAPYDAIHVGAAASEIPQPLLDQLKPGGRMVIPLGTYFQELKVIDKNEDGSIKVHTETSVRYVPLTSRVEQLGGF

SEQ ID NO: 107682 - protein, 227 aa, Arabidopsis thaliana
  peptide (1)..(227): Ceres Seq. ID no. 13651218
MESGTGSSGKRGMVENLKRYGVISSKRVAQVMEALDRGLFVPVGSSAYVDTPVPIGYNATISAPHMHATCLQLLEDKLHPGMRALDVGSGTGYLTGCFALMVGAEGRVVGVDHIPELVDMSIKNIEKSVAASFLKKGSLSLHVGDGRKGWQEFAPYDAIHVGAAASEIPQPLLDQLKPGGRMVIPLGTYFQELKVIDKNEDGSIKVHTETSVRYVPLTSRVEQLGGF

SEQ ID NO: 107683 - protein, 215 aa, Arabidopsis thaliana; identical to SEQ ID NO: 70145
  peptide (1)..(215): Ceres Seq. ID no. 13651219

SEQ ID NO: 107684 - DNA, 2428 bp, Arabidopsis thaliana
  misc_feature (1)..(2428): Ceres Seq. ID no. 13651220
  misc_feature (1)..(2428): Ortholog of  Ceres SEQ ID NO 15169244 as cited in SEQ ID NO 58988
aaaataaaagcttataattaaagaaccataaagacgaacacaaaagaaactctcacattctcaagagtttctttcttctttcaatggctttactaactttcttgccggagaacgcagaggcgccacaaaaacacaagccaacgtctagcaaacgaaagaaacgcgataatcccaccgaccaaacgcagacacagaaacataaaccgcagaaaccgaagaaagcagtacctccgaagcagccatcttcatgggaccaaatcaagaacctattgacttgcaaacaaatcgaagggtcaagagtccatgatccttccaagaactctcaatctggtccgtccatgacaactaacttatctccttccaagcttggctcgtcgtgcagctccatttgcagctttagagacgtggctcacggcaacactcgtgtggttcatagagctgatcactcaccagacgtaggtaactcggctactcctaactcggagactcggcttctgactcggaaacctggtcaacacggttcttcttcgtctcggtctcttacatctggctcaacgagatctaacgccagtgggagttacacgtcatcgtcaacgacttcgtttagagccatgcagttccgtaaactctccggatgttacgaatgtcacatgatcgttgacccgagcaggtatccgatttcgcctagggtttgtgcttgttcccaatgtggagaagttttccccaagcttgaaagcttagagcttcatcaagcagttcgtcacgcaggtaaggctttttttttccttttaacaaaaattgtttgactttatcacttacctcaaattaattaattacgctttagctacaattttttattttttggtgtgtggtagtcacatttttaaatttaaccctaagtatctagtgagattttcgtaaatgcgaatggcttggcaaagtaagattatgttttgtatccttggaaaaaaacttaagatctcagtccatgatttgacttgtgaatgatgatacaacctttgtttgtttagtattgattgaataattagcattaacacatgttttccggcgtataggcccttggatttatcgatagatttaccataatgctaagcaaataattaacgaacatgctttcattaatatatatcttagacttcgttgtttcttaatggaatcaagatctcagtgttattgtcggtgattatatcgatcaaataagttaggatgatttggccgtatgttacagattgtttttggaatagagattcatacgtatttttagagaaagatacaaaagagaataggaatataactggagaacaagatatattctatggtctccaaatccgtcgttttgcttggaaacacttaccatgcgatgggaccattgtactataaaaagaaacagctgtctctgctcttaactaaattcaatgtccccctgaaatattacgtgtcatttttcaattcgacagtatcagaattaaaacccctcacctgacaaaaaccgaattatagaactgtctttaatgtcccaaaaactcagatttttgttttgacttgcatatttttcctgattttatgagcaaaaacgttgtcgtttaattgcagtttcggagttaggtccggaggattcgggtcgaaacatagtggagatcatattcaaatcaagctggcttaaaaaagacagtcccatctgtcagatcgaacggatattaaaagtccacaacactcaacgtacgatccaacggtttgaggattgccgagacgcagtgaaggcgcgtgcacttcaagcaaccagaaaagatgctcgttgtgccgccgacggcaacgagctcttacgttttcactgcaccactctcacttgttcactcggagctcgtggctcttcttctctctgctctaacctccctgtttgtggcgtctgcaccgtgattcgccacggtttccaaggaaaatctggtggcggaggagccaacgtcgcaaacgccggtgtgaggacgacggcgagcagcggaagagctgatgatttgctgaggtgtagcgatgatgcgaggagagtgatgcttgtgtgccgtgtgatcgctgggagagttaagcgagttgatttaccggcggcggatgcttcggctacagcggagaagaagtcaacggtggaggataactcggtggttggagtttcttcgagtggtggtacgtttgactcggtggcggtcaatgctggagtttattcgaatcttgaggagcttgtggtttataacccgagagctatattaccttgcttcgtggttatttacaaagttttagaatcttgaatttgtaattttaacttgagaaataatgtttgttttttgtacttctaactttttaatattatagggagagattagggataatcatcaacctgcatcataattcccatctt

SEQ ID NO: 107685 - protein, 240 aa, Arabidopsis thaliana
  peptide (1)..(240): Ceres Seq. ID no. 13651221
MALLTFLPENAEAPQKHKPTSSKRKKRDNPTDQTQTQKHKPQKPKKAVPPKQPSSWDQIKNLLTCKQIEGSRVHDPSKNSQSGPSMTTNLSPSKLGSSCSSICSFRDVAHGNTRVVHRADHSPDVGNSATPNSETRLLTRKPGQHGSSSSRSLTSGSTRSNASGSYTSSSTTSFRAMQFRKLSGCYECHMIVDPSRYPISPRVCACSQCGEVFPKLESLELHQAVRHAGKAFFFLLTKIV

SEQ ID NO: 107686 - protein, 155 aa, Arabidopsis thaliana
  peptide (1)..(155): Ceres Seq. ID no. 13651222
MTTNLSPSKLGSSCSSICSFRDVAHGNTRVVHRADHSPDVGNSATPNSETRLLTRKPGQHGSSSSRSLTSGSTRSNASGSYTSSSTTSFRAMQFRKLSGCYECHMIVDPSRYPISPRVCACSQCGEVFPKLESLELHQAVRHAGKAFFFLLTKIV

SEQ ID NO: 107687 - DNA, 1117 bp, Arabidopsis thaliana
  misc_feature (1)..(1117): Ceres Seq. ID no. 13651223
  misc_feature (1)..(1117): Ortholog of  Ceres SEQ ID NO 13593855 as cited in SEQ ID NO 53838
  misc_feature (1)..(1117): Ortholog of  Ceres SEQ ID NO 14302247 as cited in SEQ ID NO 62154
  misc_feature (1)..(1117): Ortholog of  Ceres SEQ ID NO 13539874 as cited in SEQ ID NO 64069
ctgtcaacagacatctttataattaattattgagaaaagagaaaaacagaggaaaaaaagatggagagaagcttgaagaagacgaagaacaattataacaactccataaagagcaatcttatgaaagatgatgaattgtttcatgtgattcacaaagttccctgtggagacactccttatgtcagagccaaacatgctcagttgatagagaagaacccggagatggcaatagtgtggttttggaaagccatcaacactggagacagagtagacagtgccctcaaggacatggctgttgtaatgaaacaacttgaccgttctgaagaagctattgaagctatcaaatctttccgtcctcgttgttccaagaattcccaagattcccttgacaatgtcctcatcgacttatacaagaaatgtgggagaatggaggagcaagttgagttgttgaagaggaaattaaggcagatctatcaaggagaagctttcaatggtaaacctaccaaaaccgctcgctcccacggaaaaaagtttcaagtgactgttcaacaagaaatctcaagattactgggtaacttggggtgggcatatatgcaacaagccaagtacttatcggccgaagcggtatacagaaaagcccagatggttgagccagatgctaacaaatcgtgcaaccttgcgatgtgccttatcaaacaaggcaggtttgaggagggaagattggttcttgacgatgttctcgagtatagggttttgggtgcggatgattgtagaacaaggcaacgggccgaagagcttctgagtgaattagagtcttcgctgccacggatgcgagatgctgagatggaggatgtcttgggaaatatcttagacgatgactttgttcttgggcttgaagagatgacatccactagttttaaatctaagagactcccaatcttcgaacagatctcgtcttttagaaatacattagtttgctagttaattcattctgtgttttcttgtgtatcatcatcatagctttgctgctttatagttttgatgagttgtaaatatatgtttctctttagtaactttgtacatacaacaaataatgggaacaacttcatttaagcac

SEQ ID NO: 107688 - protein, 306 aa, Arabidopsis thaliana; identical to SEQ ID NO: 71121
  peptide (1)..(306): Ceres Seq. ID no. 13651224

SEQ ID NO: 107689 - protein, 286 aa, Arabidopsis thaliana; identical to SEQ ID NO: 71122
  peptide (1)..(286): Ceres Seq. ID no. 13651225

SEQ ID NO: 107690 - protein, 252 aa, Arabidopsis thaliana; identical to SEQ ID NO: 71123
  peptide (1)..(252): Ceres Seq. ID no. 13651226

SEQ ID NO: 107691 - DNA, 3117 bp, Arabidopsis thaliana
  misc_feature (1)..(3117): Ceres Seq. ID no. 13651272
  misc_feature (1)..(3117): Ortholog of  Ceres SEQ ID NO 15168378 as cited in SEQ ID NO 59129
agtacacattttttttgatgagacaattatgaatcttgtctcataaggaagctactttaatctgtttcttctttctctatgatttcacttaaatatcaaacttcaagaactcatgtctcttgaggaacaatatggtgggttccaacaccgtaaccgctacatcgcggttgctcttgatctgttttgcttactcattcactgtcttctcaatgatttcatcagtgactgatcctcgtgatgcggcggctctgcgttctttgatggatcaatgggacaatacgccgcctagttggggaggttctgatgatccttgtggaactccttgggaaggtgtatcttgcaataactccagaatcactgctttgggtttgtcaacaatgggtctcaaaggaagacttagtggagatattggagaactagctgaactaagatcattggatctttcctttaatcgaggactaacaggttcacttacttctcggttaggagacctgcaaaagctaaatatccttattcttgctggttgtggcttcactggtaccatcccaaatgagcttggctatctcaaagatctatctttcttggccttgaactcgaacaacttcacgggtaaaatcccggcgtctctaggaaatctcactaaggtttattggctggatcttgcggataatcagttgacaggacccattccaatttcatcaggctcaagtcctggtcttgatcttcttttgaaagccaaacactttcatttcaacaagaatcagctctctgggaccattccaccaaaacttttcagctctgagatgatactgatccatgtattattcgatggaaatcgattcacaggaagcataccttccactttaggactcattcagacactagaggttcttcggcttgacagaaacactttgaccggaaaagttccagagaatctcagtaatctcacaaacatcattgaactgaacttagctcacaacaagctcgttggatcattaccagatttgtcagacatgaagtccatgaactacgtagatctcagcaataactcatttgatccatcagagtctcctctctggttctcaaccttaccttcactgaccacacttgtgatggaatatggatctcttcaaggaccactacctaataagctctttgggttcccacagcttcaacaagtgagactgaagaagaacgcattcaatggaacactgagcttgggagacacagtaggtccagagctccaacttgttgatctacaagacaacgacatatcctctgtaacactaagctctggatataccaatacattaatactcgaaggaaatcctgtatgcacaacagctctctccaacacaaactactgtcagattcagcagcaacaagtcaaacgaatatactcgaccagtcttgctaactgtggaggaaagtcttgtccattagaccaaaaggtcagccctcagagctgtgaatgcgcctacccttatgaaggcacactctacttccgagggcctatgttcagagacctgtccaatgtgaacacataccattctttggagatgagcttgtgggtgaaattaggactcactccaggctcggtctctctacaaaaccctttcttcaacaatgatgattatcttcagatacagttggcacttttcccacctatgggcaagtattttaacagaactgaagttcagagaattggatttgacttgagtaaccaaacatataaacctcctcctttgtttggaccttactacttcattgcatctccctacacattcccagctgatggtaacggacattccttgagctctcggatggtcactgggataataactggttgcagtgctttggtcctgtgccttgttgcgttaggaatatacgcaatgtggcagaagagacgtgcagagcaagctatcggtttgagtagaccatttgtttcatgggcatcaagtggaaaagacagcggtggcgcaccgcagctgaaaggggcacgatggttctcctacgaagaactcaagaagatcacgaacaatttctctgtgagcagtgagctgggttatggaggttatggaaaggtgtataaaggaatgcttcaagatgggcacatggtggcgatcaaaagagcacaacaaggatcaacacaaggagggctcgagttcaaaacagagattgagttgctttctcgagttcatcacaagaacctagttgggcttgtcgggttctgcttcgagcaaggcgagcagattctagtctacgaatacatgtccaacggatcactaaaagatagcttaaccgggcgatccggaattacgctggattggaaaagaaggctgagagtggctctaggatcggcaagaggactcgcatacctccatgaactggcggatcctccgatcatccacagggacgtgaaatcaactaacattcttttggatgagaatctgacagccaaggttgctgattttggtttgtccaagctggtttcagactgcaccaaaggccatgtttcaacacaagttaaaggaacattgggatatttggacccagagtactacacaacacagaaacttacagagaagagtgatgtgtacagcttcggtgttgtaatgatggagctgatcacagcgaaacagccgatagagaaaggcaagtacattgttagagagatcaagcttgtaatgaacaagagcgacgatgacttctacggactgagagataagatggatcgttcgttaagagacgtcggaactctgccagagctcggccggtatatggaactagccctgaaatgcgtagatgagacggcagatgagaggccaacgatgagtgaagtggtcaaggagattgagattatcatccagaatagtggggcgagtagtagctcctctgcatctgcgtcgtcatccgctacagattttggtgagaagcttttgtacggaggtactttgaagaagaaagaagcaagagacggagatggaggcggagcgtttgattatagtggtggctactctgttccgaccaaaattgagcccaagtaaatatcaacatctcttgtgagattatttgtcgttactttttgtatgaatgaatggaaaagtcatattgatg

SEQ ID NO: 107692 - protein, 971 aa, Arabidopsis thaliana
  peptide (1)..(971): Ceres Seq. ID no. 13651273
MVGSNTVTATSRLLLICFAYSFTVFSMISSVTDPRDAAALRSLMDQWDNTPPSWGGSDDPCGTPWEGVSCNNSRITALGLSTMGLKGRLSGDIGELAELRSLDLSFNRGLTGSLTSRLGDLQKLNILILAGCGFTGTIPNELGYLKDLSFLALNSNNFTGKIPASLGNLTKVYWLDLADNQLTGPIPISSGSSPGLDLLLKAKHFHFNKNQLSGTIPPKLFSSEMILIHVLFDGNRFTGSIPSTLGLIQTLEVLRLDRNTLTGKVPENLSNLTNIIELNLAHNKLVGSLPDLSDMKSMNYVDLSNNSFDPSESPLWFSTLPSLTTLVMEYGSLQGPLPNKLFGFPQLQQVRLKKNAFNGTLSLGDTVGPELQLVDLQDNDISSVTLSSGYTNTLILEGNPVCTTALSNTNYCQIQQQQVKRIYSTSLANCGGKSCPLDQKVSPQSCECAYPYEGTLYFRGPMFRDLSNVNTYHSLEMSLWVKLGLTPGSVSLQNPFFNNDDYLQIQLALFPPMGKYFNRTEVQRIGFDLSNQTYKPPPLFGPYYFIASPYTFPADGNGHSLSSRMVTGIITGCSALVLCLVALGIYAMWQKRRAEQAIGLSRPFVSWASSGKDSGGAPQLKGARWFSYEELKKITNNFSVSSELGYGGYGKVYKGMLQDGHMVAIKRAQQGSTQGGLEFKTEIELLSRVHHKNLVGLVGFCFEQGEQILVYEYMSNGSLKDSLTGRSGITLDWKRRLRVALGSARGLAYLHELADPPIIHRDVKSTNILLDENLTAKVADFGLSKLVSDCTKGHVSTQVKGTLGYLDPEYYTTQKLTEKSDVYSFGVVMMELITAKQPIEKGKYIVREIKLVMNKSDDDFYGLRDKMDRSLRDVGTLPELGRYMELALKCVDETADERPTMSEVVKEIEIIIQNSGASSSSSASASSSATDFGEKLLYGGTLKKKEARDGDGGGAFDYSGGYSVPTKIEPK

SEQ ID NO: 107693 - protein, 945 aa, Arabidopsis thaliana
  peptide (1)..(945): Ceres Seq. ID no. 13651274
MISSVTDPRDAAALRSLMDQWDNTPPSWGGSDDPCGTPWEGVSCNNSRITALGLSTMGLKGRLSGDIGELAELRSLDLSFNRGLTGSLTSRLGDLQKLNILILAGCGFTGTIPNELGYLKDLSFLALNSNNFTGKIPASLGNLTKVYWLDLADNQLTGPIPISSGSSPGLDLLLKAKHFHFNKNQLSGTIPPKLFSSEMILIHVLFDGNRFTGSIPSTLGLIQTLEVLRLDRNTLTGKVPENLSNLTNIIELNLAHNKLVGSLPDLSDMKSMNYVDLSNNSFDPSESPLWFSTLPSLTTLVMEYGSLQGPLPNKLFGFPQLQQVRLKKNAFNGTLSLGDTVGPELQLVDLQDNDISSVTLSSGYTNTLILEGNPVCTTALSNTNYCQIQQQQVKRIYSTSLANCGGKSCPLDQKVSPQSCECAYPYEGTLYFRGPMFRDLSNVNTYHSLEMSLWVKLGLTPGSVSLQNPFFNNDDYLQIQLALFPPMGKYFNRTEVQRIGFDLSNQTYKPPPLFGPYYFIASPYTFPADGNGHSLSSRMVTGIITGCSALVLCLVALGIYAMWQKRRAEQAIGLSRPFVSWASSGKDSGGAPQLKGARWFSYEELKKITNNFSVSSELGYGGYGKVYKGMLQDGHMVAIKRAQQGSTQGGLEFKTEIELLSRVHHKNLVGLVGFCFEQGEQILVYEYMSNGSLKDSLTGRSGITLDWKRRLRVALGSARGLAYLHELADPPIIHRDVKSTNILLDENLTAKVADFGLSKLVSDCTKGHVSTQVKGTLGYLDPEYYTTQKLTEKSDVYSFGVVMMELITAKQPIEKGKYIVREIKLVMNKSDDDFYGLRDKMDRSLRDVGTLPELGRYMELALKCVDETADERPTMSEVVKEIEIIIQNSGASSSSSASASSSATDFGEKLLYGGTLKKKEARDGDGGGAFDYSGGYSVPTKIEPK

SEQ ID NO: 107694 - protein, 928 aa, Arabidopsis thaliana
  peptide (1)..(928): Ceres Seq. ID no. 13651275
MDQWDNTPPSWGGSDDPCGTPWEGVSCNNSRITALGLSTMGLKGRLSGDIGELAELRSLDLSFNRGLTGSLTSRLGDLQKLNILILAGCGFTGTIPNELGYLKDLSFLALNSNNFTGKIPASLGNLTKVYWLDLADNQLTGPIPISSGSSPGLDLLLKAKHFHFNKNQLSGTIPPKLFSSEMILIHVLFDGNRFTGSIPSTLGLIQTLEVLRLDRNTLTGKVPENLSNLTNIIELNLAHNKLVGSLPDLSDMKSMNYVDLSNNSFDPSESPLWFSTLPSLTTLVMEYGSLQGPLPNKLFGFPQLQQVRLKKNAFNGTLSLGDTVGPELQLVDLQDNDISSVTLSSGYTNTLILEGNPVCTTALSNTNYCQIQQQQVKRIYSTSLANCGGKSCPLDQKVSPQSCECAYPYEGTLYFRGPMFRDLSNVNTYHSLEMSLWVKLGLTPGSVSLQNPFFNNDDYLQIQLALFPPMGKYFNRTEVQRIGFDLSNQTYKPPPLFGPYYFIASPYTFPADGNGHSLSSRMVTGIITGCSALVLCLVALGIYAMWQKRRAEQAIGLSRPFVSWASSGKDSGGAPQLKGARWFSYEELKKITNNFSVSSELGYGGYGKVYKGMLQDGHMVAIKRAQQGSTQGGLEFKTEIELLSRVHHKNLVGLVGFCFEQGEQILVYEYMSNGSLKDSLTGRSGITLDWKRRLRVALGSARGLAYLHELADPPIIHRDVKSTNILLDENLTAKVADFGLSKLVSDCTKGHVSTQVKGTLGYLDPEYYTTQKLTEKSDVYSFGVVMMELITAKQPIEKGKYIVREIKLVMNKSDDDFYGLRDKMDRSLRDVGTLPELGRYMELALKCVDETADERPTMSEVVKEIEIIIQNSGASSSSSASASSSATDFGEKLLYGGTLKKKEARDGDGGGAFDYSGGYSVPTKIEPK

SEQ ID NO: 107695 - DNA, 3952 bp, Arabidopsis thaliana
  misc_feature (1)..(3952): Ceres Seq. ID no. 13651276
  misc_feature (1)..(3952): Ortholog of  Ceres SEQ ID NO 15180400 as cited in SEQ ID NO 0
gtttgcaaaaaaaatcggagacgcaaaaccaacttgccgccgaatcttccttaaaccctcaacgctgctcttcgccgccgttgagacgatcacagtgatcgaatcttccttttcaactttctcgtcttttgatcaaacgagtttggttgagtttttgataaacgtgattaagcgattaatttcgcgttttaacaacaatctagattgtcctttggagattgaacaaatttagggtttttggggataatctaagtgtttatgatttgaaactttgtgtgttttgagattgttttgggcaatgttggattttcgagacggtttggtggcggcagagttagtgagtgttggggtttaggaagtagtagtagttattagggtttggaattgggttatgtttagggttttactagtttagaagatgggagaggattatgagcttgaagaaggagagatgaattgttcttctgatgaagctgttgttgatcttgacgttgatctctcttacattgacaagaaggtacagaatgtacttggccacttgcaaaaaggtttcggagaggaagcccgggaccggtttggtccggagatctttgactatggatcatttttgcccacttacaaacgtttgccggctgtaccatcatgtcaaaggagttctctagggaatcatgctgtacaaagaatttccaacagtttacccgggaagaatgtggttcagaagtttcagtcaccccctgctacatcttgtaaactagtaagaaatcaggatcctcagaactatcaaacttcaggatctcttttggctcaagctccaggaaaagttcccataaataaaggaaatgcaagaacaccagccaatgatttgcctcataataagccgatcagagttcggatcaaaatgggttctgaaatcttgtcccaaagtgtcgcgatggtttgcaaggatcttggtctcgatggttctccaaattcaccaccccgaatcagccaggatgatagtagcagaatgctaccgcatacatctctagggaagacaagtgaatctccttcccgcattcttcaggaaatgactgccatttctgttccagaggatctactgatgtcgcctcttcctgatagtctgctcctagtgaaggataagaagaagcaatatactttattagacaatcaacctatgattaagacaggaaagaaatcttctattcagatacagaacaagttctcggatgttttatgttgtgagaaaactccaattggaaggagaaggaaagaggtagactgttttcatgccaccacttggaatgagacgaagaagcataaagttttatccactggtcagctagccagggataactcagcttgtggtttaggtggggcaagtcttactactgatgggtttacaacaaaaagtaacttgcaggaaggttgtagaaaagatggtgaaagtgatcccagagtcgcaaataaaataaagtttgttgggttgcatgctgtgaaagagaaaaaaacatgtccgacaaagttgcaacagaaccgtagcaaatatcgtattggtgataaagttttatcaaagatgcctttgaaggatgccgcatatataggtcacaatagcatggacactgggtttgattttgcggttgcaccttcttccaccagtgttgacctagattattgggcccaatgtgagagttgtgagaaatggcggctactgccctatgacctgaatactgagaagctgcctgataagtggttgtgtagcatgcaaacctggctgcctggaatgaaccactgtggcgtcagcgaggaagagactacaaacgcaattaaatcctttcatgctagtgagggtcatggtcctgacactggtgttaaactcctctctgatgttcgtaatgctgataaaatctaccaacctttaacttctggttcattgcctaatccaattgaaaagaagtctaacgtagaagacttatcgcaaggagtttcaagcaacatccttgttgatgctgcaaagcctatgagaagtaacccacatattttcaagaataaaaacatgaagctgccaggagaaacacctactgctactcagatatctgcagacctttcgcacgatttttttcaggataagattgaccagaaagcaaagaggagagcagcaggtgctggttgtcagataaaggtcaagaagaaaaaggaggctgacaaagaagaaagtgatggttccaagcatatcaagactggtgatggtaacaaacttgccagagttattaaagcagaagaaatacattggaatcaagatcctaaatggactccagcagagagaaaaagaaaacgtcatgacaatgatttttgcactttgaatgtagagcgagacccaaagaaaagattactcgtatctaaaaagaaacctgaccacaaacctcaactgataactgctagtggttccttgtgtacaaaagcccagggaaatatcaatagtactgtgaggaaaataaggttgatgggttacaagcagggtaaggatgggaaaaattcaaaattgtttgcagatggtgaggaaaacgagccctcaatggaaaaggcggtaacaactaagatttcagtccatgaatctaaagcaaaccaaagaaatgaattgtttcaggctgattgctttcaagaacacctgaatggtgatgcctcatgtagatatttctctggtggaagtgggcagatttctgggatagaaacatcaaactcgtcgaaggttttaggatcacataaaagtggacgaatgtatgtggaagaagtaaaagcatcccctgtggaatcagtttcctcttcccctgcaaggtcttcatgccccacgaatgatatacttcaagaggctgaaaagctgagaaagcttgctgactgtttcaagagctctggatttgaatatgaatacaaggagatcaactttaaagcggctctgaggtttctccttggagcttcagttttagaaatgtgcagtacagataatgtggaagtggggaagatgagccatattgaggcttaccatactgctgcaaaactttcagaaagttgtgcccatcaatatgaaacaagccaagaaatggctgcagctactttggcttataaatgcacagaagtggcttgcatgagattagtgtatggcagaagtctaggtctgagtggagaatggaatgaattgcaaaaaatggtacagatgactcctcaaggtgaatcaccgtcatcatctgcatctgatgtcgatagtttcaatcatcaaggggtgattaagaagtctgctaaaaccagaagaggtctttcccatgttgccggaaaccttctccctgttgctagaagccaactaaattttgttccgctattggactttacagggagcatgaatctggcaatggaggcctcagcaaaatcccaaaatgcttttaaagccgtcactgacacctcagaagaaagaaagcatggagactgtatctctgctatcaaaaaagttgtcgattttagtttccatgatgttgaagcgcttataaagatgattgaggttgccatggatgctctaagttcatcaagattcggtggcccaaagtgttgactctattttgtatatagaccctggtcctataaagaatagaatagtgtttcatgaacttccatagaaaaatcttagtaagtagcatagattaggaaaggaagacttggagagaggacactagataaggtctaagtttgctatttgcagtaactctcagggtcctgtttcaggtctttcttctttttggtgtctgggtattcaatattaactaaagcatatttatagaagagtaggaggattcttagatatagtcatttaaaagatcggttagtgataagatttctgacaagacactgctctaatcctgtttcagttctgttcaaagtattttggaattgaaacatatactttctt

SEQ ID NO: 107696 - protein, 1059 aa, Arabidopsis thaliana
  peptide (1)..(1059): Ceres Seq. ID no. 13651277
MGEDYELEEGEMNCSSDEAVVDLDVDLSYIDKKVQNVLGHLQKGFGEEARDRFGPEIFDYGSFLPTYKRLPAVPSCQRSSLGNHAVQRISNSLPGKNVVQKFQSPPATSCKLVRNQDPQNYQTSGSLLAQAPGKVPINKGNARTPANDLPHNKPIRVRIKMGSEILSQSVAMVCKDLGLDGSPNSPPRISQDDSSRMLPHTSLGKTSESPSRILQEMTAISVPEDLLMSPLPDSLLLVKDKKKQYTLLDNQPMIKTGKKSSIQIQNKFSDVLCCEKTPIGRRRKEVDCFHATTWNETKKHKVLSTGQLARDNSACGLGGASLTTDGFTTKSNLQEGCRKDGESDPRVANKIKFVGLHAVKEKKTCPTKLQQNRSKYRIGDKVLSKMPLKDAAYIGHNSMDTGFDFAVAPSSTSVDLDYWAQCESCEKWRLLPYDLNTEKLPDKWLCSMQTWLPGMNHCGVSEEETTNAIKSFHASEGHGPDTGVKLLSDVRNADKIYQPLTSGSLPNPIEKKSNVEDLSQGVSSNILVDAAKPMRSNPHIFKNKNMKLPGETPTATQISADLSHDFFQDKIDQKAKRRAAGAGCQIKVKKKKEADKEESDGSKHIKTGDGNKLARVIKAEEIHWNQDPKWTPAERKRKRHDNDFCTLNVERDPKKRLLVSKKKPDHKPQLITASGSLCTKAQGNINSTVRKIRLMGYKQGKDGKNSKLFADGEENEPSMEKAVTTKISVHESKANQRNELFQADCFQEHLNGDASCRYFSGGSGQISGIETSNSSKVLGSHKSGRMYVEEVKASPVESVSSSPARSSCPTNDILQEAEKLRKLADCFKSSGFEYEYKEINFKAALRFLLGASVLEMCSTDNVEVGKMSHIEAYHTAAKLSESCAHQYETSQEMAAATLAYKCTEVACMRLVYGRSLGLSGEWNELQKMVQMTPQGESPSSSASDVDSFNHQGVIKKSAKTRRGLSHVAGNLLPVARSQLNFVPLLDFTGSMNLAMEASAKSQNAFKAVTDTSEERKHGDCISAIKKVVDFSFHDVEALIKMIEVAMDALSSSRFGGPKC

SEQ ID NO: 107697 - protein, 1048 aa, Arabidopsis thaliana
  peptide (1)..(1048): Ceres Seq. ID no. 13651278
MNCSSDEAVVDLDVDLSYIDKKVQNVLGHLQKGFGEEARDRFGPEIFDYGSFLPTYKRLPAVPSCQRSSLGNHAVQRISNSLPGKNVVQKFQSPPATSCKLVRNQDPQNYQTSGSLLAQAPGKVPINKGNARTPANDLPHNKPIRVRIKMGSEILSQSVAMVCKDLGLDGSPNSPPRISQDDSSRMLPHTSLGKTSESPSRILQEMTAISVPEDLLMSPLPDSLLLVKDKKKQYTLLDNQPMIKTGKKSSIQIQNKFSDVLCCEKTPIGRRRKEVDCFHATTWNETKKHKVLSTGQLARDNSACGLGGASLTTDGFTTKSNLQEGCRKDGESDPRVANKIKFVGLHAVKEKKTCPTKLQQNRSKYRIGDKVLSKMPLKDAAYIGHNSMDTGFDFAVAPSSTSVDLDYWAQCESCEKWRLLPYDLNTEKLPDKWLCSMQTWLPGMNHCGVSEEETTNAIKSFHASEGHGPDTGVKLLSDVRNADKIYQPLTSGSLPNPIEKKSNVEDLSQGVSSNILVDAAKPMRSNPHIFKNKNMKLPGETPTATQISADLSHDFFQDKIDQKAKRRAAGAGCQIKVKKKKEADKEESDGSKHIKTGDGNKLARVIKAEEIHWNQDPKWTPAERKRKRHDNDFCTLNVERDPKKRLLVSKKKPDHKPQLITASGSLCTKAQGNINSTVRKIRLMGYKQGKDGKNSKLFADGEENEPSMEKAVTTKISVHESKANQRNELFQADCFQEHLNGDASCRYFSGGSGQISGIETSNSSKVLGSHKSGRMYVEEVKASPVESVSSSPARSSCPTNDILQEAEKLRKLADCFKSSGFEYEYKEINFKAALRFLLGASVLEMCSTDNVEVGKMSHIEAYHTAAKLSESCAHQYETSQEMAAATLAYKCTEVACMRLVYGRSLGLSGEWNELQKMVQMTPQGESPSSSASDVDSFNHQGVIKKSAKTRRGLSHVAGNLLPVARSQLNFVPLLDFTGSMNLAMEASAKSQNAFKAVTDTSEERKHGDCISAIKKVVDFSFHDVEALIKMIEVAMDALSSSRFGGPKC

SEQ ID NO: 107698 - protein, 899 aa, Arabidopsis thaliana
  peptide (1)..(899): Ceres Seq. ID no. 13651279
MGSEILSQSVAMVCKDLGLDGSPNSPPRISQDDSSRMLPHTSLGKTSESPSRILQEMTAISVPEDLLMSPLPDSLLLVKDKKKQYTLLDNQPMIKTGKKSSIQIQNKFSDVLCCEKTPIGRRRKEVDCFHATTWNETKKHKVLSTGQLARDNSACGLGGASLTTDGFTTKSNLQEGCRKDGESDPRVANKIKFVGLHAVKEKKTCPTKLQQNRSKYRIGDKVLSKMPLKDAAYIGHNSMDTGFDFAVAPSSTSVDLDYWAQCESCEKWRLLPYDLNTEKLPDKWLCSMQTWLPGMNHCGVSEEETTNAIKSFHASEGHGPDTGVKLLSDVRNADKIYQPLTSGSLPNPIEKKSNVEDLSQGVSSNILVDAAKPMRSNPHIFKNKNMKLPGETPTATQISADLSHDFFQDKIDQKAKRRAAGAGCQIKVKKKKEADKEESDGSKHIKTGDGNKLARVIKAEEIHWNQDPKWTPAERKRKRHDNDFCTLNVERDPKKRLLVSKKKPDHKPQLITASGSLCTKAQGNINSTVRKIRLMGYKQGKDGKNSKLFADGEENEPSMEKAVTTKISVHESKANQRNELFQADCFQEHLNGDASCRYFSGGSGQISGIETSNSSKVLGSHKSGRMYVEEVKASPVESVSSSPARSSCPTNDILQEAEKLRKLADCFKSSGFEYEYKEINFKAALRFLLGASVLEMCSTDNVEVGKMSHIEAYHTAAKLSESCAHQYETSQEMAAATLAYKCTEVACMRLVYGRSLGLSGEWNELQKMVQMTPQGESPSSSASDVDSFNHQGVIKKSAKTRRGLSHVAGNLLPVARSQLNFVPLLDFTGSMNLAMEASAKSQNAFKAVTDTSEERKHGDCISAIKKVVDFSFHDVEALIKMIEVAMDALSSSRFGGPKC

SEQ ID NO: 107699 - DNA, 1288 bp, Arabidopsis thaliana
  misc_feature (1)..(1288): Ceres Seq. ID no. 13651288
  misc_feature (1)..(1288): Ortholog of  Ceres SEQ ID NO 15176219 as cited in SEQ ID NO 58640
  misc_feature (1)..(1288): Ortholog of  Ceres SEQ ID NO 14303413 as cited in SEQ ID NO 59769
aaagaaccgccaagaaacctcaagagtgaaaatgagttttttcagatcaaagacttcaaaaactgaaacacaacaaccatcatcgtatggacaacaacaagacgctatgtactcatcttacggaaccgtgagtgacgaagtgttattacagattcatggatgcagagctcatctcatcaacggatccgaagctgtggagctagccgccggagacttcgagcttgtacaagtcttagacagcaacgtagccttagctatggtcgtgaggatcggaaatgacttacaatggccggtgattaaagacgagccagtggtgaaacttgactctcgtgactacctcttcacgttgccggttaaagatggagagccacttagttacggcatcacgtttttccctattgatgaaaatgacatcgtttttgtgaatagtatcgagttgctagacgatttcttgagagagaattcttgtttctcttcgtctccgtcttcttcttcgtcttcttcttcgtcttcttcttcgagtgttaacaatggaattgattggaaagagtttgcgcctaagattgaagattataacaatgttgtagctaaagctattgcaggaggtacagggcatatcattagagggatgtttaaatgcagtaatgcttacactaatcaggttcataaaggaggtgaaattatgattacgaaggctgagaaaaagaatggtgcctcgtcaaaaagaaatgcaaccacaaacaagaatcaaatcaacaagaaccttcaacgagtaaggaaattgtctagggcgacggagaaattgagcaagacaatgttgaatggtgtgggagtggtgagtggctcggtgatgggtccagttgtaaagtcgaagccagggaaagcttttttctcaatggttccaggggaggttctattggcttcacttgatgctcttaataaattactagacgctgctgaagccgcagagagacaaactctttctgctacgtccaaagctactacaagaatggttagtgagaggttaggtgagagcgcgggagaagctacgaaagatgtactaggcacggttgggcacgcagccggcactgcgtggaacgtcttcaatatccgcaaagctttctctccttcctcttcagtcacatcggggatcctcaaaaacgcttcacgaaagtgatatttggtgtttgtatttatttgtgggcagagaccataaggttaaaattaagtcagaatatgcaaatgtgtaatcttgaatctcaaacaaaggaaacctctcttccttacc

SEQ ID NO: 107700 - protein, 391 aa, Arabidopsis thaliana
  peptide (1)..(391): Ceres Seq. ID no. 13651289
KNRQETSRVKMSFFRSKTSKTETQQPSSYGQQQDAMYSSYGTVSDEVLLQIHGCRAHLINGSEAVELAAGDFELVQVLDSNVALAMVVRIGNDLQWPVIKDEPVVKLDSRDYLFTLPVKDGEPLSYGITFFPIDENDIVFVNSIELLDDFLRENSCFSSSPSSSSSSSSSSSSSVNNGIDWKEFAPKIEDYNNVVAKAIAGGTGHIIRGMFKCSNAYTNQVHKGGEIMITKAEKKNGASSKRNATTNKNQINKNLQRVRKLSRATEKLSKTMLNGVGVVSGSVMGPVVKSKPGKAFFSMVPGEVLLASLDALNKLLDAAEAAERQTLSATSKATTRMVSERLGESAGEATKDVLGTVGHAAGTAWNVFNIRKAFSPSSSVTSGILKNASRK

SEQ ID NO: 107701 - protein, 381 aa, Arabidopsis thaliana
  peptide (1)..(381): Ceres Seq. ID no. 13651290
MSFFRSKTSKTETQQPSSYGQQQDAMYSSYGTVSDEVLLQIHGCRAHLINGSEAVELAAGDFELVQVLDSNVALAMVVRIGNDLQWPVIKDEPVVKLDSRDYLFTLPVKDGEPLSYGITFFPIDENDIVFVNSIELLDDFLRENSCFSSSPSSSSSSSSSSSSSVNNGIDWKEFAPKIEDYNNVVAKAIAGGTGHIIRGMFKCSNAYTNQVHKGGEIMITKAEKKNGASSKRNATTNKNQINKNLQRVRKLSRATEKLSKTMLNGVGVVSGSVMGPVVKSKPGKAFFSMVPGEVLLASLDALNKLLDAAEAAERQTLSATSKATTRMVSERLGESAGEATKDVLGTVGHAAGTAWNVFNIRKAFSPSSSVTSGILKNASRK

SEQ ID NO: 107702 - protein, 356 aa, Arabidopsis thaliana
  peptide (1)..(356): Ceres Seq. ID no. 13651291
MYSSYGTVSDEVLLQIHGCRAHLINGSEAVELAAGDFELVQVLDSNVALAMVVRIGNDLQWPVIKDEPVVKLDSRDYLFTLPVKDGEPLSYGITFFPIDENDIVFVNSIELLDDFLRENSCFSSSPSSSSSSSSSSSSSVNNGIDWKEFAPKIEDYNNVVAKAIAGGTGHIIRGMFKCSNAYTNQVHKGGEIMITKAEKKNGASSKRNATTNKNQINKNLQRVRKLSRATEKLSKTMLNGVGVVSGSVMGPVVKSKPGKAFFSMVPGEVLLASLDALNKLLDAAEAAERQTLSATSKATTRMVSERLGESAGEATKDVLGTVGHAAGTAWNVFNIRKAFSPSSSVTSGILKNASRK

SEQ ID NO: 107703 - DNA, 769 bp, Arabidopsis thaliana
  misc_feature (1)..(769): Ceres Seq. ID no. 13651302
  misc_feature (1)..(769): Ortholog of  Ceres SEQ ID NO 14306814 as cited in SEQ ID NO 56370
  misc_feature (1)..(769): Ortholog of  Ceres SEQ ID NO 13662830 as cited in SEQ ID NO 61566
  misc_feature (1)..(769): Ortholog of  Ceres SEQ ID NO 14309275 as cited in SEQ ID NO 0
gagttggaccagtcggaggattagggtttcaacggagactcactagtcgatctccgatcctttcttctacccgcccgaaatccgtcgaaacttctcttctttaccattgatttgcctcgtctcagctcaattctcttccgttgctgcttcgtttagtactctggtggtgggagagatgaatcacggccaacaatctggtgaggcaaagcatgaagatgatgctgctcttacagagttccttgcttctctgatggattatactcctactattcctgatgatttagtggagcactacttggctaagagtggatttcagtgccccgacgtacgattgataaggctagttgctgtggctacacaaaagtttgttgcagatgttgccagtgacgcccttcagcattgcaaggctagaccagcaccagttgtgaaagacaaaaaacagcaaaaggataagcgtttggtattgacaatggaagatctttcaaaagctttgcgtgagtatggtgtgaacgtgaagcatccagaatattttgctgatagcccttcgactggaatggaccctgtaacaagggacgaatagaaaccaggaattcctcaaaatctttgcctagtaaggacggtcatgtgtctcagatccctgattctctgttgtgtttcagttaaaaacaaaactcacttgtcttgctagtcctcaattactacattacatgtatattcgtttgttgtttgttctctggtgatttttggggttctacatcacttatccacc

SEQ ID NO: 107704 - protein, 134 aa, Arabidopsis thaliana
  peptide (1)..(134): Ceres Seq. ID no. 13651303
MNHGQQSGEAKHEDDAALTEFLASLMDYTPTIPDDLVEHYLAKSGFQCPDVRLIRLVAVATQKFVADVASDALQHCKARPAPVVKDKKQQKDKRLVLTMEDLSKALREYGVNVKHPEYFADSPSTGMDPVTRDE

SEQ ID NO: 107705 - protein, 109 aa, Arabidopsis thaliana
  peptide (1)..(109): Ceres Seq. ID no. 13651304
MDYTPTIPDDLVEHYLAKSGFQCPDVRLIRLVAVATQKFVADVASDALQHCKARPAPVVKDKKQQKDKRLVLTMEDLSKALREYGVNVKHPEYFADSPSTGMDPVTRDE

SEQ ID NO: 107706 - DNA, 1700 bp, Arabidopsis thaliana
  misc_feature (1)..(1700): Ceres Seq. ID no. 13651312
  misc_feature (1)..(1700): Ortholog of  Ceres SEQ ID NO 15169439 as cited in SEQ ID NO 55062
actctgactctcacactcgatactccaaaatctctcatactgttccattgattcttcctctggtttttatttgttcttgtaagaatggttgcgatacccaatattaagataaagtttggtcctcaaggttctgtcagaacattccaaacgttgtctgatagttcgaagaaaattgagcatgtagtgactgaagatttatctcaatcctcggagaaatcaaagaagcgtggtgggcctaaagagctagatgaagttcaacctaagaagaagcagaggctggattgtgattggtctagtcaatgtttggcattgttacgttttttgatggagcaccgtggtggatggctctttaaggagcctgttgatcctgttaaaatggagattcctgattacttcaatgtcatacaaaagccaatggatttaggcactgtcaaatcgaaacttttgaagaatgtctacagtaatgctgatgagtttgcagcggatgttcggttaacttttgccaatgcgatgcattataatcctctgtggaatgaggttcacacgattgcaaaggagattaatgagatttttgaggttagatgggaatcactcatgaagaaaaaggttttgaggttatcctggaatgaagttagagaaggttataagagacagccagttgaacgtgattgttctagacggagcagcactggaacatcagcttcctctggggtgggattgacgaaaccagctaaagagaactccgaaaagggttctctttcgtccaagccagtgaaagtgcagagcaaaaagaatactcctgctgtgacgcctaaagcattagcaacctgtaaatgtggtaggataatttgcatatgcctcaagtcctgtagctcatttggaagtgacgtttgttcgttaacggattgtcaattaaagaacatttcaggtgcacaagcgagcgagttagatcctcaatctaatgggtctgacacttcaaagaaggagagaaatggtagtctcaagtctcagcttgataaaccttcaaacagtgatctgttgggtaatgagttgaaaacggcttttcctgctctgccgccggtacctcctgagaaagctcttcgtgctgcaatactcaaagctcaatatgcaggaaccatcataaaagctaaacacagaatagtccttggccagaataacaaagctgatctgattagaatacagatagaaaaggaacagatggaaagagcacaacgtgaagagaaagctagaattgaagccgagatgagagctgctaaggttgctgaacgaatgagggcacaagacgagttgaaacagaaacgtgagagtcaacggcttgaaatagcaaagatgaaaaaaggcttcgattttgaacggaacaaccactcgaaattgaagaaaaaattcgttaaagtctgtggctgctttagtctgacaaaagctcggttgttacttgaagagttgggtctggttttgaaaaatgattattgtccggaactggaagtgatcgggtcagaaaaatttgatgcaatgagaatggacgatcttgaggaaggagagatcctttagagttttctctataagaaaacctcttggatgtaatttttgaccataaggaatgctttgtaaccttaactttggttttttttttttttttgtgaacaacaaccttaactttgttaatatatgaaaatgctatt

SEQ ID NO: 107707 - protein, 494 aa, Arabidopsis thaliana; identical to SEQ ID NO: 79182
  peptide (1)..(494): Ceres Seq. ID no. 13651313

SEQ ID NO: 107708 - protein, 414 aa, Arabidopsis thaliana; identical to SEQ ID NO: 79183
  peptide (1)..(414): Ceres Seq. ID no. 13651314

SEQ ID NO: 107709 - protein, 397 aa, Arabidopsis thaliana; identical to SEQ ID NO: 79184
  peptide (1)..(397): Ceres Seq. ID no. 13651315

SEQ ID NO: 107710 - DNA, 1778 bp, Arabidopsis thaliana
  misc_feature (1)..(1778): Ceres Seq. ID no. 13651357
  misc_feature (1)..(1778): Ortholog of  Ceres SEQ ID NO 13594213 as cited in SEQ ID NO 57038
  misc_feature (1)..(1778): Ortholog of  Ceres SEQ ID NO 13654989 as cited in SEQ ID NO 63117
  misc_feature (1)..(1778): Ortholog of  Ceres SEQ ID NO 13584744 as cited in SEQ ID NO 69137
gttgagcactccccagtctcagtggtgcggtgaggagagcttcgttgtcttccccattgcaattagggttttcaaaacgggtaatcgaattcggtggtgctcggctttgaaattgaggatgagatcctttccacttccttctacctgctgacaatgggcaactgcggtactagagacgaggctgccgtcttcactcctcaagctcaagcccaacagctccagaagaagcactcccgatccgtctcagatctgagcgatccatccactcctcgcttccgagacgactctcgcactcctatttcgtatgcccaagtcatcccctttactttgtttgagcttgagaccatcaccaagagcttccgcccagattatatactcggagaaggtggtttcggtaccgtctacaagggttacattgatgacaatctccgcgtcggcctcaagtctctccctgttgccgtcaaggtccttaacaaggagggactccagggtcaccgtgaatggcttacagaggtcaacttcctcggccaactccgtcatcccaacctcgtcaagcttattggttactgctgcgaggacgatcaccgattacttgtttatgagttcatgctgcgaggcagtcttgagaatcacctatttcgaaaaaccacagctccgctatcttggtctagaaggatgatgattgctcttggagctgcgaaaggccttgctttcctccacaatgctgaaagaccggttatttatagggatttcaagacttccaatatactgcttgactccgactacaccgccaagctttcagattttggcttagctaaagctggaccccagggtgatgaaacccatgtatcaactcgagttatgggtacttatggctatgctgccccagaatatgtgatgactggacacttgacggccagaagtgatgtatacagctttggagttgttcttctagagatgttgacaggaagaaaatcagtggataagacaagacctagcaaagagcagaacttggttgattgggctcggccaaagctgaatgataaaagaaaactgctgcagataattgacccaagactggagaaccaatactctgtcagggcagctcagaaggcatgcagcttggcgtattattgtcttagccagaacccgaaagctaggccattgatgagcgatgtggttgagactttggaacctttgcagtgtactggtgatgccctgatcccttgtgcaactactacagctggagctgcatttgcaatgggaggggtgcctgattacagaatgcaccggaggtttgcaaagaacgttgggccaggtgcaatttgccggtcacccaatccaaattattcaccgggtggacctgcagcatgcagagttcggtgattagtgtcaagtgtatataatccgtttcgctgtgtctccttttccgtaatttctctcagagccaaacatctggttgctaaaaatcgtggatgcacgttgtttttgttgttgttgatgctgctgtttattgccactttactgtgttgatctgtctagagtcttgtatgattatgaatgagtgtggttcttgtttaatccgcactctgatgcagtatgcttgtagtagtcgacacttattcactccaaggtgaattttttttgtgtaagcagatatggttttctaacaagtggacattctccagccataatggtttggtagggttgcacattgtacttactgggcgaagagaagataacatatcaatgaacagtagacatatgatgctattaat

SEQ ID NO: 107711 - protein, 410 aa, Arabidopsis thaliana
  peptide (1)..(410): Ceres Seq. ID no. 13651358
MGNCGTRDEAAVFTPQAQAQQLQKKHSRSVSDLSDPSTPRFRDDSRTPISYAQVIPFTLFELETITKSFRPDYILGEGGFGTVYKGYIDDNLRVGLKSLPVAVKVLNKEGLQGHREWLTEVNFLGQLRHPNLVKLIGYCCEDDHRLLVYEFMLRGSLENHLFRKTTAPLSWSRRMMIALGAAKGLAFLHNAERPVIYRDFKTSNILLDSDYTAKLSDFGLAKAGPQGDETHVSTRVMGTYGYAAPEYVMTGHLTARSDVYSFGVVLLEMLTGRKSVDKTRPSKEQNLVDWARPKLNDKRKLLQIIDPRLENQYSVRAAQKACSLAYYCLSQNPKARPLMSDVVETLEPLQCTGDALIPCATTTAGAAFAMGGVPDYRMHRRFAKNVGPGAICRSPNPNYSPGGPAACRVR

SEQ ID NO: 107712 - protein, 259 aa, Arabidopsis thaliana
  peptide (1)..(259): Ceres Seq. ID no. 13651359
MLRGSLENHLFRKTTAPLSWSRRMMIALGAAKGLAFLHNAERPVIYRDFKTSNILLDSDYTAKLSDFGLAKAGPQGDETHVSTRVMGTYGYAAPEYVMTGHLTARSDVYSFGVVLLEMLTGRKSVDKTRPSKEQNLVDWARPKLNDKRKLLQIIDPRLENQYSVRAAQKACSLAYYCLSQNPKARPLMSDVVETLEPLQCTGDALIPCATTTAGAAFAMGGVPDYRMHRRFAKNVGPGAICRSPNPNYSPGGPAACRVR

SEQ ID NO: 107713 - protein, 236 aa, Arabidopsis thaliana; identical to SEQ ID NO: 71405
  peptide (1)..(236): Ceres Seq. ID no. 13651360

SEQ ID NO: 107714 - DNA, 1725 bp, Arabidopsis thaliana
  misc_feature (1)..(1725): Ceres Seq. ID no. 13651361
  misc_feature (1)..(1725): Ortholog of  Ceres SEQ ID NO 13654989 as cited in SEQ ID NO 63117
  misc_feature (1)..(1725): Ortholog of  Ceres SEQ ID NO 13657138 as cited in SEQ ID NO 65923
  misc_feature (1)..(1725): Ortholog of  Ceres SEQ ID NO 13584744 as cited in SEQ ID NO 69137
gtctcatttcttgtctccaatccatggaaggccttcgagactcatcgtcacaaactatctcttccacgacgtcgtcttcttcgtctccgtcctgcgatgtagacgttgacaatcgtggaaaacaattaactccttctacaagacgatctcgagccggcttctctgattctttctcttctcatgatttatcatcattctgtcgagatgaagaagtaaaaacattctgccccatcaaatcggaatcagacgatgaattattaaggagcatagaagccgaaacttcatcttccgtggtgagcacgtcagactcatcagaaactcatcaccatcaccatcatcatcattcgtctggaggtcccaacaacggtcactggagaagaggtttcttccgtttgcttaagaaaggatcatccgcaatgccattcaacacgttcacacctctcaaaggagttccgaaactgaccagacggaagagcaaacgcataagggacaacatggttcccgttatacctgctcttgacactgatcacttgttctatttcaaaccctcctggaggaacttctctctccgagatattcagaccgcgacaaatgactacagccgtgaaaatctgatcggagaaggaggatatgcggaggtgtataagggacaaatggcagatgggcagatagtagcgataaagaagttgactagaggttctgcagaagagatgacgatggattatctgtccgaactagggatcattgttcatgtagatcatccaaacattgctaagcttattggttattgtgttgaaggaggaatgcatcttgttcttgagctatctcctaatggaagccttgcttctttgctctacgaggcgaaggagaaactgaattggagcatgagatacaaagtggcgatgggaacagcagagggactctactatctccatgaaggttgtcagagaagaatcattcataaagacattaaagcttctaacattcttctcactcagaactttgaggctcagatatcggatttcgggctagcgaaatggctaccagaccaatggactcaccatactgtatcaaaagttgaaggaacattcggttaccttccgccagagtttttcatgcatgggatagtagacgagaaaacagacgtatatgcttatggtgtcctgcttctcgagctcattaccggtagacaagccctcgacagctcacaacatagcattgtcatgtgggctaagccattgatcaaagagaacaagatcaaacaacttgttgatccgattctggaagatgactacgacgtagaagagttggaccgtcttgtcttcatagcttccttgtgtatacatcaaacctccatgaaccggcctcagatgagccaggttgtggagattctgaggggagacaagtgcagcttagataagctaagagagcgagaaaactccaaactccagaggacttactctgaagaactattggataacgaagaatacaactcgacaagatatttaaacgatattaatcgacacatggagaccgttctcggaacatctaaggattaattctgaaatgtcctacttgctaaatgcaagacaaacatttcattgagtccatatatttgttcactatagagtttgtatgactgctgaggattggagatgaatccgatcaggattggatattaagttagtagagaaaaggactgaaaaagttcaatattgccttagc

SEQ ID NO: 107715 - protein, 518 aa, Arabidopsis thaliana
  peptide (1)..(518): Ceres Seq. ID no. 13651362
LISCLQSMEGLRDSSSQTISSTTSSSSSPSCDVDVDNRGKQLTPSTRRSRAGFSDSFSSHDLSSFCRDEEVKTFCPIKSESDDELLRSIEAETSSSVVSTSDSSETHHHHHHHHSSGGPNNGHWRRGFFRLLKKGSSAMPFNTFTPLKGVPKLTRRKSKRIRDNMVPVIPALDTDHLFYFKPSWRNFSLRDIQTATNDYSRENLIGEGGYAEVYKGQMADGQIVAIKKLTRGSAEEMTMDYLSELGIIVHVDHPNIAKLIGYCVEGGMHLVLELSPNGSLASLLYEAKEKLNWSMRYKVAMGTAEGLYYLHEGCQRRIIHKDIKASNILLTQNFEAQISDFGLAKWLPDQWTHHTVSKVEGTFGYLPPEFFMHGIVDEKTDVYAYGVLLLELITGRQALDSSQHSIVMWAKPLIKENKIKQLVDPILEDDYDVEELDRLVFIASLCIHQTSMNRPQMSQVVEILRGDKCSLDKLRERENSKLQRTYSEELLDNEEYNSTRYLNDINRHMETVLGTSKD

SEQ ID NO: 107716 - protein, 511 aa, Arabidopsis thaliana
  peptide (1)..(511): Ceres Seq. ID no. 13651363
MEGLRDSSSQTISSTTSSSSSPSCDVDVDNRGKQLTPSTRRSRAGFSDSFSSHDLSSFCRDEEVKTFCPIKSESDDELLRSIEAETSSSVVSTSDSSETHHHHHHHHSSGGPNNGHWRRGFFRLLKKGSSAMPFNTFTPLKGVPKLTRRKSKRIRDNMVPVIPALDTDHLFYFKPSWRNFSLRDIQTATNDYSRENLIGEGGYAEVYKGQMADGQIVAIKKLTRGSAEEMTMDYLSELGIIVHVDHPNIAKLIGYCVEGGMHLVLELSPNGSLASLLYEAKEKLNWSMRYKVAMGTAEGLYYLHEGCQRRIIHKDIKASNILLTQNFEAQISDFGLAKWLPDQWTHHTVSKVEGTFGYLPPEFFMHGIVDEKTDVYAYGVLLLELITGRQALDSSQHSIVMWAKPLIKENKIKQLVDPILEDDYDVEELDRLVFIASLCIHQTSMNRPQMSQVVEILRGDKCSLDKLRERENSKLQRTYSEELLDNEEYNSTRYLNDINRHMETVLGTSKD

SEQ ID NO: 107717 - protein, 380 aa, Arabidopsis thaliana
  peptide (1)..(380): Ceres Seq. ID no. 13651364
MPFNTFTPLKGVPKLTRRKSKRIRDNMVPVIPALDTDHLFYFKPSWRNFSLRDIQTATNDYSRENLIGEGGYAEVYKGQMADGQIVAIKKLTRGSAEEMTMDYLSELGIIVHVDHPNIAKLIGYCVEGGMHLVLELSPNGSLASLLYEAKEKLNWSMRYKVAMGTAEGLYYLHEGCQRRIIHKDIKASNILLTQNFEAQISDFGLAKWLPDQWTHHTVSKVEGTFGYLPPEFFMHGIVDEKTDVYAYGVLLLELITGRQALDSSQHSIVMWAKPLIKENKIKQLVDPILEDDYDVEELDRLVFIASLCIHQTSMNRPQMSQVVEILRGDKCSLDKLRERENSKLQRTYSEELLDNEEYNSTRYLNDINRHMETVLGTSKD

SEQ ID NO: 107718 - DNA, 3471 bp, Arabidopsis thaliana
  misc_feature (1)..(3471): Ceres Seq. ID no. 13651372
  misc_feature (1)..(3471): Ortholog of  Ceres SEQ ID NO 12586556 as cited in SEQ ID NO 64667
  misc_feature (1)..(3471): Ortholog of  Ceres SEQ ID NO 13660894 as cited in SEQ ID NO 67475
atggagttgtcttcactcttcatcttcagagtctcgtactcttgttgcgttttttcgcgcgcattcttccgctttgctttgttgttccaatatctctctcttacctctgtttcgttattctcaatcatataggttctgctatgtatatactctcagctcttagggttcaaatgtgtatatagtatggttcagcaatcagcacaccacgtgttcgatgatatgcttcaatgaagttttctcaacttgtagtcttattctgctttgatctcaagtagagaagcatattttttgttgtggagctcgaatatggcgcgttgggcatggtgttgttagacagagtatatgccgtatattcttggaggtctcaccatagccgacattgtcaagtttattcccagattatggaaaaagtcgcagtcttgttccaagaactttccaaacccacattgaaccaatgctgagtgagagtcttttcaaatctcttggacatttggccagccacggtcatttgcacgacgctttcaaaacgttttctcttcttcgtcttcaatcttcttctgcagtttcagatgacctcgttttgcattccgcggcttcccttttatccgcttgcgttgatgttcgtgcatttttagcaggggtgcaagttcacgctcactgtatttcgtcgggtgtcgaatatcactctgtgttagtcccaaagctggttaccttttactctgctttcaatctccacaatgaagctcaatcgattattgagaactctgacattttgcatcccttaccttggaatgtgctcattgcttcgtatgccaagaacgagctttttgaggaggttattgctgcttacaagagaatggtgagcaagggaatccgacccgatgccttcacttatccgtctgttcttaaggcttgtggtgaaacacttgacgttgcctttggaagggtggttcatggttccatcgagtgataaactgttatgcttcggaaggcatgtggagtgaagcgtttgagcttttcgataaaatgtggttttcaggtgttgaggtcagtgtcataacttggaatattatttctggaggttgtttgcaaacaggaaattatgtaggagctttgggtttgatctctaggatgagaaattttcctacgagcttagatcctgtggctatgattattggtttgaaggcttgctctctcataggagcaatacgattgggaaaagagattcacggtcttgctattcacagttcttatgatgggattgacaatgttcgaaacacgttgatcacaatgtactcaaaatgcaaagaccttaggcacgccttaatagtgtttcgacagactgaagaaaatagtttgtgtacttggaactctatcatttccggttatgcgcagctgaacaaatcagaagaagcctctcacctgctgagggagatgttggttgctggctttcagccaaattccattacactagcaagcattctccctctttgtgctcggattgcaaacctgcaacatggaaaagagtttcattgctacatcctgaggcgcaagtgcttcaaggactatacaatgctgtggaactcccttgttgatgtttatgcaaaatcgggaaagattgtagctgcaaagcaagtatctgatttgatgagcaaaagagacgaagtaacatacacttccttgatagatggatacggaaatcaaggtgaagggggagtagccttggccctgttcaaggagatgaccagatctggtattaaacctgaccatgtaaccgtggttgcagttctatcagcctgcagtcattccaagttagtccatgaaggtgaaaggctgtttatgaagatgcagtgtgagtatggtatacgtccttgtcttcaacatttttcttgtatggttgatctctatggcagagcaggtttcctagcaaaagccaaagacataattcacaatatgccatataagccatccggtgccacgtgggctaccctactgaacgcgtgtcacatccatgggaacacacagattggtaaatgggcagcagaaaagctcctggagatgaagccagagaacccgggatactacgtgttaattgcaaatatgtatgcagctgctggttcttggagcaagcttgctgaagtgaggactataatgagggacttgggtgtgaaaaaggatcctggctgtgcttggatcgacacagattctggattttcactgttttcggtgggggacacatcaagccctgaagcatgtaatacttatcctctattagatggactgaatcagctgatgaaagacaatgctggttatgccatcaataaggtgcaaagttcagatgaagaacttcttcaagaaatgggatgaaggtgaagagctgaggatgatcaactggagctttatttagttaatagcacatagtctatatacgcctgcatatcaccagactgagaacaagttggatacacatgacaagttctagtatatacattaactaaaattggacaatggtggggattgctgcggaagtatttttcctatataacacaaagaaaacttatattgtgagctgattcacttcatcgagcaagagctttgtaatgccatcagaattggtcggccagttgaggaaatttctgcagcagccaggtttgattgcaggctcaacgcagtctcttccatatctgcaaacaaaacagagaagaaatgtttatcccagcaagacaaaaattggcatctctgtcagtctacacgatctgtcgagaaaagtgtgcttacacgatctgtctcttcccatcaatcacctctaaccgctgaagagtcttctgttgagatatcatctatcacgaattggagatccgtacttgttgattcaatgaattttccgaagaaatcaagaattgcctgtcatggctttatcaaaattaggctctgagacacaacaaagtctgaaaagaagagactttggtttattagaataataatcgtttcacctttcggccaacaaagggagatgagaagacgagatcctcgtagacgcagtcctgagcgatgaggtctgtgacagaggataaatcatggacgttaacggcggcgtagaagctggagacgacctccgacgctgatgtcggagctgtttctggaacaacgtcgttggctgtagcagcttttgcagctggaccataggatgcggacaatctcggaggctgtgaatgagtgaggcttgttggcttgacaagtttggttgggaggaagaaggaaggaggaagatggttgagcgagacgagtgagggagacgtcaaataagagacgagagaagcagtgaagctcatcgtcgtttcttgatatgatgtcttcgtttttgtggctcatttgtgtttgtgattaagagagcaaagagttgaattttgaatttcaattggaatttgtggacagaaattcttattagtagtccctatgattatcgatgcc

SEQ ID NO: 107719 - protein, 457 aa, Arabidopsis thaliana
  peptide (1)..(457): Ceres Seq. ID no. 13651373
MWSEAFELFDKMWFSGVEVSVITWNIISGGCLQTGNYVGALGLISRMRNFPTSLDPVAMIIGLKACSLIGAIRLGKEIHGLAIHSSYDGIDNVRNTLITMYSKCKDLRHALIVFRQTEENSLCTWNSIISGYAQLNKSEEASHLLREMLVAGFQPNSITLASILPLCARIANLQHGKEFHCYILRRKCFKDYTMLWNSLVDVYAKSGKIVAAKQVSDLMSKRDEVTYTSLIDGYGNQGEGGVALALFKEMTRSGIKPDHVTVVAVLSACSHSKLVHEGERLFMKMQCEYGIRPCLQHFSCMVDLYGRAGFLAKAKDIIHNMPYKPSGATWATLLNACHIHGNTQIGKWAAEKLLEMKPENPGYYVLIANMYAAAGSWSKLAEVRTIMRDLGVKKDPGCAWIDTDSGFSLFSVGDTSSPEACNTYPLLDGLNQLMKDNAGYAINKVQSSDEELLQEMG

SEQ ID NO: 107720 - protein, 446 aa, Arabidopsis thaliana
  peptide (1)..(446): Ceres Seq. ID no. 13651374
MWFSGVEVSVITWNIISGGCLQTGNYVGALGLISRMRNFPTSLDPVAMIIGLKACSLIGAIRLGKEIHGLAIHSSYDGIDNVRNTLITMYSKCKDLRHALIVFRQTEENSLCTWNSIISGYAQLNKSEEASHLLREMLVAGFQPNSITLASILPLCARIANLQHGKEFHCYILRRKCFKDYTMLWNSLVDVYAKSGKIVAAKQVSDLMSKRDEVTYTSLIDGYGNQGEGGVALALFKEMTRSGIKPDHVTVVAVLSACSHSKLVHEGERLFMKMQCEYGIRPCLQHFSCMVDLYGRAGFLAKAKDIIHNMPYKPSGATWATLLNACHIHGNTQIGKWAAEKLLEMKPENPGYYVLIANMYAAAGSWSKLAEVRTIMRDLGVKKDPGCAWIDTDSGFSLFSVGDTSSPEACNTYPLLDGLNQLMKDNAGYAINKVQSSDEELLQEMG

SEQ ID NO: 107721 - protein, 411 aa, Arabidopsis thaliana
  peptide (1)..(411): Ceres Seq. ID no. 13651375
MRNFPTSLDPVAMIIGLKACSLIGAIRLGKEIHGLAIHSSYDGIDNVRNTLITMYSKCKDLRHALIVFRQTEENSLCTWNSIISGYAQLNKSEEASHLLREMLVAGFQPNSITLASILPLCARIANLQHGKEFHCYILRRKCFKDYTMLWNSLVDVYAKSGKIVAAKQVSDLMSKRDEVTYTSLIDGYGNQGEGGVALALFKEMTRSGIKPDHVTVVAVLSACSHSKLVHEGERLFMKMQCEYGIRPCLQHFSCMVDLYGRAGFLAKAKDIIHNMPYKPSGATWATLLNACHIHGNTQIGKWAAEKLLEMKPENPGYYVLIANMYAAAGSWSKLAEVRTIMRDLGVKKDPGCAWIDTDSGFSLFSVGDTSSPEACNTYPLLDGLNQLMKDNAGYAINKVQSSDEELLQEMG

SEQ ID NO: 107722 - DNA, 786 bp, Arabidopsis thaliana
  misc_feature (1)..(786): Ceres Seq. ID no. 13651376
  misc_feature (1)..(786): Ortholog of  Ceres SEQ ID NO 14310243 as cited in SEQ ID NO 20666
atatacacgacttccacgatctgttcgtctatctgatcattcgttttctaacaccagagagagattctttaagcacaaaagagagaaaaaagatctaatgttttctccacatgatggaacactctgttctaaaaagagggatcatatgaaagtttttggagaatcgtttcatggttctttcaaaaggagcaaacaaggagatcaaaaacaaaccaaatttgagaagaacactactactctgttctttcaaagatcaaagtcagatagcgccatgttgataaagcctgatgttcagcttcacctagaggctaagacccaatcagagacatttgaagatcataggacagacctggaccttaatttgaacctttattcgtcatcaagttcctctgtcaaaaaaacaatcatggagaaagatgaatgttccaaaggcggaactgtgatcatcagcccaagtaagaaggtgagatcaggtgatatagggctaagtcgatccccgtcttggctagcgtttgaaggtgatgatgatgataatcagaagaagcaagagatgataacaacagtgtgcatgaagtgtcacatgctggttatgctctgcaaatctactcttgtctgtcctaactgcaaattcatgcaccatgatgatcatagctccactaaacagtttcagactttaaatttgtttaagctcttatgctagacttttcagtgtatgttaatgagcccaagaatgtgaaactagatatgtatgagttatgtatatatacaagtactgattgttttatt

SEQ ID NO: 107723 - protein, 232 aa, Arabidopsis thaliana
  peptide (1)..(232): Ceres Seq. ID no. 13651377
YTRLPRSVRLSDHSFSNTRERFFKHKREKKDLMFSPHDGTLCSKKRDHMKVFGESFHGSFKRSKQGDQKQTKFEKNTTTLFFQRSKSDSAMLIKPDVQLHLEAKTQSETFEDHRTDLDLNLNLYSSSSSSVKKTIMEKDECSKGGTVIISPSKKVRSGDIGLSRSPSWLAFEGDDDDNQKKQEMITTVCMKCHMLVMLCKSTLVCPNCKFMHHDDHSSTKQFQTLNLFKLLC

SEQ ID NO: 107724 - protein, 200 aa, Arabidopsis thaliana; identical to SEQ ID NO: 97919
  peptide (1)..(200): Ceres Seq. ID no. 13651378

SEQ ID NO: 107725 - protein, 184 aa, Arabidopsis thaliana; identical to SEQ ID NO: 97920
  peptide (1)..(184): Ceres Seq. ID no. 13651379

SEQ ID NO: 107726 - DNA, 1641 bp, Arabidopsis thaliana
  misc_feature (1)..(1641): Ceres Seq. ID no. 13651387
  misc_feature (1)..(1641): Ortholog of  Ceres SEQ ID NO 15169045 as cited in SEQ ID NO 58372
  misc_feature (1)..(1641): Ortholog of  Ceres SEQ ID NO 13597361 as cited in SEQ ID NO 63638
gaggttccatttctacttctctccaaaattcgaaacttttcccactctctctctctctctactagtttgacatgaacagcgacggtgtttggcttgacggctccggtgaatctccggaagttaataacggtgaagctgcgtcttgggtcagaaacccagatgaagactggttcaataacccaccaccaccacaacacactaatcaaaacgacttcagattcaatggtggctttcctttaaacccctcagagaatctgcttcttcttcttcagcaatcgattgattcttcttcttcttcttctccgttattacatcctttcacactcgacgctgcttcacagcaacaacaacaacaacaacaacaacaggaacagtctttcttagctacgaaagcttgtatagtttctcttctcaacgtcccaaccatcaataacaacactttcgatgacttcggctttgactctggtttcttaggacaacaattccatggaaatcatcaatctccgaactcgatgaatttcactggcttaaaccactcagtaccggattttcttccagctccggaaaacagctcaggatcatgtggattgagtcctctgttctcaaacagagcaaaggttttaaaaccgttacaggtaatggcttcatctggctcgcagccaactctgtttcagaaacgagctgcaatgcgtcagagctcgagtagcaaaatgtgcaattctgagagttcttctgaaatgaggaaatcgagctacgagagagagattgacgatactagtaccggaatcatcgatatctctggattgaattacgaatctgatgaccataatactaataacaacaaaggtaagaagaaaggaatgcctgcaaagaatcttatggctgagagaagaagaaggaagaagcttaatgataggctttacatgcttagatcagttgttcccaagatcagcaaaatggatagagcatcaatacttggagatgctattgattacctcaaagagcttttacaaagaatcaacgatcttcacaccgaacttgaatctactccaccgagttcttcaagcttgcatccgttaacaccgactccacaaacgctgtcttaccgtgttaaggaagagttgtgtccatcttcctccttgccaagtcctaaaggccaacaaccaagagttgaggttagattaagagaaggaaaggcagtgaacatacacatgttctgtggacgtagaccaggtcttttactttccaccatgagagctttggataacttaggattggatgttcaacaagcggtgattagctgtttcaatggttttgctttggatgttttccgcgctgagcaatgtcaagaagaccatgacgtgttacctgaacaaatcaaagcagtgcttttagatacagcaggttacgctggtttggtttgattgcgaagcagaaggaagcatctgtgtggaacagagctagatctaagtccttgttctgttttagtcagcaattttcttacttagtttcatcaatttcaatcatgtatggaagatgataactgttttattttagctatgagaacatgtgtttggggaacaatagttgcaacctttgagcaaaatgccattgtttctcaataattctactttgctttcc

SEQ ID NO: 107727 - protein, 450 aa, Arabidopsis thaliana
  peptide (1)..(450): Ceres Seq. ID no. 13651388
MNSDGVWLDGSGESPEVNNGEAASWVRNPDEDWFNNPPPPQHTNQNDFRFNGGFPLNPSENLLLLLQQSIDSSSSSSPLLHPFTLDAASQQQQQQQQQQEQSFLATKACIVSLLNVPTINNNTFDDFGFDSGFLGQQFHGNHQSPNSMNFTGLNHSVPDFLPAPENSSGSCGLSPLFSNRAKVLKPLQVMASSGSQPTLFQKRAAMRQSSSSKMCNSESSSEMRKSSYEREIDDTSTGIIDISGLNYESDDHNTNNNKGKKKGMPAKNLMAERRRRKKLNDRLYMLRSVVPKISKMDRASILGDAIDYLKELLQRINDLHTELESTPPSSSSLHPLTPTPQTLSYRVKEELCPSSSLPSPKGQQPRVEVRLREGKAVNIHMFCGRRPGLLLSTMRALDNLGLDVQQAVISCFNGFALDVFRAEQCQEDHDVLPEQIKAVLLDTAGYAGLV

SEQ ID NO: 107728 - protein, 303 aa, Arabidopsis thaliana
  peptide (1)..(303): Ceres Seq. ID no. 13651389
MNFTGLNHSVPDFLPAPENSSGSCGLSPLFSNRAKVLKPLQVMASSGSQPTLFQKRAAMRQSSSSKMCNSESSSEMRKSSYEREIDDTSTGIIDISGLNYESDDHNTNNNKGKKKGMPAKNLMAERRRRKKLNDRLYMLRSVVPKISKMDRASILGDAIDYLKELLQRINDLHTELESTPPSSSSLHPLTPTPQTLSYRVKEELCPSSSLPSPKGQQPRVEVRLREGKAVNIHMFCGRRPGLLLSTMRALDNLGLDVQQAVISCFNGFALDVFRAEQCQEDHDVLPEQIKAVLLDTAGYAGLV

SEQ ID NO: 107729 - protein, 261 aa, Arabidopsis thaliana
  peptide (1)..(261): Ceres Seq. ID no. 13651390
MASSGSQPTLFQKRAAMRQSSSSKMCNSESSSEMRKSSYEREIDDTSTGIIDISGLNYESDDHNTNNNKGKKKGMPAKNLMAERRRRKKLNDRLYMLRSVVPKISKMDRASILGDAIDYLKELLQRINDLHTELESTPPSSSSLHPLTPTPQTLSYRVKEELCPSSSLPSPKGQQPRVEVRLREGKAVNIHMFCGRRPGLLLSTMRALDNLGLDVQQAVISCFNGFALDVFRAEQCQEDHDVLPEQIKAVLLDTAGYAGLV

SEQ ID NO: 107730 - DNA, 2332 bp, Arabidopsis thaliana
  misc_feature (1)..(2332): Ceres Seq. ID no. 13651395
  misc_feature (1)..(2332): Ortholog of  Ceres SEQ ID NO 13654989 as cited in SEQ ID NO 63117
  misc_feature (1)..(2332): Ortholog of  Ceres SEQ ID NO 13584744 as cited in SEQ ID NO 69137
gtggccaaaccatttctcttattcatgtcctctgcagatctcattcttcttcagatcttgaagaaggaacgccacaacagaaacagcaaatggagaagatagctaaagatctctttgtatccttccactgctattgttcccgtaaagagataaattgtcgagacattttgctggaagacgcagacaaagttcgagccattaccgaatatgtttcatcttctgcaattgagaacttagtcgttggatctgcatcacgtaatggcttcatgagaagattcaagacggatttgccaacaacagtgtcaaaatcagctccagatttctgcaatgtttatgtcatttcaaaaggcaaaattgcttcagtacgaaatgcatcacgtcctgctccttaccaaaattcgatgcagcaatgtgaaattgacaatcatcacccacatactcctgacaaagcaccaaagtaccatgaccatcccaattctgcaggtagtacaccatctagaccgcgcaaatcagttgaagcagatagatcgccgttggtgaaaaggaagccatatggggacttctatgattcagatagtgacctttcgtttatcagtccgtcttctcatcgtgactctgacatttccttcatcagctcaggaagaccaagcgttgagcggtcttcctttagccttgattttcctgaatctgcaaggacttcaagaatgtcaacgagctcagagcaaagcattggctcaaatcgtttgggaattaagttcagtgatcctgatttccttaacgaatcctctacattctctgaagagagtggtagaacatcctcctattcatctcagagcttggatgatgttgaagctgaaatgaagaggctgcgtctagagctgaaacaaaccatggatatgtatagcacagcttgtaaagaagctttaagcgctagacaacaggcaacggagctgcaaaagctgagaaccgaagaggagagacggttggaagaagcaaaaagttcagaggaagcagcaatgtcaatagtggaaaaggagagagctaaagccaaagcagcgttggaagctgctaaagctgcaaagagattagcagaagtggaatctaaaagaaggttgactgcagagatgaagacaatgaaggaatcagattcattctctcgcggatttgttcggtataggaaatacacggttgacgaaatcgaagaagctacttcaaattttgcagagtctcaaaaggtaggagaaggaggttatggtcctgtctttagaggctttcttgatcacacaagtgttgctgttaaagttctacgcccagacgcagctcaagggagatcacagtttcagaaagaggttgaagtgttaagctgcataaggcatccaaacatggtgcttcttcttggagcttgtccagaatttgggattcttgtttatgaatacatggccaaaggaagtttagaagaccggcttttcatgcgaggaaacacaccgccgattacctggcagctacgtttcagaatcgctgctgagatcgccacgggactcctcttcctccaccagaccaaacctgaaccaattgtccacagagaccttaaaccaggaaatgttctgctcgattacaactatgtgagcaagatcagtgatgtcgggctagcgagattagtccctgcagtagcggaaaacgttacacagtacagagtcacttcagctgcaggaactttctgttacattgatcctgagtaccaacaaacaggaatgttgggtgtgaagtcagatgtttattctcttggaatcatgcttttgcagatcttaaccgcaaaacagccaatgggtttggcttattacgttgaacaagcgatcgaagaagggactcttaaggatatgcttgatccagcagtaccggactggcctatagaagaagctctatctttagcaaagctttcgcttcaatgcgcggaactaagaagaaaagatagacctgacctcgggaaagagatattgcctgagctcaatcgattaagagagataggtgaagagagtttagagagtgtgttttatgcaggaaatcaaggaaagtctccaaacactagccaagtctcgattccggaatctccagctgcagaatctcaatcctagttttgatatgagggaagcaaatgtgctctaacactcaatttgcaggagttataaacaaaagcagagcaagtttctttgctgattagtgtatagcattagaggaatttggtattctgttaaataatcagttatgtaaccgcctttttgttaggcccataacggttttgaacaatcaatactgtatttattaaagaatcgac

SEQ ID NO: 107731 - protein, 709 aa, Arabidopsis thaliana
  peptide (1)..(709): Ceres Seq. ID no. 13651396
GQTISLIHVLCRSHSSSDLEEGTPQQKQQMEKIAKDLFVSFHCYCSRKEINCRDILLEDADKVRAITEYVSSSAIENLVVGSASRNGFMRRFKTDLPTTVSKSAPDFCNVYVISKGKIASVRNASRPAPYQNSMQQCEIDNHHPHTPDKAPKYHDHPNSAGSTPSRPRKSVEADRSPLVKRKPYGDFYDSDSDLSFISPSSHRDSDISFISSGRPSVERSSFSLDFPESARTSRMSTSSEQSIGSNRLGIKFSDPDFLNESSTFSEESGRTSSYSSQSLDDVEAEMKRLRLELKQTMDMYSTACKEALSARQQATELQKLRTEEERRLEEAKSSEEAAMSIVEKERAKAKAALEAAKAAKRLAEVESKRRLTAEMKTMKESDSFSRGFVRYRKYTVDEIEEATSNFAESQKVGEGGYGPVFRGFLDHTSVAVKVLRPDAAQGRSQFQKEVEVLSCIRHPNMVLLLGACPEFGILVYEYMAKGSLEDRLFMRGNTPPITWQLRFRIAAEIATGLLFLHQTKPEPIVHRDLKPGNVLLDYNYVSKISDVGLARLVPAVAENVTQYRVTSAAGTFCYIDPEYQQTGMLGVKSDVYSLGIMLLQILTAKQPMGLAYYVEQAIEEGTLKDMLDPAVPDWPIEEALSLAKLSLQCAELRRKDRPDLGKEILPELNRLREIGEESLESVFYAGNQGKSPNTSQVSIPESPAAESQS

SEQ ID NO: 107732 - protein, 680 aa, Arabidopsis thaliana
  peptide (1)..(680): Ceres Seq. ID no. 13651397
MEKIAKDLFVSFHCYCSRKEINCRDILLEDADKVRAITEYVSSSAIENLVVGSASRNGFMRRFKTDLPTTVSKSAPDFCNVYVISKGKIASVRNASRPAPYQNSMQQCEIDNHHPHTPDKAPKYHDHPNSAGSTPSRPRKSVEADRSPLVKRKPYGDFYDSDSDLSFISPSSHRDSDISFISSGRPSVERSSFSLDFPESARTSRMSTSSEQSIGSNRLGIKFSDPDFLNESSTFSEESGRTSSYSSQSLDDVEAEMKRLRLELKQTMDMYSTACKEALSARQQATELQKLRTEEERRLEEAKSSEEAAMSIVEKERAKAKAALEAAKAAKRLAEVESKRRLTAEMKTMKESDSFSRGFVRYRKYTVDEIEEATSNFAESQKVGEGGYGPVFRGFLDHTSVAVKVLRPDAAQGRSQFQKEVEVLSCIRHPNMVLLLGACPEFGILVYEYMAKGSLEDRLFMRGNTPPITWQLRFRIAAEIATGLLFLHQTKPEPIVHRDLKPGNVLLDYNYVSKISDVGLARLVPAVAENVTQYRVTSAAGTFCYIDPEYQQTGMLGVKSDVYSLGIMLLQILTAKQPMGLAYYVEQAIEEGTLKDMLDPAVPDWPIEEALSLAKLSLQCAELRRKDRPDLGKEILPELNRLREIGEESLESVFYAGNQGKSPNTSQVSIPESPAAESQS

SEQ ID NO: 107733 - protein, 621 aa, Arabidopsis thaliana
  peptide (1)..(621): Ceres Seq. ID no. 13651398
MRRFKTDLPTTVSKSAPDFCNVYVISKGKIASVRNASRPAPYQNSMQQCEIDNHHPHTPDKAPKYHDHPNSAGSTPSRPRKSVEADRSPLVKRKPYGDFYDSDSDLSFISPSSHRDSDISFISSGRPSVERSSFSLDFPESARTSRMSTSSEQSIGSNRLGIKFSDPDFLNESSTFSEESGRTSSYSSQSLDDVEAEMKRLRLELKQTMDMYSTACKEALSARQQATELQKLRTEEERRLEEAKSSEEAAMSIVEKERAKAKAALEAAKAAKRLAEVESKRRLTAEMKTMKESDSFSRGFVRYRKYTVDEIEEATSNFAESQKVGEGGYGPVFRGFLDHTSVAVKVLRPDAAQGRSQFQKEVEVLSCIRHPNMVLLLGACPEFGILVYEYMAKGSLEDRLFMRGNTPPITWQLRFRIAAEIATGLLFLHQTKPEPIVHRDLKPGNVLLDYNYVSKISDVGLARLVPAVAENVTQYRVTSAAGTFCYIDPEYQQTGMLGVKSDVYSLGIMLLQILTAKQPMGLAYYVEQAIEEGTLKDMLDPAVPDWPIEEALSLAKLSLQCAELRRKDRPDLGKEILPELNRLREIGEESLESVFYAGNQGKSPNTSQVSIPESPAAESQS

SEQ ID NO: 107734 - DNA, 2046 bp, Arabidopsis thaliana
  misc_feature (1)..(2046): Ceres Seq. ID no. 13651427
  misc_feature (1)..(2046): Ortholog of  Ceres SEQ ID NO 15172539 as cited in SEQ ID NO 57333
  misc_feature (1)..(2046): Ortholog of  Ceres SEQ ID NO 14315951 as cited in SEQ ID NO 57634
  misc_feature (1)..(2046): Ortholog of  Ceres SEQ ID NO 13597324 as cited in SEQ ID NO 64842
  misc_feature (1)..(2046): Ortholog of  Ceres SEQ ID NO 13658672 as cited in SEQ ID NO 66627
caaaagggttctcgactcatcgctgttccagacagcgatgactcgagaaccgatcagaattttctctcaggtgatcggaatcgttactggaattttagttcatatatagacgatcaatcaaacctctttagttttccttaggaaagaaataaatgagcagccgttcgagtagaacgatttacgtcgggaaccttcccggcgatatccgtgaaagagaagttgaagacttgttcagtaagtatggacctgttgttcaaatcgatttgaagattccgccgaggcctccaggctatgcattcgtcgagtttgaggatgctcgtgatgctgatgatgcaatttatggccgtgatggttatgactttgatgggcatcatttacgggtggaactagctcatggtgggaggcgttcatcacatgatgcacgcggtagttatagtggtcgtggtcgtggcggtcgtggtggtggtgacggtggtggtcgtgaacgtggaccatctaggagatcagagtaccgcgttgtagtgtcaggtttgccttcatctgcgtcctggcaagacctcaaggatcacatgcgtaaaggaggagaagtttgtttttctcaagtgtttcgtgatggtagaggtacaactggaattgtagattataccagctacgaggacatgaaatatgcgataaaaaaagctcgatgacacagagtttcggaatgcgttttctcatgaatatgttcgggttagagaatatgattcaaggagggattcgaggagccccagccgtggaagatcctattctaagagccgcagccgtggacggagtcccagccgtagtcgtagccgcagcagaagcaggagcaagagcagaagtccaaaggctaaatctttgcgtagatcgcctgcaaaatctacatcgagatctcctcgctctcgctcccgctctaagtcgaggtcactgtctccacgagggtatgcttcatttcttctataatgtttatgctaaaatatccaacataaaacataacataggctctatttagctcttcccttgaagtttggtgacatcacattaaaagatgtcactgggatgactccgagttgttgattgagaatgatgattgcttctagttaagggtacacgatttatttcctttgaaagtctggtcttttataattatagtgttgagaatggttttgtttcttagatatggatatacatacaatcaactaaaatatgggaaatagtatctggatcatggatgtcttggttggttgtacacaactgtttcgtctctcaggtatatgctctttcttagatgggcaagttcgttttctgataatatccattgctgctagatgggtaacagtggggagacattggatcgcattgatatagtgtcatcaaaatggacccatcgagctaggacagatattttcattacctgctaatcgacaagcgatctggattctcatggaaccgatgctgttctggacacagggtttgatagaattagatttgctttgatattctccatctctaccatctgttttaacgaaaagcaggcttgtgttggtttgattttctgctagaaatagtctgaagatatgtttttttcttttttgcttcttgtgattgtgttttgatgtctgacatggaatgaggcatcaagggtcttggtgaaacagctattaaacacggaaatattggatttttaaaactggatttgtttctcggacttttgcagatctcgttcaaggttcagaaggaagcaagtaagagccctagcaagcagctgagccctatccgtggtaggagcaagagcagaagcaggagtccatctcggtaaagaaacatctcatatcaggtaaaaagctgggtctgttggaagattctcataaagatgatctctcttatgtatgagaagttgaaaaactagttgtgtatttcattcttattagcttgggtttgcacatgggaatgatatatactcagtcatcatcagtttatgagctaagctcagctgatttatatgacttgctaatatagttagtgctt

SEQ ID NO: 107735 - protein, 178 aa, Arabidopsis thaliana; identical to SEQ ID NO: 82681
  peptide (1)..(178): Ceres Seq. ID no. 13651428

SEQ ID NO: 107736 - protein, 114 aa, Arabidopsis thaliana
  peptide (1)..(114): Ceres Seq. ID no. 13651429
MTQSFGMRFLMNMFGLENMIQGGIRGAPAVEDPILRAAAVDGVPAVVVAAAEAGARAEVQRLNLCVDRLQNLHRDLLALAPALSRGHCLHEGMLHFFYNVYAKISNIKHNIGSI

SEQ ID NO: 107737 - protein, 108 aa, Arabidopsis thaliana
  peptide (1)..(108): Ceres Seq. ID no. 13651430
MRFLMNMFGLENMIQGGIRGAPAVEDPILRAAAVDGVPAVVVAAAEAGARAEVQRLNLCVDRLQNLHRDLLALAPALSRGHCLHEGMLHFFYNVYAKISNIKHNIGSI

SEQ ID NO: 107738 - DNA, 1690 bp, Arabidopsis thaliana
  misc_feature (1)..(1690): Ceres Seq. ID no. 13651467
  misc_feature (1)..(1690): Ortholog of  Ceres SEQ ID NO 13502874 as cited in SEQ ID NO 66298
  misc_feature (1)..(1690): Ortholog of  Ceres SEQ ID NO 12614124 as cited in SEQ ID NO 68392
catcgctgtctggaacagcgatgactcgagaacaaaacaaaaagaatgattaatcaattaacaaagaacgagttaatcggattatttacatcgattgccgtcctcatatacgttacatgtctcttctacaccaaacgatgtcgtacgagactacctccgggaccaaatccatggccggtgattggaaacattttccagctcgctggtttaccgccacacgactcattgactaaactttcacggcgtcacgggccaatcatgactttacggatcgggtcgatgctgacggttgtgatctcttcgagtgaagtggctcgggagatcttcaagaagcatgacgcagctttggctggccgggagatttacgaggcgatgaaaggagggaagagtagtgacggctcgctcatcacggctcagtatggtgcgtattggcggatgctgcggaggctttgcaccactcagttctttgtcacgcgccgtcttgatgctatgagtgatgtacgctctaggtgtgttgatcagatgcttcggtttgtcgaggaaggtggccaaaacggtacaaaaacaatcgatgtggggagatatttcttcttgatggcatttaatctcataggaaacctcatgttctcgagagatttgcttgatcctgattcaaaaagaggatccgaattcttttaccacaccgggaaagtgatggagttcgccggaaaaccaaacgttgccgatttcttcccgttgctaaggtttcttgaccctcaaggaatcaggagaaaaacgcaattccacgtggaaaaagcgtttgagatcgccggagagttcatcagagaacgaacggaggttagggagagagaaaagagcgacgagaagacgaaagattacttagatgttcttttggagtttcgtggtggcgatggagtcgacgaagaaccttctagcttctcatcaagagatatcaacgttattgttttcgaaatgtttacggctggaacggatacgacaacgagcacgttggagtgggcactagcggagcttctacacaacccaagaacactgaccaaactccaaaccgaactccggacctacttcaagtcctcgaaccaaaagctccaagaagaagacctaccaaaccttccctatctctcagctgttatcatggaaaccttaaggctacacccacctctgcctttcctcgtcccacacaaagccatgtcaacttgtcacatcttcgatcaatacactatccccaaggaaacacaagtcttggtcaatgtatgggccatcggacgcgatcctaaaacatgggtcgacccgataatgttcaaacccgagagatttatatccgaccctgacgcccgagacttcaagggacaagattacgagttcttgccgttcgggtcgggtcgaaggatgtgtccagctttgcctttggcatcacgggttttgccgttggccattgggtcaatggtgagatcgtttgattgggctttagaaaatgggcttaatgcagaagaaatggatatgggagaaaggattggtataacattgaaaaaagctgttcctttggaagccattccaattccttatcgagggacttaatttcttttcttcttttctctttgttttctttacatgcatgtgtacagtgtacttgaacacttcaaatcatcaaagcaatccgatatttgtaccc

SEQ ID NO: 107739 - protein, 516 aa, Arabidopsis thaliana
  peptide (1)..(516): Ceres Seq. ID no. 13651468
MINQLTKNELIGLFTSIAVLIYVTCLFYTKRCRTRLPPGPNPWPVIGNIFQLAGLPPHDSLTKLSRRHGPIMTLRIGSMLTVVISSSEVAREIFKKHDAALAGREIYEAMKGGKSSDGSLITAQYGAYWRMLRRLCTTQFFVTRRLDAMSDVRSRCVDQMLRFVEEGGQNGTKTIDVGRYFFLMAFNLIGNLMFSRDLLDPDSKRGSEFFYHTGKVMEFAGKPNVADFFPLLRFLDPQGIRRKTQFHVEKAFEIAGEFIRERTEVREREKSDEKTKDYLDVLLEFRGGDGVDEEPSSFSSRDINVIVFEMFTAGTDTTTSTLEWALAELLHNPRTLTKLQTELRTYFKSSNQKLQEEDLPNLPYLSAVIMETLRLHPPLPFLVPHKAMSTCHIFDQYTIPKETQVLVNVWAIGRDPKTWVDPIMFKPERFISDPDARDFKGQDYEFLPFGSGRRMCPALPLASRVLPLAIGSMVRSFDWALENGLNAEEMDMGERIGITLKKAVPLEAIPIPYRGT

SEQ ID NO: 107740 - protein, 445 aa, Arabidopsis thaliana
  peptide (1)..(445): Ceres Seq. ID no. 13651469
MTLRIGSMLTVVISSSEVAREIFKKHDAALAGREIYEAMKGGKSSDGSLITAQYGAYWRMLRRLCTTQFFVTRRLDAMSDVRSRCVDQMLRFVEEGGQNGTKTIDVGRYFFLMAFNLIGNLMFSRDLLDPDSKRGSEFFYHTGKVMEFAGKPNVADFFPLLRFLDPQGIRRKTQFHVEKAFEIAGEFIRERTEVREREKSDEKTKDYLDVLLEFRGGDGVDEEPSSFSSRDINVIVFEMFTAGTDTTTSTLEWALAELLHNPRTLTKLQTELRTYFKSSNQKLQEEDLPNLPYLSAVIMETLRLHPPLPFLVPHKAMSTCHIFDQYTIPKETQVLVNVWAIGRDPKTWVDPIMFKPERFISDPDARDFKGQDYEFLPFGSGRRMCPALPLASRVLPLAIGSMVRSFDWALENGLNAEEMDMGERIGITLKKAVPLEAIPIPYRGT

SEQ ID NO: 107741 - protein, 438 aa, Arabidopsis thaliana
  peptide (1)..(438): Ceres Seq. ID no. 13651470
MLTVVISSSEVAREIFKKHDAALAGREIYEAMKGGKSSDGSLITAQYGAYWRMLRRLCTTQFFVTRRLDAMSDVRSRCVDQMLRFVEEGGQNGTKTIDVGRYFFLMAFNLIGNLMFSRDLLDPDSKRGSEFFYHTGKVMEFAGKPNVADFFPLLRFLDPQGIRRKTQFHVEKAFEIAGEFIRERTEVREREKSDEKTKDYLDVLLEFRGGDGVDEEPSSFSSRDINVIVFEMFTAGTDTTTSTLEWALAELLHNPRTLTKLQTELRTYFKSSNQKLQEEDLPNLPYLSAVIMETLRLHPPLPFLVPHKAMSTCHIFDQYTIPKETQVLVNVWAIGRDPKTWVDPIMFKPERFISDPDARDFKGQDYEFLPFGSGRRMCPALPLASRVLPLAIGSMVRSFDWALENGLNAEEMDMGERIGITLKKAVPLEAIPIPYRGT

SEQ ID NO: 107742 - DNA, 1792 bp, Arabidopsis thaliana
  misc_feature (1)..(1792): Ceres Seq. ID no. 13651479
  misc_feature (1)..(1792): Ortholog of  Ceres SEQ ID NO 12609146 as cited in SEQ ID NO 52118
  misc_feature (1)..(1792): Ortholog of  Ceres SEQ ID NO 13638136 as cited in SEQ ID NO 58644
  misc_feature (1)..(1792): Ortholog of  Ceres SEQ ID NO 13596868 as cited in SEQ ID NO 62806
  misc_feature (1)..(1792): Ortholog of  Ceres SEQ ID NO 12566239 as cited in SEQ ID NO 0
  misc_feature (1)..(1792): Ortholog of  Ceres SEQ ID NO 13599119 as cited in SEQ ID NO 0
ttttttgcaggtcatggtggatccagagcagctgagtatgtgaagcgtcaccttttcagcaatcttattactcatcctaagttcatctctgacaccaaatctgcaataggtttactttcaatttcttttcgtttggacttactattattgttgctctaaatcttgggatcatatatatttgctttgtgtttttggttcagctgatgcctatactcatacagactctgaacttctcaagtcagaaaatagtcatactagagatgctggttcaactgcttccacagctattctcgttggtgatcgtttacttgttgctaatgttggtgattccagagctgttatatgtcgtggcggaaatggtacttttattgacatttttgattaagtcatgactcttggtatctattgaaatcttctgaaatgaattcatgtgctcttgtagcatttgctgtttcaagagaccataaacctgaccaaagtgatgagcgtgaacggattgagaatgctggtggttttgtgatgtgggcaggtaacaagaaaccgtagagttatttcccgctttgtggcttattttccggtgtgcctaactcctagattgaacagggacttggagagttggaggagttcttgcagtttcccgcgcgtttggtgatcgattgcttaaacaatatgttgttgctgatccagaaattcaggtttgtatcttcatttgctttgtaaaccacacacaacatctacttgtgttcacttaaggtcatgtcttcaacttcaggaagagaagattgatgattctcttgagtttctgattcttgccagcgatggactatgggatgttttctccaatgaggtttgtaaaattaagttcttcttcgaaaaactactttcatgttccgataagtatcacatcaaactcaatgattgagatctctctgatggtctttcaggaagcagttgcagtagtaaaagaagttgaagatccggaagagtccaccaagaaacttgtgggagaagcaattaaaagaggaagtgcagacaatattacatgtgtagttgtacgtttcttggagagcaagtcagctaacaacaacggttccagctcatccgaggaagcaaatcaagtgccaaccgctgttagaaatgactcagaccacaagatctcagccaaagaaaccaatcaagaccataccacagtaaacaaggacttggaccgcaacactgacagtcaaagcctgaaccaaaagccgattgcagctagaagtgccgataactcgaaccaaaaaccaatcgcgactacagcaacaggacacagcgtttcttcagaacagagtggtttaaccggggaaaagagtcaaatgccaatcaaaattcgcagcgactcagagcctaagagttcagccaaggtacctaatcaaacgcaaagcacagtacacaacgacttggacagtagcactgcgaagaagccggccgcaacagaacagagcggatcaacgggtgaaaggaatcgaaaaccaatcaaagttcatagtgattccgccgcaagaaagacaactccctctatctttaactaaaacgtccactaccttcttttgataaatgaatgtatcatcttcatttaactttgaactatttagtgtccaaagattttgcctcgaaactgatttatctcgttcatgtaagtttcttctctttgtcacccttttttctgaggtctttaacttcaacaatgtaatttctttttgcagtgtaccaaattttgtaaacttgttgattctaaatagtttgagtacataac

SEQ ID NO: 107743 - protein, 249 aa, Arabidopsis thaliana
  peptide (1)..(249): Ceres Seq. ID no. 13651480
MDYGMFSPMRFVKLSSSSKNYFHVPISITSNSMIEISLMVFQEAVAVVKEVEDPEESTKKLVGEAIKRGSADNITCVVVRFLESKSANNNGSSSSEEANQVPTAVRNDSDHKISAKETNQDHTTVNKDLDRNTDSQSLNQKPIAARSADNSNQKPIATTATGHSVSSEQSGLTGEKSQMPIKIRSDSEPKSSAKVPNQTQSTVHNDLDSSTAKKPAATEQSGSTGERNRKPIKVHSDSAARKTTPSIFN

SEQ ID NO: 107744 - protein, 245 aa, Arabidopsis thaliana
  peptide (1)..(245): Ceres Seq. ID no. 13651481
MFSPMRFVKLSSSSKNYFHVPISITSNSMIEISLMVFQEAVAVVKEVEDPEESTKKLVGEAIKRGSADNITCVVVRFLESKSANNNGSSSSEEANQVPTAVRNDSDHKISAKETNQDHTTVNKDLDRNTDSQSLNQKPIAARSADNSNQKPIATTATGHSVSSEQSGLTGEKSQMPIKIRSDSEPKSSAKVPNQTQSTVHNDLDSSTAKKPAATEQSGSTGERNRKPIKVHSDSAARKTTPSIFN

SEQ ID NO: 107745 - protein, 241 aa, Arabidopsis thaliana
  peptide (1)..(241): Ceres Seq. ID no. 13651482
MRFVKLSSSSKNYFHVPISITSNSMIEISLMVFQEAVAVVKEVEDPEESTKKLVGEAIKRGSADNITCVVVRFLESKSANNNGSSSSEEANQVPTAVRNDSDHKISAKETNQDHTTVNKDLDRNTDSQSLNQKPIAARSADNSNQKPIATTATGHSVSSEQSGLTGEKSQMPIKIRSDSEPKSSAKVPNQTQSTVHNDLDSSTAKKPAATEQSGSTGERNRKPIKVHSDSAARKTTPSIFN

SEQ ID NO: 107746 - DNA, 1117 bp, Arabidopsis thaliana
  misc_feature (1)..(1117): Ceres Seq. ID no. 13651489
  misc_feature (1)..(1117): Ortholog of  Ceres SEQ ID NO 13597538 as cited in SEQ ID NO 64966
catcgctgtctggaacagcgatgactcggatgatgatgatgataaacccaatagaattttaaaaggataagaatcgcaaagctcatatcacaaaactttgagatctcatttcatctttcttcgattctacctactccgattcaatcgatcttatcgagacatggatgctcgtaagagaggacgccctgaagctgctgcctctcacaactccaatggcggattcaagaggtctaagcaagagatggaatcaatttcaactggtttaggaagcaaatccaagccatgcactaaatttttcagcacttctggatgtccatttggtgacaattgccacttcttgcactatgtgcccggtgggtacaatgctgcagcgcagatgacaaatctccgaccaccggtttctcaagtttccagaaatatgcaaggatctggtggtcccggcggcagattctcagggagaggagatccaggatcaggccctgtttcaatctttggtgcttctacttccaagatcagtgtagatgcttctttagccggtgccatcattggaaaaggtggaatccattccaaacagatatgccgtgaaacaggagcaaaattatcgattaaagatcatgaaagagacccaaacttgaagattatcgagctggaaggaacatttgaacagatcaatgtagcgagtgggatggtgagagagcttatagggaggcttggatcagtgaagaaacctcaagggattggtggtcctgaagggaaaccacatcctgggagcaactacaaaaccaagatctgtgataggtactctaaagggaactgtacatatggagatagatgccattttgctcatggtgaatctgagctgcgcaggtcaggaatcgcttagttatgtctttagactcttgagaacagattatgcattgttagctccattatcattgtgactttttgctctctctttttgttttatcaatttgttttatgcgactcgctttgaaaactttagcccattctgtattgagctctgaagattcgacgagttctgtaagttaccgatcacagttaaaagactttgatatgttaaaacccttatattacagctacatactatttttgtcct

SEQ ID NO: 107747 - protein, 240 aa, Arabidopsis thaliana; identical to SEQ ID NO: 105314
  peptide (1)..(240): Ceres Seq. ID no. 13651490

SEQ ID NO: 107748 - protein, 213 aa, Arabidopsis thaliana; identical to SEQ ID NO: 105315
  peptide (1)..(213): Ceres Seq. ID no. 13651491

SEQ ID NO: 107749 - protein, 168 aa, Arabidopsis thaliana; identical to SEQ ID NO: 105316
  peptide (1)..(168): Ceres Seq. ID no. 13651492

SEQ ID NO: 107750 - DNA, 1254 bp, Arabidopsis thaliana
  misc_feature (1)..(1254): Ceres Seq. ID no. 13651497
  misc_feature (1)..(1254): Ortholog of  Ceres SEQ ID NO 14312866 as cited in SEQ ID NO 55630
  misc_feature (1)..(1254): Ortholog of  Ceres SEQ ID NO 13597376 as cited in SEQ ID NO 64002
  misc_feature (1)..(1254): Ortholog of  Ceres SEQ ID NO 13503573 as cited in SEQ ID NO 65402
  misc_feature (1)..(1254): Ortholog of  Ceres SEQ ID NO 13659615 as cited in SEQ ID NO 67248
cagcgctgtctggaagagcgatgactcgagaaccgggggtttgttcgaaaaatgggttcttctgtggaacagaacattttggtgactggtggtgctggattcattggaacacatactgttgttcagcttttgaatcagggttttaaggttacgatcattgataatcttgataactctgtcgttgaagctgttcatagggttagggaacttgttggtcctgatctctctaccaagcttgaattcaatctgggtgatctaagaaacaaaggagatattgagaaactcttttccaatcagagatttgatgctgtgattcactttgctggtcttaaagctgtgggagaaagtgttggaaaccctcgtcgttactttgataataacttagttggaactatcaatctatatgagaccatggcaaaatacaactgcaaaatgatggtgttttcgtcgtctgcaacagtttatggtcaacctgaaatagtcccatgtgtggaagactttgagttacaggctatgaatccttatggtcgtactaagctgtttcttgaagagatagctagagacattcacgctgcggaaccagaatggaagataattcttctgaggtacttcaatccggttggagctcacgagagtggaagaattggagaagatccaaagggcataccgaataatctcatgccttatatccaacaagtggcggttggaagattacctgaactcaatgtatttggacatgattatcctaccatggatggtagcgcggttagagactacatccatgtaatggatttagcagatggccatgtggctgcgttaaacaaattgttttcagactcaaagattggctgtactgcttataatcttggcactggtcaaggaacttctgtcttagaaatggtttcttcttttgaaaaagcttctggcaagaaaatacctatcaagctatgtccaagaagagctggagatgcaacagctgtttatgcttcaactcagaaagctgagaaggaacttggctggaaggcaaaatatggagttgatgagatgtgcagagatcaatggaactgggcaaataagaatccatggggtttccagaagaagccttgattgattttgttttgtttcaccactcaatataaagaaaaaaaaagatatagatgtcgttttattttcctgcatctatttgatttctctcttcaaaaaaagttgtattgaactcgtcatctttcggttaataaagtataaagtttatct

SEQ ID NO: 107751 - protein, 351 aa, Arabidopsis thaliana; identical to SEQ ID NO: 102703
  peptide (1)..(351): Ceres Seq. ID no. 13651498

SEQ ID NO: 107752 - protein, 231 aa, Arabidopsis thaliana; identical to SEQ ID NO: 102704
  peptide (1)..(231): Ceres Seq. ID no. 13651499

SEQ ID NO: 107753 - protein, 224 aa, Arabidopsis thaliana; identical to SEQ ID NO: 102705
  peptide (1)..(224): Ceres Seq. ID no. 13651500

SEQ ID NO: 107754 - DNA, 1686 bp, Arabidopsis thaliana
  misc_feature (1)..(1686): Ceres Seq. ID no. 13651507
  misc_feature (1)..(1686): Ortholog of  Ceres SEQ ID NO 13502874 as cited in SEQ ID NO 66298
  misc_feature (1)..(1686): Ortholog of  Ceres SEQ ID NO 12614124 as cited in SEQ ID NO 68392
agtttctcgtttgctttcttccggtaaagtcgttgatcgattcattatcgttaattcttttttcttccgttggccatccttgaaattggaaacctaagaactcacggcttgtcgcttatggctgtgatctgcctccgagccctccatctcttccgattataggccatgttcaccttctcctctcttccctagctcataaatctttacagaaactctcatccaagtatggacctcttctctatctccgcgtcttcaacttccctgtagtcctcgtctcctcggcgtctgtggcctacgagatctttaaggctcatgacttgaacatctcatctcgtgacaacccttcaatcgatgattccctcttgattggatcttctgtctttggtagtgctccttatggagattactttaagttcatgaagaagctcctggttactaagctgcttggaccacaggcacttgagcggtcaagaggcatccgtgcagatgagcttgagcggtttcactcaagcctgcttgataaggcggtaaagaaggagatcgttgagattgggaaggaagcaacgaagcttagtaataacagcctctggaggatgagcattgggagaagtttttcagagaagaatggtgaggctgagagagtcaggggactggttactgagttagatggcttgacaaagaaggtcttgtttgcaactttgctgcacaggccccttgagaagcttggaatctctctgttcaaaaaggagatcatgtgtgtttctgacagcttcgatgaggtccttgagagggttcttgtggaacatgaacagaaactggacgatcatcaagatagggacatgatggacgtgttgttggcagcttatggagatgaaaacgcagggcataaaatcagcaggaaccacatcaaagcatttttcgtggagcttttctttgcgggtactgatacctcggcgcaatcaatacagtggacaatggcagagatcattaacaaccccaacattcttaaaagattgagagaagaaatcgattctgtggtagggaaaacaaggttgattcaagaaactgatctaccaaagctcccctatttgcaagctgtggttaaggaaggacttagattgcacccgccattgcctctctttgtaaggacgttccaagaagggtgtaagattggaggtttctatgtaccagaaaagacaacacttattggtaatgcttatgttatgatgagagatccgagtgtctgggaagaccctgaggagtttaaacctgagaggtttctatcttcttcaagatcaacgcaagaagaggaaagaagagagcaagcacttaagtacattcctttcggtagtggacggagaggctgtcctggatcaagtctgggttatatctttgttggcaccgcagttggaatgatggtgcaatgctttgactggagtatcaaaggagacaaggtccaaatggatgaggctggaggactaaacttgagtatggctcattccctgaagtgcactcctgttcctcgaaaccggcctttacttgctgatcagtagatgccaagtttgtaattttcagatgtcactgaactcgcaaacatagaaaagtgctgaattcagatgtttactactggtatgttttaattccgtttactgtatgaatataaataaaatagaaaattgtcccacc

SEQ ID NO: 107755 - protein, 378 aa, Arabidopsis thaliana
  peptide (1)..(378): Ceres Seq. ID no. 13651508
MKKLLVTKLLGPQALERSRGIRADELERFHSSLLDKAVKKEIVEIGKEATKLSNNSLWRMSIGRSFSEKNGEAERVRGLVTELDGLTKKVLFATLLHRPLEKLGISLFKKEIMCVSDSFDEVLERVLVEHEQKLDDHQDRDMMDVLLAAYGDENAGHKISRNHIKAFFVELFFAGTDTSAQSIQWTMAEIINNPNILKRLREEIDSVVGKTRLIQETDLPKLPYLQAVVKEGLRLHPPLPLFVRTFQEGCKIGGFYVPEKTTLIGNAYVMMRDPSVWEDPEEFKPERFLSSSRSTQEEERREQALKYIPFGSGRRGCPGSSLGYIFVGTAVGMMVQCFDWSIKGDKVQMDEAGGLNLSMAHSLKCTPVPRNRPLLADQ

SEQ ID NO: 107756 - protein, 319 aa, Arabidopsis thaliana
  peptide (1)..(319): Ceres Seq. ID no. 13651509
MSIGRSFSEKNGEAERVRGLVTELDGLTKKVLFATLLHRPLEKLGISLFKKEIMCVSDSFDEVLERVLVEHEQKLDDHQDRDMMDVLLAAYGDENAGHKISRNHIKAFFVELFFAGTDTSAQSIQWTMAEIINNPNILKRLREEIDSVVGKTRLIQETDLPKLPYLQAVVKEGLRLHPPLPLFVRTFQEGCKIGGFYVPEKTTLIGNAYVMMRDPSVWEDPEEFKPERFLSSSRSTQEEERREQALKYIPFGSGRRGCPGSSLGYIFVGTAVGMMVQCFDWSIKGDKVQMDEAGGLNLSMAHSLKCTPVPRNRPLLADQ

SEQ ID NO: 107757 - protein, 266 aa, Arabidopsis thaliana
  peptide (1)..(266): Ceres Seq. ID no. 13651510
MCVSDSFDEVLERVLVEHEQKLDDHQDRDMMDVLLAAYGDENAGHKISRNHIKAFFVELFFAGTDTSAQSIQWTMAEIINNPNILKRLREEIDSVVGKTRLIQETDLPKLPYLQAVVKEGLRLHPPLPLFVRTFQEGCKIGGFYVPEKTTLIGNAYVMMRDPSVWEDPEEFKPERFLSSSRSTQEEERREQALKYIPFGSGRRGCPGSSLGYIFVGTAVGMMVQCFDWSIKGDKVQMDEAGGLNLSMAHSLKCTPVPRNRPLLADQ

SEQ ID NO: 107758 - DNA, 2024 bp, Arabidopsis thaliana
  misc_feature (1)..(2024): Ceres Seq. ID no. 13651521
  misc_feature (1)..(2024): Ortholog of  Ceres SEQ ID NO 13654989 as cited in SEQ ID NO 63117
catcgctgtctggaacagcgatgactcgagaaccgtatctcatcttcgtcttcttcgtcttcactctaaccgttgctacacaaaccaccggttcggttaagtgcaaaacaagtttgctccgttacccgtttggtttctccgacggttatccgatccgattcaactgctctgagataaccggagaggccgtgatcggtgaattcgctgtgcaagaagtgacaaactccaacatctacgtcgaaatcccgccggtttgcaaacgcaacatccgtaaaatcgaacaacttttccgggaaaatcttgctccgtcgaaattacagaacataattctcgtccaaggatgcaagaaacagaacaagtcttctaattgcttaatccgcaataaattcgttgaaaaccggttaaatctcagcaaatgtaaatctccggttagctgtctcgacggagcaacaacgacaactgccgatgtgatgagtttaggcgacgttgtgaacggaagtggatgtaagtattggttctcttctatttctcaatcgcaagtttcggtcaatttgggtcgactcaagcttgattggtggcttaagggaagttgcagtaacaccacttgctcggagaacgcagactgtgccaaagttaagctcgacgacggtggactcggtcatcgctgcacttgtcgtgaaggatttagcggtaaagccttcaccgtgcctggtggttgccaccgattagtttacaaacgcaaaggactacacaaactcgttgttcttggtactgcggggattttggttggagttttagtaatcgtggtcttgatagctacatatttcttccggaacaagcaatctgcgtcatctgaaagagcatcaatcgcgaatcgcttgctttgcgagctagccgaaaactcaagtgttcctttctacacctacaaagagattgagaaagctaccgatagtttctccgacaagaacatgctcggaaccggagcatacggaacagtctacgcaggcgaattcccaaacagctcatgcgtcgctataaaacgtctcaaacacaaagacactacaagcattgaccaagttgtgaacgagatcaagcttctttcctctgtgagccacccaaatctagtacgtctcttaggttgttgctttgcagatggagaaccgtttctagtctatgagttcatgccaaacggaactctttatcagcatttacaacacgagagaggccaaccaccactttcttggcagctccgactcgccattgcgtgtcaaaccgcaaacgcaatcgcacatctccactcttcagtaaaccctcctatctaccaccgagacataaaatctagtaacatcctccttgaccacgaattcaactccaagatatctgatttcggactctctaggctcggcatgtctaccgatttcgaagcctctcatatctccacggctccacaaggcactccaggatacttagatcctcaatatcaccaagattttcagctctcggacaagagtgatgtctatagctttggagttgttctcgtagaaatcatctcaggctttaaagtcatagacttcactcgtccctactctgaagtgaacctagcctctcttgccgtcgacaggatcggaagagggcgtgtggtagatatcatcgatccctgcttaaacaaagaaatcaatccgaaaatgtttgcatctatccacaacttagcagaattggcgtttcgctgcttatcctttcacagaaacatgaggcctacgatggtagaaattacggaagatctccaccggattaagcttatgcactatggtacagagtcaggtaagttcaaaaaccgatccgaaatagatatgaagagacaacaatcatttccgagagaatgaaaagtaaacacttggcagaaattatgtatagtttagtattcaagtttttttattcgaattttaagctctatatacatagaggtaaaactctgtcttttggttttattggttccttgtgtatgaagtaaacagtcggcagag

SEQ ID NO: 107759 - protein, 626 aa, Arabidopsis thaliana
  peptide (1)..(626): Ceres Seq. ID no. 13651522
SLSGTAMTREPYLIFVFFVFTLTVATQTTGSVKCKTSLLRYPFGFSDGYPIRFNCSEITGEAVIGEFAVQEVTNSNIYVEIPPVCKRNIRKIEQLFRENLAPSKLQNIILVQGCKKQNKSSNCLIRNKFVENRLNLSKCKSPVSCLDGATTTTADVMSLGDVVNGSGCKYWFSSISQSQVSVNLGRLKLDWWLKGSCSNTTCSENADCAKVKLDDGGLGHRCTCREGFSGKAFTVPGGCHRLVYKRKGLHKLVVLGTAGILVGVLVIVVLIATYFFRNKQSASSERASIANRLLCELAENSSVPFYTYKEIEKATDSFSDKNMLGTGAYGTVYAGEFPNSSCVAIKRLKHKDTTSIDQVVNEIKLLSSVSHPNLVRLLGCCFADGEPFLVYEFMPNGTLYQHLQHERGQPPLSWQLRLAIACQTANAIAHLHSSVNPPIYHRDIKSSNILLDHEFNSKISDFGLSRLGMSTDFEASHISTAPQGTPGYLDPQYHQDFQLSDKSDVYSFGVVLVEIISGFKVIDFTRPYSEVNLASLAVDRIGRGRVVDIIDPCLNKEINPKMFASIHNLAELAFRCLSFHRNMRPTMVEITEDLHRIKLMHYGTESGKFKNRSEIDMKRQQSFPRE

SEQ ID NO: 107760 - protein, 620 aa, Arabidopsis thaliana
  peptide (1)..(620): Ceres Seq. ID no. 13651523
MTREPYLIFVFFVFTLTVATQTTGSVKCKTSLLRYPFGFSDGYPIRFNCSEITGEAVIGEFAVQEVTNSNIYVEIPPVCKRNIRKIEQLFRENLAPSKLQNIILVQGCKKQNKSSNCLIRNKFVENRLNLSKCKSPVSCLDGATTTTADVMSLGDVVNGSGCKYWFSSISQSQVSVNLGRLKLDWWLKGSCSNTTCSENADCAKVKLDDGGLGHRCTCREGFSGKAFTVPGGCHRLVYKRKGLHKLVVLGTAGILVGVLVIVVLIATYFFRNKQSASSERASIANRLLCELAENSSVPFYTYKEIEKATDSFSDKNMLGTGAYGTVYAGEFPNSSCVAIKRLKHKDTTSIDQVVNEIKLLSSVSHPNLVRLLGCCFADGEPFLVYEFMPNGTLYQHLQHERGQPPLSWQLRLAIACQTANAIAHLHSSVNPPIYHRDIKSSNILLDHEFNSKISDFGLSRLGMSTDFEASHISTAPQGTPGYLDPQYHQDFQLSDKSDVYSFGVVLVEIISGFKVIDFTRPYSEVNLASLAVDRIGRGRVVDIIDPCLNKEINPKMFASIHNLAELAFRCLSFHRNMRPTMVEITEDLHRIKLMHYGTESGKFKNRSEIDMKRQQSFPRE

SEQ ID NO: 107761 - protein, 470 aa, Arabidopsis thaliana
  peptide (1)..(470): Ceres Seq. ID no. 13651524
MSLGDVVNGSGCKYWFSSISQSQVSVNLGRLKLDWWLKGSCSNTTCSENADCAKVKLDDGGLGHRCTCREGFSGKAFTVPGGCHRLVYKRKGLHKLVVLGTAGILVGVLVIVVLIATYFFRNKQSASSERASIANRLLCELAENSSVPFYTYKEIEKATDSFSDKNMLGTGAYGTVYAGEFPNSSCVAIKRLKHKDTTSIDQVVNEIKLLSSVSHPNLVRLLGCCFADGEPFLVYEFMPNGTLYQHLQHERGQPPLSWQLRLAIACQTANAIAHLHSSVNPPIYHRDIKSSNILLDHEFNSKISDFGLSRLGMSTDFEASHISTAPQGTPGYLDPQYHQDFQLSDKSDVYSFGVVLVEIISGFKVIDFTRPYSEVNLASLAVDRIGRGRVVDIIDPCLNKEINPKMFASIHNLAELAFRCLSFHRNMRPTMVEITEDLHRIKLMHYGTESGKFKNRSEIDMKRQQSFPRE

SEQ ID NO: 107762 - DNA, 1814 bp, Arabidopsis thaliana
  misc_feature (1)..(1814): Ceres Seq. ID no. 13651541
  misc_feature (1)..(1814): Ortholog of  Ceres SEQ ID NO 13648124 as cited in SEQ ID NO 20362
agtctcttcttgagaatcaatggtctctcataattccaagaacaccaacatactgtcatcttcaagttgagatttatcacactctttccttcaagaagctgtactgtagactttggaagatttaggacttctcaagattttgaaaatggcgaatcaacatttcttcaagcctcttcttcctggcttccacacccacttgagaatacctgtagccttcttcttgaagaatatagaaggaagatatgagcagaagacggcggagctgagatcagatgcgtcaaagataacttgggaagtgaagatagatggacagagactcactgacggttggaaagagtttgctctctcacatgatcttcgaatcggtgacattgttgttttcagacaagagagagatatgtctttccacgttacaatgttgggacctagttgttgtgagatccaatatggttcgtgttcagacgaggagagaaacctcgagaagaagaagaatccaaatggagaagcaaagtcttcttcactagatccttcttgtttttcggctaatgtggcgccttcgagtctacgttatgacttaatgctttttccaatgggttttgtgagggaaaatggtgtagtcggatctggaaagattgttctgatgaatgaaaagggcagatcatggaattttaacttgagacaaaagccatcatgcggaacagtttatgttagaggagggtgggtgagtttttgtgatgccaatggacttcaagctggagatatctacactttcaaactgatcaaaagaggaggaactcttgttctacgtttgttacccaaaggggcagagtcttgttcactagatccctcttgttttgtggctaatgttgcgccttcgactctacgctatgacacactgtatcttccaaagcgttttatgagggaaaatggtgtagacaaaagacgtggagagatgattctgatgaatgaaaagggcaaatcatggactttagatttgaaactaaagaaatcatgcggaacttccctcatcagacgaggatggagaagtttctgtagtgccaatggactaagagctggaagtatcattactttcaaactgattaagaaaagtggaactcttgttctatgtttgctctccaacgagccagaaaaagaagtgtgctcagaagctaatgaagtagagtctctttcgacagatcaagaaagccatgaagagagtagccacaacgagaaaatctcaagaagaaaggaaaagaagggtagaatgatatggaaagcttcgtcttcaccatccgaaaaccgatttgtgacattaaatcttacaccttataacatcctacgttctgcactgcgtcttccgatacccttcacgaggatgaatggtatcaatgaagaaactaaaatgactctgttggataaacatggtatgaagtggttaacgactctgcggttggtggactacaaaagaaaaagactgggaatggtaggaggctggaaaggattcatccaagctaacggtgtgaaggcaaacgaatccatcatgttggaactgatttgggaagaagaaacaagttgcgtccttaagttctgctccaaggtgaagctagcaatcaaatgaaaatgtatatgagtgtaatattgaaatgaatcaatgtttgactcttttatttggtaagatataactcttaaggtctaattgtactattgtagtatgttttctaagtatgttgtaattgtatgatcattggccttacggtgtgggatttgtgaatgtttgtttagcaaagaaaaggagagttcaactttatcagttt

SEQ ID NO: 107763 - protein, 490 aa, Arabidopsis thaliana
  peptide (1)..(490): Ceres Seq. ID no. 13651542
MANQHFFKPLLPGFHTHLRIPVAFFLKNIEGRYEQKTAELRSDASKITWEVKIDGQRLTDGWKEFALSHDLRIGDIVVFRQERDMSFHVTMLGPSCCEIQYGSCSDEERNLEKKKNPNGEAKSSSLDPSCFSANVAPSSLRYDLMLFPMGFVRENGVVGSGKIVLMNEKGRSWNFNLRQKPSCGTVYVRGGWVSFCDANGLQAGDIYTFKLIKRGGTLVLRLLPKGAESCSLDPSCFVANVAPSTLRYDTLYLPKRFMRENGVDKRRGEMILMNEKGKSWTLDLKLKKSCGTSLIRRGWRSFCSANGLRAGSIITFKLIKKSGTLVLCLLSNEPEKEVCSEANEVESLSTDQESHEESSHNEKISRRKEKKGRMIWKASSSPSENRFVTLNLTPYNILRSALRLPIPFTRMNGINEETKMTLLDKHGMKWLTTLRLVDYKRKRLGMVGGWKGFIQANGVKANESIMLELIWEEETSCVLKFCSKVKLAIK

SEQ ID NO: 107764 - protein, 406 aa, Arabidopsis thaliana
  peptide (1)..(406): Ceres Seq. ID no. 13651543
MSFHVTMLGPSCCEIQYGSCSDEERNLEKKKNPNGEAKSSSLDPSCFSANVAPSSLRYDLMLFPMGFVRENGVVGSGKIVLMNEKGRSWNFNLRQKPSCGTVYVRGGWVSFCDANGLQAGDIYTFKLIKRGGTLVLRLLPKGAESCSLDPSCFVANVAPSTLRYDTLYLPKRFMRENGVDKRRGEMILMNEKGKSWTLDLKLKKSCGTSLIRRGWRSFCSANGLRAGSIITFKLIKKSGTLVLCLLSNEPEKEVCSEANEVESLSTDQESHEESSHNEKISRRKEKKGRMIWKASSSPSENRFVTLNLTPYNILRSALRLPIPFTRMNGINEETKMTLLDKHGMKWLTTLRLVDYKRKRLGMVGGWKGFIQANGVKANESIMLELIWEEETSCVLKFCSKVKLAIK

SEQ ID NO: 107765 - protein, 400 aa, Arabidopsis thaliana
  peptide (1)..(400): Ceres Seq. ID no. 13651544
MLGPSCCEIQYGSCSDEERNLEKKKNPNGEAKSSSLDPSCFSANVAPSSLRYDLMLFPMGFVRENGVVGSGKIVLMNEKGRSWNFNLRQKPSCGTVYVRGGWVSFCDANGLQAGDIYTFKLIKRGGTLVLRLLPKGAESCSLDPSCFVANVAPSTLRYDTLYLPKRFMRENGVDKRRGEMILMNEKGKSWTLDLKLKKSCGTSLIRRGWRSFCSANGLRAGSIITFKLIKKSGTLVLCLLSNEPEKEVCSEANEVESLSTDQESHEESSHNEKISRRKEKKGRMIWKASSSPSENRFVTLNLTPYNILRSALRLPIPFTRMNGINEETKMTLLDKHGMKWLTTLRLVDYKRKRLGMVGGWKGFIQANGVKANESIMLELIWEEETSCVLKFCSKVKLAIK

SEQ ID NO: 107766 - DNA, 1090 bp, Arabidopsis thaliana
  misc_feature (1)..(1090): Ceres Seq. ID no. 13651582
  misc_feature (1)..(1090): Ortholog of  Ceres SEQ ID NO 13658400 as cited in SEQ ID NO 66403
gctccaaagtctccagaattttccttctcattcccggaaaatttctacagttccttggatttgctcgatttcggaagagaacgaagaagatagtatggaaactccgaagatcgtagtaacgagtgaagattgggaatcgaagctaagtgatgtggaaattttgatagaagacatgaacagactcgtgatgaatcttcttgtggctgaaggatatagagaagctgctgagaaattcaaagaggagtctataactatgccagaggaagatcttgctagcatgaatgagcgattggaggtgataaaagctatcgaatcccgaaatctcgaggatgcaattgagaagttgaatgcactaaaccctgagattatcaaaacaagttttcacctccaccagcaaatgttgatcgagttgatccgtgagaagaagaccgaggaggctgttgcgtttgcacaggaaaaactcgcgccactagctgaggagaatgaggccttacaaagagaactggaaaaaacagtgtgtatactcgttactgaaggtctccctaactgcccgtccagggagcttttccacaactcgcagtggattaggactgctagccacgtaaacgaagcaatccatacaagccagactggagaaaaaggtcctgaattggagcgcttgttgaaggagctgatttggactcagaatcaactggatgaaaaaacagtctatgtgtatccacgcatgaatgatttttccactggccagctcatataccgaccagaatgattcttcttccctttcaacaactaacggctctgcaaaagggaacatatatagtgatatataactgatctgtcgcaagaacatgatgaccatttcttcctagtgagtattttgagtgaggggggagtttttagccttgctcttatgatttagggattttcttattcatgacaatattggacccctaggtagtactaataacaagagagggtttttgttttcaaatgttggtttactggttaggcttttattctccaccatggtatggttcctataaagctacataagaattcattttgaagtttgtttggtgtgtgaccgaag

SEQ ID NO: 107767 - protein, 255 aa, Arabidopsis thaliana
  peptide (1)..(255): Ceres Seq. ID no. 13651583
LQSLQNFPSHSRKISTVPWICSISEENEEDSMETPKIVVTSEDWESKLSDVEILIEDMNRLVMNLLVAEGYREAAEKFKEESITMPEEDLASMNERLEVIKAIESRNLEDAIEKLNALNPEIIKTSFHLHQQMLIELIREKKTEEAVAFAQEKLAPLAEENEALQRELEKTVCILVTEGLPNCPSRELFHNSQWIRTASHVNEAIHTSQTGEKGPELERLLKELIWTQNQLDEKTVYVYPRMNDFSTGQLIYRPE

SEQ ID NO: 107768 - protein, 224 aa, Arabidopsis thaliana
  peptide (1)..(224): Ceres Seq. ID no. 13651584
METPKIVVTSEDWESKLSDVEILIEDMNRLVMNLLVAEGYREAAEKFKEESITMPEEDLASMNERLEVIKAIESRNLEDAIEKLNALNPEIIKTSFHLHQQMLIELIREKKTEEAVAFAQEKLAPLAEENEALQRELEKTVCILVTEGLPNCPSRELFHNSQWIRTASHVNEAIHTSQTGEKGPELERLLKELIWTQNQLDEKTVYVYPRMNDFSTGQLIYRPE

SEQ ID NO: 107769 - protein, 198 aa, Arabidopsis thaliana; identical to SEQ ID NO: 88848
  peptide (1)..(198): Ceres Seq. ID no. 13651585

SEQ ID NO: 107770 - DNA, 738 bp, Arabidopsis thaliana
  misc_feature (1)..(738): Ceres Seq. ID no. 13651590
  misc_feature (1)..(738): Ortholog of  Ceres SEQ ID NO 15172974 as cited in SEQ ID NO 67643
gtacaagtggaattttgaaaaaagaagcagagagcgatggagaaagtggttgatctcttcggagtcggagaagctaattcccagaagctactcgaaggaggcaaagatctcagcgagatccaacagggattgttcataggatcagtagctgaagcgaataacaaggattttctcaaaagctctaatatcactcatgtcttaaccgttgctgtggccttggctcctccttatcctgatgattttgtctacaaagtcattgaagtggttgatagatccgagaccgatttgacagtatatttcgatgagtgttatagcttcatcgaccaagctattcaatctggtggtggtgttttggttcattgcttcatgggaatgtctaggagtgtgactatagtggtggcttacctgatgaaaaagcatggaatgggattctctaaagctatggaacttgtaaggagccgacgacatcaggcatatcctaatcccggtttcatttcgcagctccagcaatttgaaaaatccatccaaggtaatgcatgattgcttcagctgataagaagattcaagatagtggcatgatgaactctcatgaaattccggcaagtgtcttcagccccatgttggccaaaaaagttgattggtttcgtgctgtgaaggattttttcttgtgaactattgatggtgagcactttgccatgtccattagccaattgaaatgaatgaaaacgcagaatttac

SEQ ID NO: 107771 - protein, 167 aa, Arabidopsis thaliana
  peptide (1)..(167): Ceres Seq. ID no. 13651591
MEKVVDLFGVGEANSQKLLEGGKDLSEIQQGLFIGSVAEANNKDFLKSSNITHVLTVAVALAPPYPDDFVYKVIEVVDRSETDLTVYFDECYSFIDQAIQSGGGVLVHCFMGMSRSVTIVVAYLMKKHGMGFSKAMELVRSRRHQAYPNPGFISQLQQFEKSIQGNA

SEQ ID NO: 107772 - DNA, 966 bp, Arabidopsis thaliana
  misc_feature (1)..(966): Ceres Seq. ID no. 13651592
  misc_feature (1)..(966): Ortholog of  Ceres SEQ ID NO 14313522 as cited in SEQ ID NO 63547
  misc_feature (1)..(966): Ortholog of  Ceres SEQ ID NO 13597471 as cited in SEQ ID NO 65101
gcttccgatgattcctctcactatttcaccgagtttaccttgtctgagacatggagaatctgtataaggagctcggtgaccaatctctccacaaagatttctgtcaaactgttgcctctacttttagttgttctgtgaatcggaatggcaaatcctctataacctggaaacaggtacagatttggttccaggagaagctgaagcatcaaagccaaccaaaatccaaaactttgccatctccccctttgcagattcatgacttatctaatcccagttcttatgcttcaaatgcctcaaatgctacctttgttgggaattctacctttgttcaaacacgaaaaggcaaggcctctgatttagctgatctggcttttgaggctaaatcagcgcgggactacgcgtggtatgacgtgtcttcgttccttacttatagagttcttcgcactggtgaactggaagtgcgtgtacggttttctgggttcgacaaccgacacgatgagtgggtaaacgtcaaaacatcagtgcgtgagcggtctattcctgtagaaccatcagagtgtgggagagtgaacgttggagacctgcttctatgtttccaagaaagagaggatcaagcactctactgtgatggtcatgttttgaatatcaagagagggattcatgatcacgcgagatgtaactgcgtgtttcttgttcgctacgagcttgacaatacagagtgtatgttcaggaatcgctgggactagaaagaatttgccgccgccctgaagagtaattttttttggttttgaagtcatatttggaagatgcagtaaactatgactatatagtatatgactgacccaaaaatggaataacatgctcatgtatagacttccactactaagtacctaccggccctaggattctatgttagtttttttctgtcaactatgtggaataaagtgcaaaagcttagaattgtag

SEQ ID NO: 107773 - protein, 231 aa, Arabidopsis thaliana
  peptide (1)..(231): Ceres Seq. ID no. 13651593
MENLYKELGDQSLHKDFCQTVASTFSCSVNRNGKSSITWKQVQIWFQEKLKHQSQPKSKTLPSPPLQIHDLSNPSSYASNASNATFVGNSTFVQTRKGKASDLADLAFEAKSARDYAWYDVSSFLTYRVLRTGELEVRVRFSGFDNRHDEWVNVKTSVRERSIPVEPSECGRVNVGDLLLCFQEREDQALYCDGHVLNIKRGIHDHARCNCVFLVRYELDNTECMFRNRWD

SEQ ID NO: 107774 - DNA, 1079 bp, Arabidopsis thaliana
  misc_feature (1)..(1079): Ceres Seq. ID no. 13651594
  misc_feature (1)..(1079): Ortholog of  Ceres SEQ ID NO 15178717 as cited in SEQ ID NO 54457
  misc_feature (1)..(1079): Ortholog of  Ceres SEQ ID NO 13584012 as cited in SEQ ID NO 63469
taagaggtatttgtcaatcaatacctttcttcgtcgattcccttagctgatgtgttgttattttcgaatttgatttgttggaacacacttcgaagcttgggatctgaaatatctgattctgactgtatactgtagtcaaagatgggcagtgaaagtgataaaggtagagaagcaattgttgaagaagaagaagaagagatagtctgcttggagtctttcttcatcaacgatgattatcagttgacgaagtttacgtttggttctcatgttcttgagctctactgtctccaatcagcttcaactgattttgatttaacagggcagctggtttggcctggtgcgatgcttatgaatggttatctctcagaaaatgctgacattctccagggatgttcagttttggagttgggatctggcgttggtataactggagtcctatgtagcaaattttgccgtaaagttatttttactgaccacaacgatgaagtgctcaagatactgaagaaaaacattgaccttcatggacattcaagtggtcccaaaccctcagctgaattagaggctgcaaagcttgaatggggaaatagtgatcagcttggtcaaattttaaagaaacacaatgatggctttgatcttattcttggagctgagatctgctttcagcaatcaagtgtgccattgctatttgacagtgttgagcagcttctgcggatcaggggacaaggaaactgcaaattcatactagcatacgtatcacgggctagacagatggattctgcaatcttgagagaaggcgctcagcacgggatgctgatgaatgaagtttctgggactcggtgtaccgtaggaaacttggaaggggtcatatatgaaatcacacttcaaaagaagagaggaattgtgttcgagtaacttagttcctttgatacctcagaattttgtaacattatttttatgttatttagatgcatacatttttggtgaaacgtttactaaagttacagttcaaaaagtatacaatgacatttgtggatgctttgaagtgaatccacattgttagctgaaaaactgttgcaact

SEQ ID NO: 107775 - protein, 256 aa, Arabidopsis thaliana
  peptide (1)..(256): Ceres Seq. ID no. 13651595
MGSESDKGREAIVEEEEEEIVCLESFFINDDYQLTKFTFGSHVLELYCLQSASTDFDLTGQLVWPGAMLMNGYLSENADILQGCSVLELGSGVGITGVLCSKFCRKVIFTDHNDEVLKILKKNIDLHGHSSGPKPSAELEAAKLEWGNSDQLGQILKKHNDGFDLILGAEICFQQSSVPLLFDSVEQLLRIRGQGNCKFILAYVSRARQMDSAILREGAQHGMLMNEVSGTRCTVGNLEGVIYEITLQKKRGIVFE

SEQ ID NO: 107776 - protein, 189 aa, Arabidopsis thaliana
  peptide (1)..(189): Ceres Seq. ID no. 13651596
MLMNGYLSENADILQGCSVLELGSGVGITGVLCSKFCRKVIFTDHNDEVLKILKKNIDLHGHSSGPKPSAELEAAKLEWGNSDQLGQILKKHNDGFDLILGAEICFQQSSVPLLFDSVEQLLRIRGQGNCKFILAYVSRARQMDSAILREGAQHGMLMNEVSGTRCTVGNLEGVIYEITLQKKRGIVFE

SEQ ID NO: 107777 - protein, 187 aa, Arabidopsis thaliana
  peptide (1)..(187): Ceres Seq. ID no. 13651597
MNGYLSENADILQGCSVLELGSGVGITGVLCSKFCRKVIFTDHNDEVLKILKKNIDLHGHSSGPKPSAELEAAKLEWGNSDQLGQILKKHNDGFDLILGAEICFQQSSVPLLFDSVEQLLRIRGQGNCKFILAYVSRARQMDSAILREGAQHGMLMNEVSGTRCTVGNLEGVIYEITLQKKRGIVFE

SEQ ID NO: 107778 - DNA, 1337 bp, Arabidopsis thaliana
  misc_feature (1)..(1337): Ceres Seq. ID no. 13651632
  misc_feature (1)..(1337): Ortholog of  Ceres SEQ ID NO 15169415 as cited in SEQ ID NO 59010
  misc_feature (1)..(1337): Ortholog of  Ceres SEQ ID NO 13656546 as cited in SEQ ID NO 65729
gtttccttccacgcctccgccggcaagctagttttctgactggagttccatcgtggacgccattatcttcctaaaaatgaagattcttacactcgtaatgcttttatgctactcgttcgtctcttctaccggagatacgactatccacacaaacaattgggctgttttggtctgcacttctcgcttctggtttaactaccggcacatggccaatactctgtccctctataggacagtcaagagacttggaataccagatgagaggatcattcttatgctggctgatgatatggcctgtaatgctagaaatgaatatcctgctcaagttttcaacaatgaaaaccacaaacttaacctctatggagataacgttgaggtagattatcgtggatatgaggtaacagttgaaaatttcttacgggttttgactgggcgtcatgagaatgctgttccaaggtcaaagcgtctcctcagtgatgagggtagccatatactactgtacatgactgggcatggaggtgatgaatttttgaagtttcaagatgcagaagaactccagagtcacgatttagcagatgctgtaaaacaaatgaaagagaagcgtagattcaaggagctgatgataatggttgatacttgccaagctgccactctctttaatcagcttcaatctcctggtgttttggctattggtagcagtctaaaaggagagaactcatattcccatcacctggattcagatattggtgtatctgttgtagatcggtttacatattacactcttgcattctttgagaggctcaatatatatgacaatgcatcacttaacagtttatttaggtcctacgatccgagactgctaatgtctactgcctactaccggactgatctttaccaaccacatctggtggaggtaccggtcacaaatttcttcggttcagttatggagaccattcatactgattcagcttacaaagctttctcaagtaaaatctccgaaagaaagatcaattctgagatgccattcaatcaactttccgaacacgatcttaaagaagagcttgagaatacaaacataccaaacgatgagttgatagctgagaagcaaaaatgcccatattcacaaatgcgggcagacctccacgagaaagtggagaagcttgaaaatgtcgatacagtggttaacctcagcatagcagtgatggtactcgctgtaatggtctcatcatctttactacgatgaagaactgatataatcatctgcacttcacttaatctatgtagtctgattcactgttgcagcttcacacccattttgtaattttttgcacaatgct

SEQ ID NO: 107779 - protein, 388 aa, Arabidopsis thaliana; identical to SEQ ID NO: 90399
  peptide (1)..(388): Ceres Seq. ID no. 13651633

SEQ ID NO: 107780 - protein, 381 aa, Arabidopsis thaliana; identical to SEQ ID NO: 90400
  peptide (1)..(381): Ceres Seq. ID no. 13651634

SEQ ID NO: 107781 - protein, 345 aa, Arabidopsis thaliana; identical to SEQ ID NO: 90401
  peptide (1)..(345): Ceres Seq. ID no. 13651635

SEQ ID NO: 107782 - DNA, 1121 bp, Arabidopsis thaliana
  misc_feature (1)..(1121): Ceres Seq. ID no. 13651636
  misc_feature (1)..(1121): Ortholog of  Ceres SEQ ID NO 14304842 as cited in SEQ ID NO 54198
  misc_feature (1)..(1121): Ortholog of  Ceres SEQ ID NO 14308683 as cited in SEQ ID NO 58723
gaaataatttatcaaataaacagagaagaagaaccaaattcaatgcttccttgtcgccgtcttgttctgtcctgcaagaatcaagctgccagttttctccgaaggtgtggaccatcgaaacgaattcaatcagtcaattactgtaaatcaacaagacagggccatgaaattccagatgtgaaacctctttttcccacaggaggaggaactcaagctccttctcgttctcgtgctcgttatgctgttcctgcgattctacttggttttgccggattcgtcggctttcttcattacaacgacgaaaggagagcagttcctagaggtcaagcaagcagcaatagcggttgtggctgcggttctaatacaactgtcaaaggtccgattatcggaggtccgtttacgcttgtgagcacagaaaacaagatagtcacagagaatgacttttgtggtaaatgggttctactctactttggatactctttttccccggatgttggacctgagcaactaaagatgatgtccaaagctgttgataaactaggttgagttacttatacaaagctccagccatttcattagtttcagatctttcttgttataatatatgatcttcttttagtaatgatgtcttgtcttgatggaaacaacagagtctaaacataacgagaagattctgcctgtctttgtcactcttgaccctcaacgagacacaccttctcatctccacgcatacttgaaagagtttgatagtagaatactaggactaaccgggactgcaagtgcaatgaggcaaatggcacaagagtatcgtgtctacttcaagaaggttcaagaggacggagaagattatctcgttgatacttctcacaacatgtacttgataaatccgaagatggagattgtgaggtgctttggggttgagtataatccagacgagctctcacaagagcttcttaaagaagttgcttctgtttcacagtgacccattttgaccaaacactaaagagagaaacactaggatgctctttgattgttttcttcaattcgtgatttttttaaagacgattttgttaatccgtctcttattcttgaaaaaatgaaaattagatggtagatcctgc

SEQ ID NO: 107783 - protein, 181 aa, Arabidopsis thaliana
  peptide (1)..(181): Ceres Seq. ID no. 13651637
EIIYQINREEEPNSMLPCRRLVLSCKNQAASFLRRCGPSKRIQSVNYCKSTRQGHEIPDVKPLFPTGGGTQAPSRSRARYAVPAILLGFAGFVGFLHYNDERRAVPRGQASSNSGCGCGSNTTVKGPIIGGPFTLVSTENKIVTENDFCGKWVLLYFGYSFSPDVGPEQLKMMSKAVDKLG

SEQ ID NO: 107784 - protein, 167 aa, Arabidopsis thaliana
  peptide (1)..(167): Ceres Seq. ID no. 13651638
MLPCRRLVLSCKNQAASFLRRCGPSKRIQSVNYCKSTRQGHEIPDVKPLFPTGGGTQAPSRSRARYAVPAILLGFAGFVGFLHYNDERRAVPRGQASSNSGCGCGSNTTVKGPIIGGPFTLVSTENKIVTENDFCGKWVLLYFGYSFSPDVGPEQLKMMSKAVDKLG

SEQ ID NO: 107785 - protein, 114 aa, Arabidopsis thaliana
  peptide (1)..(114): Ceres Seq. ID no. 13651639
METTESKHNEKILPVFVTLDPQRDTPSHLHAYLKEFDSRILGLTGTASAMRQMAQEYRVYFKKVQEDGEDYLVDTSHNMYLINPKMEIVRCFGVEYNPDELSQELLKEVASVSQ

SEQ ID NO: 107786 - DNA, 1232 bp, Arabidopsis thaliana
  misc_feature (1)..(1232): Ceres Seq. ID no. 13651640
  misc_feature (1)..(1232): Ortholog of  Ceres SEQ ID NO 13598935 as cited in SEQ ID NO 1239
  misc_feature (1)..(1232): Ortholog of  Ceres SEQ ID NO 13598171 as cited in SEQ ID NO 61357
  misc_feature (1)..(1232): Ortholog of  Ceres SEQ ID NO 13664149 as cited in SEQ ID NO 61490
ggtttgccaaatctcttccatctcatccgccgagcgatattgttgatagctcaaaaaagggaggacactgggagcattaagcaagaagcacagtctcatcctccagggatcttcgagataccgggggagcctgcggttgttatcaatggtgtgcctgatgaacctcaaactgattgtatgattgccaaagatgaaccaatatcaagtggcactgtaggaagcggggaatggcttgagggtagagaagttcgcaagtttttcttgggtcgctactattctggtacggtgacaaagttcgataaacaatctggatggtacagagttgaatatgaagatggggattctgaagatcttgactggtctgagcttgaagaagtgcttctacctttggatgttactgtcccattgaggtctatctcattgcatatcatcaagaatcgacaaatacatgcccagctttatggatacacgccacaacgctagaccaagaactccaacacaaatgcgcagagtgaatatggtgaagcaggacaaagagtaaatgtgaaggcaccatatccaggacataaaccggagaaactagtgaccacaacagtgaaggcaccatacccaggacataaaccggagaagctaatcccacgtacgcttctacttccatgacattgtatccggagtcaaaccaacctcagtcgtagtcgctacgagtcccacaacaaactcctctgcaaccgctttcggtatggttgcagtcgttgacgacatattgacggtgggacctgaaataacctcagaggaagttgggagagcccaaggaattttcgcatcggccgaccagaacaactttggtctgcttatggctttcaactttgttttcacaaagggtgaattttccggcagcaccgtgtccatgtatggccggaatccgatattttcgaaggtgagagagatgccgatcatcggaggtactggagcattcaggttcggaagaggatatgcacaagccaagacttttacgttcaatactaccagtggaaatgctgtggtcaagtataatgtttatatttggcattaattgttgacttctttggtgcttttctatttttccgtcgaaagatgataaatttggatggatacaaaaagaaataaaaggttggtatgaataaatgcctctttttctattgtagttgaattgatttttgattttgatgtatttgattgtaagaaattgtggt

SEQ ID NO: 107787 - protein, 160 aa, Arabidopsis thaliana
  peptide (1)..(160): Ceres Seq. ID no. 13651641
GLPNLFHLIRRAILLIAQKREDTGSIKQEAQSHPPGIFEIPGEPAVVINGVPDEPQTDCMIAKDEPISSGTVGSGEWLEGREVRKFFLGRYYSGTVTKFDKQSGWYRVEYEDGDSEDLDWSELEEVLLPLDVTVPLRSISLHIIKNRQIHAQLYGYTPQR

SEQ ID NO: 107788 - protein, 110 aa, Arabidopsis thaliana
  peptide (1)..(110): Ceres Seq. ID no. 13651642
MVAVVDDILTVGPEITSEEVGRAQGIFASADQNNFGLLMAFNFVFTKGEFSGSTVSMYGRNPIFSKVREMPIIGGTGAFRFGRGYAQAKTFTFNTTSGNAVVKYNVYIWH

SEQ ID NO: 107789 - protein, 101 aa, Arabidopsis thaliana
  peptide (1)..(101): Ceres Seq. ID no. 13651643
MIAKDEPISSGTVGSGEWLEGREVRKFFLGRYYSGTVTKFDKQSGWYRVEYEDGDSEDLDWSELEEVLLPLDVTVPLRSISLHIIKNRQIHAQLYGYTPQR

SEQ ID NO: 107790 - DNA, 1186 bp, Arabidopsis thaliana
  misc_feature (1)..(1186): Ceres Seq. ID no. 13651646
  misc_feature (1)..(1186): Ortholog of  Ceres SEQ ID NO 13655640 as cited in SEQ ID NO 63844
  misc_feature (1)..(1186): Ortholog of  Ceres SEQ ID NO 13584744 as cited in SEQ ID NO 69137
gtcttcgtcttcatcttcgctatggccgttacttcgcttctcgataccgttttccgacgtagaaagaagaagtctactgagtttataagctttttcgaattcgacttggacaccattaaagctgcaacaaatgatttctcagaactggttggtcgtggcggatttggttttgtttacaagggtaggcttcaaaatggacaagaaatagcagtcaagattttgtctacaagttcaattagaactgagagacagtttcataacgaacttattattttgtctaagcttaaacacaagaatctgatcaatcttcttggtttctgcactaaacgagaccaacatggtcttgtttacgagttcatgcctaactcaagcctcgattgttttatactcgacccacacagagctgctcagctaaattgggagatgtgccgaaacattattgatggcatagctcgagggctacgttaccttcatgaagaatccgggttatgggtcgttcaccgcgacattaaacctggaaacattctattggattcagatttgaaaccgaaaatagtgggatttgaattggcgaggacgatgcaacaaggtgaaaacgcagctgaaacaactgaaattgtcggtaccgtagggtatttagatccggagtacatacgaagcggacgtgtttccgtcaaatctgacgtttatgcctttggagttacaatcttgacgatcattagcagaaggaaggcttggagtgtggacggagactctctaatcaaatatgttaggagatgctggaacagaggagaagccatagatgtgatccatgaagtgatgagggaagaagaaagagaatattcgataagcgaaatcttgagatacattcacattgctttgctatgtgtggatgagaatgctgagagaaggccgaatattgataaagttctgcattggtttagttgtttctctactcctttacctgatccaacatttggtaatagatttcttgtagaggaagaaacaaattggccctggtcgccatctttatctcctggtcacagctctgtcacgtcacccatatcttcacgttaaggagattgagtgctctgttttattagactgacgagagtttatgatgaaaagaattgttggttgataagttcaagtcgtaatttgctattgtcttcttctttttgtgccc

SEQ ID NO: 107791 - protein, 358 aa, Arabidopsis thaliana
  peptide (1)..(358): Ceres Seq. ID no. 13651647
VFVFIFAMAVTSLLDTVFRRRKKKSTEFISFFEFDLDTIKAATNDFSELVGRGGFGFVYKGRLQNGQEIAVKILSTSSIRTERQFHNELIILSKLKHKNLINLLGFCTKRDQHGLVYEFMPNSSLDCFILDPHRAAQLNWEMCRNIIDGIARGLRYLHEESGLWVVHRDIKPGNILLDSDLKPKIVGFELARTMQQGENAAETTEIVGTVGYLDPEYIRSGRVSVKSDVYAFGVTILTIISRRKAWSVDGDSLIKYVRRCWNRGEAIDVIHEVMREEEREYSISEILRYIHIALLCVDENAERRPNIDKVLHWFSCFSTPLPDPTFGNRFLVEEETNWPWSPSLSPGHSSVTSPISSR

SEQ ID NO: 107792 - protein, 351 aa, Arabidopsis thaliana
  peptide (1)..(351): Ceres Seq. ID no. 13651648
MAVTSLLDTVFRRRKKKSTEFISFFEFDLDTIKAATNDFSELVGRGGFGFVYKGRLQNGQEIAVKILSTSSIRTERQFHNELIILSKLKHKNLINLLGFCTKRDQHGLVYEFMPNSSLDCFILDPHRAAQLNWEMCRNIIDGIARGLRYLHEESGLWVVHRDIKPGNILLDSDLKPKIVGFELARTMQQGENAAETTEIVGTVGYLDPEYIRSGRVSVKSDVYAFGVTILTIISRRKAWSVDGDSLIKYVRRCWNRGEAIDVIHEVMREEEREYSISEILRYIHIALLCVDENAERRPNIDKVLHWFSCFSTPLPDPTFGNRFLVEEETNWPWSPSLSPGHSSVTSPISSR

SEQ ID NO: 107793 - protein, 239 aa, Arabidopsis thaliana; identical to SEQ ID NO: 69755
  peptide (1)..(239): Ceres Seq. ID no. 13651649

SEQ ID NO: 107794 - DNA, 498 bp, Arabidopsis thaliana
  misc_feature (1)..(498): Ceres Seq. ID no. 13651662
  misc_feature (1)..(498): Ortholog of  Ceres SEQ ID NO 12635836 as cited in SEQ ID NO 0
  misc_feature (1)..(498): Ortholog of  Ceres SEQ ID NO 13599004 as cited in SEQ ID NO 0
gctgatttcttctctgcttctgtaatttctccaattcattgatcagatcagccatggaagacgagattgaattgaaaactgctcctgctgatttccggtttcctacaacaaatcaaactaggcactgcttcactcggtacatcgagtttcacaggtgtacaactgcaaagggagaggagtctaatgactgtgaaaggtttgccaagtattaccgtgccctctgtcctggagaatgggttgacaagtggaacgagcagagggagagtggaacttttccaggtcctctttgaaccaagccttcaatcttgatgaagaggcaatcaagtccgtaataatacatggtttcaaagttaatttcttgcttgcgtgtgtatgttttggccttattatttcctctctagtgtaagtgttttattgggatgtctaagaaaggccaatcaaattataatatgaaaacattcgcttattttgtttggaacttataataccagaatgcat

SEQ ID NO: 107795 - protein, 78 aa, Arabidopsis thaliana; identical to SEQ ID NO: 35309
  peptide (1)..(78): Ceres Seq. ID no. 13651663

SEQ ID NO: 107796 - protein, 41 aa, Arabidopsis thaliana; identical to SEQ ID NO: 35310
  peptide (1)..(41): Ceres Seq. ID no. 13651664

SEQ ID NO: 107797 - DNA, 743 bp, Arabidopsis thaliana
  misc_feature (1)..(743): Ceres Seq. ID no. 13651677
  misc_feature (1)..(743): Ortholog of  Ceres SEQ ID NO 14309686 as cited in SEQ ID NO 58523
gatgctttgacattcctctctttcttctgctctcggaattggtgttgcagaagaaaagttaacaggactggtgaagtatcaaaatttggggttttgctacgatgacgctaggtgctcggcttgttgctcccatgattatacttctcctttttataccgattgaattagttaaagcggaagtcattacactgacaccagaaaccttttctgacaagataaaggagaaggatactgcgtggttcgtaaagttttgtgttccttggtgtaaacactgcaagaaactggggaatttgtgggaagacttgggaaaagcaatggagggagacgatgaaattgaggttggtgaagtagactgtggtactagcagagctgtttgcaccaaagttgaaattcactcgtatccaacatttatgctattttacaatggagaagaagtttcgaaatataaaggaaaaagagacgttgaatcgctcaaggcttttgttgtagaggaaactgaaaaggcagcagaaaaagcacagcttgaagacaaggaactgtgatacaactagtcggtgattattagaacctgatacattgttccctttggttttcattttgcctatgcagttgtgtgactcttaccgttagttagataggcatggttttcagcacgatggaggagcatctttgggtttaaaggtttttcacaccactgttttgctaaaatattcagtttccattttattcagagtcagataagc

SEQ ID NO: 107798 - protein, 146 aa, Arabidopsis thaliana; identical to SEQ ID NO: 29677
  peptide (1)..(146): Ceres Seq. ID no. 13651678

SEQ ID NO: 107799 - protein, 136 aa, Arabidopsis thaliana; identical to SEQ ID NO: 29678
  peptide (1)..(136): Ceres Seq. ID no. 13651679

SEQ ID NO: 107800 - protein, 75 aa, Arabidopsis thaliana; identical to SEQ ID NO: 29679
  peptide (1)..(75): Ceres Seq. ID no. 13651680

SEQ ID NO: 107801 - DNA, 1113 bp, Arabidopsis thaliana
  misc_feature (1)..(1113): Ceres Seq. ID no. 13651692
  misc_feature (1)..(1113): Ortholog of  Ceres SEQ ID NO 15174694 as cited in SEQ ID NO 54754
  misc_feature (1)..(1113): Ortholog of  Ceres SEQ ID NO 15175666 as cited in SEQ ID NO 54985
  misc_feature (1)..(1113): Ortholog of  Ceres SEQ ID NO 12388689 as cited in SEQ ID NO 0
gtcccaccgttaaagatgacgacgacgactgcttctctggttaagacttttctgtttcggtgcgactcgttttcatctttcaaattcaaatgcaaattcgaatctcccgcgaaaacgcgattgctctctccggcgaccgagaaacatgttgtcagatcgtcaagagcctggcgtattcgttgcttatccgatgatcctggttcgagtcatgttttcgttgcaagtagaaggaaaatggtagtcttgttgtcgacggtgcagcttctgtctcatatgcttccgcaaaacgggaacgcagctgagatttatccggtgatgcaaaacgaaataaggaaagtggtgacaaagggcaaggctgctggtgtgcttcgtttagtgtttcatgatgctggaacctttgaactggacgatcattctggtggcatcaacggatctattgcttatgaacttgagagacctgagaacataggtttgaagaaatccttaaaggttctagcgaaagcaaaggttaaggttgacgagatacaaccagtgtcttgggcggatatgatctctgtcgctgggtctgaagcagtttcaatatgtggcggcccaacaattccagtagttttgggaagacttgattcagcgcaacctgatccagaaggcaagctacctccagaaaccctgagtgcctcgggattgaaagaatgcttcaaaagaaaaggattttcgacccaggagcttgttgccttatctggggcacatacgattgggagtaaaggctttggagatccgacagtttttgacaatgcatactacaaaatccttcttgaaaaaccatggacgtcaacttctaagatgacgagcatggtcgggcttccttcggatcatgctttagtgcaggatgatgagtgcttaaggtgggtgaaacggtatgcagaagaccaagacaagttcttcgaagacttcacaaatgcttatatcaaactagtaaattctggggccaaatggaatatgttatgatatctaatctagttttatattttgttagctcataagtgtttcaaacatgcccgaataatttgggtagtaatgcttatttgctaataagtaaaaatttcgctgcttact

SEQ ID NO: 107802 - protein, 334 aa, Arabidopsis thaliana
  peptide (1)..(334): Ceres Seq. ID no. 13651693
VPPLKMTTTTASLVKTFLFRCDSFSSFKFKCKFESPAKTRLLSPATEKHVVRSSRAWRIRCLSDDPGSSHVFVASRRKMVVLLSTVQLLSHMLPQNGNAAEIYPVMQNEIRKVVTKGKAAGVLRLVFHDAGTFELDDHSGGINGSIAYELERPENIGLKKSLKVLAKAKVKVDEIQPVSWADMISVAGSEAVSICGGPTIPVVLGRLDSAQPDPEGKLPPETLSASGLKECFKRKGFSTQELVALSGAHTIGSKGFGDPTVFDNAYYKILLEKPWTSTSKMTSMVGLPSDHALVQDDECLRWVKRYAEDQDKFFEDFTNAYIKLVNSGAKWNML

SEQ ID NO: 107803 - protein, 329 aa, Arabidopsis thaliana
  peptide (1)..(329): Ceres Seq. ID no. 13651694
MTTTTASLVKTFLFRCDSFSSFKFKCKFESPAKTRLLSPATEKHVVRSSRAWRIRCLSDDPGSSHVFVASRRKMVVLLSTVQLLSHMLPQNGNAAEIYPVMQNEIRKVVTKGKAAGVLRLVFHDAGTFELDDHSGGINGSIAYELERPENIGLKKSLKVLAKAKVKVDEIQPVSWADMISVAGSEAVSICGGPTIPVVLGRLDSAQPDPEGKLPPETLSASGLKECFKRKGFSTQELVALSGAHTIGSKGFGDPTVFDNAYYKILLEKPWTSTSKMTSMVGLPSDHALVQDDECLRWVKRYAEDQDKFFEDFTNAYIKLVNSGAKWNML

SEQ ID NO: 107804 - protein, 256 aa, Arabidopsis thaliana
  peptide (1)..(256): Ceres Seq. ID no. 13651695
MVVLLSTVQLLSHMLPQNGNAAEIYPVMQNEIRKVVTKGKAAGVLRLVFHDAGTFELDDHSGGINGSIAYELERPENIGLKKSLKVLAKAKVKVDEIQPVSWADMISVAGSEAVSICGGPTIPVVLGRLDSAQPDPEGKLPPETLSASGLKECFKRKGFSTQELVALSGAHTIGSKGFGDPTVFDNAYYKILLEKPWTSTSKMTSMVGLPSDHALVQDDECLRWVKRYAEDQDKFFEDFTNAYIKLVNSGAKWNML

SEQ ID NO: 107805 - DNA, 1034 bp, Arabidopsis thaliana
  misc_feature (1)..(1034): Ceres Seq. ID no. 13651696
  misc_feature (1)..(1034): Ortholog of  Ceres SEQ ID NO 15225623 as cited in SEQ ID NO 64319
catcgctgtctggaacagcgatgactcgagaaccggagagagagctgtagcagtgtttgaaatcctttggattgcatcaccaggagcaagagatcacgatgtctaagaaacggggactttcgctggaggagaaacgagagaagatgcttcagatattctatgagtctcaagacttcttcctactaaaggaacttgagaagatggggccgaagaagggtgtaattagtcagtctgtgaaagatgttatccagagtttagtcgatgatgatcttgttgcgaaagacaagattggaatttctatctacttttggagccttcccagctgtgctggcaatcaacttaggagtgttcgccagaaacttgaatctgatcttcagggtagtaacaaaaggttagcagaacttgttgatcagtgtgaggccctaaagaagggaagggaagaatcggaggaacgaacagaggccttgacgcaactcaaagatattgaaaagaaacacaaagatctgaagaacgagatggtacaatttgctgacaacgatccagctactttggaggcaaagaggaatgcaattgaagttgctcaccagtcggctaacagatggacagataacatcttcacactgcgacaatggtgttcaaacaacttcccccaggccaaggaacagctagaacatctatacacggaggcgggaatcactgaggactttgattacatagagttatcatcattccctttgagctcatcccatgaagctgataccgcaaagcagctagtacaagatgaagcttagttctaatactctccagcataacagttaaagaaacaatagcttaagtaaaaaatcttttcactatccttttaagttttctggttttaaaggtagcaacagtctgtaattctctatgtgacccaatcatctaatgtcaaaactcggttacaaattctgtggtcagaaaagatttttattttctttgtatctgtcggctatgtccaagcttggctatgttttgttataatattttattggagttat

SEQ ID NO: 107806 - protein, 230 aa, Arabidopsis thaliana
  peptide (1)..(230): Ceres Seq. ID no. 13651697
MSKKRGLSLEEKREKMLQIFYESQDFFLLKELEKMGPKKGVISQSVKDVIQSLVDDDLVAKDKIGISIYFWSLPSCAGNQLRSVRQKLESDLQGSNKRLAELVDQCEALKKGREESEERTEALTQLKDIEKKHKDLKNEMVQFADNDPATLEAKRNAIEVAHQSANRWTDNIFTLRQWCSNNFPQAKEQLEHLYTEAGITEDFDYIELSSFPLSSSHEADTAKQLVQDEA

SEQ ID NO: 107807 - protein, 215 aa, Arabidopsis thaliana; identical to SEQ ID NO: 49080
  peptide (1)..(215): Ceres Seq. ID no. 13651698

SEQ ID NO: 107808 - protein, 196 aa, Arabidopsis thaliana; identical to SEQ ID NO: 49081
  peptide (1)..(196): Ceres Seq. ID no. 13651699

SEQ ID NO: 107809 - DNA, 950 bp, Arabidopsis thaliana
  misc_feature (1)..(950): Ceres Seq. ID no. 13651741
  misc_feature (1)..(950): Ortholog of  Ceres SEQ ID NO 14311590 as cited in SEQ ID NO 51709
atttcaaagtttggtacagacaaaaaaaaaacattttaaggtaatctcaaaaccaaaaagcctatcaatctttgtacttggatgttttgttgttgcaaggattgcagaggaaaccaacgagtttctaactttgattctctaacaggtgttttctttggagatcttgagtttggacctcagaatcaaagatatataaagatgaatgaggaagaagataaagatcaagatcgagtaacgagaggatgtagtcacactcatagctgtaaccctccaggcccagaggatgcttctcactcccacacatgcttccacgctcacactcatctcatcatctctgatcagcaagagaatgatcattctgacagtagcaacaagaaacggttatgtggtaatagagaggcagtgaggaagtacagggagaagaagaaggctcgcactgcataccttgaagatgaagtgatgagattgcaatctctgaatgagcaattccttagaaaacttcagagccaagaaatggtggaaactgaattgatcagactccgggctcttctggtagagatgcaggggaaaattgaagttgaactttgtagtttctcgtttcagaaacaatgcaacggttctggttttgtgttcaaagaagatggatgcaacttagcaacaagtaatatgatgtgtgaagcggcaagagtggagtgcgaggagggccaaacacttcatgatcctattcaatcttttgttcctcaaccaccaccattctcacgttaagcgtttacgggctgtggtattgtgtgtatatatatacatatgggtttaattaggggcatagaggtcggattccaatatagttaacatatacacagattggtaacttattctacatatgtctattttaagggtaccaaaacatcttgatgtggaattgattttgaaatgaagaggaggatgattgc

SEQ ID NO: 107810 - protein, 227 aa, Arabidopsis thaliana
  peptide (1)..(227): Ceres Seq. ID no. 13651742
MFCCCKDCRGNQRVSNFDSLTGVFFGDLEFGPQNQRYIKMNEEEDKDQDRVTRGCSHTHSCNPPGPEDASHSHTCFHAHTHLIISDQQENDHSDSSNKKRLCGNREAVRKYREKKKARTAYLEDEVMRLQSLNEQFLRKLQSQEMVETELIRLRALLVEMQGKIEVELCSFSFQKQCNGSGFVFKEDGCNLATSNMMCEAARVECEEGQTLHDPIQSFVPQPPPFSR

SEQ ID NO: 107811 - protein, 188 aa, Arabidopsis thaliana
  peptide (1)..(188): Ceres Seq. ID no. 13651743
MNEEEDKDQDRVTRGCSHTHSCNPPGPEDASHSHTCFHAHTHLIISDQQENDHSDSSNKKRLCGNREAVRKYREKKKARTAYLEDEVMRLQSLNEQFLRKLQSQEMVETELIRLRALLVEMQGKIEVELCSFSFQKQCNGSGFVFKEDGCNLATSNMMCEAARVECEEGQTLHDPIQSFVPQPPPFSR

SEQ ID NO: 107812 - DNA, 1770 bp, Arabidopsis thaliana
  misc_feature (1)..(1770): Ceres Seq. ID no. 13651747
  misc_feature (1)..(1770): Ortholog of  Ceres SEQ ID NO 13654989 as cited in SEQ ID NO 63117
  misc_feature (1)..(1770): Ortholog of  Ceres SEQ ID NO 13584744 as cited in SEQ ID NO 69137
aacgttttgtgtctttttccatcttaatctgctttctcgacaaagaaaagcagagaaagagagacttgttatactaaactcaatctctggcttttagttttgttgtctctctccttcagtttccaggaaaaaatctctttctcattaagctgttatatagatctgtgttcatactcttcttccacaatctaacccaaaaaaaaaaaaactttatttctctctacaaatttcatttgttccattttctcaattttagaacttaagaaacccaaaaagcaaatttttagtacattttctggtttaactaaagtaattaatttttgtgttttccatcaaaattccactggttttctttagaatttttttatctctctttaagacatgaactgtctgttcttgttcaaatcaaagaaacccagaaagcaacagaaagacaacaacaagaacaaaagaaaaggtaaagagttgttacaaaactcagctccagaactgacgaatcggagtgaaacgtcttcgtttaatctccagacaccaagatcgttgccttctccaagaagtatcaaagatttgtatacagagagagaacaaaatcttagggttttttcttacgaagaactcagtaaagccacttatgtgtttagcagaaagcttgtgatcggtgaaggtggatttggtattgtttataaaggaaagattctcagcaatggagattcttctgatcctccacttgtcgttgccatcaagaaactcaatcgacaaggtttacagggtcacaagcaatggctagcagaggttcagtttcttggagtagtgaatcatccgaacgttgtgaagctcataggttattgctcggaagacggcgagaccgggatcgagaggcttttggtttatgagtacatgtcgaatcgaagtttagaagaccatctcttccctcgtcgatcacacacattaccgtggaaaaaaagactcgagatcatgcttggtgctgctgaaggattgacttatttacatgatcttaaggtgatatatagagatttcaaatcctctaatgtgcttttagacgatcaattctgtccaaaattatcggactttgggcttgccagagaaggacctgatggcgacaatactcatgtcactaccgcaagagttggaacacacggctatgcggctccggaatacgtgcaaacaggtcatcttcggttaaagagcgacgtctatagcttcggtgttgtgctctacgagatcataaccggacgcagaaccattgagaggaacaagccagtggctgaacgaaggctattggattgggtcaaagagtatcctgctgatagtcaacgtttcagcatgatcgttgaccctcggttacgcaacaattatccagctgctggagctaggagtttggctaaattggctgatctttgcctgaaaaagaacgataaagagcgacctacgatggaaattgtagtggaaagattgaaaaagattatcgaagaatcggatagtgaagattatccgatggctacgactacgaccaaggaaagtagtcaggtaaggaggagacaagttgcaaaacctgagaaacaaagtttgagaggggttagtgtcagaggatgattttgagtttagaagtttttttgcaagtttatatattataaataagtttatgcaatttgttggtttattgtgagattagtagagaaaatgtatcttattgtgtgttttgtaaataaaattcaatacggtgaatgagaatcattgagatcaagtttt

SEQ ID NO: 107813 - protein, 410 aa, Arabidopsis thaliana; identical to SEQ ID NO: 38356
  peptide (1)..(410): Ceres Seq. ID no. 13651748

SEQ ID NO: 107814 - protein, 238 aa, Arabidopsis thaliana; identical to SEQ ID NO: 38357
  peptide (1)..(238): Ceres Seq. ID no. 13651749

SEQ ID NO: 107815 - protein, 212 aa, Arabidopsis thaliana; identical to SEQ ID NO: 38358
  peptide (1)..(212): Ceres Seq. ID no. 13651750

SEQ ID NO: 107816 - DNA, 497 bp, Arabidopsis thaliana
  misc_feature (1)..(497): Ceres Seq. ID no. 13651751
  misc_feature (1)..(497): Ortholog of  Ceres SEQ ID NO 13648206 as cited in SEQ ID NO 20374
aattttctaaagaagaaacaaattaaacctcaccgacggattcaattctctcgttctcaggccgtcttcatcgccggagcgttttcttacgaaaagaatgggcttctggacattgttaaaaggtctgctgctctttgcaaatgcactggcaatcctcaacgaagaccgtttccttgttccaagaggatggacactcggagaactccaccaaaccgatagaagaaactctcccaaaggccaaatcattggtctgatccatgcctgccagtacatgaggctacccctcatgctcattaacacagcagtcatcgtcttgaagcttatctccggttgaagattttgtgtagatgaagataaactacattgcgttcttcaaatgattgtgattagttacaaatctattttgtgtaggagttggaatttgtttttgtcatccctcgcactcaagtttggtgtgcattctacaacattcttctcatatttttacatgccaaatc

SEQ ID NO: 107817 - protein, 78 aa, Arabidopsis thaliana
  peptide (1)..(78): Ceres Seq. ID no. 13651752
MGFWTLLKGLLLFANALAILNEDRFLVPRGWTLGELHQTDRRNSPKGQIIGLIHACQYMRLPLMLINTAVIVLKLISG

SEQ ID NO: 107818 - protein, 72 aa, Arabidopsis thaliana
  peptide (1)..(72): Ceres Seq. ID no. 13651753
NFLKKKQIKPHRRIQFSRSQAVFIAGAFSYEKNGLLDIVKRSAALCKCTGNPQRRPFPCSKRMDTRRTPPNR

SEQ ID NO: 107819 - protein, 40 aa, Arabidopsis thaliana
  peptide (1)..(40): Ceres Seq. ID no. 13651754
MIVISYKSILCRSWNLFLSSLALKFGVHSTTFFSYFYMPN

SEQ ID NO: 107820 - DNA, 1372 bp, Arabidopsis thaliana
  misc_feature (1)..(1372): Ceres Seq. ID no. 13651774
  misc_feature (1)..(1372): Ortholog of  Ceres SEQ ID NO 13590671 as cited in SEQ ID NO 68208
accgatacaagatcgaagctttgccttctgtttcttcgaaaatctaccatggctgctctacaataccttgaatcgcagaaaaatgcgcacccagagcttggtgagtggtacaattcgctcgcagatctgtaccagaagaagctctggcatcagctcactcttaagctcgagcagttcatcgctctctctgtctttcaggctggagatgctttaatacagctttacaacaatttcatcactgactttgagacgaggatcaatcttctgaagcttgcgcatttcgctgttgtagtctcccgacagtatcctgagaaagaagctgcagttagttatcttgaaggagtgattgagaagcttaaagctactaaagagtcaaggataaatgaaccaattagctatatagaaacacaaatagctttgttcaagcttgagcaaggtgaccagaaggagtgcaagaaaatcttggacgatggaaaaagcctgcttgatagtatgactgacattgatccatcagtttatgccaacttcttttgggtctcttctcagtaccataaagtccgtcaagagttctctgagttctataaaaatgctcttctttacctcgcttatacgtctgtggactcactctcggaatcatttaagctggatttggcttttgatttgtcgctttcagctctacttggggagaatatctataactttggggaactgttagcccatccaattttgaaaagtctgcttggaacaaatgtggaatggctttaccacattctacaagcattcaaccacggagatttagttcagtaccaagaactctgtcgtgtgcacaatgcatcgttgagtgctcaaccagcactggttgagaatgagaagaaactattagagaagatcaacattctctgccttattgagatcattttcagccgacctgctgaagataggaccatacctttgagtgtcattgccgagcgtactaaactttcaatcgaagatgttgagcaccttctcatgaagagcttatcggtgcacttgatagagggaatactagatcaggtgaatggaacagtttacgtctcatgggcgcaaccgagggtgttaggaataccgcagatcaagtcattgagggatcagctagacagctgggtcgataaggttcacaccacattgttatctgttgaggccgagacacctgatcttgttgcagcttaaactcttctttcctcttttttccttcactgttcgtttaagctacagattgtaacattctctgaggattaaatgcaacttccttttaagtttttaggtattacagttatacttttgaactttgttctccacagacacatgaatctatcctattaagttgagtttc

SEQ ID NO: 107821 - protein, 402 aa, Arabidopsis thaliana
  peptide (1)..(402): Ceres Seq. ID no. 13651775
TDTRSKLCLLFLRKSTMAALQYLESQKNAHPELGEWYNSLADLYQKKLWHQLTLKLEQFIALSVFQAGDALIQLYNNFITDFETRINLLKLAHFAVVVSRQYPEKEAAVSYLEGVIEKLKATKESRINEPISYIETQIALFKLEQGDQKECKKILDDGKSLLDSMTDIDPSVYANFFWVSSQYHKVRQEFSEFYKNALLYLAYTSVDSLSESFKLDLAFDLSLSALLGENIYNFGELLAHPILKSLLGTNVEWLYHILQAFNHGDLVQYQELCRVHNASLSAQPALVENEKKLLEKINILCLIEIIFSRPAEDRTIPLSVIAERTKLSIEDVEHLLMKSLSVHLIEGILDQVNGTVYVSWAQPRVLGIPQIKSLRDQLDSWVDKVHTTLLSVEAETPDLVAA

SEQ ID NO: 107822 - protein, 386 aa, Arabidopsis thaliana
  peptide (1)..(386): Ceres Seq. ID no. 13651776
MAALQYLESQKNAHPELGEWYNSLADLYQKKLWHQLTLKLEQFIALSVFQAGDALIQLYNNFITDFETRINLLKLAHFAVVVSRQYPEKEAAVSYLEGVIEKLKATKESRINEPISYIETQIALFKLEQGDQKECKKILDDGKSLLDSMTDIDPSVYANFFWVSSQYHKVRQEFSEFYKNALLYLAYTSVDSLSESFKLDLAFDLSLSALLGENIYNFGELLAHPILKSLLGTNVEWLYHILQAFNHGDLVQYQELCRVHNASLSAQPALVENEKKLLEKINILCLIEIIFSRPAEDRTIPLSVIAERTKLSIEDVEHLLMKSLSVHLIEGILDQVNGTVYVSWAQPRVLGIPQIKSLRDQLDSWVDKVHTTLLSVEAETPDLVAA

SEQ ID NO: 107823 - protein, 238 aa, Arabidopsis thaliana
  peptide (1)..(238): Ceres Seq. ID no. 13651777
MTDIDPSVYANFFWVSSQYHKVRQEFSEFYKNALLYLAYTSVDSLSESFKLDLAFDLSLSALLGENIYNFGELLAHPILKSLLGTNVEWLYHILQAFNHGDLVQYQELCRVHNASLSAQPALVENEKKLLEKINILCLIEIIFSRPAEDRTIPLSVIAERTKLSIEDVEHLLMKSLSVHLIEGILDQVNGTVYVSWAQPRVLGIPQIKSLRDQLDSWVDKVHTTLLSVEAETPDLVAA

SEQ ID NO: 107824 - DNA, 1185 bp, Arabidopsis thaliana
  misc_feature (1)..(1185): Ceres Seq. ID no. 13651801
  misc_feature (1)..(1185): Ortholog of  Ceres SEQ ID NO 13596601 as cited in SEQ ID NO 62486
attttccgcaaatcggattcatgtttttgctttatcgtaggcttccttcatttgcacgaacaacaacaacaacccttctctgcaaatctatggagcctgcgataacagcgacttcttcttcttctttcggtggtggctcttctcgtctcgccgctttagcccagcaacttcgccaatacaagcccccaccttcttcatcgttcgatgactccgaggagatgcagacagatcaggagaccgctgggaaagtcgtttctcaggttgggtttcaggaatctattgctcctctttcgaaagaccctgataggtttaaacccaagagagccgctgtgttgatctgtctctttgaaggagatgatggtgatttgcgtgttattcttactaagagatcttccaaattgtctactcactctggagaagtttcattgccaggtggtaaagcggaggaggatgataaagatgatgggatgactgctaccagagaggctgaggaagagattggattggacccttctcttgttgatgttgttacttctcttgaaccatttctgtctaagcatcttcttagagtaattcctgtgataggcatcttgagggacaaaaataaattcaatccgataccaaatcctggggaagtggaagctgtgtttgatgcacccttggaaatgttccttaaggatgagaatcgaagatctgaagagagagagtggatgggtgaaaagtatttgatccattactttgactacagaacaggagataaggattatatgatatggggtttaactgctgggattttgatcagagctgcacctgtgacttatgaaagaccacctgcttttatcgagcagtgcccgaagtttaagtaccctaaaatgtgaatggctgaatgcagaacttggctacttgcttatatatatgcagacgcagtagctgaagctccaattcatttcctgctggggcatctcataacaggcttcatttctgagttgttcccacaggatgctcaatggtgattcagagaaaagttggcttgttatgattctaggcaaacatcaccctcaattgtgaatttggaggaatatttgtactcagtatttaccttcaaacgctcatttttcattgtatacttgttatcttctatttgtatactgaaccaatttcaaagcaaacttgtcttatgaggct

SEQ ID NO: 107825 - protein, 291 aa, Arabidopsis thaliana
  peptide (1)..(291): Ceres Seq. ID no. 13651802
FPQIGFMFLLYRRLPSFARTTTTTLLCKSMEPAITATSSSSFGGGSSRLAALAQQLRQYKPPPSSSFDDSEEMQTDQETAGKVVSQVGFQESIAPLSKDPDRFKPKRAAVLICLFEGDDGDLRVILTKRSSKLSTHSGEVSLPGGKAEEDDKDDGMTATREAEEEIGLDPSLVDVVTSLEPFLSKHLLRVIPVIGILRDKNKFNPIPNPGEVEAVFDAPLEMFLKDENRRSEEREWMGEKYLIHYFDYRTGDKDYMIWGLTAGILIRAAPVTYERPPAFIEQCPKFKYPKM

SEQ ID NO: 107826 - protein, 285 aa, Arabidopsis thaliana
  peptide (1)..(285): Ceres Seq. ID no. 13651803
MFLLYRRLPSFARTTTTTLLCKSMEPAITATSSSSFGGGSSRLAALAQQLRQYKPPPSSSFDDSEEMQTDQETAGKVVSQVGFQESIAPLSKDPDRFKPKRAAVLICLFEGDDGDLRVILTKRSSKLSTHSGEVSLPGGKAEEDDKDDGMTATREAEEEIGLDPSLVDVVTSLEPFLSKHLLRVIPVIGILRDKNKFNPIPNPGEVEAVFDAPLEMFLKDENRRSEEREWMGEKYLIHYFDYRTGDKDYMIWGLTAGILIRAAPVTYERPPAFIEQCPKFKYPKM

SEQ ID NO: 107827 - protein, 262 aa, Arabidopsis thaliana
  peptide (1)..(262): Ceres Seq. ID no. 13651804
MEPAITATSSSSFGGGSSRLAALAQQLRQYKPPPSSSFDDSEEMQTDQETAGKVVSQVGFQESIAPLSKDPDRFKPKRAAVLICLFEGDDGDLRVILTKRSSKLSTHSGEVSLPGGKAEEDDKDDGMTATREAEEEIGLDPSLVDVVTSLEPFLSKHLLRVIPVIGILRDKNKFNPIPNPGEVEAVFDAPLEMFLKDENRRSEEREWMGEKYLIHYFDYRTGDKDYMIWGLTAGILIRAAPVTYERPPAFIEQCPKFKYPKM

SEQ ID NO: 107828 - DNA, 2095 bp, Arabidopsis thaliana
  misc_feature (1)..(2095): Ceres Seq. ID no. 13651809
  misc_feature (1)..(2095): Ortholog of  Ceres SEQ ID NO 13586013 as cited in SEQ ID NO 1182
acgttgatcacattcttctctatcccaccaattccgatgtccctcgccgtcaagatcattcctctccagtatcccgattccacctcttctgatcctcactgtcactccattccctttaatgatttcttctcccgatggacggcgaagatcaagcgcatgacgttcttcgactggattgatgcaatatttccttgcttcctttggattcggacttaccggtggcatcagtactttaagctcgatcttatggctggtatcaccgtcggtatcatgcttgttccccaggcaatgtcgtatgcaaggttagctgggcttcaaccaatatacggtctatactcctcatttgtgccggtattcgtgtatgccgtcttcggttcatcccgtcagcttgcagttggacctgtagcattagtttcccttctcgtttctaatgccttgagtggaattgttgatccatctgaagaattatacactgagcttgccattttgttggctcttatggtcggaatatttgagagcattatggggttcttgaggcttggatggcttattcgtttcataagtcactcagtcatttctggatttacaactgcttcagctgttgtaattgggttatcccaactgaaatacttcctagggtatagcgtttctcggagcagcaagattatgccagtaattgatagcataatagctggagctgatcagtttaagtggccacctttcttgttgggatgtaccattctggtgatccttttagtaatgaagcatgtgggaaaagcaaagaaggaacttcggttcatacgagcagcaggaccgctcacaggtcttgctcttggtacaatcattgcaaaagtgttccatccaccttccatcacactggtgggagatatacctcagggacttccaaagttttctttcccaaaaagttttgatcatgccaaattactgcttccaacatcggctctcattactggtgttgccatcttggaatctgtaggtattgcgaaagcactagccgcgaaaaatagatacgaattggattcaaattcagagttgtttggtcttggcgttgcaaatatatttgggtcactattctctgcatatccaactacaggatccttttctaggtcagctgtgaatagcgaaagtgaagccaagactggtctatcaggccttgtaacaggaatcatcattggatgttctctactgttcttgaccccaatgttcaaatttataccacagtgtgctttagcagcaatagttatctctgctgttagtggtttggtggactatgaaggggcaatctttctgtggcgtgtggacaagagagattttactctttggaccatcactagcaccaccactttgttctttggaatagagattggggtcctcattggtgttggtttttcacttgcatttgttatacacgagtctgcaaaccctcatatagctgtcttggggcgtcttccagggaccactgtgtacagaaacatgaaacagtatccagaggcatacacttacaacgggattgtgattgttcgaatcgatgctcccatttattttgccaacataagctacatcaaggacaggctacgagaatatgaagttgctatcgacaaacacacaagcaagggcccagatatggagaggatctactttgttatcctggaaatgtctcctgtcacatacatcgactcgagcgctgtagaagctttaaaagatttgtacgaggagtataaaacaaggggcattcagctagcgatttcgaacccaaacaaagaggttctcttgactctagcaagagcaggcattgtggaacttattggcaaagaatggttcttcgtgagagtacatgacgcagtccaagtttgtgttcattacgtcaatagacccacagatgtagaagaaagcagcaaaccaagcttatggagaagaagcggcctgaaaaactcatcgacctacactgaagttgaatcgaacatagttttagaggaaccattgttgtcaagagagaaatagagacattgaacacttcgattctttttacaataatgtaatgtatgtatcaaataaagcattcactttggttgag

SEQ ID NO: 107829 - protein, 673 aa, Arabidopsis thaliana
  peptide (1)..(673): Ceres Seq. ID no. 13651810
TLITFFSIPPIPMSLAVKIIPLQYPDSTSSDPHCHSIPFNDFFSRWTAKIKRMTFFDWIDAIFPCFLWIRTYRWHQYFKLDLMAGITVGIMLVPQAMSYARLAGLQPIYGLYSSFVPVFVYAVFGSSRQLAVGPVALVSLLVSNALSGIVDPSEELYTELAILLALMVGIFESIMGFLRLGWLIRFISHSVISGFTTASAVVIGLSQLKYFLGYSVSRSSKIMPVIDSIIAGADQFKWPPFLLGCTILVILLVMKHVGKAKKELRFIRAAGPLTGLALGTIIAKVFHPPSITLVGDIPQGLPKFSFPKSFDHAKLLLPTSALITGVAILESVGIAKALAAKNRYELDSNSELFGLGVANIFGSLFSAYPTTGSFSRSAVNSESEAKTGLSGLVTGIIIGCSLLFLTPMFKFIPQCALAAIVISAVSGLVDYEGAIFLWRVDKRDFTLWTITSTTTLFFGIEIGVLIGVGFSLAFVIHESANPHIAVLGRLPGTTVYRNMKQYPEAYTYNGIVIVRIDAPIYFANISYIKDRLREYEVAIDKHTSKGPDMERIYFVILEMSPVTYIDSSAVEALKDLYEEYKTRGIQLAISNPNKEVLLTLARAGIVELIGKEWFFVRVHDAVQVCVHYVNRPTDVEESSKPSLWRRSGLKNSSTYTEVESNIVLEEPLLSREK

SEQ ID NO: 107830 - protein, 661 aa, Arabidopsis thaliana
  peptide (1)..(661): Ceres Seq. ID no. 13651811
MSLAVKIIPLQYPDSTSSDPHCHSIPFNDFFSRWTAKIKRMTFFDWIDAIFPCFLWIRTYRWHQYFKLDLMAGITVGIMLVPQAMSYARLAGLQPIYGLYSSFVPVFVYAVFGSSRQLAVGPVALVSLLVSNALSGIVDPSEELYTELAILLALMVGIFESIMGFLRLGWLIRFISHSVISGFTTASAVVIGLSQLKYFLGYSVSRSSKIMPVIDSIIAGADQFKWPPFLLGCTILVILLVMKHVGKAKKELRFIRAAGPLTGLALGTIIAKVFHPPSITLVGDIPQGLPKFSFPKSFDHAKLLLPTSALITGVAILESVGIAKALAAKNRYELDSNSELFGLGVANIFGSLFSAYPTTGSFSRSAVNSESEAKTGLSGLVTGIIIGCSLLFLTPMFKFIPQCALAAIVISAVSGLVDYEGAIFLWRVDKRDFTLWTITSTTTLFFGIEIGVLIGVGFSLAFVIHESANPHIAVLGRLPGTTVYRNMKQYPEAYTYNGIVIVRIDAPIYFANISYIKDRLREYEVAIDKHTSKGPDMERIYFVILEMSPVTYIDSSAVEALKDLYEEYKTRGIQLAISNPNKEVLLTLARAGIVELIGKEWFFVRVHDAVQVCVHYVNRPTDVEESSKPSLWRRSGLKNSSTYTEVESNIVLEEPLLSREK

SEQ ID NO: 107831 - protein, 621 aa, Arabidopsis thaliana; identical to SEQ ID NO: 90068
  peptide (1)..(621): Ceres Seq. ID no. 13651812

SEQ ID NO: 107832 - DNA, 2097 bp, Arabidopsis thaliana
  misc_feature (1)..(2097): Ceres Seq. ID no. 13651817
  misc_feature (1)..(2097): Ortholog of  Ceres SEQ ID NO 13596319 as cited in SEQ ID NO 67933
ggtgttggtggtgaccattcatgggttgtttaagaagcttagtaagaaggaaacaattcgactcttcaaatggcaaagcagagactcatcatcatcaccaacagcttgcaaaagcgttgacctttcctcacttgattgccattggtgttggatcaacaattggagcaggggtttatattcttgtgggaacagtagctagagagcattcaggacctgctcttgctttatccttccttatagctggaatttctgctgccctttctgcgttttgttatgcggaactatctagtcgttttccctctgctgggagtgcctatcattattcttacatttgcattggtgaaggtgttgcgtggttgattggctgggcgctgattttggaatacacaattggtggttcaacagttgcccgcggcatatctccaaatctggcaatgattttcggtggtgaagattgtctgcctacaatattagctcgtcatcaaatcccaggccttgatattgttgttgacccgtgtgctgctgtgctagtgttcattgtaacaggactttgttgccttggagtaaaggagagcacatttgctcagggaattgtaacaacagcaaatgtctttgtcatgatatttgtcatagtagctggaagctatttgtgtttcaagacaggttgggttggttatgaacttccaacggggtattttccttacggggttgatggaatgcttactggatctgctactgtcttctttgcctacatcgggtttgatacagttgcaagtatggcagaggaggtgaaaaatccccggcgggatttaccgctcggtattgggatttcgctcctgctttgttgtttgctgtacatgatggtgtctgttgttattgttggtttagtgccgtattatgctatggaccctgacactccaatatcatccgcattttctagtcatggaattcaatgggctgcatatttgataaatttaggtgctgtcatggctctctgttctgcattaatgggctccattctccctcagccgcggattctgatggcaatggctagggatggtctcttgccttcatatttctcatatgtgaatcaacgcacgcaggttccaattaatggcaccataaccactggtgtttgtgcagcaatcttagctttctttatggatgtttcgcaactggcgggaatggtgagtgtcgggacacttgttgcatttacaatggttgcaatatcattgttgatagtcagatatgttgttcctccagatgaggtacctcttccctcatcacttcaagaaaactcatccagtcacgtcggaacttccatccgtagtaaacaacctttacttggcaaagtggatgattcagttgtcgataaggaaaatgctccaggaagttgggttctcaacaaaaaaaacagacggaaatttgctggttggagcattatgttcacttgtattggaaacttccttttaagctatgcagcgtcaagcttcctcttgccaggactcctccgatattctctatgtggtgttggtggattgttccttcttgtcggtttgattgttctgatttgcatagatcaggatgatgctagacacagttttgggcattctggaggcttcatttgcccgtttgttccgcttttgcctatagtttgcattcttatcaacatgtatctcttggtaaaccttggagctgcgacgtgggttcgtgtatcggtttggctgttcctcggagtggttgtttacattttctatgggagaagaaacagctctcttgtgaatgctgtttatgtctccactgctcatctccaggagattcgtcgcacttctggacattctttggcttaagtctacatgaaaccatcaatggaagctcaaggaagtgggagtttcctttgtaaaatatgttcaacaaaatctgtataataatatatttttgagattggattatcctgtgtaaatacaaagttcaatgccactgctcataggcattgtatattttttttaaaacctaaatggtctaaatgttatctggtggactattgtatattttttgaactgctgaatttggtggactatgttgaatctggcgact

SEQ ID NO: 107833 - protein, 609 aa, Arabidopsis thaliana
  peptide (1)..(609): Ceres Seq. ID no. 13651818
MGCLRSLVRRKQFDSSNGKAETHHHHQQLAKALTFPHLIAIGVGSTIGAGVYILVGTVAREHSGPALALSFLIAGISAALSAFCYAELSSRFPSAGSAYHYSYICIGEGVAWLIGWALILEYTIGGSTVARGISPNLAMIFGGEDCLPTILARHQIPGLDIVVDPCAAVLVFIVTGLCCLGVKESTFAQGIVTTANVFVMIFVIVAGSYLCFKTGWVGYELPTGYFPYGVDGMLTGSATVFFAYIGFDTVASMAEEVKNPRRDLPLGIGISLLLCCLLYMMVSVVIVGLVPYYAMDPDTPISSAFSSHGIQWAAYLINLGAVMALCSALMGSILPQPRILMAMARDGLLPSYFSYVNQRTQVPINGTITTGVCAAILAFFMDVSQLAGMVSVGTLVAFTMVAISLLIVRYVVPPDEVPLPSSLQENSSSHVGTSIRSKQPLLGKVDDSVVDKENAPGSWVLNKKNRRKFAGWSIMFTCIGNFLLSYAASSFLLPGLLRYSLCGVGGLFLLVGLIVLICIDQDDARHSFGHSGGFICPFVPLLPIVCILINMYLLVNLGAATWVRVSVWLFLGVVVYIFYGRRNSSLVNAVYVSTAHLQEIRRTSGHSLA

SEQ ID NO: 107834 - protein, 471 aa, Arabidopsis thaliana
  peptide (1)..(471): Ceres Seq. ID no. 13651819
MIFGGEDCLPTILARHQIPGLDIVVDPCAAVLVFIVTGLCCLGVKESTFAQGIVTTANVFVMIFVIVAGSYLCFKTGWVGYELPTGYFPYGVDGMLTGSATVFFAYIGFDTVASMAEEVKNPRRDLPLGIGISLLLCCLLYMMVSVVIVGLVPYYAMDPDTPISSAFSSHGIQWAAYLINLGAVMALCSALMGSILPQPRILMAMARDGLLPSYFSYVNQRTQVPINGTITTGVCAAILAFFMDVSQLAGMVSVGTLVAFTMVAISLLIVRYVVPPDEVPLPSSLQENSSSHVGTSIRSKQPLLGKVDDSVVDKENAPGSWVLNKKNRRKFAGWSIMFTCIGNFLLSYAASSFLLPGLLRYSLCGVGGLFLLVGLIVLICIDQDDARHSFGHSGGFICPFVPLLPIVCILINMYLLVNLGAATWVRVSVWLFLGVVVYIFYGRRNSSLVNAVYVSTAHLQEIRRTSGHSLA

SEQ ID NO: 107835 - protein, 410 aa, Arabidopsis thaliana
  peptide (1)..(410): Ceres Seq. ID no. 13651820
MIFVIVAGSYLCFKTGWVGYELPTGYFPYGVDGMLTGSATVFFAYIGFDTVASMAEEVKNPRRDLPLGIGISLLLCCLLYMMVSVVIVGLVPYYAMDPDTPISSAFSSHGIQWAAYLINLGAVMALCSALMGSILPQPRILMAMARDGLLPSYFSYVNQRTQVPINGTITTGVCAAILAFFMDVSQLAGMVSVGTLVAFTMVAISLLIVRYVVPPDEVPLPSSLQENSSSHVGTSIRSKQPLLGKVDDSVVDKENAPGSWVLNKKNRRKFAGWSIMFTCIGNFLLSYAASSFLLPGLLRYSLCGVGGLFLLVGLIVLICIDQDDARHSFGHSGGFICPFVPLLPIVCILINMYLLVNLGAATWVRVSVWLFLGVVVYIFYGRRNSSLVNAVYVSTAHLQEIRRTSGHSLA

SEQ ID NO: 107836 - DNA, 803 bp, Arabidopsis thaliana
  misc_feature (1)..(803): Ceres Seq. ID no. 13651839
  misc_feature (1)..(803): Ortholog of  Ceres SEQ ID NO 15171426 as cited in SEQ ID NO 51543
  misc_feature (1)..(803): Ortholog of  Ceres SEQ ID NO 14311780 as cited in SEQ ID NO 59241
  misc_feature (1)..(803): Ortholog of  Ceres SEQ ID NO 13584630 as cited in SEQ ID NO 65282
cttacgatcgctatctccagagcgtgcaatcaggagaaggtggttctgtttccatgggaagatcaggaggaggaggaggaggaggaggaggtaacgttcaaaccatagatgattttatgttgagacgtggtggagttctccctttagaccatggtccaaatggtcacaccattggttttgatcccccagaacctgttggtaggcgtaacctaccttcagatgcatccaacactttatatgttgaaggacttccttctaattgctctaggagggaagtagctcatatatttcgaccttttgtaggatacagagaagtgagacttgtgaccaaagactccaaacatcggaacggagatcctattgttctttgctttgttgattttacaaaccctgcctgtgctgcgactgctctgagcgccttacaaggctatcgaatggacgaaaacgagtctgattccaagttcctgcggctccagttttctaggaaaccaggttcaagaccaggacaaagaggaagaaggtgatgactcagggacattgtggtacgtcaaccaaatggtgacttgtggtatctcctttgaaggaaatatacatcctccctttccaagtataatctcaatgaaatcgcacattacatcacttatgtccttgaagcaacctgagtcgagagaaacaaagatgcgcggagagtgtagaatatgaggttatagaaactgaaaaagactcttttaacatatatatactgtttttgttcccttcctagatttcaagctcatatgtcatgttatcaagttgtgttgtag

SEQ ID NO: 107837 - protein, 173 aa, Arabidopsis thaliana
  peptide (1)..(173): Ceres Seq. ID no. 13651840
YDRYLQSVQSGEGGSVSMGRSGGGGGGGGGNVQTIDDFMLRRGGVLPLDHGPNGHTIGFDPPEPVGRRNLPSDASNTLYVEGLPSNCSRREVAHIFRPFVGYREVRLVTKDSKHRNGDPIVLCFVDFTNPACAATALSALQGYRMDENESDSKFLRLQFSRKPGSRPGQRGRR

SEQ ID NO: 107838 - protein, 156 aa, Arabidopsis thaliana
  peptide (1)..(156): Ceres Seq. ID no. 13651841
MGRSGGGGGGGGGNVQTIDDFMLRRGGVLPLDHGPNGHTIGFDPPEPVGRRNLPSDASNTLYVEGLPSNCSRREVAHIFRPFVGYREVRLVTKDSKHRNGDPIVLCFVDFTNPACAATALSALQGYRMDENESDSKFLRLQFSRKPGSRPGQRGRR

SEQ ID NO: 107839 - protein, 135 aa, Arabidopsis thaliana
  peptide (1)..(135): Ceres Seq. ID no. 13651842
MLRRGGVLPLDHGPNGHTIGFDPPEPVGRRNLPSDASNTLYVEGLPSNCSRREVAHIFRPFVGYREVRLVTKDSKHRNGDPIVLCFVDFTNPACAATALSALQGYRMDENESDSKFLRLQFSRKPGSRPGQRGRR

SEQ ID NO: 107840 - DNA, 1691 bp, Arabidopsis thaliana
  misc_feature (1)..(1691): Ceres Seq. ID no. 13651850
  misc_feature (1)..(1691): Ortholog of  Ceres SEQ ID NO 13594209 as cited in SEQ ID NO 59089
  misc_feature (1)..(1691): Ortholog of  Ceres SEQ ID NO 13502874 as cited in SEQ ID NO 66298
  misc_feature (1)..(1691): Ortholog of  Ceres SEQ ID NO 12614124 as cited in SEQ ID NO 68392
aattcgtcgagaaccaaaatggcaatcatcctctgtttcctcattctcttaccccttatcttaatcttcttgaaaaaactcaaacattcgaaatggaagcttcctccggggccaccaaagcttccgttcattggaaacttacaccaactccaagaactacctcccaggaatctcaaccacaagtacgggccagtgatacttctccgtttcggattcgtccccttggtcgtgatctcatctaaagaagcagcagaggaagttctcaagattcacgatcttgaatgttgtagccgaccagagacggccgggactagaaagatctcttacaactttaaagacatcggattcgcgccttacggtgaggaatggaaggccatgcgaaagctctcggtggtcgaactcttcaccgccaaaaaacatcagtattttaggtctatcagagaggaagagaatgacttgttggtcaagaaactaacagaattggctctgacacgatccccggtgaatttgaagaagacccttttcactttagtcgggagtattgtgtgtcggatcggattcgggtttaatcttcatgagtgtgagttcatcgatgaaaatagcatctccgaccttgttgacaagtctgagatacttgagatgacttctatgttctctgatttctttccaggaggaatcggtagattcatcgattggatctccggtcaaaacaagcgattcgataatgttttctcggacctcgacactttctttcaaaacattcttgattatcatcttaagcctggaagaaaagtagcagatagctctgatataatcgacgtggtgatcaacatgataaagaagcaagagaaagatggagactctttcaagctcacaacggatcatcttaaagggatgatctcggtaatgtttttggacctttattagttgtgtagactaatcttcccttttttaattaaatattcacacaatttttgttctgtcaggacatatttctagctggagttagcacaagtgcctccacactgatatgggcgataacagagttagttaggaaccgtaaagtgatgaagaaagtgcaagaagagattaggacaacactcggagacaagaaggagagaatcacagagcaagatctcaccaatctccattacttcaagcttgtggtcaaagagatattcagattacacccagcagttccatttttgctaccaagagagacattatctcatgtcaagattcaaggctacgacattcccgccaaaacccagatcatgatcaacgtctatgcgattgctcgcgatccaaaactttggacaaacccagatgagtttaaccctgacaggttcctagacagttccatagattacaaaggactaaattttgaactgttaccgtttgggtctggtaggagaatctgtccaggaatgacgatgggaatcacacttgttgaatttgctttattgaatttgctttacttctttggttggggtttgccggagaaggaagaggcggacaagatcatcaccggcaatggagttgctgttggcctagttcaagttcttctccactgaaaatctgatagatgtttctttttttggtttgcaacatttttttagtattggttatattgaatgcttgtgttttaaccttgcttttttctttagagacattctattaattagtaaccc

SEQ ID NO: 107841 - protein, 308 aa, Arabidopsis thaliana
  peptide (1)..(308): Ceres Seq. ID no. 13651851
NSSRTKMAIILCFLILLPLILIFLKKLKHSKWKLPPGPPKLPFIGNLHQLQELPPRNLNHKYGPVILLRFGFVPLVVISSKEAAEEVLKIHDLECCSRPETAGTRKISYNFKDIGFAPYGEEWKAMRKLSVVELFTAKKHQYFRSIREEENDLLVKKLTELALTRSPVNLKKTLFTLVGSIVCRIGFGFNLHECEFIDENSISDLVDKSEILEMTSMFSDFFPGGIGRFIDWISGQNKRFDNVFSDLDTFFQNILDYHLKPGRKVADSSDIIDVVINMIKKQEKDGDSFKLTTDHLKGMISVMFLDLY

SEQ ID NO: 107842 - protein, 302 aa, Arabidopsis thaliana
  peptide (1)..(302): Ceres Seq. ID no. 13651852
MAIILCFLILLPLILIFLKKLKHSKWKLPPGPPKLPFIGNLHQLQELPPRNLNHKYGPVILLRFGFVPLVVISSKEAAEEVLKIHDLECCSRPETAGTRKISYNFKDIGFAPYGEEWKAMRKLSVVELFTAKKHQYFRSIREEENDLLVKKLTELALTRSPVNLKKTLFTLVGSIVCRIGFGFNLHECEFIDENSISDLVDKSEILEMTSMFSDFFPGGIGRFIDWISGQNKRFDNVFSDLDTFFQNILDYHLKPGRKVADSSDIIDVVINMIKKQEKDGDSFKLTTDHLKGMISVMFLDLY

SEQ ID NO: 107843 - protein, 183 aa, Arabidopsis thaliana
  peptide (1)..(183): Ceres Seq. ID no. 13651853
MRKLSVVELFTAKKHQYFRSIREEENDLLVKKLTELALTRSPVNLKKTLFTLVGSIVCRIGFGFNLHECEFIDENSISDLVDKSEILEMTSMFSDFFPGGIGRFIDWISGQNKRFDNVFSDLDTFFQNILDYHLKPGRKVADSSDIIDVVINMIKKQEKDGDSFKLTTDHLKGMISVMFLDLY

SEQ ID NO: 107844 - DNA, 4253 bp, Arabidopsis thaliana
  misc_feature (1)..(4253): Ceres Seq. ID no. 13651857
  misc_feature (1)..(4253): Ortholog of  Ceres SEQ ID NO 14304811 as cited in SEQ ID NO 53097
actaacagttacgctttcgtcttcctcgtcgcttcctcaaaatccttaacctcgaaaactctgaagatcttccagagagtctcagcgagtgagagagaaagctatttgttctctcgtgaagtccgagtgttggaaattgacaactggatttatggttggatttggtgtgtaagtgtgtaagcgattaggttttgaatcagcggaatcgaaaaaatggtattcaagaacaaactcttcttctcttcgaagaaatctggatcttctagtcccgatagctctaatagtcccagatctgttggctccaactctccgatacgatcagataagaagaagtctaaatccgcttccaaggatgaacctccgatccctattcctggatttgttggagttggttgcaagcagacgcagattaaagatggtttgaagaagaaggatggttcatctaagggtaaacaactttcatctgaagttcaagctcactctattggaaaatcgaacttgtctcctagttccgaggtgaagaaaccacctccgccggaagtgaaggaaggacctgcttttgtttctccaatcatggcttcgtctcttgggttgaaccggattaagacgagatccggacctttgccacaggaaagggttttcaattataggaatgatccggctacgagcaatttgtcgaagatgggtgctgatggtggtgacttgggctcgggttcagctacttctggctctggtagtggcaatagaaggaaagaagctgggagtagcaagctagggttagaagagaacatggatcgcactcgaccaagtgacaataagagtgatcgtgatagtttgtctcctgatacaggaccaccgaggagcctcagccctactttgccgccatcaggatctcgattgcagaatgtagcatcctcatcgggaactggtcgctctgagatgtcatccggtcgttctggccctctaagaaattcagacttttgcaccccagagaattcatatgaatgggaaaatcccaaagagtcagaatcgcctcgttatcaagccttacttcgtatgaccagtgctccacgaaagaggtttcctggtgacatcaaaagcttttctcatgagttgaactcaaaaggtgtacgtccctttccattatggaagcctcgtaggtcgaacaatgtggaggaagtattgaatctgattcgggcaaaatttgagaaagcaaaggaagaagtaaactctgaccttgcagtatttgcagcggacctggtgggagttcttgagaaaaatgcagaaagccatcctgagtgggaggaaacatttgaagacttgctaattttggctcgaagttgtgctatgactactcctggagatttctggcttcagtgtgaaggcattgttcaggacttagatgatagacgtcaagagcttcccccgggcgtcctcaagcagcttcatactcggatgctttttatccttaccagatgtactagattacttcagtttcataaggaaagctggggggaggaggaacaagttgtacaactacgtcagtcaagagtcttgcattctatagagaaaataccgccgagtggagcgggaaggagttacagtgctgcaaaggtaccatctaccaagaaagcttatagtcaggagcagcatggtttggactggaaggaagacgctgttgtacgctcagttccccctcttgctcctcctgaaaattatgctataaaggaatctgaatctcctgcaaacattgatagaatgtcttcctggaaaaaacttccatctccagcactgaaaactgtgaaagaagcgccagcgtcagaagagcagaatgatagcaaagttgaacctccaaatatagttgggagtcgacaaggtagggatgatgccgctgttgctattctcaactttcctccagcaaaagattctcatgaacactcctccaagcatcggcacaatatttcttggggttactggggggaacaaccccttatttcggaggaaagttcaataatgtgccgtatctgtgaggaggaagttccgacaactcatgtggaagatcactctagggtttgtacattggctgataaatatgaccagaaaggactgagtgttgatgagcgactgatggcagttgctggtacacttgacaagatagcagagaccttcaggcataaggatagcctagcagccgcagagagcccagatggtatgaaagtatccaattcacatctgactgaagaatctgatgttctctctccaaggttgagtgattggtcgcgaaaaggatcagaagacatgcttgactgttttccggaggctgataattcaatttttatggatgatctgagaggtttaccgctaatgtcatgtagaacccgttttggtcccaagtctgatcaaggtatgacaacttcatctgccagtagcatgactcctagatccccgattccgacccctaggcctgatccaattgaacagatattaggaggcaagggtacattccacgatcaagatgatattccacagatgagtgaacttgctgacattgcaaaatgtgcagcagatgccattccgggtgatgatcaatccattccattcctactgtcttgtcttgaagatctaagggttgtcatagaccgcagaaagtttgatgcacttacagtagaaacatttgggactcgcatagaaaagttgatccgtgagaaatatgtgcatatgtgtgagcttatggatgatgaaaaagttgatctactaagcactgtaattgatgaagatgctcccttagaagatgatgttgttcggagcttgaggaccagcccagtacatccgcgagatcgcacatccattgatgattttgagatcataaaaccaataagtcggggagcttttgggcgagtttttttagcgaaaaagaggacaacaggagatctattcgcaatcaaggttctgaaaaaggcagatatgattcgtaagaatgctgttgaaagtatacttgctgaacgtgatatattgatcaacgttcgcaatccttttgtggttcgtttcttctattctttcacgtgtcgtgacaacctgtatttggtgatggagtatctgaatggaggggatctgtattcgttgttgagaaatttaggttgcttagaagaagatattgtccgtgtatatattgctgaagttgtccttgctttggaatatttgcattctgagggtgttgttcaccgtgatttgaagccggataatttgttgattgcgcatgatggtcatataaagttaacagatttcgggctctctaaagttggtctcatcaacagcacagatgatctggctggtcctgctgtaagtgggacgtctctgcttgatgaggaggaatcacgattagcggcatctgaggaacaacttgaaaggcgcaagaaacggtctgctgtgggtactcctgactacttagcgccagaaattcttttagggacaggacatggtgcaactgcggattggtggtctgttggcatcattctgtttgaactcattgtgggaattccacccttcaatgcggaacatcctcagcaaatatttgataatattctcaaccgtaagataccatggcatcatgttccagaagaaatgagtgctgaagcccatgatataatagaccgatttttaacagaagatccacatcagagacttggagctagaggggcagctgaggtcaagcagcacatcttctttaaagacatcaactgggacacactagcaaggcaaaaggctgcatttgttccggcttcagagagtgcaattgacacaagttacttcagaagtcgctactcgtggaacacatcagatgagcaatttttcccaagcggtgaggttccagattatagtgatgctgatagcatgactaacagcagtggttgctcgagcaatcatcatgaagaaggggaggctgaagaatgcgaaggtcatgcagagtttgagtctggcatacctgtagattactctttcagtaatttctcgtttaagaacctctctcagttggcgtctatcaactatgatcttttatccaaaggctggaaagatgagccacaacaaattccgcatcacaagtaacatccatttcctggatgttttttctcgattcttttggtgttcagtcagtgtaatgagtactctgccattaccggcgtttgtttgtatactctgtaaatgtaagtcgttcgtttctgttaatcacaaaatcaatttagtaagctcaaaag

SEQ ID NO: 107845 - protein, 1296 aa, Arabidopsis thaliana
  peptide (1)..(1296): Ceres Seq. ID no. 13651858
MVFKNKLFFSSKKSGSSSPDSSNSPRSVGSNSPIRSDKKKSKSASKDEPPIPIPGFVGVGCKQTQIKDGLKKKDGSSKGKQLSSEVQAHSIGKSNLSPSSEVKKPPPPEVKEGPAFVSPIMASSLGLNRIKTRSGPLPQERVFNYRNDPATSNLSKMGADGGDLGSGSATSGSGSGNRRKEAGSSKLGLEENMDRTRPSDNKSDRDSLSPDTGPPRSLSPTLPPSGSRLQNVASSSGTGRSEMSSGRSGPLRNSDFCTPENSYEWENPKESESPRYQALLRMTSAPRKRFPGDIKSFSHELNSKGVRPFPLWKPRRSNNVEEVLNLIRAKFEKAKEEVNSDLAVFAADLVGVLEKNAESHPEWEETFEDLLILARSCAMTTPGDFWLQCEGIVQDLDDRRQELPPGVLKQLHTRMLFILTRCTRLLQFHKESWGEEEQVVQLRQSRVLHSIEKIPPSGAGRSYSAAKVPSTKKAYSQEQHGLDWKEDAVVRSVPPLAPPENYAIKESESPANIDRMSSWKKLPSPALKTVKEAPASEEQNDSKVEPPNIVGSRQGRDDAAVAILNFPPAKDSHEHSSKHRHNISWGYWGEQPLISEESSIMCRICEEEVPTTHVEDHSRVCTLADKYDQKGLSVDERLMAVAGTLDKIAETFRHKDSLAAAESPDGMKVSNSHLTEESDVLSPRLSDWSRKGSEDMLDCFPEADNSIFMDDLRGLPLMSCRTRFGPKSDQGMTTSSASSMTPRSPIPTPRPDPIEQILGGKGTFHDQDDIPQMSELADIAKCAADAIPGDDQSIPFLLSCLEDLRVVIDRRKFDALTVETFGTRIEKLIREKYVHMCELMDDEKVDLLSTVIDEDAPLEDDVVRSLRTSPVHPRDRTSIDDFEIIKPISRGAFGRVFLAKKRTTGDLFAIKVLKKADMIRKNAVESILAERDILINVRNPFVVRFFYSFTCRDNLYLVMEYLNGGDLYSLLRNLGCLEEDIVRVYIAEVVLALEYLHSEGVVHRDLKPDNLLIAHDGHIKLTDFGLSKVGLINSTDDLAGPAVSGTSLLDEEESRLAASEEQLERRKKRSAVGTPDYLAPEILLGTGHGATADWWSVGIILFELIVGIPPFNAEHPQQIFDNILNRKIPWHHVPEEMSAEAHDIIDRFLTEDPHQRLGARGAAEVKQHIFFKDINWDTLARQKAAFVPASESAIDTSYFRSRYSWNTSDEQFFPSGEVPDYSDADSMTNSSGCSSNHHEEGEAEECEGHAEFESGIPVDYSFSNFSFKNLSQLASINYDLLSKGWKDEPQQIPHHK

SEQ ID NO: 107846 - protein, 1176 aa, Arabidopsis thaliana
  peptide (1)..(1176): Ceres Seq. ID no. 13651859
MASSLGLNRIKTRSGPLPQERVFNYRNDPATSNLSKMGADGGDLGSGSATSGSGSGNRRKEAGSSKLGLEENMDRTRPSDNKSDRDSLSPDTGPPRSLSPTLPPSGSRLQNVASSSGTGRSEMSSGRSGPLRNSDFCTPENSYEWENPKESESPRYQALLRMTSAPRKRFPGDIKSFSHELNSKGVRPFPLWKPRRSNNVEEVLNLIRAKFEKAKEEVNSDLAVFAADLVGVLEKNAESHPEWEETFEDLLILARSCAMTTPGDFWLQCEGIVQDLDDRRQELPPGVLKQLHTRMLFILTRCTRLLQFHKESWGEEEQVVQLRQSRVLHSIEKIPPSGAGRSYSAAKVPSTKKAYSQEQHGLDWKEDAVVRSVPPLAPPENYAIKESESPANIDRMSSWKKLPSPALKTVKEAPASEEQNDSKVEPPNIVGSRQGRDDAAVAILNFPPAKDSHEHSSKHRHNISWGYWGEQPLISEESSIMCRICEEEVPTTHVEDHSRVCTLADKYDQKGLSVDERLMAVAGTLDKIAETFRHKDSLAAAESPDGMKVSNSHLTEESDVLSPRLSDWSRKGSEDMLDCFPEADNSIFMDDLRGLPLMSCRTRFGPKSDQGMTTSSASSMTPRSPIPTPRPDPIEQILGGKGTFHDQDDIPQMSELADIAKCAADAIPGDDQSIPFLLSCLEDLRVVIDRRKFDALTVETFGTRIEKLIREKYVHMCELMDDEKVDLLSTVIDEDAPLEDDVVRSLRTSPVHPRDRTSIDDFEIIKPISRGAFGRVFLAKKRTTGDLFAIKVLKKADMIRKNAVESILAERDILINVRNPFVVRFFYSFTCRDNLYLVMEYLNGGDLYSLLRNLGCLEEDIVRVYIAEVVLALEYLHSEGVVHRDLKPDNLLIAHDGHIKLTDFGLSKVGLINSTDDLAGPAVSGTSLLDEEESRLAASEEQLERRKKRSAVGTPDYLAPEILLGTGHGATADWWSVGIILFELIVGIPPFNAEHPQQIFDNILNRKIPWHHVPEEMSAEAHDIIDRFLTEDPHQRLGARGAAEVKQHIFFKDINWDTLARQKAAFVPASESAIDTSYFRSRYSWNTSDEQFFPSGEVPDYSDADSMTNSSGCSSNHHEEGEAEECEGHAEFESGIPVDYSFSNFSFKNLSQLASINYDLLSKGWKDEPQQIPHHK

SEQ ID NO: 107847 - protein, 1140 aa, Arabidopsis thaliana
  peptide (1)..(1140): Ceres Seq. ID no. 13651860
MGADGGDLGSGSATSGSGSGNRRKEAGSSKLGLEENMDRTRPSDNKSDRDSLSPDTGPPRSLSPTLPPSGSRLQNVASSSGTGRSEMSSGRSGPLRNSDFCTPENSYEWENPKESESPRYQALLRMTSAPRKRFPGDIKSFSHELNSKGVRPFPLWKPRRSNNVEEVLNLIRAKFEKAKEEVNSDLAVFAADLVGVLEKNAESHPEWEETFEDLLILARSCAMTTPGDFWLQCEGIVQDLDDRRQELPPGVLKQLHTRMLFILTRCTRLLQFHKESWGEEEQVVQLRQSRVLHSIEKIPPSGAGRSYSAAKVPSTKKAYSQEQHGLDWKEDAVVRSVPPLAPPENYAIKESESPANIDRMSSWKKLPSPALKTVKEAPASEEQNDSKVEPPNIVGSRQGRDDAAVAILNFPPAKDSHEHSSKHRHNISWGYWGEQPLISEESSIMCRICEEEVPTTHVEDHSRVCTLADKYDQKGLSVDERLMAVAGTLDKIAETFRHKDSLAAAESPDGMKVSNSHLTEESDVLSPRLSDWSRKGSEDMLDCFPEADNSIFMDDLRGLPLMSCRTRFGPKSDQGMTTSSASSMTPRSPIPTPRPDPIEQILGGKGTFHDQDDIPQMSELADIAKCAADAIPGDDQSIPFLLSCLEDLRVVIDRRKFDALTVETFGTRIEKLIREKYVHMCELMDDEKVDLLSTVIDEDAPLEDDVVRSLRTSPVHPRDRTSIDDFEIIKPISRGAFGRVFLAKKRTTGDLFAIKVLKKADMIRKNAVESILAERDILINVRNPFVVRFFYSFTCRDNLYLVMEYLNGGDLYSLLRNLGCLEEDIVRVYIAEVVLALEYLHSEGVVHRDLKPDNLLIAHDGHIKLTDFGLSKVGLINSTDDLAGPAVSGTSLLDEEESRLAASEEQLERRKKRSAVGTPDYLAPEILLGTGHGATADWWSVGIILFELIVGIPPFNAEHPQQIFDNILNRKIPWHHVPEEMSAEAHDIIDRFLTEDPHQRLGARGAAEVKQHIFFKDINWDTLARQKAAFVPASESAIDTSYFRSRYSWNTSDEQFFPSGEVPDYSDADSMTNSSGCSSNHHEEGEAEECEGHAEFESGIPVDYSFSNFSFKNLSQLASINYDLLSKGWKDEPQQIPHHK

SEQ ID NO: 107848 - DNA, 1264 bp, Arabidopsis thaliana
  misc_feature (1)..(1264): Ceres Seq. ID no. 13651869
  misc_feature (1)..(1264): Ortholog of  Ceres SEQ ID NO 12615365 as cited in SEQ ID NO 63027
  misc_feature (1)..(1264): Ortholog of  Ceres SEQ ID NO 12783179 as cited in SEQ ID NO 0
ctatttctcctaccgtcgaactaaatcctagggcacaggtgaaatcgccgagtgacgtctagccaccgcaccgcctccttctccggttatctcgctactaatcagactattccacagctatgtcacaggtagacaacagaaattcatcagcagccaagcgtgctagaactgacggggggcgtagagaagatgattggatctgcccaagttgtggcaatgtcaacttttcattcaggacaacttgcaatatgcgtaattgcactcagcctagacctgcagatcataatggaaagtctgctcccaaacctatgcaacatcaacaaggtttctcatcacccggggcatacttaggatctgggggtccccctccagtatatatgggcgggtcaccatatggatctcctctctttaatggatcatctatgcctccttatgacgtcccattttctgggggttcgccttaccattttaactataatagccgaatgcctgccggagctcattacagaccattacatatgtctggaccaccaccataccatggcggatctatgatgggaagtggtggtatgtatggaatgcctccaccaatagacaggtatggccttggtatggcaatgggtcctggttctgccgctgccatgatgccaagaccaaggttttacccagatgaaaaatcacaaaagagagattcaactcgcgataatgattggacatgtccgaattgtggtaatgtaaacttctcattcagaactgtatgtaacatgaggaagtgcaacactccaaagcctggttctcagcagggtggaagctcagataaaatatccaaacaaaatgcaccggaagggagctggaagtgtgataactgtggaaatataaactacccattcaggagcaaatgcaacaggcaaaactgtggagctgataagcctggggatcggtcgaatggatctccgtcccgtgcaccagaagagaacgatcagtgagtcgtagacatgtttgggggttgagaagggtgagtctaatccagcgggtgtcgtaatgtcagtcaatgtctcgtcaggtcaggtcgtccatgttgctgcgtcgtcagtcaagttgcttctatgcatttgtctctttacttcccttgcgtggttgtggattgtattaataatgcaaaaattgtttatttactttgtcgtcctcgtggatcttgtcttgctatagaatcctcctccaggtccatactgttttacatcctaatcttaagtaagttggcacc

SEQ ID NO: 107849 - protein, 288 aa, Arabidopsis thaliana
  peptide (1)..(288): Ceres Seq. ID no. 13651870
MSQVDNRNSSAAKRARTDGGRREDDWICPSCGNVNFSFRTTCNMRNCTQPRPADHNGKSAPKPMQHQQGFSSPGAYLGSGGPPPVYMGGSPYGSPLFNGSSMPPYDVPFSGGSPYHFNYNSRMPAGAHYRPLHMSGPPPYHGGSMMGSGGMYGMPPPIDRYGLGMAMGPGSAAAMMPRPRFYPDEKSQKRDSTRDNDWTCPNCGNVNFSFRTVCNMRKCNTPKPGSQQGGSSDKISKQNAPEGSWKCDNCGNINYPFRSKCNRQNCGADKPGDRSNGSPSRAPEENDQ

SEQ ID NO: 107850 - protein, 245 aa, Arabidopsis thaliana
  peptide (1)..(245): Ceres Seq. ID no. 13651871
MRNCTQPRPADHNGKSAPKPMQHQQGFSSPGAYLGSGGPPPVYMGGSPYGSPLFNGSSMPPYDVPFSGGSPYHFNYNSRMPAGAHYRPLHMSGPPPYHGGSMMGSGGMYGMPPPIDRYGLGMAMGPGSAAAMMPRPRFYPDEKSQKRDSTRDNDWTCPNCGNVNFSFRTVCNMRKCNTPKPGSQQGGSSDKISKQNAPEGSWKCDNCGNINYPFRSKCNRQNCGADKPGDRSNGSPSRAPEENDQ

SEQ ID NO: 107851 - protein, 225 aa, Arabidopsis thaliana
  peptide (1)..(225): Ceres Seq. ID no. 13651872
MQHQQGFSSPGAYLGSGGPPPVYMGGSPYGSPLFNGSSMPPYDVPFSGGSPYHFNYNSRMPAGAHYRPLHMSGPPPYHGGSMMGSGGMYGMPPPIDRYGLGMAMGPGSAAAMMPRPRFYPDEKSQKRDSTRDNDWTCPNCGNVNFSFRTVCNMRKCNTPKPGSQQGGSSDKISKQNAPEGSWKCDNCGNINYPFRSKCNRQNCGADKPGDRSNGSPSRAPEENDQ

SEQ ID NO: 107852 - DNA, 1621 bp, Arabidopsis thaliana
  misc_feature (1)..(1621): Ceres Seq. ID no. 13651873
  misc_feature (1)..(1621): Ortholog of  Ceres SEQ ID NO 13590780 as cited in SEQ ID NO 68149
  misc_feature (1)..(1621): Ortholog of  Ceres SEQ ID NO 13599756 as cited in SEQ ID NO 0
ctctgctctcaacgtcatcttctatattctatagtttctatttgtccttcgttctctgctcatccatcgatggcgaataatcatcatcccaaggatgaggcttatctctcatccgtcatccccaagcgtatcaggctcttcgaggaaatccaagccgagcagcttgagcagcttcaatctcggccacacgatccaatcaagattactcttctccccgacggtatcgagaaagaaggaaggagatgggagacctctccaatggacatcgcagtgcagatttctaagggtttagcaaaatctgctctggtttcttcggttaatcatgtcttgtgggacatgaataggcccctggaaggtgattgttccttagagattttcggatttgacagcgaccaaggccgtaatactttctggcattctagcgcccacattctaggccaggctctcgagcaggagtatggatgcaagctatgtattggaccctgcgaacccagagatgaaggcttctattacgattcactttattatggcgagctgggattaaacgacaatcattttccaaacatcgaagcaagtgttgcatatatatcttttgctgacatcttttttgttttgcggtatggaatgtagaattacccattagaatggccgaatttggagtgttacaccgaaatgaggacagtggagcacttggtggaatgacccgtgtccgacggtttgtacaggatgatgcacacatattctgtagagtggatcaggttgaggaagaagtgaagggtgtgttggatttcattgactatgtttacagaatatttgggtttacctatgaactaacgctttcaacgaggccaaaggatcacattggagatttggaaacatgggctaaagctgaaaatgatcttgaaaaagctctagatgattttggaaagccatgggttataaaggaaggagacggtgcattttatggcccaaagatagacataacagtgtctgatgccaggaataggaaattccagtgtgctactatacagcttgattttcaacttccggcttgcttcaaactgaaatacctaagtgaaaaaaacgaaatggaggcacctgtgatgatacatagtgcggtgttgggatctattgagcgtatgtttgccatattgttggaacattacaaaggaatttggcccttctggcttagtccccgccaggccatagtttgctctctttcagaggattgtagttcctatgccaaacaggtacaaaaacagattaatgaagtcgggtactatgttgatattgatgaaagtgacagaagcctccgtaaaaaggtggcagatgctcgggatgcaccatacaactacatactggtcgtaggtcaaaaagaggttgcaactggacaggtgacagttcggctcagagaggaccctgaaggccgtaaagacttgccagagatgagcatcgaaagtttgcttgatgaattcaagttcaagacagtcaacttcctctgagatccgatgtttatggtttaaaatttcatttttctgttgatgatgaatgtatttcttttataatggtctttttcattgtaccaagacacattttggaataaaatgtactattgaagtat

SEQ ID NO: 107853 - protein, 285 aa, Arabidopsis thaliana
  peptide (1)..(285): Ceres Seq. ID no. 13651874
MAEFGVLHRNEDSGALGGMTRVRRFVQDDAHIFCRVDQVEEEVKGVLDFIDYVYRIFGFTYELTLSTRPKDHIGDLETWAKAENDLEKALDDFGKPWVIKEGDGAFYGPKIDITVSDARNRKFQCATIQLDFQLPACFKLKYLSEKNEMEAPVMIHSAVLGSIERMFAILLEHYKGIWPFWLSPRQAIVCSLSEDCSSYAKQVQKQINEVGYYVDIDESDRSLRKKVADARDAPYNYILVVGQKEVATGQVTVRLREDPEGRKDLPEMSIESLLDEFKFKTVNFL

SEQ ID NO: 107854 - protein, 267 aa, Arabidopsis thaliana
  peptide (1)..(267): Ceres Seq. ID no. 13651875
MTRVRRFVQDDAHIFCRVDQVEEEVKGVLDFIDYVYRIFGFTYELTLSTRPKDHIGDLETWAKAENDLEKALDDFGKPWVIKEGDGAFYGPKIDITVSDARNRKFQCATIQLDFQLPACFKLKYLSEKNEMEAPVMIHSAVLGSIERMFAILLEHYKGIWPFWLSPRQAIVCSLSEDCSSYAKQVQKQINEVGYYVDIDESDRSLRKKVADARDAPYNYILVVGQKEVATGQVTVRLREDPEGRKDLPEMSIESLLDEFKFKTVNFL

SEQ ID NO: 107855 - protein, 209 aa, Arabidopsis thaliana
  peptide (1)..(209): Ceres Seq. ID no. 13651876
LCSQRHLLYSIVSICPSFSAHPSMANNHHPKDEAYLSSVIPKRIRLFEEIQAEQLEQLQSRPHDPIKITLLPDGIEKEGRRWETSPMDIAVQISKGLAKSALVSSVNHVLWDMNRPLEGDCSLEIFGFDSDQGRNTFWHSSAHILGQALEQEYGCKLCIGPCEPRDEGFYYDSLYYGELGLNDNHFPNIEASVAYISFADIFFVLRYGM

SEQ ID NO: 107856 - DNA, 1282 bp, Arabidopsis thaliana
  misc_feature (1)..(1282): Ceres Seq. ID no. 13651897
  misc_feature (1)..(1282): Ortholog of  Ceres SEQ ID NO 13592961 as cited in SEQ ID NO 20522
  misc_feature (1)..(1282): Ortholog of  Ceres SEQ ID NO 12583469 as cited in SEQ ID NO 51031
  misc_feature (1)..(1282): Ortholog of  Ceres SEQ ID NO 13595998 as cited in SEQ ID NO 68161
gactagctcttcccatggcttcttcactgaagaagcttatctcaagctttctacttgtcttatactctaccaccatcattgttgcttcatcagaatctcgatgtcggcgctttacatctatcatcagctttggtgattccatcgcagacaccggaaatattctccatctctccgacgtcaatcatcttcctcaaaccgccttttttccttatggtgaaagcttcttccatcctccctctggtcgtgcctctgatggccgtctcatcatcgacttcatcgctgaattcttgggactaccgtatgttccaccttactttggatcccaaaacgttagctttgaacaagggatcaatttcgcggtgtatggagcaaccgcattggaccgagcgtattttgtggcaaaaggaattgaatctgatttcaccaacgttagtttaggtgttcagcttgacatcttcaagcagattttgcctaacctttgtgcctcatcttctcgtgattgcagagagatgcttggagactcgctgatactcatgggagagattggaggtaacgactttttttacccatcctccgaaggcaaaagtatcaatgaaaccaaactacaggatttgatcatcaaagctatttcttctgcaattgatttgatcgctttagggggcaaaacatttttggtacccggaggcttcccagcagggcagcgtgtcttactcaatatcagaacgcgacagaagaagactacgaccccttgacaggttgtatcccacggctcaatgaacttggagagcacgacaacgaacaacttaagacagaactcaaacgactccaaaaactctatcctgatgtcaacatcatttacgctgactaccataactccttataccggttttatcaagaaccagctaaatatgggtttaagaacaaacctttagctgcttgctgtggagtcggaggtaaatacaacttcactattggtaaggagtgtggatacgaaggagttagctattgtcaaaatccttccgagtatgtgaattgggatggttatcatttaaccgaagccgcctaccagaagatggctgagggtatactcaacggtccctatgcaactcctgctttcgactggtcctgccttggctctggtacagtggatacataaaaggagcagttagaattcatttgttgtaaaaaaaaaaaaagaggaagaaaattgtgtgatgatgattaacaaaaagattgcttgtacggcaggatttgactagtgacaaaaatttcgaggataaac

SEQ ID NO: 107857 - protein, 249 aa, Arabidopsis thaliana
  peptide (1)..(249): Ceres Seq. ID no. 13651898
LALPMASSLKKLISSFLLVLYSTTIIVASSESRCRRFTSIISFGDSIADTGNILHLSDVNHLPQTAFFPYGESFFHPPSGRASDGRLIIDFIAEFLGLPYVPPYFGSQNVSFEQGINFAVYGATALDRAYFVAKGIESDFTNVSLGVQLDIFKQILPNLCASSSRDCREMLGDSLILMGEIGGNDFFYPSSEGKSINETKLQDLIIKAISSAIDLIALGGKTFLVPGGFPAGQRVLLNIRTRQKKTTTP

SEQ ID NO: 107858 - protein, 245 aa, Arabidopsis thaliana
  peptide (1)..(245): Ceres Seq. ID no. 13651899
MASSLKKLISSFLLVLYSTTIIVASSESRCRRFTSIISFGDSIADTGNILHLSDVNHLPQTAFFPYGESFFHPPSGRASDGRLIIDFIAEFLGLPYVPPYFGSQNVSFEQGINFAVYGATALDRAYFVAKGIESDFTNVSLGVQLDIFKQILPNLCASSSRDCREMLGDSLILMGEIGGNDFFYPSSEGKSINETKLQDLIIKAISSAIDLIALGGKTFLVPGGFPAGQRVLLNIRTRQKKTTTP

SEQ ID NO: 107859 - DNA, 1750 bp, Arabidopsis thaliana
  misc_feature (1)..(1750): Ceres Seq. ID no. 13651904
  misc_feature (1)..(1750): Ortholog of  Ceres SEQ ID NO 14304094 as cited in SEQ ID NO 53422
accggagtgaaagagaactgttgtcttccctctggcgagtactaccgtacaaaccaaatccttcgtatttcactttgagcggtcttattagggttttacttgtccagaccaaaagcagtaaagatgtgcggtaggactcgatgtactttaagacccgacgatgtccccagagcttctcaccgccacaccgttcctacccgatttcttcacctcgaccgttatcgtccatcttacaatgttgcccctggatcctatatacctgttctacggagagacaatgaagaagttgttggtgatggtgttgttgttcattgtatgaagtggggattagtgccaagtttcactaagaaaactgataagcctgatttcttcaaaatgtttaatgctcggtctgaatctgtggctgagaaagcgtcttttcgtcgattgcttcccaagaataggtgccttgttgcagttgatgggttctatgagtggaagaaggaaggttcaaaaaagcaaccctactacatccattttgaggatgggagacctctcgtatttgctgctctttttgatacttggcagaactcaggaggtgagacactttacacctttacgattttgacaaccgcttcctcttcagccctccaatggctccatgacagaatgcctgtaattcttggtgataaggattcaatcgacacatggttagatgatccctcgacaacgaaactgcagccattactttcaccatatgaaaaatcggatttggtatggtatccagtaacctctgcaattggtaaaccaacgtttgatggaccagagtgtattcaacagataccgctaaagacttcacaaaatagcttgatctcgaagtttttctcaacaaagcagcccaaaacagatgaaggagacaaagaaaccaaatcaacagatgcaaatatcatagttgatttgaaaaaggaacctacggctgaaaaggacacgttttctgacagcattaagaaaattgaagaactagacggggagaaagatatgtcgaatgtagccaaaaatctggagtttcaagagattgtgaaagcagaaccatttgttgaagataactcagcagttgcgtcacttcctgaacctgtaaagaatgatgttcaggagggtacaaaggaagaaggcaaatccctaaagactggtcttactaaagaaacaggtgagagcagtgccagtataccggctgagtcctacatccttgatctccaaagaatctcaaaagaagaacccgagactcaaagccatcatttctttactgcagatgagagattgaatcagctgcatgaggctgtcgaagatattccaggaaatgaaaaccagaagacagttttaactagcccgacgacgaaggaaggtggcttagtgtttagcgaaaagagtgggacaaagcgagactatgaggtattctcagctcaagaaaagccacagaaacactatgagaggttgcaaaatgttaaaagcagtgggaaacaaggaaagatgcatggaatggggaaatctaacatcaagaaatctaaggagacgcagtctacattacatttctttttcgatgagaaatagttttgagtctacataacatctatgaggaccatgttggcctacttttgttgtagataatgttagataagaccatcgttttgggaatgttgcttgtattgtatgtgtagtgtttgatctttgatctaaggtaatattattatgaatgaattgggtttttaatgcc

SEQ ID NO: 107860 - protein, 487 aa, Arabidopsis thaliana
  peptide (1)..(487): Ceres Seq. ID no. 13651905
MCGRTRCTLRPDDVPRASHRHTVPTRFLHLDRYRPSYNVAPGSYIPVLRRDNEEVVGDGVVVHCMKWGLVPSFTKKTDKPDFFKMFNARSESVAEKASFRRLLPKNRCLVAVDGFYEWKKEGSKKQPYYIHFEDGRPLVFAALFDTWQNSGGETLYTFTILTTASSSALQWLHDRMPVILGDKDSIDTWLDDPSTTKLQPLLSPYEKSDLVWYPVTSAIGKPTFDGPECIQQIPLKTSQNSLISKFFSTKQPKTDEGDKETKSTDANIIVDLKKEPTAEKDTFSDSIKKIEELDGEKDMSNVAKNLEFQEIVKAEPFVEDNSAVASLPEPVKNDVQEGTKEEGKSLKTGLTKETGESSASIPAESYILDLQRISKEEPETQSHHFFTADERLNQLHEAVEDIPGNENQKTVLTSPTTKEGGLVFSEKSGTKRDYEVFSAQEKPQKHYERLQNVKSSGKQGKMHGMGKSNIKKSKETQSTLHFFFDEK

SEQ ID NO: 107861 - protein, 423 aa, Arabidopsis thaliana; identical to SEQ ID NO: 70404
  peptide (1)..(423): Ceres Seq. ID no. 13651906

SEQ ID NO: 107862 - protein, 403 aa, Arabidopsis thaliana; identical to SEQ ID NO: 70405
  peptide (1)..(403): Ceres Seq. ID no. 13651907

SEQ ID NO: 107863 - DNA, 1211 bp, Arabidopsis thaliana
  misc_feature (1)..(1211): Ceres Seq. ID no. 13651958
  misc_feature (1)..(1211): Ortholog of  Ceres SEQ ID NO 13595658 as cited in SEQ ID NO 59888
  misc_feature (1)..(1211): Ortholog of  Ceres SEQ ID NO 13661330 as cited in SEQ ID NO 61614
  misc_feature (1)..(1211): Ortholog of  Ceres SEQ ID NO 13596025 as cited in SEQ ID NO 62024
  misc_feature (1)..(1211): Ortholog of  Ceres SEQ ID NO 13662324 as cited in SEQ ID NO 62162
  misc_feature (1)..(1211): Ortholog of  Ceres SEQ ID NO 12625713 as cited in SEQ ID NO 64160
  misc_feature (1)..(1211): Ortholog of  Ceres SEQ ID NO 14303564 as cited in SEQ ID NO 65360
  misc_feature (1)..(1211): Ortholog of  Ceres SEQ ID NO 15170103 as cited in SEQ ID NO 66345
  misc_feature (1)..(1211): Ortholog of  Ceres SEQ ID NO 14313495 as cited in SEQ ID NO 0
gactactctcactctctttctattctctcttccgccgctttttccatcgttcgaaagtaaagttgctcgctttactcgttcaagcattcaactttagaatccgatcgaatcctcctgtaacagcaatgatgaatcggatcctcttgtttatgatcctggcttttgtctcatctctttcagaagttgagccaatttcgttcaagatcacgaatcgttgccggaacacgatatggcccggtttgctctctggtgctaactcagcgccgctccccacaactggctttcgtctctctagaggaaaatctaaaaccgtcgcaataccagagtcgtggtccggtcgtctctgggcacgaaccttgtgttcacaagatcggagttccggttctttcgtctgcttaaccggagattgcggctcgggaaaagtcgaatgttcaggctccggagctaaacctccagcaactctcgccgagtttactctcaacggcacaggaggactagatttttacgacgttagcctcgtcgacggttacaatctcccgatgctaatcttgcccaagaaaatcgtcattggaggatgcggagccaccgggtgtctcgtggacttgaacggcgcgtgtcccagagacctaaagctggtgacgcgtgggaatgggaacggtgttgcttgccgtagcgcgtgcgaggcattcggagacccaaggtattgctgcagcgatgcgtacgccacgccggacacgtgtcagccttcggtttactcgctcttctttaagcatgcgtgcccacgagcatacagctacgcctatgacgataagacgagcacttacacttgcgccaccggagccgattacttcatcatcttctgtccgccaccgtatacaagcgagaagcttttaggatcgaggaaagatggtgcaacactgccactagtaaacaagagcatgattcatttgccgcatccgcacagcagctgagccatcttcttattatatgtcttaagtccttcttacatcaggtccgtcttacatgggtactcgcattgtctgttgaggttactatactgttttcatttcctctttcttgttgcaggcagatagaaaattcatgtgtagaaaaatgtcattacggttaataccaaggtagaattacttctttacttgatagaaaaattcatgtgtaaatctttacttgttttacacttgttacttctttcg

SEQ ID NO: 107864 - protein, 322 aa, Arabidopsis thaliana
  peptide (1)..(322): Ceres Seq. ID no. 13651959
LLSLSFYSLFRRFFHRSKVKLLALLVQAFNFRIRSNPPVTAMMNRILLFMILAFVSSLSEVEPISFKITNRCRNTIWPGLLSGANSAPLPTTGFRLSRGKSKTVAIPESWSGRLWARTLCSQDRSSGSFVCLTGDCGSGKVECSGSGAKPPATLAEFTLNGTGGLDFYDVSLVDGYNLPMLILPKKIVIGGCGATGCLVDLNGACPRDLKLVTRGNGNGVACRSACEAFGDPRYCCSDAYATPDTCQPSVYSLFFKHACPRAYSYAYDDKTSTYTCATGADYFIIFCPPPYTSEKLLGSRKDGATLPLVNKSMIHLPHPHSS

SEQ ID NO: 107865 - protein, 281 aa, Arabidopsis thaliana; identical to SEQ ID NO: 74372
  peptide (1)..(281): Ceres Seq. ID no. 13651960

SEQ ID NO: 107866 - protein, 280 aa, Arabidopsis thaliana; identical to SEQ ID NO: 74373
  peptide (1)..(280): Ceres Seq. ID no. 13651961

SEQ ID NO: 107867 - DNA, 1405 bp, Arabidopsis thaliana
  misc_feature (1)..(1405): Ceres Seq. ID no. 13651977
  misc_feature (1)..(1405): Ortholog of  Ceres SEQ ID NO 14302216 as cited in SEQ ID NO 66456
ctctctctctccccccatttgaattatttcaccacgactccaaaaatcctgcgattctcattccttcttcctgtttccgtagcggggattttgtgatcatcaatatcaaaaacaatcagatttcttctaccaaacgattaattgccttttgggatacgattcagggcttcttttggggcctctgtttgatttaacaccttgtttgctgcaaaccaagatagcaaaggaaacgatggtgtcggacaatgagatgggtctggtattagctgtgtcgtcgagcgtcttcataggttccagcttcattttgaagaagaaaggtctcaagcgcgctgctgctaatggcacccgcgctggtttcggaggttatacatatttgttagagccactttggtgggtaggcttggtaacaatgacttttggagaaattgctaactttgtggcttacgtttatgcacctgctgtactagtcactcctcttggcgcattaagtataatcatcagtgctgttttggcacatttcttgttagacgaaaaacttaggaaaatgggagtttggggatgtgtttgttgcattgtgggctcagttatgatcgtcatacacgcacctcaggagcagactcccaattctgtagaagaaatctggaaactagcaatgcaaccagcttttctaatttacgtagccatatcaatgtcgatagtccttgctttgattctctactgtgaacctctctgcggccaaaccaacattcttgtgtatatcggaatttgttcattgatgggttctctcacagttatgagcatcaaggctgtagggattgccataaagttaacatttgaagggataaaccagatctggtatccagagacttggttttttgccatggttgcagcaatctgtgttgttatgcaaatgatttacctcaacaaggcgctggacacattcaacgcagcaattgtttctccaatctattatgtgatgttcacaacactcacaattgtcgctagtgcaatcatgttcaaggactggaatgggcaaaacacagacagcatagcctctgagatttgtggattcatcacagtgcttacaggaacggttatactccattccacgagagaagaggaacaagcttcgccacgacgaatgagatggcaggattcagggaagagctttgacgaagaacatttgacaagtttgtacagtcctgaatattaggaaggtaacaaagatttaaaccttgtgctgaacggaaggatgttgggatccgaatcagaagatcatctaattaatctcttagtggggaaaagaatgtaaactagctttctgtatatacttgatagttttgtaacagtcttttgtatacaaatttgtccactgtttgttcatattcatttctttttgagctag

SEQ ID NO: 107868 - protein, 326 aa, Arabidopsis thaliana; identical to SEQ ID NO: 97985
  peptide (1)..(326): Ceres Seq. ID no. 13651978

SEQ ID NO: 107869 - protein, 320 aa, Arabidopsis thaliana; identical to SEQ ID NO: 97986
  peptide (1)..(320): Ceres Seq. ID no. 13651979

SEQ ID NO: 107870 - protein, 267 aa, Arabidopsis thaliana; identical to SEQ ID NO: 97987
  peptide (1)..(267): Ceres Seq. ID no. 13651980

SEQ ID NO: 107871 - DNA, 1728 bp, Arabidopsis thaliana
  misc_feature (1)..(1728): Ceres Seq. ID no. 13651997
  misc_feature (1)..(1728): Ortholog of  Ceres SEQ ID NO 13596816 as cited in SEQ ID NO 62287
aattcgtcgagaaccgatctttgcacccgagagagagctcagtgaaaaagatgggaagcggtgtaggtgtagctctctttgccctctcccttcttctcgtctcccatgaggtggaatctgcaatcggcgtgaactggggaacgttgtcatttcacaagatgagaccttccacagtggtggatctcctcaaagcaaacaagatcaccaaggtgaagcttttcgatgcgaatccagatgcgcttcgagcgttaatgggtactggaatccaagtaatgatcggcattcctaacgagatgctctcaactttcaattctgatttgtttgtccagcaaaatctctctcgcttcataggcaaaaacggtgctgatattaggtatgttgcagtagggaatgagccgtttctgactggttacggtggtcagtttcagaactatgtagtcccaactatggttaacctgcaacaatctttggttagagcaaatctagctagctatgtgaagttggtggttccttgcaacgcagatgcgtatcagtctaatgttccctctcaggggatgttccggcctgagcttacacagattatgactcaattggtttcgtttctcaactccaatggctctccttttgtggttaatatctatcctttccttagtctctatgggaactcggattttccacaagactatgccttttttgaggggagtagtcatccggttccggatgggcctaacacttactataatgcatttgatgggaactttgacactcttgttgctgctctcaccaagcttggatatggtcaaatgcctatagttattggtgagattggttggcctacagatggagcagttggtgctaatctcacagcagcccgggtttttaatcaagggctcattagccatgtgttgagcaacaaaggaacaccgctcaggcctggatctcctcctgcggatgtatatcttttcggtttgcttgacgaaggagcgaaaagcacactgcctggtaactttgagaggcattggggaatcttctctttcgatggacaggccaagtatcgtctcaacttaggactaggcaacagaggactcaagaatgcaaaaaatgtgcagtaccttccttcaaggtggtgtgtggctcacccatcaagagacatgacccaagttggtgaccacctcaggcttgcttgcagtgaagcagattgcacaacgctcaacgacgggggctcgtgcagccagcttggtgaaaaagataatatctcatacgctttcaacagttactatcagatgcagatgcaacatgaaaagagctgtgactttgatggacttggcatggtcaccttcctagatccttcagttggtgactgtcgatttcttgtgggtgttactgatataggcttatcgtcaagtactgagccaatggcaaggtggtctatctaccacatttgcattggactattgatctggactctcacaatgtagattagggaaatttttcagtgttacattatttagcgatatagtagatataggacggagaaattgcataaatatagggtcagatgtattttattgttaagctgaaaagctgaaccagtgttatctctgtaatatcttcttggggtctatattagaaaatcagaaccactaaaactatggtacctttgttgtcaatgtactgtctaagatgagactcaaatcggttatcatcaattagattgtgatcatcact

SEQ ID NO: 107872 - protein, 491 aa, Arabidopsis thaliana
  peptide (1)..(491): Ceres Seq. ID no. 13651998
FVENRSLHPRESSVKKMGSGVGVALFALSLLLVSHEVESAIGVNWGTLSFHKMRPSTVVDLLKANKITKVKLFDANPDALRALMGTGIQVMIGIPNEMLSTFNSDLFVQQNLSRFIGKNGADIRYVAVGNEPFLTGYGGQFQNYVVPTMVNLQQSLVRANLASYVKLVVPCNADAYQSNVPSQGMFRPELTQIMTQLVSFLNSNGSPFVVNIYPFLSLYGNSDFPQDYAFFEGSSHPVPDGPNTYYNAFDGNFDTLVAALTKLGYGQMPIVIGEIGWPTDGAVGANLTAARVFNQGLISHVLSNKGTPLRPGSPPADVYLFGLLDEGAKSTLPGNFERHWGIFSFDGQAKYRLNLGLGNRGLKNAKNVQYLPSRWCVAHPSRDMTQVGDHLRLACSEADCTTLNDGGSCSQLGEKDNISYAFNSYYQMQMQHEKSCDFDGLGMVTFLDPSVGDCRFLVGVTDIGLSSSTEPMARWSIYHICIGLLIWTLTM

SEQ ID NO: 107873 - protein, 475 aa, Arabidopsis thaliana; identical to SEQ ID NO: 46855
  peptide (1)..(475): Ceres Seq. ID no. 13651999

SEQ ID NO: 107874 - protein, 439 aa, Arabidopsis thaliana; identical to SEQ ID NO: 46856
  peptide (1)..(439): Ceres Seq. ID no. 13652000

SEQ ID NO: 107875 - DNA, 1386 bp, Arabidopsis thaliana
  misc_feature (1)..(1386): Ceres Seq. ID no. 13652044
  misc_feature (1)..(1386): Ortholog of  Ceres SEQ ID NO 13595351 as cited in SEQ ID NO 55934
  misc_feature (1)..(1386): Ortholog of  Ceres SEQ ID NO 13639645 as cited in SEQ ID NO 57488
catcgctgtctggaacagcgatgactactcaaacaagtttctgaagaagagacagagagagaaggatagagtaaaagctaagagagagagcgagactgagagagaaagaaagagatatcattttggttattaagtaattaacttatactaatcatgggttttatcgatggaaagtgggcaccaatgatagtcttaattgtttctaacatgattgcgggaatggttaatgctttagttaagaaagttcttgatggaggcatcaatcatatggttattgctacttatcgtttgggtatatctactcttttccttcttccagtcgcttatttttgggaacggaaaacaagaccaaagctaactctaagcatctcatgtcagcttttcgtcagtgccctttttggggcgagcttgatgcaatatttctacttgcttggactgtcctacacgtctgcaacgctgggatctgctttctgggccataatgccttccctcactttcgttatggctttaatatttgggttcgaaaagctaagtttgaaaacaaaaataggatacggtgtcgttcttggaactttgataagcttagtaggaggtttacttcttactatgtatcaagggattccattaacaaactctccagaacaagcagcaaattcaaataaccacacaggacatgagaattggatcaaaggttgtttctttttattgaccggagttgttcttttcagttcttggatgcttatacaagccaagatcaacgtgaaatacccttgtccatactcgagtaccgttattttgtcggtctttggtacgcttcaatgcgcccttcttagtttaattaagactagacatttggaagattggatccttagagatgagcttaccatcatcaccgtcgttatagcgggagtggttgcacaaggtatgtgtacggtgggcatgtcgtggtgtatcaaacaacaaggacctgtcgtttcctcatcatttagtcctgtcgtgcttatgtctgcaaccgtgttcgatttcttgattcttcatcgtgagatttatttgggaaggagtaagcaaatagtagagtgtaagatcatgaagttgcctaccaatacggtggaagaagaaaaggaagaggaaggccgtacaaatgttaacaacggtcaacttttggttattccgatgactccttgatctacttccctaaacacgcttgttcaacaagaatcatgaccgatatgtcttcaaaaaatgaaatatgaagaagagaagataacgatcgttttcattgtttattggactatttcatacttttattggacaatttcgtacttgtgttgcaacgtttagtttttttggggattttaattcctacgggattcatttggataaaag

SEQ ID NO: 107876 - protein, 343 aa, Arabidopsis thaliana
  peptide (1)..(343): Ceres Seq. ID no. 13652045
MGFIDGKWAPMIVLIVSNMIAGMVNALVKKVLDGGINHMVIATYRLGISTLFLLPVAYFWERKTRPKLTLSISCQLFVSALFGASLMQYFYLLGLSYTSATLGSAFWAIMPSLTFVMALIFGFEKLSLKTKIGYGVVLGTLISLVGGLLLTMYQGIPLTNSPEQAANSNNHTGHENWIKGCFFLLTGVVLFSSWMLIQAKINVKYPCPYSSTVILSVFGTLQCALLSLIKTRHLEDWILRDELTIITVVIAGVVAQGMCTVGMSWCIKQQGPVVSSSFSPVVLMSATVFDFLILHREIYLGRSKQIVECKIMKLPTNTVEEEKEEEGRTNVNNGQLLVIPMTP

SEQ ID NO: 107877 - protein, 333 aa, Arabidopsis thaliana
  peptide (1)..(333): Ceres Seq. ID no. 13652046
MIVLIVSNMIAGMVNALVKKVLDGGINHMVIATYRLGISTLFLLPVAYFWERKTRPKLTLSISCQLFVSALFGASLMQYFYLLGLSYTSATLGSAFWAIMPSLTFVMALIFGFEKLSLKTKIGYGVVLGTLISLVGGLLLTMYQGIPLTNSPEQAANSNNHTGHENWIKGCFFLLTGVVLFSSWMLIQAKINVKYPCPYSSTVILSVFGTLQCALLSLIKTRHLEDWILRDELTIITVVIAGVVAQGMCTVGMSWCIKQQGPVVSSSFSPVVLMSATVFDFLILHREIYLGRSKQIVECKIMKLPTNTVEEEKEEEGRTNVNNGQLLVIPMTP

SEQ ID NO: 107878 - protein, 325 aa, Arabidopsis thaliana
  peptide (1)..(325): Ceres Seq. ID no. 13652047
MIAGMVNALVKKVLDGGINHMVIATYRLGISTLFLLPVAYFWERKTRPKLTLSISCQLFVSALFGASLMQYFYLLGLSYTSATLGSAFWAIMPSLTFVMALIFGFEKLSLKTKIGYGVVLGTLISLVGGLLLTMYQGIPLTNSPEQAANSNNHTGHENWIKGCFFLLTGVVLFSSWMLIQAKINVKYPCPYSSTVILSVFGTLQCALLSLIKTRHLEDWILRDELTIITVVIAGVVAQGMCTVGMSWCIKQQGPVVSSSFSPVVLMSATVFDFLILHREIYLGRSKQIVECKIMKLPTNTVEEEKEEEGRTNVNNGQLLVIPMTP

SEQ ID NO: 107879 - DNA, 3062 bp, Arabidopsis thaliana
  misc_feature (1)..(3062): Ceres Seq. ID no. 13652071
  misc_feature (1)..(3062): Ortholog of  Ceres SEQ ID NO 12584310 as cited in SEQ ID NO 67945
ataatgtggcttggcttatctctcagcacaagtgtttcctcttaaactcatccaatagtcctttacgccttcaaatccttcttcattctcccattcacaattccttcatttttaatttttgattcatcctccattttttttttctgaaaaacaagaaaagttcaaaaaaaaaccaaaaaaccaatctcggttttcgtcattgtattcatctttaatggtagaccgtagacacgtattttgaagggaattacaaaattttaatactatctcttaccaaaaaattagaaaatagagagaagaaaaatgaaagtggcagttataggaagtggtataagtggattaggaagtgcttacgtacttgcgaatcaaggagttaaagaagttgtgttgtacgagaaagaagagtcattaggaggccatgccaagacggtgcgtttcgatggcgttgacttggatcttggtttcatggtctttaatcgtgttacatatccaaacatgatagagttcttcgagaaccttggagtagagatggaggtttcagacatgtctttcgcagtgagccttgacaatggcaaaggttgtgaatggggaagccgcaacggtgtctcgggcttatttgctcaaaagaagaacgttttaaatccgtatttctggcaaatgatcagagaaattgttagatttaaagaagacgtcttaaattacattgagaagcttgagggtaaccccgatatcgatcgaaaggaaaccttaggagaatttctcaatacacgtggatactctgagttgtttcagcaagcttacttagtaccgatatgcggttcgatatggtcatgcccatcagatggtgtcttaagcttctctgcttactctgttctttcgttttgttgcaaccaccaccttcttcagatctttgggaggccacagtggctaactgttgcaggacgttctcagacttacgtcgcaaaggttagggcagaattggagagactaggatgcaagatcagaacaagctgcgacgtaaaatctgtttcgacatccgaaaatggttgtgtaactgttacaagtggagatgggtctgaagaagtattcgataggtgcatattggctatgcacgccccagatgctctgagattgcttggtgaagaagttacatttgacgaatctagggttcttggtgctttccaatacgtttacagcgatatatatctccatcatgacattgatttgatgccacggaacaaagcagcgtggagtgcgtggaatttcttgggaagtacggaaaagaaagtatgtgtaacatactggctcaatatacttcagaaccttggcgagaacagtgaaccattctttgtaacacttaacccagacgagaccccaaagaaagcattgctcaaatggaccactggtcaccctgtaccatcagttgcagcttcgatagcttcacaagagcttcaccagattcaaggcaaacgtaacatatggttctgtggtgcatatcagggctatggtttccatgaagacgggctaaaggccggtatggcggctgcacgaggtttgttagggaaagaaacagctcttctgaacaatccgcgacatatggtcccttccttgacagaaacaggagctcggcttttcgttactagattcttgggacaatttatatcaaccggttctgtaacaatactagaagaaggaggaacaatgttcacattcggagggaaggattctacttgtcctctgaaatctatcctcaagattcacagtcctcaattttactggaaggttatgacacaagcggatttaggacttgcagatgcttatatcaatggagatttttctttcgttgataaagaatcaggacttttaaatctgattatgattctcattgctaacagagatacaaaatcaaatcttactaagaaaaggggatggtggacaccgatgtttttaactgcgggtttagcatctgcaaagtattttctaaagcatgtctctaggcagaacactctaacacaagctcgtagaaacatttctcgtcactatgaccttagcaacgagcttttcggtttgttcttggatgataccatgacttactcctcggcagtattcaagtcggatgatgaggatctgagaactgcacagatgagaaaaatatctcttctgattgataaggcgagaatagagaaggaccatgaggttttagagataggatgtggatggggaactttggccatagaagttgtgagaagaactggatgcaaatacaccggcattacgctatctattgagcagcttaaatatgctgaagaaaaagtgaaagaagctggacttcaggaccggattacttttgagctccgcgattatcgccaactatctgatgctcacaaatatgacagaattatatcttgcgagatgctagaagcggtcggacatgagtttatggagatgtttttcagtcgatgtgaagccgcacttgctgaagacggcctaatggtcttgcagttcatatcgacacccgaagagcgttacaatgagtacagactaagttcagatttcattaaagaatacatattccctggtgcatgcgttccttctttagccaaagtcacttcagccatgtcctcttcttctaggctatgcattgaacatgttgagaacattgggattcattactaccaaacattgagattgtggaggaagaacttcttggagagacagaaacaaatcatggctcttggatttgatgataaattcgtaaggacatgggaatattattttgattattgcgcagctggattcaagactcgtactcttggagactaccagttggtgttctcgcgtccagggaacgtagctgcatttgcggattcataccgaggatttccttctgcttattgtgtctcttgagagcaacaacatttggttgcttatgtttttcgatctatacaatatttgatgacctgaaatactagtattgattactgatttgtttggtgtaccaatttgtgaaagtttgttgaataaaagtgagctttactttggaaaaataaccagttactcgt

SEQ ID NO: 107880 - protein, 867 aa, Arabidopsis thaliana; identical to SEQ ID NO: 99634
  peptide (1)..(867): Ceres Seq. ID no. 13652072

SEQ ID NO: 107881 - protein, 813 aa, Arabidopsis thaliana; identical to SEQ ID NO: 99635
  peptide (1)..(813): Ceres Seq. ID no. 13652073

SEQ ID NO: 107882 - protein, 803 aa, Arabidopsis thaliana; identical to SEQ ID NO: 99636
  peptide (1)..(803): Ceres Seq. ID no. 13652074

SEQ ID NO: 107883 - DNA, 2426 bp, Arabidopsis thaliana
  misc_feature (1)..(2426): Ceres Seq. ID no. 13652075
  misc_feature (1)..(2426): Ortholog of  Ceres SEQ ID NO 15175771 as cited in SEQ ID NO 55443
aattcgtcgagaaccggttgagaaatcaaaaaccaaaataccatctttgatcttcttcttcttcttcttcttcttcttcttctttctttttttacctgcaatttccctgcgagactgatcactgatgtgctttccttctctcgtgacaacaatcttcaatcaatcgagttcactttttagttcgtgactccctaatttcacacgatcaaagatctcgccaccgaaacgctttcacccaaggattctttcaacggcggcgaaggatatgattacacgacggagaaggacgatggccaagagagggatagtgaaattgacgaccagttggcagattctttggctttaaaactacaattcgactgcggaggaagcagacgaatttgtgtttcatcgatcgatccataatcatgatcaccagcgagaaccaaggactttaaatcatggcggatacaatggttgctcatatggaccgacataataagatagatgttgagatctcagaagatgacaagagattaacaaagctttgctctctaaagaagaaggctataaatgcgacgaacaagtttaagcactcaatgaccaagaaaggtcgaaggcatagccgtgtggcgtgtgtctcaatcgtcgatgaaatcgatacagaagagttgcaagcggttgatgctttccgtcaagctcttattttagacgaactacttccctctaagcatgatgatcatcacatgatgcttaggttcttgagggcaagaaagtttgatctcgaaaaggctaagcaaatgtggtctgatatgcttaactggaggaaagaatatggcgcagacacgatcatggaggactttgatttcaaagaaatcgaagaagtggttaagtattatccacaaggatatcatggtgttgacaaggaaggaagacctatctatattgagaggctaggccaagttgatgccacaaagctgatgaaagtgaccacaattgataggtacgtgaagtaccatgtgaaagagttcgagaagactttcaacgtcaaattccctgcttgttccatcgctgcgaaacgacacattgatcagagcacaacgatcttggatgttcaaggcgtggggcttagtaacttcaacaaagctgcaaaagatcttcttcagagtattcagaaaatcgacaacgataactaccctgaggtttagttatgtttttggacgttcttctttgagtttctataatggttctgacgcagcaacatgacctctgtgtttgtgtttcgttgtagacgctgaaccgtatgttcatcatcaatgctggttgtgggtttaggcttttatggaacacagtgaaatctttccttgacccaaagactacagcaaagattcacgttcttggcaacaaataccaaaccaaacttctagaaatcattgacgccaatgaactgcctgagttcttgggtggtaagtgcacctgcgcagacaaaggtggatgtatgcgttcagacaaaggtccatggaacgaccctgagatcttcaagttggttcagaacggtgaaggtagatgcctgcgaaggagcttgtcagggatcggggaaaagacaatctttgagtataacaacgaaacaaagaagaaatgcgaaccagaagagactcacaagcaatctgctgcagagatggagaagaagttcatcgacacgaatgtggatgctgcagcggctgctgattggcctacaaagcttaacaaggctgaaaaaaaccctaccgaccttaaagatgtgtactcagctgtgaatccgttggagaggaaagggtacttatatggcagcgtcatggcattgctaatggggatagtgggagtgatgaggctaaccaagaacatgccaaggaggctcaccgaggcaaatgtttatagccgtgaaggcagcgccgtctaccaggacggagtgactgttatgtcgaagcaggagtatattgcgatggtgaagaagataacagatcttgaggagaaatgtaagtccatggaagctcaggctgcgttttatatggagagggagaagactctagacgctgcacttcgtcgtattgaccagctcgagcttcagttgtctgaaaccaacaaggcactagacgagacaatgacgaggcaacatgagataatggctttcatcgagaagaaaaagaagaagaagcggaagttcttattattctagaagactgcatcagaggctaagaagcctggaaaataaatcaaaatttccagtttactgtaatcttttaaaatatggatactggagaagatagaaagatgaagtcatgttttgtctgtatctaaggactctcaatttctcctgtgttttttttggtataattgttttgttaatataaacttaaaagactcattcgtcatcatcataatcatcatcataaactaatcattatcat

SEQ ID NO: 107884 - protein, 303 aa, Arabidopsis thaliana
  peptide (1)..(303): Ceres Seq. ID no. 13652076
MFIINAGCGFRLLWNTVKSFLDPKTTAKIHVLGNKYQTKLLEIIDANELPEFLGGKCTCADKGGCMRSDKGPWNDPEIFKLVQNGEGRCLRRSLSGIGEKTIFEYNNETKKKCEPEETHKQSAAEMEKKFIDTNVDAAAAADWPTKLNKAEKNPTDLKDVYSAVNPLERKGYLYGSVMALLMGIVGVMRLTKNMPRRLTEANVYSREGSAVYQDGVTVMSKQEYIAMVKKITDLEEKCKSMEAQAAFYMEREKTLDAALRRIDQLELQLSETNKALDETMTRQHEIMAFIEKKKKKKRKFLLF

SEQ ID NO: 107885 - protein, 248 aa, Arabidopsis thaliana
  peptide (1)..(248): Ceres Seq. ID no. 13652077
MADTMVAHMDRHNKIDVEISEDDKRLTKLCSLKKKAINATNKFKHSMTKKGRRHSRVACVSIVDEIDTEELQAVDAFRQALILDELLPSKHDDHHMMLRFLRARKFDLEKAKQMWSDMLNWRKEYGADTIMEDFDFKEIEEVVKYYPQGYHGVDKEGRPIYIERLGQVDATKLMKVTTIDRYVKYHVKEFEKTFNVKFPACSIAAKRHIDQSTTILDVQGVGLSNFNKAAKDLLQSIQKIDNDNYPEV

SEQ ID NO: 107886 - protein, 244 aa, Arabidopsis thaliana
  peptide (1)..(244): Ceres Seq. ID no. 13652078
MVAHMDRHNKIDVEISEDDKRLTKLCSLKKKAINATNKFKHSMTKKGRRHSRVACVSIVDEIDTEELQAVDAFRQALILDELLPSKHDDHHMMLRFLRARKFDLEKAKQMWSDMLNWRKEYGADTIMEDFDFKEIEEVVKYYPQGYHGVDKEGRPIYIERLGQVDATKLMKVTTIDRYVKYHVKEFEKTFNVKFPACSIAAKRHIDQSTTILDVQGVGLSNFNKAAKDLLQSIQKIDNDNYPEV

SEQ ID NO: 107887 - DNA, 1448 bp, Arabidopsis thaliana
  misc_feature (1)..(1448): Ceres Seq. ID no. 13652099
  misc_feature (1)..(1448): Ortholog of  Ceres SEQ ID NO 12612314 as cited in SEQ ID NO 51420
  misc_feature (1)..(1448): Ortholog of  Ceres SEQ ID NO 14306493 as cited in SEQ ID NO 53170
  misc_feature (1)..(1448): Ortholog of  Ceres SEQ ID NO 14311095 as cited in SEQ ID NO 53197
tggaaggagatgagttcctctagtgaatctcatctagccaccgccaaaacagctctcacagcggttgcatcagttgctgcagccgcaatactagctcgatcagtggttcaagattacatgccaaacgaggttcatgaatatatctctcacggctttcgcagattcttcagctacttctcttatcagatgacagctgtaatagaagaatttggaggttttgaacacaaccaagtgtttgaagctgcagaggcttatctctccaccaagatatctaattccactagaagaatcaaagttaacaaacttgagaaacagagcaattatagtgttactgttgaacgtgatgaggaagttgttgatatttttgatggcgtcaagcttagttggatccttgtatgtcgccatgtcgataaaaaggattttcgtaacccgagagatctcaactccactttgaaatcagaagtgcgtagttacgagcttagtttccgaaagaagttcaagaacatggttcttgaatcttatttaccgtttgttgtggaacaagctgcttctattaaacaaaagtttaaaacattgaagatcttcaccgttgattcttactccgtggagtggacctctgtgactctagatcatccttccacgtttcgcactctcgctctggatcccgaggtgaagaaaaacttggtggaggatcttgatcgattcgtgcagcggaaaggcttttacgggagagttggaaaagcttggaagagaggttatttgttgtatggtcctcccggtactggaaaatcaagcttgatcgcagctatagctaatcatcttaacttcgatatctatgacttagacttgacatcacttaacaacaatgctgagctacggaggttacttatgtctactgcaaatcgttccattctagttgtggaagatatagattgttcaatcgagttaaaagatcggtctactgatcaagaaaacaacgatccgttacataaaacggtcacactctctggtctattgaattttgtagacggactatggtcaagttgtggtaacgagcggattatagtgtttacgactaactacagagaaaaattggatccagcattgttgaggccaggacgtatggacatgcacattcacatgtcgtattgcacaccagctgcttttaaggttttggcttcgaattatctcgagattcaagatcatatacttttcgagcagattgaagaatttatccgagaaattgaagttacaccagcagaagtagctgaacaactgatgaggagtgactctgtggataaagtactccaaggacttgttgagttcttaaaagccaagaagcaaatagataattcaaaagcttagaagaaatttagttcttttatttgtttctttgttaaacactatcatgcaattattggttataaaatgttacagaaagtgaaacc

SEQ ID NO: 107888 - protein, 454 aa, Arabidopsis thaliana
  peptide (1)..(454): Ceres Seq. ID no. 13652100
WKEMSSSSESHLATAKTALTAVASVAAAAILARSVVQDYMPNEVHEYISHGFRRFFSYFSYQMTAVIEEFGGFEHNQVFEAAEAYLSTKISNSTRRIKVNKLEKQSNYSVTVERDEEVVDIFDGVKLSWILVCRHVDKKDFRNPRDLNSTLKSEVRSYELSFRKKFKNMVLESYLPFVVEQAASIKQKFKTLKIFTVDSYSVEWTSVTLDHPSTFRTLALDPEVKKNLVEDLDRFVQRKGFYGRVGKAWKRGYLLYGPPGTGKSSLIAAIANHLNFDIYDLDLTSLNNNAELRRLLMSTANRSILVVEDIDCSIELKDRSTDQENNDPLHKTVTLSGLLNFVDGLWSSCGNERIIVFTTNYREKLDPALLRPGRMDMHIHMSYCTPAAFKVLASNYLEIQDHILFEQIEEFIREIEVTPAEVAEQLMRSDSVDKVLQGLVEFLKAKKQIDNSKA

SEQ ID NO: 107889 - protein, 451 aa, Arabidopsis thaliana
  peptide (1)..(451): Ceres Seq. ID no. 13652101
MSSSSESHLATAKTALTAVASVAAAAILARSVVQDYMPNEVHEYISHGFRRFFSYFSYQMTAVIEEFGGFEHNQVFEAAEAYLSTKISNSTRRIKVNKLEKQSNYSVTVERDEEVVDIFDGVKLSWILVCRHVDKKDFRNPRDLNSTLKSEVRSYELSFRKKFKNMVLESYLPFVVEQAASIKQKFKTLKIFTVDSYSVEWTSVTLDHPSTFRTLALDPEVKKNLVEDLDRFVQRKGFYGRVGKAWKRGYLLYGPPGTGKSSLIAAIANHLNFDIYDLDLTSLNNNAELRRLLMSTANRSILVVEDIDCSIELKDRSTDQENNDPLHKTVTLSGLLNFVDGLWSSCGNERIIVFTTNYREKLDPALLRPGRMDMHIHMSYCTPAAFKVLASNYLEIQDHILFEQIEEFIREIEVTPAEVAEQLMRSDSVDKVLQGLVEFLKAKKQIDNSKA

SEQ ID NO: 107890 - protein, 415 aa, Arabidopsis thaliana
  peptide (1)..(415): Ceres Seq. ID no. 13652102
MPNEVHEYISHGFRRFFSYFSYQMTAVIEEFGGFEHNQVFEAAEAYLSTKISNSTRRIKVNKLEKQSNYSVTVERDEEVVDIFDGVKLSWILVCRHVDKKDFRNPRDLNSTLKSEVRSYELSFRKKFKNMVLESYLPFVVEQAASIKQKFKTLKIFTVDSYSVEWTSVTLDHPSTFRTLALDPEVKKNLVEDLDRFVQRKGFYGRVGKAWKRGYLLYGPPGTGKSSLIAAIANHLNFDIYDLDLTSLNNNAELRRLLMSTANRSILVVEDIDCSIELKDRSTDQENNDPLHKTVTLSGLLNFVDGLWSSCGNERIIVFTTNYREKLDPALLRPGRMDMHIHMSYCTPAAFKVLASNYLEIQDHILFEQIEEFIREIEVTPAEVAEQLMRSDSVDKVLQGLVEFLKAKKQIDNSKA

SEQ ID NO: 107891 - DNA, 1473 bp, Arabidopsis thaliana
  misc_feature (1)..(1473): Ceres Seq. ID no. 13652103
  misc_feature (1)..(1473): Ortholog of  Ceres SEQ ID NO 13639663 as cited in SEQ ID NO 57850
agggtttttcccattgaagaagatcgagtgaaattcgaagagcgaatcaaagaggaagaagaagaaggaggaggtatagcaatgggggtcgattattacaaggttcttcaggtggatcggaatgcgaaagacgacgacttgaagaaagcttatcgcaaactcgccatgaagtggcatccagacaagaaccctaacaacaaaaaagacgccgaagccaaattcaagcagatctccgaagcttacgatgtaaattaacaaaatgcgttttctcttttcagagagattcccatcttttgcttgaatttgagcaattgtgtagtttgtcaattcactatggttacttctctggcaattaagtaatcttgatttgcttgtagaattgtgtttgatagattccttatgctgttggattttgtaaggttttgagtgatcctcaaaagagagccatctatgatcaatatggagaagaaggtctaacaagccaggctccgcctcccggagcaggcggcgggttttcggatggaggggcttcgttccggttcaacggtagaagcgcagatgatatcttctcggagttctttggcttcacaagaccatttggtgactcacgtggtgcaggtccctctaatgggttccggttcgcggaagacgttttctcgtcaaatgttgttccaccgaggaaagctgcccctattgagagacaacttccttgtagtttggaagatctctacaaaggagtcagtaagaagatgaagatctctcgggacgtcctcgattcaagcgggagacccacaacagttgaggagatcttgacgatagaaatcaagccagggtggaagaaagggacgaagattaccttcccggagaaaggaaacgagcagcgaggaatcataccatcagatcttgtattcatagttgatgagaagccacatgcggtgttcaagcgagacgggaatgaccttgtgatgacacagaagatccctcttgtggaagccctcacgggatacactgctcaggtctcgactctggatggaagatcagtaacggttccaattaacaacgtgatcagcccttcttatgaagaggtggtgaaaggtgaaggcgtgccaatccctaaagacccatcaaagaaagggaacttgagaatcaagttcactgttaagttcccatcgaggctaacaacagagcagaaatctggaatcaaacgaatgttttcgtcttcctagtctgtctctttctatcttactgctacgtttgattttcggttatgactaggtatgtggtagtgtgggtctttgtttgggagattgtgaggttcttgaacgatgtcgcattgagatttctcaacgtccttcagagcttttggtttgggtttggggttttacattttagcattttttttttttcgttcttttaaatttgttattagattgggggaaaaataaaaaactaaataaagattctttgcttctt

SEQ ID NO: 107892 - protein, 158 aa, Arabidopsis thaliana
  peptide (1)..(158): Ceres Seq. ID no. 13652104
MKISRDVLDSSGRPTTVEEILTIEIKPGWKKGTKITFPEKGNEQRGIIPSDLVFIVDEKPHAVFKRDGNDLVMTQKIPLVEALTGYTAQVSTLDGRSVTVPINNVISPSYEEVVKGEGVPIPKDPSKKGNLRIKFTVKFPSRLTTEQKSGIKRMFSSS

SEQ ID NO: 107893 - protein, 86 aa, Arabidopsis thaliana
  peptide (1)..(86): Ceres Seq. ID no. 13652105
MTQKIPLVEALTGYTAQVSTLDGRSVTVPINNVISPSYEEVVKGEGVPIPKDPSKKGNLRIKFTVKFPSRLTTEQKSGIKRMFSSS

SEQ ID NO: 107894 - protein, 84 aa, Arabidopsis thaliana
  peptide (1)..(84): Ceres Seq. ID no. 13652106
RVFPIEEDRVKFEERIKEEEEEGGGIAMGVDYYKVLQVDRNAKDDDLKKAYRKLAMKWHPDKNPNNKKDAEAKFKQISEAYDVN

SEQ ID NO: 107895 - DNA, 1768 bp, Arabidopsis thaliana
  misc_feature (1)..(1768): Ceres Seq. ID no. 13652115
  misc_feature (1)..(1768): Ortholog of  Ceres SEQ ID NO 15179578 as cited in SEQ ID NO 0
gattctttcttcttcattattcatttctctcgttattcgtttcgtattttgtttgtgtttatgattttacctccttagttgctgtgagatcaagaagtggtgaaagaaaagttactaaatctggatgttatttgattgtcgtcgttggtcttgagctatgaggagcgttaataatagtagtgtcgacaccgtgaacgccgccgcttccgccatcgtctccgctgagtctagaacacaaccgtcgtcggttcagaaaaaaaggggaagctggtggagcttgtactggtgttttggatccaagaagaacaataaaaggataggccacgcggtgcttgtacccgaaccagctgcatcaggagctgcggtggctccagtccaaaactcttcgagcaattctacttcaatattcatgccctttatagctcctccttcatctcctgcttcctttctgccatcaggtcctccctctgcgtcacatactcctgatcctggtctactttgttccctaaccgtcaatgaaccgccttcagcctttactattggaccatacgctcatgagactcaacctgttactcctccagtgttctctgctttcacaacggaaccctccaccgcgccattcacgccacctcctgaatcaccttcttcccctgaagtgccttttgctcagttacttacatcttcattggaaagggctaggaggaacagtggtggtggaatgaatcagaagttttcagctgcacactacgagtttaagtcttgtcaagtgtatcctggaagtccaggtggtaatctaatctctcctggttcaggtacatcttctccttacccagggaaatgctccatcatcgagtttcgtatcggcgaacctccaaagtttcttggttttgagcacttcacagcgcgtaaatggggatcaagattcggttctggatccatcacacctgctggacaaggttcaaggttgggttcaggtgctttgactcctgatggctcaaagctaacttctggtgtagtgacaccaaatggtgcagagactgttataagaatgagttatgggaatctcacaccacttgaaggcagtcttttggatagtcagatctctgaggttgcgtctttagccaattcggaccacgggtcgtcaaggcataatgatgaagctctcgtggttcctcacagagtttctttcgagttgactggtgaagacgttgcacggtgtcttgcaagcaagctaaaccgttccggttcacatgaaaaagcaagcggcgaacatttaagaccaaactgttgtaaaacgtcgggagaaacagagagcgaacagagtcagaagctaagatcgttttctacaggctctaacaaagaattcaagtttgatagcaccaatgaagagatgatagagaaaattcgatcggagtggtgggcgaatgagaaggtcgccggaaaaggtgatcacagtccaagaaacagttggactttctttccagtcttacgctctggacatacttagcacaaagaaatagcttttaccttcttcattacctctaacatgggaagcaaagtcagtgatatggtaagagattggggtctaacaactatacatatatatagcttggtattgtaggtgtctttgttctttgtactgttaattatataaaatagttttaacacttagatggtagacttatcattgacaaaagaaaagaaactgtattctttcttggttatgtataaacataaaaatcatctctttactatattgtcttacatt

SEQ ID NO: 107896 - protein, 449 aa, Arabidopsis thaliana
  peptide (1)..(449): Ceres Seq. ID no. 13652116
MRSVNNSSVDTVNAAASAIVSAESRTQPSSVQKKRGSWWSLYWCFGSKKNNKRIGHAVLVPEPAASGAAVAPVQNSSSNSTSIFMPFIAPPSSPASFLPSGPPSASHTPDPGLLCSLTVNEPPSAFTIGPYAHETQPVTPPVFSAFTTEPSTAPFTPPPESPSSPEVPFAQLLTSSLERARRNSGGGMNQKFSAAHYEFKSCQVYPGSPGGNLISPGSGTSSPYPGKCSIIEFRIGEPPKFLGFEHFTARKWGSRFGSGSITPAGQGSRLGSGALTPDGSKLTSGVVTPNGAETVIRMSYGNLTPLEGSLLDSQISEVASLANSDHGSSRHNDEALVVPHRVSFELTGEDVARCLASKLNRSGSHEKASGEHLRPNCCKTSGETESEQSQKLRSFSTGSNKEFKFDSTNEEMIEKIRSEWWANEKVAGKGDHSPRNSWTFFPVLRSGHT

SEQ ID NO: 107897 - protein, 365 aa, Arabidopsis thaliana; identical to SEQ ID NO: 46009
  peptide (1)..(365): Ceres Seq. ID no. 13652117

SEQ ID NO: 107898 - protein, 262 aa, Arabidopsis thaliana; identical to SEQ ID NO: 46010
  peptide (1)..(262): Ceres Seq. ID no. 13652118

SEQ ID NO: 107899 - DNA, 2072 bp, Arabidopsis thaliana
  misc_feature (1)..(2072): Ceres Seq. ID no. 13652136
  misc_feature (1)..(2072): Ortholog of  Ceres SEQ ID NO 15180350 as cited in SEQ ID NO 0
atctaaaagcaatctcgctcttctcttctcttctcttctcttctcttctcttctctcctcttcaacctcaatcacttaacaaaaccctcagtagaaaacttccactaagtttttagtcatcgttggttttcacaataaagcagctcacatgcaaacattctcgtttaagaggagacccaaccattcacatttcccatcaactctcttcttcttctttctctctttaactctgttcatctctggtgtgagttctcgtgtactaagtcctgtccctctagataactcgagcttgatctctgatggtgtccatggcgcctcggattacaagtatctcactctcgaccctccaaagaacgtttccaaagcagcttgcatccatgtctacgggttccttccatgtgcagacaatattggaggttatgtcttccaagttttttcctttggctgtctcttgatcattggtgactatttcttgtctcaaggaagatccaaactctttgtaatcttcgaggtcgggttttatggtggtatcgtcttccctctccttaccatgttcccaagaattgcccttatgatatcgcctggactagcagcgacccacgagggtgctttaatgattgttggaaacaacgttggagttactattggacacacaatctttgctctgacaatgcaatggggagcttgtgttatctttggtttgactagtcctaattcagatccatcaatccgaagaggatctatcaaaagaacatcctctgacacaaagaatccaagaagaggattttacaggatgaagatactaaaaagtgttgttgaagcaagcgtagatgcggatcctaagaacaaaaaagctgcagggattatgctcttgactctagttccatttctcttagtgacattgcctgatttattggatgtacaatcttggagtgatatcattatgttgatcacactcataatctcctgttcttcaacctttatctactttgtttactcgtattttgatacggcagaccaaaagaagagcttagatcatgccaagtttgagcttatgtcagaagttcataagcatttgcagagtttttcgcctcgaacccttattagagatgggcaactaagtaaagaaagcttgaaaagtttgtttgataaaatcgataggaacaaagatgggaagattcaaatctcggagcttaaagacttaaccgtggagtttggagtttttggaaagatgaaatgtgacatcaatgagtttgctagcactttacttgcggagttcgataaagacaaaaatggcgaactagacgagaacgaattcgaagaagggataatgaaactactgaatcattacaaatttgataaccaagaatctccaagacagaacaacacatacatttacagaacaccatccgattctgttaagagcctatcgcagggcgaggaagctggagttttaaagctagaaatgccaaagcaaactcttgttgctaaattcctctccatgagtaccttaagagctgtgactaaagttatcggtgggatgctaatcgtcgtctttcttgctaaaccatttatggtaaacattggactcttatcagtttcagctggagttccttctttctactcagtatttgcagtgatccctttggttagaaacttgaagaacacgttatctgcacacttctgtcgaaagaaagacaaagcaaggatcgcttctgaaaagttctctgagatttacagggatgttacgatgaacaatctgatgggaatgtcgataacattggcgattgtatactcgagaggattgaagtgggaatactcaatagaatctcttcttgttgtggtagttggcattgcaattggcttaccggcttatgtgagatcgacttatccgttctggatctgtgtaatggcctttgctatgtatatcttctctcttgtccttatctatatccattttcatcttcgaggtcagagctaaagctttcaccttttagctctgatcagactaaaagagtatatcaacttcaaagtgtacttttccattttcattaagaccatgttcttttgat

SEQ ID NO: 107900 - protein, 610 aa, Arabidopsis thaliana
  peptide (1)..(610): Ceres Seq. ID no. 13652137
MQTFSFKRRPNHSHFPSTLFFFFLSLTLFISGVSSRVLSPVPLDNSSLISDGVHGASDYKYLTLDPPKNVSKAACIHVYGFLPCADNIGGYVFQVFSFGCLLIIGDYFLSQGRSKLFVIFEVGFYGGIVFPLLTMFPRIALMISPGLAATHEGALMIVGNNVGVTIGHTIFALTMQWGACVIFGLTSPNSDPSIRRGSIKRTSSDTKNPRRGFYRMKILKSVVEASVDADPKNKKAAGIMLLTLVPFLLVTLPDLLDVQSWSDIIMLITLIISCSSTFIYFVYSYFDTADQKKSLDHAKFELMSEVHKHLQSFSPRTLIRDGQLSKESLKSLFDKIDRNKDGKIQISELKDLTVEFGVFGKMKCDINEFASTLLAEFDKDKNGELDENEFEEGIMKLLNHYKFDNQESPRQNNTYIYRTPSDSVKSLSQGEEAGVLKLEMPKQTLVAKFLSMSTLRAVTKVIGGMLIVVFLAKPFMVNIGLLSVSAGVPSFYSVFAVIPLVRNLKNTLSAHFCRKKDKARIASEKFSEIYRDVTMNNLMGMSITLAIVYSRGLKWEYSIESLLVVVVGIAIGLPAYVRSTYPFWICVMAFAMYIFSLVLIYIHFHLRGQS

SEQ ID NO: 107901 - protein, 476 aa, Arabidopsis thaliana
  peptide (1)..(476): Ceres Seq. ID no. 13652138
MFPRIALMISPGLAATHEGALMIVGNNVGVTIGHTIFALTMQWGACVIFGLTSPNSDPSIRRGSIKRTSSDTKNPRRGFYRMKILKSVVEASVDADPKNKKAAGIMLLTLVPFLLVTLPDLLDVQSWSDIIMLITLIISCSSTFIYFVYSYFDTADQKKSLDHAKFELMSEVHKHLQSFSPRTLIRDGQLSKESLKSLFDKIDRNKDGKIQISELKDLTVEFGVFGKMKCDINEFASTLLAEFDKDKNGELDENEFEEGIMKLLNHYKFDNQESPRQNNTYIYRTPSDSVKSLSQGEEAGVLKLEMPKQTLVAKFLSMSTLRAVTKVIGGMLIVVFLAKPFMVNIGLLSVSAGVPSFYSVFAVIPLVRNLKNTLSAHFCRKKDKARIASEKFSEIYRDVTMNNLMGMSITLAIVYSRGLKWEYSIESLLVVVVGIAIGLPAYVRSTYPFWICVMAFAMYIFSLVLIYIHFHLRGQS

SEQ ID NO: 107902 - protein, 469 aa, Arabidopsis thaliana
  peptide (1)..(469): Ceres Seq. ID no. 13652139
MISPGLAATHEGALMIVGNNVGVTIGHTIFALTMQWGACVIFGLTSPNSDPSIRRGSIKRTSSDTKNPRRGFYRMKILKSVVEASVDADPKNKKAAGIMLLTLVPFLLVTLPDLLDVQSWSDIIMLITLIISCSSTFIYFVYSYFDTADQKKSLDHAKFELMSEVHKHLQSFSPRTLIRDGQLSKESLKSLFDKIDRNKDGKIQISELKDLTVEFGVFGKMKCDINEFASTLLAEFDKDKNGELDENEFEEGIMKLLNHYKFDNQESPRQNNTYIYRTPSDSVKSLSQGEEAGVLKLEMPKQTLVAKFLSMSTLRAVTKVIGGMLIVVFLAKPFMVNIGLLSVSAGVPSFYSVFAVIPLVRNLKNTLSAHFCRKKDKARIASEKFSEIYRDVTMNNLMGMSITLAIVYSRGLKWEYSIESLLVVVVGIAIGLPAYVRSTYPFWICVMAFAMYIFSLVLIYIHFHLRGQS

SEQ ID NO: 107903 - DNA, 3417 bp, Arabidopsis thaliana
  misc_feature (1)..(3417): Ceres Seq. ID no. 13652164
  misc_feature (1)..(3417): Ortholog of  Ceres SEQ ID NO 15168378 as cited in SEQ ID NO 59129
aacaactcttcccaattgtgaaacctttatatcccattatcagctgttttaagttgaccaagttttttcttatggtcctcttcctattttcttcttttgatatacttttttttttaactctatttgttcaaagtcttcgtcttctttttgttaacattattgtttacatgtttttgaaagagagattataatttttattaagagattcgtcaaacctttgtgtagagcacatgcttttttcttagattattttgagataggatcagaaaacagaggaagtgataagaggttctttttgggtttgaagatgagttcaagaactggagcctctttgctcctgatcttgtttttcttccaaatttgttctgtttcggcactcacgaatggtttagacgcttctgctttaaatgctctgaagagtgaatggaccactcctcctgatggttgggaaggctctgatccttgtggaaccaattgggttggaattacatgtcaaaatgaccgcgtcgtttcaatatcactaggtaaccttgacttggaaggaaagcttcctgccgatatatcgttcttgtccgagttgcggatcttggatttgtcatacaatcctaaattgtccggaccgcttccaccaaacatcggtaaccttgggaagttaaggaacttgatccttgtgggatgtagtttcagtggtcaaatccctgagtccattggaactctaaaagaacttatatatctctccctaaatttaaataaatttagtggaacaattccgccttcaattggcctgttatcaaaactatattggtttgatatagctgacaatcagattgaaggagagcttccagtttctaatgggacttctgcacctggacttgacatgcttcttcaaactaagcattttcattttggaaaaaacaagctttcaggcaatatcccaaaagaacttttcagctcaaacatgagtttaatacatgtcctcttcgatggaaaccaattcacgggcgaaattccagagaccctcagtctcgttaaaacgttgacggtgttacgccttgataggaacaaactcattggagatattccttcatatcttaacaatctcacaaatcttaacgaactgtacttggccaacaacagatttactggtactcttccaaatttaaccagcttgaccagtctctacacattggatgtgagcaataacactttggatttctcacccattccatcatggatctcttcattaccctccctatcaacattaaggatggaagggatccaacttaatggtccaataccaatctcatttttcagccctcctcagttgcagactgttatcttaaagcgaaatagtatagtggaaagcttagactttggtacagacgttagcagccagttggagtttgtggatttacaatacaatgaaataactgattataaaccatcagctaataaagtcctccaagtaatattggcaaataatccagtgtgtctagaggcgggaaacgggccgagttactgttcagcaatccaacacaatacctcattttctacactcccaacaaactgttctccatgcgaaccgggcatggaagcgagtcccacgtgccgctgtgcgtatccattcatgggaacactctacttccggtctccttctttctcagggttgttcaactccaccaacttctcaattctacagaaggcaatcgcggatttctttaagaagttcaattatcctgtagactccgttggtgttcggaacataagagagaatccaactgatcatcagcttctaatagatctattggtctttccattgggaagagagagttttaatcagacaggaatgtcacttgttggttttgcatttagcaaccagacttataagcctcctccgatatttggcccttatattttcaaagctgatttgtacaaacagttctctgatgtagaagtttcatcaaagtcatcaaacaaaagcattctcattggagcagtagttggtgttgttgttcttctactattgttaacaatagctgggatttacgctcttaggcagaagaagagagctgaaagagcaactggtcaaaataatccttttgctaaatgggatacaagtaagagtagtattgatgctccgcagctaatgggagcaaaagcgtttacttttgaggagctgaagaaatgcactgacaacttttcagaggcaaatgatgttggcggtggaggttacggcaaggtttatagagggattcttcctaatgggcaactcatagcaatcaaaagggctcaacaaggatctttgcaaggagggttggagttcaaaactgagattgagcttctctcaagggtccatcataagaatgttgtcagactcttgggcttctgctttgaccggaatgaacaaatgctcgtatacgagtacatttcaaatgggtcacttaaagacagtctgtccgggaagagtgggattcgattggattggacaagaagacttaaaatagcacttggttcaggcaagggcttggcttatcttcatgaacttgctgatcctccaattatacatagagacatcaaatcaaataacatattacttgatgaaaatctaaccgcaaaggttgccgacttcggtctctccaaacttgtgggagaccctgagaaaactcatgtcacaacacaagtcaaaggaaccatgggctacttggatccagagtactacatgacgaatcaattaacggagaagagcgatgtgtatgggtttggtgtggttttactcgagctattaaccggtagaagtccgatagagagaggcaaatatgtggtgagagaggtgaagacaaagatgaataaatctcggagtttgtatgacctgcaggagttgttggacacaacgatcatagcaagcagtgggaatctaaaagggttcgagaagtatgtagacttggctttgagatgtgtggaggaggaaggagttaataggccatcaatgggtgaggttgtgaaagagattgagaacataatgcagcttgcgggattaaatcctaactcagattcagcaacgagttcaagaacgtatgaggacgcaatcaaaggatctggtgatccttatggcagtgaatcgtttcagtacagtgggaattttccagcttcaaagcttgagccccaatgattgattatgtttctttttgttattttgttatttcgtaagtgacttcatacttgaaatgccttgtgaatgtggagtagcatgattctgtttgatatgtggtcgctgattataaagcagatgaatggagagccaaacgcagaatcaaaaaccaccagatctttggcaatgtcgacaccagtttcaaacataagaaaagtaatcaagctcaatgtatgatgaataattgaatatattaattcttgttgagc

SEQ ID NO: 107904 - protein, 953 aa, Arabidopsis thaliana
  peptide (1)..(953): Ceres Seq. ID no. 13652165
MSSRTGASLLLILFFFQICSVSALTNGLDASALNALKSEWTTPPDGWEGSDPCGTNWVGITCQNDRVVSISLGNLDLEGKLPADISFLSELRILDLSYNPKLSGPLPPNIGNLGKLRNLILVGCSFSGQIPESIGTLKELIYLSLNLNKFSGTIPPSIGLLSKLYWFDIADNQIEGELPVSNGTSAPGLDMLLQTKHFHFGKNKLSGNIPKELFSSNMSLIHVLFDGNQFTGEIPETLSLVKTLTVLRLDRNKLIGDIPSYLNNLTNLNELYLANNRFTGTLPNLTSLTSLYTLDVSNNTLDFSPIPSWISSLPSLSTLRMEGIQLNGPIPISFFSPPQLQTVILKRNSIVESLDFGTDVSSQLEFVDLQYNEITDYKPSANKVLQVILANNPVCLEAGNGPSYCSAIQHNTSFSTLPTNCSPCEPGMEASPTCRCAYPFMGTLYFRSPSFSGLFNSTNFSILQKAIADFFKKFNYPVDSVGVRNIRENPTDHQLLIDLLVFPLGRESFNQTGMSLVGFAFSNQTYKPPPIFGPYIFKADLYKQFSDVEVSSKSSNKSILIGAVVGVVVLLLLLTIAGIYALRQKKRAERATGQNNPFAKWDTSKSSIDAPQLMGAKAFTFEELKKCTDNFSEANDVGGGGYGKVYRGILPNGQLIAIKRAQQGSLQGGLEFKTEIELLSRVHHKNVVRLLGFCFDRNEQMLVYEYISNGSLKDSLSGKSGIRLDWTRRLKIALGSGKGLAYLHELADPPIIHRDIKSNNILLDENLTAKVADFGLSKLVGDPEKTHVTTQVKGTMGYLDPEYYMTNQLTEKSDVYGFGVVLLELLTGRSPIERGKYVVREVKTKMNKSRSLYDLQELLDTTIIASSGNLKGFEKYVDLALRCVEEEGVNRPSMGEVVKEIENIMQLAGLNPNSDSATSSRTYEDAIKGSGDPYGSESFQYSGNFPASKLEPQ

SEQ ID NO: 107905 - protein, 763 aa, Arabidopsis thaliana
  peptide (1)..(763): Ceres Seq. ID no. 13652166
MLLQTKHFHFGKNKLSGNIPKELFSSNMSLIHVLFDGNQFTGEIPETLSLVKTLTVLRLDRNKLIGDIPSYLNNLTNLNELYLANNRFTGTLPNLTSLTSLYTLDVSNNTLDFSPIPSWISSLPSLSTLRMEGIQLNGPIPISFFSPPQLQTVILKRNSIVESLDFGTDVSSQLEFVDLQYNEITDYKPSANKVLQVILANNPVCLEAGNGPSYCSAIQHNTSFSTLPTNCSPCEPGMEASPTCRCAYPFMGTLYFRSPSFSGLFNSTNFSILQKAIADFFKKFNYPVDSVGVRNIRENPTDHQLLIDLLVFPLGRESFNQTGMSLVGFAFSNQTYKPPPIFGPYIFKADLYKQFSDVEVSSKSSNKSILIGAVVGVVVLLLLLTIAGIYALRQKKRAERATGQNNPFAKWDTSKSSIDAPQLMGAKAFTFEELKKCTDNFSEANDVGGGGYGKVYRGILPNGQLIAIKRAQQGSLQGGLEFKTEIELLSRVHHKNVVRLLGFCFDRNEQMLVYEYISNGSLKDSLSGKSGIRLDWTRRLKIALGSGKGLAYLHELADPPIIHRDIKSNNILLDENLTAKVADFGLSKLVGDPEKTHVTTQVKGTMGYLDPEYYMTNQLTEKSDVYGFGVVLLELLTGRSPIERGKYVVREVKTKMNKSRSLYDLQELLDTTIIASSGNLKGFEKYVDLALRCVEEEGVNRPSMGEVVKEIENIMQLAGLNPNSDSATSSRTYEDAIKGSGDPYGSESFQYSGNFPASKLEPQ

SEQ ID NO: 107906 - protein, 736 aa, Arabidopsis thaliana
  peptide (1)..(736): Ceres Seq. ID no. 13652167
MSLIHVLFDGNQFTGEIPETLSLVKTLTVLRLDRNKLIGDIPSYLNNLTNLNELYLANNRFTGTLPNLTSLTSLYTLDVSNNTLDFSPIPSWISSLPSLSTLRMEGIQLNGPIPISFFSPPQLQTVILKRNSIVESLDFGTDVSSQLEFVDLQYNEITDYKPSANKVLQVILANNPVCLEAGNGPSYCSAIQHNTSFSTLPTNCSPCEPGMEASPTCRCAYPFMGTLYFRSPSFSGLFNSTNFSILQKAIADFFKKFNYPVDSVGVRNIRENPTDHQLLIDLLVFPLGRESFNQTGMSLVGFAFSNQTYKPPPIFGPYIFKADLYKQFSDVEVSSKSSNKSILIGAVVGVVVLLLLLTIAGIYALRQKKRAERATGQNNPFAKWDTSKSSIDAPQLMGAKAFTFEELKKCTDNFSEANDVGGGGYGKVYRGILPNGQLIAIKRAQQGSLQGGLEFKTEIELLSRVHHKNVVRLLGFCFDRNEQMLVYEYISNGSLKDSLSGKSGIRLDWTRRLKIALGSGKGLAYLHELADPPIIHRDIKSNNILLDENLTAKVADFGLSKLVGDPEKTHVTTQVKGTMGYLDPEYYMTNQLTEKSDVYGFGVVLLELLTGRSPIERGKYVVREVKTKMNKSRSLYDLQELLDTTIIASSGNLKGFEKYVDLALRCVEEEGVNRPSMGEVVKEIENIMQLAGLNPNSDSATSSRTYEDAIKGSGDPYGSESFQYSGNFPASKLEPQ

SEQ ID NO: 107907 - DNA, 2007 bp, Arabidopsis thaliana
  misc_feature (1)..(2007): Ceres Seq. ID no. 13652254
  misc_feature (1)..(2007): Ortholog of  Ceres SEQ ID NO 14307069 as cited in SEQ ID NO 54322
taagaccaataagaatgatttagaccagctaaatcatgagatggatgttctggctggacatgagaattgcttgtgctggaagatctggacgaaaatgttccaaattttaagaattcttggttctcttatgataacatagttacatgctctagtgatggtagtgcaatcatttggatcccaagatcacggagttcgcctgtaaaatgctgccaagccttagaagaagatccgagaggttgaaagataaaacaaaagctaggatcatgacttctttgagtaggcgttgcgaaaagagaaactttgatgagcttgagggagctccaagcagtaaaaacacatgtaatggtgttaatgtagcacatagttgtttgtaattgaaaacagatattgatggcatggcagttgacactttctcggtggtttttaatgggtttacaaatggtgaaagacaatatctagaactaaatgacggtgagtctaacggttctcaggatgtaactagtcgcctgaatgatgtagcagatagctccatgtgggtttcaagggctcctggtggcactgatgaattaaatgatggttttgaagacatcaaatatgatttgacattagactgtcaaaaggattgtgtggttggagcagagatatctctgagatatgattgtgttgggatatcaaatcctcacatcagtgattctctttcaagtggtagtgtgttcctatgtcatggaagcataagaagaaaccaaacagggttgctactgactcaagaactcagttcttgtagtcaggatcagagtagtggcgctaagtcccatgacgttggtccttttgaaatattgaagcctcaacagttaaaagaaaagttatcttggttgacattatcgatacatgaagaggattgtcgttatattctacaaaaggaggatgaagttgcgaatttgcgacaaggacatcaagaatacttaaactttagctccttgaggggaagtagctccttggactttaataaagagtagaaatatgaaggctgtggaaatctgtaaagtgaaaagtctgaaatatgcaactcttcctagttctggagatagctgctgcaaaatgatacttaaagtcattgatccgaactccgaagtgtacagcaaactttcaagcttacattacctgatttagtgacctttccagattttcttgtgaaaagaagccggtatgaaggagcgatacagaggaaatggacttgcagggacaagtgtaaggtttggtggagaaacaaaggcgaagaagatggtcgttggtgggaaggaggaattctagctgtgaaacccaaatcaactcattttcttgatagtccatgggagaggtacaaagttaaatacaagactagcccgwccgagacacatcttcatrgtccttgggagctttttgatgctgatactaagtgggagcagcctcatattgataatgagaaatgaaacagtatgctcttagccttaacaaacttacagacttcagaaaaaagaatccagattcgttwgaggattcttatggactccaaaaactgaaccagatcatgggaaactcaagctacaccaataggttcccagttcctttgtctcttgaggtaataagatcaaggattgagaacaactattaccggagtatggaagcgttaaggcacgatgtatcagttatgctatccaatgcagagactttctttgatctaaacaaatgtgtaggtgtagcagtcaaaatttcagatctttctcaatggttcgaccgcacgttgtcttctttgtagcttatctgcctatgtatagagtacgtgaattagggtcgcttgcgttgttgtatctgaaaggcttcttcgatctaacgagtaagcacatttttcattgatctaatttttgtttgtctcttgtgatgtarkgtaccytaatgtcctaaagttggagctaatttttgtcattttatgcgcatcagtacaatgatgttattacagcattttagtgt

SEQ ID NO: 107908 - protein, 206 aa, Arabidopsis thaliana
  peptide (1)..(206): Ceres Seq. ID no. 13652255
MAVDTFSVVFNGFTNGERQYLELNDGESNGSQDVTSRLNDVADSSMWVSRAPGGTDELNDGFEDIKYDLTLDCQKDCVVGAEISLRYDCVGISNPHISDSLSSGSVFLCHGSIRRNQTGLLLTQELSSCSQDQSSGAKSHDVGPFEILKPQQLKEKLSWLTLSIHEEDCRYILQKEDEVANLRQGHQEYLNFSSLRGSSSLDFNKE

SEQ ID NO: 107909 - protein, 161 aa, Arabidopsis thaliana
  peptide (1)..(161): Ceres Seq. ID no. 13652256
MWVSRAPGGTDELNDGFEDIKYDLTLDCQKDCVVGAEISLRYDCVGISNPHISDSLSSGSVFLCHGSIRRNQTGLLLTQELSSCSQDQSSGAKSHDVGPFEILKPQQLKEKLSWLTLSIHEEDCRYILQKEDEVANLRQGHQEYLNFSSLRGSSSLDFNKE

SEQ ID NO: 107910 - protein, 109 aa, Arabidopsis thaliana
  peptide (1)..(109): Ceres Seq. ID no. 13652257
  misc_feature (22)..(22): Xaa is any aa, unknown or other
MKQYALSLNKLTDFRKKNPDSXEDSYGLQKLNQIMGNSSYTNRFPVPLSLEVIRSRIENNYYRSMEALRHDVSVMLSNAETFFDLNKCVGVAVKISDLSQWFDRTLSSL

SEQ ID NO: 107911 - DNA, 2114 bp, Arabidopsis thaliana
  misc_feature (1)..(2114): Ceres Seq. ID no. 13652258
  misc_feature (1)..(2114): Ortholog of  Ceres SEQ ID NO 14307069 as cited in SEQ ID NO 54322
ggcttaccggtttccgtcctcgtggacatactgaagctgttattgctattgtatttagtcctagacctggatccccgtaccagcttctctcatcgtcagatgatgacacatgtctgatatgggatgctcggggtgtccagcttgctccgcggatataagtccctaagcctcacagtcctattggtgattggctgattgctttatattcctggttgatttatatatcgatttgatctattggaagctataggactgacttcggaatcatattccaggagaaaaccgtggcggttcttctagtaatggtaaaatgctgccaagccttagaagaagatccgagaggttgaaagataaaacaaaagctaggatcatgacttctttgagtaggcgttgcgaaaagagaaactttgatgagcttgagggagctccaagcagtaaaaacacatgtaatggtgttaatgtagcacatagttgtttgtaattgaaaacagatattgatggcatggcagttggcactttctcggtggtttttaatgggtttacaaatggtgaaagacaatatctagaactaaatgacggtgagtctaacggttctcaggatgtaactagtcgcctgaatgatgtagcagatagctccatgtgggtttcaagggctcctggtggcactgatgaattaaatgatggttttgaagacatcaaatatgatttgacattagactgtcaaaaggattgtgtggttggagcagagatatctctgagatatgattgtgttgggatatcaaatcctcacatcagtgattctctctcaagtggtagtgtgttcctatgtcatggaagcataagaagaaaccaaacagggttgctactgactcaagaactcagttcttgtagtcaggatcagagtagtggcgctaagtcccatgacgttggtccttttgaaatattgaagcctcaacagttaaaagaaaagttatcttggttgacattatcgatacatgaagaggattgtcgttatattctacaaaaggaggatgaagttgcgaatttgcgacaaggacatcaagaatacttaaactttagctccttgaggggaagtagctccttggactttaataaagagtagaaatatgaaggctgtggaaatctgtaaagtgaaaagtctgaaatatgcaactcttcctagttctggagatagctgctgcaaaatgatacttaaagtcattgatccgaactccgaagtgtacagcaaactttcaagcttacattacctgatttagtgacctttccagattttcttgtgaaaagaagccggtatgaaggagcgatacagaggaaatggacttgcagggacaagtgtaaggtttggtggagaaacaaaggcgaagaagatggtcgttggtgggaaggaggaattctagctgtgaaacccaaatcaactcattttcttgatagtccatgggagaggtacaaagttaaatacaagactagcccgwccgagacacatcttcatrgtccttgggagctttttgatgctgatactaagtgggagcagcctcatattgataatgagaaatgaaacagtatgctcttagccttaacaaacttacagacttcagaaaaaagaatccagattcgtttgaggattcttatggactccaaaaactgaaccagatcatgggaaactcaagctacaccaataggttcccagttcctttgtctcttgaggtaataagatcaaggattgagaacaactattaccggagtatggaagcgttaaggcacgatgtatcagttatgctatccaatgcagagactttctttgatctaaacaaatgtgtaggtgtagcagtcaaaatttcagatctttctcaatggttcgaccgcacgttgtcttctttgtagcttatctgcctatgtatagagtacgtgaattagggtcgcttgcgttgttgtatctgaaaggcttcttcgatctaacgagtaagcacatttttcattgatctaatttttgtttgtctcttgtgatgtarkgtaccytaatgtcctaaagttggagctaatttttgtcattttatgcgcatcagtacaatgatgttattacagcattttagtgt

SEQ ID NO: 107912 - protein, 206 aa, Arabidopsis thaliana
  peptide (1)..(206): Ceres Seq. ID no. 13652259
MAVGTFSVVFNGFTNGERQYLELNDGESNGSQDVTSRLNDVADSSMWVSRAPGGTDELNDGFEDIKYDLTLDCQKDCVVGAEISLRYDCVGISNPHISDSLSSGSVFLCHGSIRRNQTGLLLTQELSSCSQDQSSGAKSHDVGPFEILKPQQLKEKLSWLTLSIHEEDCRYILQKEDEVANLRQGHQEYLNFSSLRGSSSLDFNKE

SEQ ID NO: 107913 - protein, 161 aa, Arabidopsis thaliana; identical to SEQ ID NO: 107909
  peptide (1)..(161): Ceres Seq. ID no. 13652260

SEQ ID NO: 107914 - protein, 109 aa, Arabidopsis thaliana
  peptide (1)..(109): Ceres Seq. ID no. 13652261
MKQYALSLNKLTDFRKKNPDSFEDSYGLQKLNQIMGNSSYTNRFPVPLSLEVIRSRIENNYYRSMEALRHDVSVMLSNAETFFDLNKCVGVAVKISDLSQWFDRTLSSL

SEQ ID NO: 107915 - DNA, 1811 bp, Arabidopsis thaliana
  misc_feature (1)..(1811): Ceres Seq. ID no. 13652269
  misc_feature (1)..(1811): Ortholog of  Ceres SEQ ID NO 15174875 as cited in SEQ ID NO 56464
gaaaagaagaagactagccggagaaccaaaatcgaacgataaccgttacactaayaaacttaccctatcatcttatctttcatggattcacttcctcacaaattctcagaatcaccgaaatggggtcaattcgtggtgaccttcagccgctctttgycatgccaccacctcccctcgatgaagattgtgatgatatcttcaattctgacgaatcttcatgggggttgttgagcttgtcctgcttcggtatcattatgggattgtggttctttgcgtcggtttgtctgatttttggtgtttacggtagtgaaactgtctggcttggacctaactcgtccattcttgttaaaccaagttccatctttgtcaaaagcattaaggtgaaggagcttgatttttcaaagcctggacttcagctatatggattcaatggtcaatctactcctagtggttattttgtaaactggactgaatctcgagtgttatctgtctcacagaattcttacaagggatggccatactacttaaatagaggaacgcatatgaatatatcttataacattttacctaaaggttctgcagttcggcttgtgatcactgaaggaatgccattcttctatcggtcgtcgctgaaggatattgcatttcgtgacaccgcttggtcatggaatctaattcaggggggtggtatgattcaattggatataagtaagtctaaaggttattatcttactgtggctaacttgaagaggaaggacatagaggtaattataatcaagttatgactttggattaagttttggtttctgttgtgtttctgcacagtccacagtacactgttttacttgacataatgtttgttcaggtggaactggatattgatgtgaaggctgtctygtatgatactaaacaatcatcctacaattgttccttcagcaatggcgagtgctcattcaaaatgaatgaaaggtcccctgttgaaaattatgctgtcgtaacttcaccagcactgggtcagggagtatccatcgatgatgaatggtatatcgagttgtcatatcaacctagattgattgcatatggaagcttcacaggtgtgttgctttccttcatgctggtagctatacacttctgcaacaagttaaagtgttgtggtggagagggatttttatcckaagatgattcagtgagaacatgtctacttgcagacaaaggtgacaatgattgttgtaatgatgtcgaagcaagtaacaaaagtctctgtgccatttgttttgatgctccaagagattgttgtttcctcccgtgtggccattgcgtctcctgttaccaatgcggaacaaagataaaaagaaccaaggggaggtgtccaatatgtcgaaagaaaataatgcatgtgaagcgaatctatacagcttaagatgtattattatctgtccaatgtgatgttgaatcgttagagcattaataaaaatcatataatttgatattgacaaggctcaggtctttctttgcattaattcgtttcatctcttaaccatctttgtgacaacaccattggttaactaccatagggtaggcaatatagtgaaccattgtttgttgactcacatcacaaaatggttcgaaacccgaatcgataattaaggatttcataaattaattgttaatttctgaataaattcggattttgtatatttcctccgtttcgtaatataagtagttttggaccaatttttttgtttcacaacgtaaattgtttttaactttctatgtaaataatatattattttaatattttttgattattt

SEQ ID NO: 107916 - protein, 221 aa, Arabidopsis thaliana
  peptide (1)..(221): Ceres Seq. ID no. 13652270
  misc_feature (13)..(13): Xaa is any aa, unknown or other
MGSIRGDLQPLFXMPPPPLDEDCDDIFNSDESSWGLLSLSCFGIIMGLWFFASVCLIFGVYGSETVWLGPNSSILVKPSSIFVKSIKVKELDFSKPGLQLYGFNGQSTPSGYFVNWTESRVLSVSQNSYKGWPYYLNRGTHMNISYNILPKGSAVRLVITEGMPFFYRSSLKDIAFRDTAWSWNLIQGGGMIQLDISKSKGYYLTVANLKRKDIEVIIIKL

SEQ ID NO: 107917 - protein, 208 aa, Arabidopsis thaliana
  peptide (1)..(208): Ceres Seq. ID no. 13652271
MPPPPLDEDCDDIFNSDESSWGLLSLSCFGIIMGLWFFASVCLIFGVYGSETVWLGPNSSILVKPSSIFVKSIKVKELDFSKPGLQLYGFNGQSTPSGYFVNWTESRVLSVSQNSYKGWPYYLNRGTHMNISYNILPKGSAVRLVITEGMPFFYRSSLKDIAFRDTAWSWNLIQGGGMIQLDISKSKGYYLTVANLKRKDIEVIIIKL

SEQ ID NO: 107918 - protein, 188 aa, Arabidopsis thaliana
  peptide (1)..(188): Ceres Seq. ID no. 13652272
  misc_feature (15)..(15): Xaa is any aa, unknown or other
  misc_feature (108)..(108): Xaa is any aa, unknown or other
MFVQVELDIDVKAVXYDTKQSSYNCSFSNGECSFKMNERSPVENYAVVTSPALGQGVSIDDEWYIELSYQPRLIAYGSFTGVLLSFMLVAIHFCNKLKCCGGEGFLSXDDSVRTCLLADKGDNDCCNDVEASNKSLCAICFDAPRDCCFLPCGHCVSCYQCGTKIKRTKGRCPICRKKIMHVKRIYTA

SEQ ID NO: 107919 - DNA, 877 bp, Arabidopsis thaliana
  misc_feature (1)..(877): Ceres Seq. ID no. 13652311
  misc_feature (1)..(877): Ortholog of  Ceres SEQ ID NO 14304593 as cited in SEQ ID NO 52961
  misc_feature (1)..(877): Ortholog of  Ceres SEQ ID NO 14303440 as cited in SEQ ID NO 59496
  misc_feature (1)..(877): Ortholog of  Ceres SEQ ID NO 13642436 as cited in SEQ ID NO 59680
atggaaatgatgaattgggagcggaggagtttgctaaacgagctaattcatggactaaaagcggccaagcagcttcaggctattttgatgctcaacggatccaccacacaacacaatccaacgatagagcttgcgcctgatcccctagctcatcccggaaaggttccaggatctccagcatcgatcaccggaaatccgagaagcgaagagtttttcaatgtaagatcgaaagaattcaacttaagttctaaaaagaggaagatgttgccaaagtggacagagcaagtgagaattagcccagagagaggcttagaaggacctcatgacgatatcttcagctggagaaaatatggccagaaagacattttgggcgccaaattcccaaggagttattacagatgcacatttcgtaacacacagtactgttgggctacgaaacaagtccaaagatcggacggtgatccaacgatcttcgaagtaacatacagaggaacacacacttgttcacaggggatcccacttccagagaaacgagaaaccaaaccaaaacacacagtagcagtaaattaccagaatctcagggccagtcttaccgtacgtaccggcggacttggaagcgaagctttctcattccccgtcacgtcgccgttatacacttacgagtccatcaacggtggtggaacgttttaccaccacgtgggaagttctggtccgtcggatttcactggattgatctcaacaaatacttccacaggaagttctccaatcttcgacgttaattttcaatttgatccaacggctgagattaacacaggcttccccacttttttccacaattcgatttaagtagtacagtattgaatattcttgagattaa

SEQ ID NO: 107920 - protein, 281 aa, Arabidopsis thaliana
  peptide (1)..(281): Ceres Seq. ID no. 13652312
MEMMNWERRSLLNELIHGLKAAKQLQAILMLNGSTTQHNPTIELAPDPLAHPGKVPGSPASITGNPRSEEFFNVRSKEFNLSSKKRKMLPKWTEQVRISPERGLEGPHDDIFSWRKYGQKDILGAKFPRSYYRCTFRNTQYCWATKQVQRSDGDPTIFEVTYRGTHTCSQGIPLPEKRETKPKHTVAVNYQNLRASLTVRTGGLGSEAFSFPVTSPLYTYESINGGGTFYHHVGSSGPSDFTGLISTNTSTGSSPIFDVNFQFDPTAEINTGFPTFFHNSI

SEQ ID NO: 107921 - protein, 279 aa, Arabidopsis thaliana
  peptide (1)..(279): Ceres Seq. ID no. 13652313
MMNWERRSLLNELIHGLKAAKQLQAILMLNGSTTQHNPTIELAPDPLAHPGKVPGSPASITGNPRSEEFFNVRSKEFNLSSKKRKMLPKWTEQVRISPERGLEGPHDDIFSWRKYGQKDILGAKFPRSYYRCTFRNTQYCWATKQVQRSDGDPTIFEVTYRGTHTCSQGIPLPEKRETKPKHTVAVNYQNLRASLTVRTGGLGSEAFSFPVTSPLYTYESINGGGTFYHHVGSSGPSDFTGLISTNTSTGSSPIFDVNFQFDPTAEINTGFPTFFHNSI

SEQ ID NO: 107922 - protein, 278 aa, Arabidopsis thaliana
  peptide (1)..(278): Ceres Seq. ID no. 13652314
MNWERRSLLNELIHGLKAAKQLQAILMLNGSTTQHNPTIELAPDPLAHPGKVPGSPASITGNPRSEEFFNVRSKEFNLSSKKRKMLPKWTEQVRISPERGLEGPHDDIFSWRKYGQKDILGAKFPRSYYRCTFRNTQYCWATKQVQRSDGDPTIFEVTYRGTHTCSQGIPLPEKRETKPKHTVAVNYQNLRASLTVRTGGLGSEAFSFPVTSPLYTYESINGGGTFYHHVGSSGPSDFTGLISTNTSTGSSPIFDVNFQFDPTAEINTGFPTFFHNSI

SEQ ID NO: 107923 - DNA, 1494 bp, Arabidopsis thaliana
  misc_feature (1)..(1494): Ceres Seq. ID no. 13652319
  misc_feature (1)..(1494): Ortholog of  Ceres SEQ ID NO 14311032 as cited in SEQ ID NO 54590
  misc_feature (1)..(1494): Ortholog of  Ceres SEQ ID NO 15170493 as cited in SEQ ID NO 58432
aacgaatcaccttccgaagatttttcttcctttcttttttggattctcctccatgcaaaattggaaagccctaagacgaacaccaaccatacgccatcgtgcgacgtgaaaattggagaatctgattggctgaaggattattgaaattgaaagttattgtgatcgagttttgttttttcctgatggtggaagaagcacaattggatcctaaatcgaaatcgattccgaatgagaatttgaaatttggagaaagggctttgtctgccggaggcgccgcttttatatcggcggtcatagtcaatcctctcgatgttgttaagacgagattacaagcacaggctgcaggagttccgtatcaaggctcgtgtcgtcttggttgtttcgacacgaattccacgttggtacatgatttgagaagtaattctgctccagggatgtgtagaattactggctctgcatctgtatgctcagataatcagtacaagggaactcttgatgttttctacaaaattatccgccaggaacaactttatgcaggaagggttttctaggctttggagaggtacaaacgcaagtttaactttagccattccgactgttgggatctacatgccttgttatgattattttcgcaacataatggaggagttcacgactgagaagtctccatctttgacggtttatgtccctctagttgctgggacaatagcacgctccttggcttgtatctcttgttaccctgttgagttagcaaggacacggatgcaggcatttaagggaacgcaaagaaatgtgaaactgcctggcgtttggaagacattagttgacgtcgtcaatccagtgaagggctcaaataatggatataggatgttatggactggtcttggtgctcaacttgctagggatgttccattctctgcaatctgctggtcgatacttgagcctacccggagaagcattcagtcggccatgggtgaagaaccaagggcaggcagtataataggtgcaaacttcgctgctggttttgttgcgggtgcagttgctgcagcagctacttgccctctagatgttgcaaagactaggcgtcaaatagagaagaacacagatagagccatgacaatgaccacaagacaaaccttggcagagatttggagggacggagggatgagagggatgtttagtggagcaggggctagagtgggacgagcaggaccatctgtagccattgtggtatcgttttacgaagtggtcaagtacggactgcacaacttccaccaacagtaacacttatactagacagattttgttttgatgcgaagctaaaaagaacacacttgcgcgtctaatccaataaaggttaccgtattaggtgcttacggcaaaacttgatttttttttgtcaagaaggaatattatttatgcaagttgttgcatttgtttttcgttttaatattttttgtaagaacaagtaaattaacacgagattcttatggc

SEQ ID NO: 107924 - protein, 262 aa, Arabidopsis thaliana
  peptide (1)..(262): Ceres Seq. ID no. 13652320
MFSTKLSARNNFMQEGFSRLWRGTNASLTLAIPTVGIYMPCYDYFRNIMEEFTTEKSPSLTVYVPLVAGTIARSLACISCYPVELARTRMQAFKGTQRNVKLPGVWKTLVDVVNPVKGSNNGYRMLWTGLGAQLARDVPFSAICWSILEPTRRSIQSAMGEEPRAGSIIGANFAAGFVAGAVAAAATCPLDVAKTRRQIEKNTDRAMTMTTRQTLAEIWRDGGMRGMFSGAGARVGRAGPSVAIVVSFYEVVKYGLHNFHQQ

SEQ ID NO: 107925 - protein, 250 aa, Arabidopsis thaliana
  peptide (1)..(250): Ceres Seq. ID no. 13652321
MQEGFSRLWRGTNASLTLAIPTVGIYMPCYDYFRNIMEEFTTEKSPSLTVYVPLVAGTIARSLACISCYPVELARTRMQAFKGTQRNVKLPGVWKTLVDVVNPVKGSNNGYRMLWTGLGAQLARDVPFSAICWSILEPTRRSIQSAMGEEPRAGSIIGANFAAGFVAGAVAAAATCPLDVAKTRRQIEKNTDRAMTMTTRQTLAEIWRDGGMRGMFSGAGARVGRAGPSVAIVVSFYEVVKYGLHNFHQQ

SEQ ID NO: 107926 - protein, 224 aa, Arabidopsis thaliana
  peptide (1)..(224): Ceres Seq. ID no. 13652322
MPCYDYFRNIMEEFTTEKSPSLTVYVPLVAGTIARSLACISCYPVELARTRMQAFKGTQRNVKLPGVWKTLVDVVNPVKGSNNGYRMLWTGLGAQLARDVPFSAICWSILEPTRRSIQSAMGEEPRAGSIIGANFAAGFVAGAVAAAATCPLDVAKTRRQIEKNTDRAMTMTTRQTLAEIWRDGGMRGMFSGAGARVGRAGPSVAIVVSFYEVVKYGLHNFHQQ

SEQ ID NO: 107927 - DNA, 1055 bp, Arabidopsis thaliana
  misc_feature (1)..(1055): Ceres Seq. ID no. 13652327
  misc_feature (1)..(1055): Ortholog of  Ceres SEQ ID NO 15226238 as cited in SEQ ID NO 68840
  misc_feature (1)..(1055): Ortholog of  Ceres SEQ ID NO 12635175 as cited in SEQ ID NO 0
  misc_feature (1)..(1055): Ortholog of  Ceres SEQ ID NO 14306100 as cited in SEQ ID NO 0
acatgtaaattcacatatctctctaatttgctcactagatattatttctttcctcttgaaaagtccaaaaatgagaagctttctctacctcatcgtagtcatcttcctcttctcttcatccgttaacgcttgtgatcgatgtctacaccgttctaaagcatcttatttctcctctgcttctgctctctcttgtaaacattcccatcttcttctaactacttccgtttaactactagtttgtttcttttttctcatgtcttgtttatgggtattttctagccggggcttgtgcctatggccctatggctacgagcttctttgccggccacattgcggccgctataccttccatttacaaagatggtgctggctgtggagcttgctttcaagtcagatgcaagaaccccaagttgtgtaacagtaaaggaaccattgtgatggtcacagacttgaacacgagcaaccaaactgatcttgtccttagtagtagagcttttagggctatggctaagcctgttgttggtgttgacaaataccttctcaaacaaggcatcgtcgacgttgaataccaaagagttccttgcaattacggtaaaaggaatttgaacgtgagagtggaagaagcaagcaaaaagccaaattacttggcgataaagctattgtaccaaggaggtcaaaccgaagtggtaggtatcgacattgctccagtaggttcgtcacaatggagttacatgagtagaagccacggagccgtttgggcgaccgataaagtaccaacgggagctctacagttcaagttcacggtgacaggcggctacgatggcaaaacggtttggtcaaagagggttcttccggcgaattggaactctgggaggatttatgatgccggcgttcagatcaccgacattgctcaagaaggttgtgatacatgcggtcacatatggaactgactcattacaattctccttatttaggcaaacagcaaacaaacaccctttataggatatatacatgtatgtgtaacagagttcattatttaatgagttgaagaattc

SEQ ID NO: 107928 - protein, 215 aa, Arabidopsis thaliana; identical to SEQ ID NO: 90784
  peptide (1)..(215): Ceres Seq. ID no. 13652328

SEQ ID NO: 107929 - protein, 170 aa, Arabidopsis thaliana; identical to SEQ ID NO: 90785
  peptide (1)..(170): Ceres Seq. ID no. 13652329

SEQ ID NO: 107930 - protein, 148 aa, Arabidopsis thaliana
  peptide (1)..(148): Ceres Seq. ID no. 13652330
MAKPVVGVDKYLLKQGIVDVEYQRVPCNYGKRNLNVRVEEASKKPNYLAIKLLYQGGQTEVVGIDIAPVGSSQWSYMSRSHGAVWATDKVPTGALQFKFTVTGGYDGKTVWSKRVLPANWNSGRIYDAGVQITDIAQEGCDTCGHIWN

SEQ ID NO: 107931 - DNA, 1612 bp, Arabidopsis thaliana
  misc_feature (1)..(1612): Ceres Seq. ID no. 13652331
  misc_feature (1)..(1612): Ortholog of  Ceres SEQ ID NO 13663839 as cited in SEQ ID NO 60834
atggcggacgcagaaacctttgctttccaagctgagatcaaccagttgctctccctcatcatcaataccttttactctaacaaggagatcttccttcgtgaactcatcagtaactcttctgatgctttggacaagattaggtttgagtccttgacagacaagagcaagctcgatggtcagccagagctcttcattcacatcattcccgacaagactaacaacaccttgacgattatcgatagtggtattgggatgaccaaggctgatctggtgaacaaccttggaacaattgcaagatctggaaccaaagaattcatggaggcgttggctgctggagctgatgttagcatgattggacagtttggtgttggtttctactctgcttacttggttgctgacaaggttgttgttactaccaagcacaatgacgatgagcagtacgtgtgggagtcccaggccggtggatctttcaccgtcaccagagacacctctggtgaggctcttggtagaggaactaagatggtcctttacctcaaggaagaccagatggagtacattgaggagcgaaggcttaaggatttggtgaagaagcactctgagttcatcagctacccaatctctctctggattgagaagaccattgagaaggagatctctgatgatgaagaggaggaagagaagaaggatgaggaaggcaaggttgaggaagttgatgaggagaaagaaaaggaggactacaacaagttctatgaggctttctctaagaacctgaagctcggtatccatgaggactcccaaaacagaaccaagattgctgagttgctccgttaccactcaaccaagagcggtgatgaattgaccagtctcaaggactacgtgacaaggatgaaggaaggtcagaacgatatcttctatatcactggtgagagcaagaagggtattgaagttctctacatggttgacgctatcgatgagtatgctattggtcagctcaaggaattcgaaggaaagaagcttgtctctgcaaccaaggaaggtctgaaactggatgagactgaagacgagaagaagaagaaagaagagctcaaggagaagtttgagggactctgcaaagtgatcaaggacgttttgggagacaaggttgagaaggttatcgtctctgaccgtgttgtggactcaccctgctgtcttgtaacaggcgagtatggctggactgcaaacatggagaggatcatgaaagctcaagccttgagagacagcagcatgggtggctacatgtcgagcaagaagacaatggagattaacccagagaactccatcatggatgagctgagaaagagagctgatgcagacaagaacgacaagtctgtgaaggaccttgtacttcttctctttgagaccgctcttctcacttctggtttcagcctcgatgagcccaacactttcgggagcaggattcacaggatgttgaagcttggattgagcattgatgacgatgatgttgttgaagccgatgctgacatgcctccacttgaagatgatgccgatgctgaaggtagcaagatggaggaagttgactaaattatcacacacagtcgacttaatcattagg

SEQ ID NO: 107932 - protein, 526 aa, Arabidopsis thaliana
  peptide (1)..(526): Ceres Seq. ID no. 13652332
MADAETFAFQAEINQLLSLIINTFYSNKEIFLRELISNSSDALDKIRFESLTDKSKLDGQPELFIHIIPDKTNNTLTIIDSGIGMTKADLVNNLGTIARSGTKEFMEALAAGADVSMIGQFGVGFYSAYLVADKVVVTTKHNDDEQYVWESQAGGSFTVTRDTSGEALGRGTKMVLYLKEDQMEYIEERRLKDLVKKHSEFISYPISLWIEKTIEKEISDDEEEEEKKDEEGKVEEVDEEKEKEDYNKFYEAFSKNLKLGIHEDSQNRTKIAELLRYHSTKSGDELTSLKDYVTRMKEGQNDIFYITGESKKGIEVLYMVDAIDEYAIGQLKEFEGKKLVSATKEGLKLDETEDEKKKKEELKEKFEGLCKVIKDVLGDKVEKVIVSDRVVDSPCCLVTGEYGWTANMERIMKAQALRDSSMGGYMSSKKTMEINPENSIMDELRKRADADKNDKSVKDLVLLLFETALLTSGFSLDEPNTFGSRIHRMLKLGLSIDDDDVVEADADMPPLEDDADAEGSKMEEVD

SEQ ID NO: 107933 - protein, 442 aa, Arabidopsis thaliana
  peptide (1)..(442): Ceres Seq. ID no. 13652333
MTKADLVNNLGTIARSGTKEFMEALAAGADVSMIGQFGVGFYSAYLVADKVVVTTKHNDDEQYVWESQAGGSFTVTRDTSGEALGRGTKMVLYLKEDQMEYIEERRLKDLVKKHSEFISYPISLWIEKTIEKEISDDEEEEEKKDEEGKVEEVDEEKEKEDYNKFYEAFSKNLKLGIHEDSQNRTKIAELLRYHSTKSGDELTSLKDYVTRMKEGQNDIFYITGESKKGIEVLYMVDAIDEYAIGQLKEFEGKKLVSATKEGLKLDETEDEKKKKEELKEKFEGLCKVIKDVLGDKVEKVIVSDRVVDSPCCLVTGEYGWTANMERIMKAQALRDSSMGGYMSSKKTMEINPENSIMDELRKRADADKNDKSVKDLVLLLFETALLTSGFSLDEPNTFGSRIHRMLKLGLSIDDDDVVEADADMPPLEDDADAEGSKMEEVD

SEQ ID NO: 107934 - protein, 421 aa, Arabidopsis thaliana
  peptide (1)..(421): Ceres Seq. ID no. 13652334
MEALAAGADVSMIGQFGVGFYSAYLVADKVVVTTKHNDDEQYVWESQAGGSFTVTRDTSGEALGRGTKMVLYLKEDQMEYIEERRLKDLVKKHSEFISYPISLWIEKTIEKEISDDEEEEEKKDEEGKVEEVDEEKEKEDYNKFYEAFSKNLKLGIHEDSQNRTKIAELLRYHSTKSGDELTSLKDYVTRMKEGQNDIFYITGESKKGIEVLYMVDAIDEYAIGQLKEFEGKKLVSATKEGLKLDETEDEKKKKEELKEKFEGLCKVIKDVLGDKVEKVIVSDRVVDSPCCLVTGEYGWTANMERIMKAQALRDSSMGGYMSSKKTMEINPENSIMDELRKRADADKNDKSVKDLVLLLFETALLTSGFSLDEPNTFGSRIHRMLKLGLSIDDDDVVEADADMPPLEDDADAEGSKMEEVD

SEQ ID NO: 107935 - DNA, 1125 bp, Arabidopsis thaliana
  misc_feature (1)..(1125): Ceres Seq. ID no. 13652351
  misc_feature (1)..(1125): Ortholog of  Ceres SEQ ID NO 13581889 as cited in SEQ ID NO 50900
  misc_feature (1)..(1125): Ortholog of  Ceres SEQ ID NO 13581902 as cited in SEQ ID NO 52223
  misc_feature (1)..(1125): Ortholog of  Ceres SEQ ID NO 12585528 as cited in SEQ ID NO 62991
aacatcttcttcttcttcatcaaatctcacaaatcttcaacacttaatcacaaatctcaaagcttcggataccaaatggctcgtaccaagcaaaccgcaaggaaatccaccggaggaaaagccccaaggaaacaactcgcaacaaaggcggcgaggaaatcagctccggcgaccggaggagtaaagaagccacacagattccgtcctggaactgttgccctaagagaaatcaggaagtatcagaagagcactgagcttctgatccgcaagcttccgttccagcgtttggttcgtgagatcgctcaggatttcaaaacagatctgcgtttccagagcagcgccgtcgcagcacttcaggaagcggctgaagcatacctcgttggattgtttgaagacaccaatctttgcgcgattcatgctaagagagtcactatcatgcctaaggatattcaattggcgaggagaattagaggcgagagggcttaagaaggagattgaagtactctagactgtgatcgttatgcttatactgctagaatatccaccggaggaaaagctccgaggaagcaattagcgccaaaagcggcgagacaatctgcaccagcaacgggaggagtgaagaagccacacagattccgtccaggaactgttgcgttgagagatattaggaaataccaaaagagtaccgagattttgatcagaaagcttccgtttcagcgacttgttcgtgagatcgctcaagatttcaaaacggatctgaggtttcagagcagtgccgtcgctgctctccaggaagctgctgaggcttaccttgttgggttattcgaagatacaaacctctgtgcgattcacgcaaagagggtgacgatcatgcctaaagagatccaattagcgagaaggattagaggtgagagagctcgaggagagtgatgattttgttgttctgcgaactgggatttcatgggtttttcgatttacggatttgggtttatgtaagtttcgatctttgctgctttggaatgtcttgtaggttggttagttaatgcttttatttgcagctaaggtgtttgtggaaattccccaatgaaacttgtaatgttcaatacaatccttactttggttccc

SEQ ID NO: 107936 - protein, 161 aa, Arabidopsis thaliana
  peptide (1)..(161): Ceres Seq. ID no. 13652352
NIFFFFIKSHKSSTLNHKSQSFGYQMARTKQTARKSTGGKAPRKQLATKAARKSAPATGGVKKPHRFRPGTVALREIRKYQKSTELLIRKLPFQRLVREIAQDFKTDLRFQSSAVAALQEAAEAYLVGLFEDTNLCAIHAKRVTIMPKDIQLARRIRGERA

SEQ ID NO: 107937 - protein, 136 aa, Arabidopsis thaliana; identical to SEQ ID NO: 8709
  peptide (1)..(136): Ceres Seq. ID no. 13652353

SEQ ID NO: 107938 - DNA, 1121 bp, Arabidopsis thaliana
  misc_feature (1)..(1121): Ceres Seq. ID no. 13652380
  misc_feature (1)..(1121): Ortholog of  Ceres SEQ ID NO 15177557 as cited in SEQ ID NO 53220
  misc_feature (1)..(1121): Ortholog of  Ceres SEQ ID NO 14313123 as cited in SEQ ID NO 54602
gtgtttgtttgttgttacagtttgtttgtttgtttatagcgggaactctcacccaaaagaaggatgagtatggagatggagttgtttgtcactccagagaagcagaggcaacatccttcagtgagcgttgagaaaactccagtgagaaggaaattgattgttgatgatgattctgaaattggatcagagaagaaagggcaatcaagaacttctggaggcgggcttcgtcaattcagtgttatggtttgtcagaagttggaagccaagaagataactacttacaaggaggttgcagacgaaattatttcagattttgccacaattaagcaaaacgcagagaagcctttgaatgaaaatgagtacaatgagaagaacataaggcggagagtctacgatgcgctcaatgtgttcatggcgttggatattattgcaagggataaaaaggaaatccggtggaaaggacttcctattacctgcaaaaaggatgtggaagaagtcaagatggatcgtaataaagttatgagcagtgtgcaaaagaaggctgcttttcttaaagagttgagagaaaaggtctcaagtcttgagagtcttatgtcgagaaatcaagagatggttgtgaagactcaaggcccagcagaaggatttaccttaccattcattctacttgagacaaaccctcacgcagtagtcgaaatcgagatttctgaagatatgcaacttgtacacctcgacttcaatagcacacctttctcggtccatgatgatgcttacattttgaaactgatgcaagaacagaagcaagaacagaacagagtatcttcttcttcatctacacatcaccaatctcaacatagctccgctcattcttcatccagttcttgcattgcttctggaacctcaggcccggtttgctggaactcgggatccattgatactcgctgaccgagcttctattcccaaattcttcaagaagaagaagtaatgatctaattggtatactaaaaaattatacatctggtttagtgttcaattgagagagactgtaaaatcaattcataggccaacaaatgtttgtttatccaattttcctttttattcgaacttgatgcgatatttcaacg

SEQ ID NO: 107939 - protein, 292 aa, Arabidopsis thaliana; identical to SEQ ID NO: 48076
  peptide (1)..(292): Ceres Seq. ID no. 13652381

SEQ ID NO: 107940 - protein, 290 aa, Arabidopsis thaliana; identical to SEQ ID NO: 48077
  peptide (1)..(290): Ceres Seq. ID no. 13652382

SEQ ID NO: 107941 - protein, 288 aa, Arabidopsis thaliana
  peptide (1)..(288): Ceres Seq. ID no. 13652383
MELFVTPEKQRQHPSVSVEKTPVRRKLIVDDDSEIGSEKKGQSRTSGGGLRQFSVMVCQKLEAKKITTYKEVADEIISDFATIKQNAEKPLNENEYNEKNIRRRVYDALNVFMALDIIARDKKEIRWKGLPITCKKDVEEVKMDRNKVMSSVQKKAAFLKELREKVSSLESLMSRNQEMVVKTQGPAEGFTLPFILLETNPHAVVEIEISEDMQLVHLDFNSTPFSVHDDAYILKLMQEQKQEQNRVSSSSSTHHQSQHSSAHSSSSSCIASGTSGPVCWNSGSIDTR

SEQ ID NO: 107942 - DNA, 1729 bp, Arabidopsis thaliana
  misc_feature (1)..(1729): Ceres Seq. ID no. 13652440
  misc_feature (1)..(1729): Ortholog of  Ceres SEQ ID NO 13597407 as cited in SEQ ID NO 64106
attcgacgattcctctcgacgttatcatatttcctctccaggagcgtgtttccagaggggatggattctgttcgacgcacttacaccattatgcgaggtcgtcacatagacaagcgtgttccttctaaagagtttctctctgctttggataaagctgaaactgcagtacgtcttcctactgggacgggaaaagactgcgggaatccttcctggaagcgatctctgcctcacgtgctcgttgcttctctgacttcgcttttattcggctatcatctcggggttgttaatgaaactctcgaaagcatatcaattgaccttggctttagtgggaacaccatagctgaaggtcttgtggttagcacctgcttaggcggcgcctttattgggtctctgttcagtgggttggtagctgatggtgttgggcgccgtagagctttccagttgagcgctttaccaatgattgttggagcttctgtgagtgcatcaactgagagtcttatgggcatgctcctgggaaggtttttggtcggaattgggatgggcataggtccttctgttacagctctctatgtcactgaggtgtcacctgcttatgtgagaggtacatatgggagttctacccaaatcgcaacatgtattggactcttaggttcgctgtttgctggaatcccggcaaaagataacttgggctggtggcgcatatgtttttggatatccacagtcccagctgcaatgcttgctgtcttcatggaactctgcgtggaaagtcctcagtggctttttaagaggggaagggcagctgaagctgaagctgtgtttgagaagctattgggagggtcgtacgtcaaagctgctatggcagagttagtgaagtcggataggggagatgacgccgattcagccaaattgtcggagttgctttttggacgcagttttagagttgtctgggataaatgctgtgttctatttctcatcaactgtcttcaagaaagctggtgtaccttcagcctctgcaaacatatgtgtaggagtttgcaacctcttaggatcaactgttgctgtggttttgatggataagctggggagaaaagtgttgcttattgggagttttgcgggcatggcagtatcgctgggtctccaagcaatagcatatacttcgcttccttcgccctttggaaccttgtttctctcggttggaggaatgctgctgtttgtgttgtcgtttgcaactggagcgggtcctgttccaagtcttctcctgtctgagatatgccctggtcgacttcgagcaactgcgttggctgtttgtcttgccgttcactgggttataaacttctttgtcgggctgctgtttctgagaatgctggagcaactaggttcggtgcttctaaatgcaatatttgggttcttctgtgtggtggcagtcatctttgtgcagaagaacgtggttgagactaaaggaaagagcctacaagagatagaaatcagtctgctctcttccacccagtgattgatctctttattctgagaattcgtattattcttctggctctctttttttccttggagagacacaagtaacgtgtacctaatatggaagtaggagtgagtagtaagtaggtaaacaacatgtaaggaaatggatattattcattcgagtatagccaacgtttcaactgattttgtaataaacataagaccaaacttcattcaacaatggtaggttctc

SEQ ID NO: 107943 - protein, 358 aa, Arabidopsis thaliana
  peptide (1)..(358): Ceres Seq. ID no. 13652441
IRRFLSTLSYFLSRSVFPEGMDSVRRTYTIMRGRHIDKRVPSKEFLSALDKAETAVRLPTGTGKDCGNPSWKRSLPHVLVASLTSLLFGYHLGVVNETLESISIDLGFSGNTIAEGLVVSTCLGGAFIGSLFSGLVADGVGRRRAFQLSALPMIVGASVSASTESLMGMLLGRFLVGIGMGIGPSVTALYVTEVSPAYVRGTYGSSTQIATCIGLLGSLFAGIPAKDNLGWWRICFWISTVPAAMLAVFMELCVESPQWLFKRGRAAEAEAVFEKLLGGSYVKAAMAELVKSDRGDDADSAKLSELLFGRSFRVVWDKCCVLFLINCLQESWCTFSLCKHMCRSLQPLRINCCCGFDG

SEQ ID NO: 107944 - protein, 338 aa, Arabidopsis thaliana
  peptide (1)..(338): Ceres Seq. ID no. 13652442
MDSVRRTYTIMRGRHIDKRVPSKEFLSALDKAETAVRLPTGTGKDCGNPSWKRSLPHVLVASLTSLLFGYHLGVVNETLESISIDLGFSGNTIAEGLVVSTCLGGAFIGSLFSGLVADGVGRRRAFQLSALPMIVGASVSASTESLMGMLLGRFLVGIGMGIGPSVTALYVTEVSPAYVRGTYGSSTQIATCIGLLGSLFAGIPAKDNLGWWRICFWISTVPAAMLAVFMELCVESPQWLFKRGRAAEAEAVFEKLLGGSYVKAAMAELVKSDRGDDADSAKLSELLFGRSFRVVWDKCCVLFLINCLQESWCTFSLCKHMCRSLQPLRINCCCGFDG

SEQ ID NO: 107945 - protein, 328 aa, Arabidopsis thaliana
  peptide (1)..(328): Ceres Seq. ID no. 13652443
MRGRHIDKRVPSKEFLSALDKAETAVRLPTGTGKDCGNPSWKRSLPHVLVASLTSLLFGYHLGVVNETLESISIDLGFSGNTIAEGLVVSTCLGGAFIGSLFSGLVADGVGRRRAFQLSALPMIVGASVSASTESLMGMLLGRFLVGIGMGIGPSVTALYVTEVSPAYVRGTYGSSTQIATCIGLLGSLFAGIPAKDNLGWWRICFWISTVPAAMLAVFMELCVESPQWLFKRGRAAEAEAVFEKLLGGSYVKAAMAELVKSDRGDDADSAKLSELLFGRSFRVVWDKCCVLFLINCLQESWCTFSLCKHMCRSLQPLRINCCCGFDG

SEQ ID NO: 107946 - DNA, 1277 bp, Arabidopsis thaliana
  misc_feature (1)..(1277): Ceres Seq. ID no. 13652448
  misc_feature (1)..(1277): Ortholog of  Ceres SEQ ID NO 13656436 as cited in SEQ ID NO 69154
ttggttacagagaagaagaagaaggagaaatgtcagacgacgacgagagaggcgaagagtacctcttcaagattgttatcatcggtgattccgccgtcggcaaatccaatctcctcactcgctacgcccgtaacgagttcaatcccaattccaaagccactatcggcgtcgagtttcagactcagagcatgctcatcgacggcaaagaggtcaaagctcagatttgggataccgccggtcaggaacgcttccgcgccgttacatctgcttattaccgtggcgccgttggagccctcgtcgtctacgatatcactcgtagctccactttcgaaaacgtcggtcgctggctcgatgagctcaacagtatgtgtttcgatctccgatttttgagtgaatttattcaatttgaagtgagatctgtaaatctgagttttgattttgaatagagtagagattggatttggattaggattgaatcatagcgatagtgatgctgctggttagaatttttagatctgaagatttatgatgacttcttaagactttgattcaaagtcaagtcaaatttatctacttctttaggtttatgattatcatgaaactgaatgatgaagatatgcaatgattagttgattcatgtttgcatctttactctattgagcttgaaattgtgataggttgagttagagttagtttgacagtaatgatgaatctttggtgcagctcattctgatacaacagtagcaaaaatgcttattgggaacaaatgtgatctcgagagcataagagcggtgagtgttgaggaaggcaagagtcttgctgagtctgaaggtttgtttttcatggagacctctgcgttggactcgaccaatgtaaagacggctttcgagatggttattcgggagatctatagcaacattagtcgaaagcaattgaactctgattcttacaaagaggagctgactgtgaatcgtgttagcttggttaagaacgagaacgaagggacaaagacattctcttgctgttcgaggtaacatctttgtaacggtttctctttgtcctgaggattggtttcgggttgaattgtgttcctgataaacttatagaaaggcagagatatattcttatagttctcagttaaagtaaaagaagaagagagaaagatgttttgagtttctttgttacgcatacagaaaaagtttggttagtgtataagttatgttctcatttgtaacttttgtaaacttatgattgttaaatcaattttgatattttcc

SEQ ID NO: 107947 - protein, 147 aa, Arabidopsis thaliana
  peptide (1)..(147): Ceres Seq. ID no. 13652449
GYREEEEGEMSDDDERGEEYLFKIVIIGDSAVGKSNLLTRYARNEFNPNSKATIGVEFQTQSMLIDGKEVKAQIWDTAGQERFRAVTSAYYRGAVGALVVYDITRSSTFENVGRWLDELNSMCFDLRFLSEFIQFEVRSVNLSFDFE

SEQ ID NO: 107948 - protein, 138 aa, Arabidopsis thaliana
  peptide (1)..(138): Ceres Seq. ID no. 13652450
MSDDDERGEEYLFKIVIIGDSAVGKSNLLTRYARNEFNPNSKATIGVEFQTQSMLIDGKEVKAQIWDTAGQERFRAVTSAYYRGAVGALVVYDITRSSTFENVGRWLDELNSMCFDLRFLSEFIQFEVRSVNLSFDFE

SEQ ID NO: 107949 - protein, 129 aa, Arabidopsis thaliana
  peptide (1)..(129): Ceres Seq. ID no. 13652451
LVTEKKKKEKCQTTTREAKSTSSRLLSSVIPPSANPISSLATPVTSSIPIPKPLSASSFRLRACSSTAKRSKLRFGIPPVRNASAPLHLLITVAPLEPSSSTISLVAPLSKTSVAGSMSSTVCVSISDF

SEQ ID NO: 107950 - DNA, 1261 bp, Arabidopsis thaliana
  misc_feature (1)..(1261): Ceres Seq. ID no. 13652452
  misc_feature (1)..(1261): Ortholog of  Ceres SEQ ID NO 13622227 as cited in SEQ ID NO 413
  misc_feature (1)..(1261): Ortholog of  Ceres SEQ ID NO 12563124 as cited in SEQ ID NO 57104
  misc_feature (1)..(1261): Ortholog of  Ceres SEQ ID NO 12617639 as cited in SEQ ID NO 65219
acatttcactgctcactactctcactgtaatcccttagatcttcttttcaaatttcaatggcgtccggtgatgttgagtatcggtgcttcgttggaggtctagcatgggccactgatgacagagctcttgagactgccttcgctcaatacggcgacgttattgattccaagatcattaacgatcgtgagactggaagatcaaggggattcggattcgtcaccttcaaggatgagaaagccatgaaggatgcgattgagggaatgaacggacaagatctcgatggccgtagcatcactgttaacgaggctcagtcacgaggaagcggtggcggcggaggccaccgtggaggtggtgtcggtggataccgcagcggcggtggtggaggttactccggtggaggtggtagctacggaggtggcggcggtagacgccatcagatcccaatcaaagatttaggtaataatttaccatagaagaaatggcagagtctactcagatggaagttgagacagcaacagaaggaactgtgccattgccgcctaaaccaaccttcaagcctttgaaagctcatgaaatgtctgatggtaaagtccagttcaggaaaatagctgtaccaccaaaccgatactcgcctctcaagaaagcatggttggatatctacacacccatttacgatcagatgaaggttgacataaggatgaatctcaaagcccgcaaagtcgagcttaaaacccgagctgacactcccgacatcagtaatcttcagaagtctgcggattttgtacacgctttcatgcttggttttgatatccctgatgctatctctcttttgagaatggacgagctttatgttgagtcttttgagatcaaggatgtgaagactcttaaaggtgagcatttgtctagagccattggtaggttgtctggtaaaggagggaagacaaagtttgctattgagaactcgaccaagacgaggattgtgattgcagacactaggattcatattttgggagctttctctaatattaaagtcgcaaggagttcactttgcagtcttattatgggatctcctgctgggaaagtttactctaagctcagatctgtctctgctagattgaacgaatagttttgaatggcgaaattttgaaacattaacttgcttttgttcggagtgatctttgtaatgaaattttgaagaaacaaatgttatggtgttctttataaaatttgttatgggatgaaaattgttatttgaatgct

SEQ ID NO: 107951 - protein, 215 aa, Arabidopsis thaliana; identical to SEQ ID NO: 98573
  peptide (1)..(215): Ceres Seq. ID no. 13652453

SEQ ID NO: 107952 - protein, 209 aa, Arabidopsis thaliana; identical to SEQ ID NO: 98574
  peptide (1)..(209): Ceres Seq. ID no. 13652454

SEQ ID NO: 107953 - protein, 183 aa, Arabidopsis thaliana; identical to SEQ ID NO: 98575
  peptide (1)..(183): Ceres Seq. ID no. 13652455

SEQ ID NO: 107954 - DNA, 1596 bp, Arabidopsis thaliana
  misc_feature (1)..(1596): Ceres Seq. ID no. 13652484
  misc_feature (1)..(1596): Ortholog of  Ceres SEQ ID NO 14314643 as cited in SEQ ID NO 56903
aaacacacttgtcgtctcttctctctctcgcagctcttctctattttcagcaatcgcctataatattaggtaaagctaaaagggtctgattcgtttgttttttcactgaagaatttggaaggaagtgattccgttgtgaaacagaaaagaagtatgggtactcacattgatatcaacaacttaggcggcgatacttctagagggaatgagtcaaagccattggcgaggcagtcttcgttatattccttaacgtttgatgagcttcagagcacattaggtgagccggggaaagattttgggtctatgaatatggatgagttactcaagaacatatggactgctgaggatactcaagcctttatgactactacatcttcggttgcagccccgggacctagtggttttgttccgggaggaaatggtttacagaggcaaggctccttgaccttgcctagaacgcttagtcagaagactgtcgatgaagtctggaaatacctgaattcgaaagaaggtagtaatgggaatactggaacggatgcgcttgagaggcaacagactttaggggaaatgactctggaagatttcttactccgtgctggcgttgttaaagaagataatactcagcagaacgaaaacagtagtagcgggttttatgctaacaacggtgctgctggtttggagtttggatttggtcagccgaatcaaaacagcatatcgttcaacgggaacaatagttctatgatcatgaatcaagcacctggtttaggcctcaaagttggtggaaccatgcagcagcagcagcagccacatcagcagcagttgcagcagccacatcagagactgcctccaactatctttccaaaacaagcgaatgtaacatttgcggcgcctgtaaatatggtcaacaggggtttatttgagactagcgcagatggtccagccaacagtaatatgggaggagcagggggtactgttacagctacttctcctgggacgagcagtgcagaaaacaatacttggtcatcaccagttccttacgtgtttggtcggggaagaagaagcaatacgggcctggagaaggttgttgagagaaggcaaaagagaatgatcaagaatcgggaatccgctgctagatcaagggctcgaaaacaggcttataccttggaactggaagctgagattgaaagtctcaagctagtgaatcaagatttgcagaagaaacaggctgaaataatgaaaacccataatagtgagctaaaggaattttcgaagcagcctccattgctggccaaaagacaatgcttgagaagaacccttaccggtccgtggtaagaaggtgaagtcaaagcaagaagaacctgctaatgtaatacaggaccactcaaaaggaagacactgggagagtaatatgtaatagaagatagtgctactgtacaggagaaactacagagacgcttacaatgtagaaatcttttgagctgaatttaactaagagtgcagtctgtgtagagtatgagagctttcaatatgaattcataattttcataaacatatgtaaaactttcagatttagctatagagaagatgtgactaact

SEQ ID NO: 107955 - protein, 392 aa, Arabidopsis thaliana
  peptide (1)..(392): Ceres Seq. ID no. 13652485
MGTHIDINNLGGDTSRGNESKPLARQSSLYSLTFDELQSTLGEPGKDFGSMNMDELLKNIWTAEDTQAFMTTTSSVAAPGPSGFVPGGNGLQRQGSLTLPRTLSQKTVDEVWKYLNSKEGSNGNTGTDALERQQTLGEMTLEDFLLRAGVVKEDNTQQNENSSSGFYANNGAAGLEFGFGQPNQNSISFNGNNSSMIMNQAPGLGLKVGGTMQQQQQPHQQQLQQPHQRLPPTIFPKQANVTFAAPVNMVNRGLFETSADGPANSNMGGAGGTVTATSPGTSSAENNTWSSPVPYVFGRGRRSNTGLEKVVERRQKRMIKNRESAARSRARKQAYTLELEAEIESLKLVNQDLQKKQAEIMKTHNSELKEFSKQPPLLAKRQCLRRTLTGPW

SEQ ID NO: 107956 - protein, 342 aa, Arabidopsis thaliana
  peptide (1)..(342): Ceres Seq. ID no. 13652486
MNMDELLKNIWTAEDTQAFMTTTSSVAAPGPSGFVPGGNGLQRQGSLTLPRTLSQKTVDEVWKYLNSKEGSNGNTGTDALERQQTLGEMTLEDFLLRAGVVKEDNTQQNENSSSGFYANNGAAGLEFGFGQPNQNSISFNGNNSSMIMNQAPGLGLKVGGTMQQQQQPHQQQLQQPHQRLPPTIFPKQANVTFAAPVNMVNRGLFETSADGPANSNMGGAGGTVTATSPGTSSAENNTWSSPVPYVFGRGRRSNTGLEKVVERRQKRMIKNRESAARSRARKQAYTLELEAEIESLKLVNQDLQKKQAEIMKTHNSELKEFSKQPPLLAKRQCLRRTLTGPW

SEQ ID NO: 107957 - protein, 340 aa, Arabidopsis thaliana
  peptide (1)..(340): Ceres Seq. ID no. 13652487
MDELLKNIWTAEDTQAFMTTTSSVAAPGPSGFVPGGNGLQRQGSLTLPRTLSQKTVDEVWKYLNSKEGSNGNTGTDALERQQTLGEMTLEDFLLRAGVVKEDNTQQNENSSSGFYANNGAAGLEFGFGQPNQNSISFNGNNSSMIMNQAPGLGLKVGGTMQQQQQPHQQQLQQPHQRLPPTIFPKQANVTFAAPVNMVNRGLFETSADGPANSNMGGAGGTVTATSPGTSSAENNTWSSPVPYVFGRGRRSNTGLEKVVERRQKRMIKNRESAARSRARKQAYTLELEAEIESLKLVNQDLQKKQAEIMKTHNSELKEFSKQPPLLAKRQCLRRTLTGPW

SEQ ID NO: 107958 - DNA, 1084 bp, Arabidopsis thaliana
  misc_feature (1)..(1084): Ceres Seq. ID no. 13652666
  misc_feature (1)..(1084): Ortholog of  Ceres SEQ ID NO 14308080 as cited in SEQ ID NO 55218
  misc_feature (1)..(1084): Ortholog of  Ceres SEQ ID NO 14309287 as cited in SEQ ID NO 0
gagagaaagagtgctcagagtgagcgagagcatagcggtggagtgtcgccactggtaactccgacgatttttctcgtttgcgagctgcaacgcgaaggtgtgatctttccactgaaactrgctatcaagatgaattcatttcctgcacaaaaccttatgctatctgctacaaacgcaaacaaggactcaggcttgcgtacgtctaatgctcattggttacattcatgtatcgccgttccaaagaccacaggcattgatctttctcaggaacctcctgctgaaggtgtgatggtgcctcaatctcatttgtttcctcctcctattagagattccagaaacgatactgaaactgtgaaacagaagtccgtaaatcagtctccttcgaaagctttgaagccaaaaccgcaaaggaagaaacgctctgtatccaacaagtcaaagaaaacacctagcataccagaaacaaaacgtgagaaaaagaatctggacatcaacattgacatctcaagctttgatacttctggggttcctcctcctgtatgttcatgtacaggcgtttcaagggtttgctacaaatggggcatgggcggttggcaatcctcatgttgtaccatcagcatatcgacatacccactacccatgagcacaacaagacctggagctcgtcttgcaggaagaaaaatgagcaatggtgcttatgttaagctccttgcgaggcttgcggacgaaggctatgacctctctcaccctcttgatctcaagaaccattgggccagacacggtactaacaagtttgtgaccatcaagtagtcgtttcattagttgggtttgatttagatattagcttttgtggcttctttttaagtccttttcacagtcttagccttttggtatatatttgggagtactgtatttgctatagtagrggtatcctttacttgtttcccctgaagtagagtatatttcctgcaaaaatcccaacagtcgtggaaacacattatggcatgaacttgggtaacttcggtcatgcaacacattgctttggaattcacaaataaatttcaataagaaatgaatattagcg

SEQ ID NO: 107959 - protein, 269 aa, Arabidopsis thaliana
  peptide (1)..(269): Ceres Seq. ID no. 13652667
  misc_feature (40)..(40): Xaa is any aa, unknown or other
ERKSAQSEREHSGGVSPLVTPTIFLVCELQREGVIFPLKXAIKMNSFPAQNLMLSATNANKDSGLRTSNAHWLHSCIAVPKTTGIDLSQEPPAEGVMVPQSHLFPPPIRDSRNDTETVKQKSVNQSPSKALKPKPQRKKRSVSNKSKKTPSIPETKREKKNLDINIDISSFDTSGVPPPVCSCTGVSRVCYKWGMGGWQSSCCTISISTYPLPMSTTRPGARLAGRKMSNGAYVKLLARLADEGYDLSHPLDLKNHWARHGTNKFVTIK

SEQ ID NO: 107960 - protein, 226 aa, Arabidopsis thaliana; identical to SEQ ID NO: 72076
  peptide (1)..(226): Ceres Seq. ID no. 13652668

SEQ ID NO: 107961 - protein, 217 aa, Arabidopsis thaliana; identical to SEQ ID NO: 72077
  peptide (1)..(217): Ceres Seq. ID no. 13652669

SEQ ID NO: 107962 - DNA, 809 bp, Arabidopsis thaliana
  misc_feature (1)..(809): Ceres Seq. ID no. 13652714
  misc_feature (1)..(809): Ortholog of  Ceres SEQ ID NO 14304228 as cited in SEQ ID NO 56358
aaaaatgtctcgattgctctcaaaaaccctaattcccaacggaagattcctcctccgtcgtttcaacgagccggcgattacgacaccaccaaacgtcgtctgtttcagccgccgcttttcatccatcccacaagtcatcgagcttgaaatcgattctaaaaacgaagcggaagcagcaattctcaaaaagctaaacgaattcgtacgaaggatcatcgttcataattcgactccagattggcttccttttgcacctggctcttccttttgggtacctcctcatcagattacggctacaaagatcgccaatttggtcgataaggtgactaatccgttgacggaggaagagtctctttcgctttcgtctccttatggttggccttgttcctctttcttcattcctcctccagatggttcctcatctacacaagaggaagaagctagcgtggagttgaaaatcccggggaatgagatgttggaagtgaagctagcacattatccagatcctatttactcttttaaacctgaagatggtgaagagtgaagagtgattcgataccttttccagcacgagagagcaggacaggattggaaaaaacagatgacgatcgaaactcaagcagtttgtacatacagttgaaaaccatgggagttatatgatctttgggtgactttatacaccttgtttactatgttttataattgacttaatataattagcttgggggcttctccactttgcagagtttatggkgatgctcgggtaacttgacatttcatttataatgacaattcttccctttgaccct

SEQ ID NO: 107963 - protein, 180 aa, Arabidopsis thaliana
  peptide (1)..(180): Ceres Seq. ID no. 13652715
KMSRLLSKTLIPNGRFLLRRFNEPAITTPPNVVCFSRRFSSIPQVIELEIDSKNEAEAAILKKLNEFVRRIIVHNSTPDWLPFAPGSSFWVPPHQITATKIANLVDKVTNPLTEEESLSLSSPYGWPCSSFFIPPPDGSSSTQEEEASVELKIPGNEMLEVKLAHYPDPIYSFKPEDGEE

SEQ ID NO: 107964 - protein, 179 aa, Arabidopsis thaliana; identical to SEQ ID NO: 24941
  peptide (1)..(179): Ceres Seq. ID no. 13652716

SEQ ID NO: 107965 - DNA, 1979 bp, Arabidopsis thaliana
  misc_feature (1)..(1979): Ceres Seq. ID no. 13652767
  misc_feature (1)..(1979): Ortholog of  Ceres SEQ ID NO 15172020 as cited in SEQ ID NO 59739
tgtggactcaaagctattttaagtacaacacacgtggagaaagcagatacattgtctcgtaacagaaaacaaactcaagaatggacccaatcttagagttctaacaatcttaatctcatgtctcttgatgatccccaaagcaaatccagatcaatgtgtgttccagagtttaacagcaacaacaacacgacgaccttcgcacagattttagtaatctcatccattggcttactcttagcccktgcactgcacttccgtctaaggaagctacgtcactccaagaacatccctcgtctcagatcgtctcaaaaacacaaaggccatgagaagcttgagagattctctcactatgttgtgcggcagatgggattcaaggacaggagagaatgtcctcatctctgcaaattagctaatgagtacataagaaaatcaggcagctgtgaggaagacatatacagcttcttctctgaagagcctggtgctgattctctcttcattaagctcgttgaagagtttgagagatgtattcttagttactttgcttaccactggagccatgcggatctcatgatcagtcaggttactaataaactttcattatcccttctttgttatattactaatagaccaaaaacatttcagatactcagtgccgatgcagagcctaagaagaagctaaagcacattgtcatggcggctacaagggaacagaggtttgagagggtgactaaaaatctaaaagtggcaagagtgtttaacacattggtaggggaaatgaaagcaatggggatcgcatctgttgatgactcagagtgtacagaagttatggctccagttgcacacaaggaccgaagcccggttctacttcttatgggaggtggtatgggtgcaggaaagagcactgtgcttaaagacattctcaaagaaccgttttgggcaggagctgatgctgtggtgattgaagccgatgcttttaaagaatctgatgtgatatacagagctttaagcgccagaggtcatgttgatatgatcaagactgctgaattcgttcaccaatcatcaacagacgcagcatcatcgctgctcgttacagctctcaacgaagggcgagacgtgayaatggatggaacactctcttgggtaccatttgtggttcagaccataacaatggcgaggaatgtgcatcgccatcgttacagaatgggagctggctacaaggttggtgagaatggagatgttatagagaactattgggaacgcataggcgaaaggcaacagcttcaagaagatggaagggagagaaagccatacaggatagagttagttggagttgtatgtgatgcatatttagcagtgattcgaggaattaggagagctataatgtgtagaagagcagttagagtgaggtctcagctgagatctcacaagaggtttgcgaatgcgtttcttacctattgcaacttagttgacaatgctagactttactgcaccaatgctcttgaaggttctccaaagctgatagggtggaaagagaaggaaaagacattgctagtggatccagaggagatagactgtttgaagaatgtagggaggttaaacgagaatgcagattctatttacgagctatacagaaatccaaatcctgcttgtgaagctggatcaatatggaaagacattgttctttctccttctaggttcaacattcaacaagagctcaaatactcaattcagaaagtggaaagattcaaacagtatctccaagaaacaccaagatgagagatgaagatagataaacgcagaagatctcttagctttttttttcccggtatgtcattcatttatgtaactcctaaaacatcaaacaaaattgaatctctctagtaaagagagaattggcaacacctaacctaagagatagttacattgtcaagcttggtcttaagagatgtttaaggaagcaaatgtatgacatgattcag

SEQ ID NO: 107966 - protein, 552 aa, Arabidopsis thaliana
  peptide (1)..(552): Ceres Seq. ID no. 13652768
  misc_feature (42)..(42): Xaa is any aa, unknown or other
  misc_feature (334)..(334): Xaa is any aa, unknown or other
MSLDDPQSKSRSMCVPEFNSNNNTTTFAQILVISSIGLLLAXALHFRLRKLRHSKNIPRLRSSQKHKGHEKLERFSHYVVRQMGFKDRRECPHLCKLANEYIRKSGSCEEDIYSFFSEEPGADSLFIKLVEEFERCILSYFAYHWSHADLMISQVTNKLSLSLLCYITNRPKTFQILSADAEPKKKLKHIVMAATREQRFERVTKNLKVARVFNTLVGEMKAMGIASVDDSECTEVMAPVAHKDRSPVLLLMGGGMGAGKSTVLKDILKEPFWAGADAVVIEADAFKESDVIYRALSARGHVDMIKTAEFVHQSSTDAASSLLVTALNEGRDVXMDGTLSWVPFVVQTITMARNVHRHRYRMGAGYKVGENGDVIENYWERIGERQQLQEDGRERKPYRIELVGVVCDAYLAVIRGIRRAIMCRRAVRVRSQLRSHKRFANAFLTYCNLVDNARLYCTNALEGSPKLIGWKEKEKTLLVDPEEIDCLKNVGRLNENADSIYELYRNPNPACEAGSIWKDIVLSPSRFNIQQELKYSIQKVERFKQYLQETPR

SEQ ID NO: 107967 - protein, 540 aa, Arabidopsis thaliana
  peptide (1)..(540): Ceres Seq. ID no. 13652769
  misc_feature (30)..(30): Xaa is any aa, unknown or other
  misc_feature (322)..(322): Xaa is any aa, unknown or other
MCVPEFNSNNNTTTFAQILVISSIGLLLAXALHFRLRKLRHSKNIPRLRSSQKHKGHEKLERFSHYVVRQMGFKDRRECPHLCKLANEYIRKSGSCEEDIYSFFSEEPGADSLFIKLVEEFERCILSYFAYHWSHADLMISQVTNKLSLSLLCYITNRPKTFQILSADAEPKKKLKHIVMAATREQRFERVTKNLKVARVFNTLVGEMKAMGIASVDDSECTEVMAPVAHKDRSPVLLLMGGGMGAGKSTVLKDILKEPFWAGADAVVIEADAFKESDVIYRALSARGHVDMIKTAEFVHQSSTDAASSLLVTALNEGRDVXMDGTLSWVPFVVQTITMARNVHRHRYRMGAGYKVGENGDVIENYWERIGERQQLQEDGRERKPYRIELVGVVCDAYLAVIRGIRRAIMCRRAVRVRSQLRSHKRFANAFLTYCNLVDNARLYCTNALEGSPKLIGWKEKEKTLLVDPEEIDCLKNVGRLNENADSIYELYRNPNPACEAGSIWKDIVLSPSRFNIQQELKYSIQKVERFKQYLQETPR

SEQ ID NO: 107968 - protein, 470 aa, Arabidopsis thaliana
  peptide (1)..(470): Ceres Seq. ID no. 13652770
  misc_feature (252)..(252): Xaa is any aa, unknown or other
MGFKDRRECPHLCKLANEYIRKSGSCEEDIYSFFSEEPGADSLFIKLVEEFERCILSYFAYHWSHADLMISQVTNKLSLSLLCYITNRPKTFQILSADAEPKKKLKHIVMAATREQRFERVTKNLKVARVFNTLVGEMKAMGIASVDDSECTEVMAPVAHKDRSPVLLLMGGGMGAGKSTVLKDILKEPFWAGADAVVIEADAFKESDVIYRALSARGHVDMIKTAEFVHQSSTDAASSLLVTALNEGRDVXMDGTLSWVPFVVQTITMARNVHRHRYRMGAGYKVGENGDVIENYWERIGERQQLQEDGRERKPYRIELVGVVCDAYLAVIRGIRRAIMCRRAVRVRSQLRSHKRFANAFLTYCNLVDNARLYCTNALEGSPKLIGWKEKEKTLLVDPEEIDCLKNVGRLNENADSIYELYRNPNPACEAGSIWKDIVLSPSRFNIQQELKYSIQKVERFKQYLQETPR

SEQ ID NO: 107969 - DNA, 1067 bp, Arabidopsis thaliana
  misc_feature (1)..(1067): Ceres Seq. ID no. 13652781
  misc_feature (1)..(1067): Ortholog of  Ceres SEQ ID NO 14305858 as cited in SEQ ID NO 52329
aaattcacactactatcttcttcttcttcgatttagcacagaagctgcagttttatcaatgttctccctttcgtttccatcttcttcttctgcccttttaccttctctcgttgctttcgattcttcgcgtcgtctctctttgcaaccaaagaagttaaatcgtcttcaaagtcacttattttcacctcaacatctctcattctctcagtctaatgtctctcgttacagagcgttttgtgtttcttcaagctctcctccagagggaacagtctccgtagtcgatttccatgagaaagattggtcctttctcgaatctatggaaattgactccactgaacatactcagaagattgagaggatcataaaggctggagaattatccgaatcttcgagggttttggtttcaattagctccgaaacattcgttgatcgtttggtagaatcttcaccttctcagcttttgctcattgtccatgactccctttttacgttagcctgtatcaaagagaagtacgacaaagtcaaatgttggcaaggagaaatgatctatgtcccggagaaatggtctccattagacgctgtgtttctctactttcttccagctttgccttttgacctcgacgaactgttcaagacactctctcaacgttgttcctcaggtactatgttctgacttttcttcactcactatgtctcaggctaacacttgttggagtcttagttgctaacactagtctaatgcttgtgacaggtgcaagagtagtaatcagtcacccgcaaggtagactaggcttggagcagcaaaggaaagagttttcagatgtggtcgtctctgatttacctgatgagtccacattgagtaatgttgctgagaagcattcatttgagctaacccagtttgttgatgagcaaggcctttatctcgctgttctgaaatcctctaaacaatagtagattatgtcaagagaacatctgttgtatgagattatatttttgcctgttgtgttgtgatgaaatatacagccaacaatggagaaattattcattctgagtaaaacaaaaccttt

SEQ ID NO: 107970 - protein, 223 aa, Arabidopsis thaliana
  peptide (1)..(223): Ceres Seq. ID no. 13652782
NSHYYLLLLRFSTEAAVLSMFSLSFPSSSSALLPSLVAFDSSRRLSLQPKKLNRLQSHLFSPQHLSFSQSNVSRYRAFCVSSSSPPEGTVSVVDFHEKDWSFLESMEIDSTEHTQKIERIIKAGELSESSRVLVSISSETFVDRLVESSPSQLLLIVHDSLFTLACIKEKYDKVKCWQGEMIYVPEKWSPLDAVFLYFLPALPFDLDELFKTLSQRCSSGTMF

SEQ ID NO: 107971 - protein, 204 aa, Arabidopsis thaliana
  peptide (1)..(204): Ceres Seq. ID no. 13652783
MFSLSFPSSSSALLPSLVAFDSSRRLSLQPKKLNRLQSHLFSPQHLSFSQSNVSRYRAFCVSSSSPPEGTVSVVDFHEKDWSFLESMEIDSTEHTQKIERIIKAGELSESSRVLVSISSETFVDRLVESSPSQLLLIVHDSLFTLACIKEKYDKVKCWQGEMIYVPEKWSPLDAVFLYFLPALPFDLDELFKTLSQRCSSGTMF

SEQ ID NO: 107972 - protein, 118 aa, Arabidopsis thaliana
  peptide (1)..(118): Ceres Seq. ID no. 13652784
MEIDSTEHTQKIERIIKAGELSESSRVLVSISSETFVDRLVESSPSQLLLIVHDSLFTLACIKEKYDKVKCWQGEMIYVPEKWSPLDAVFLYFLPALPFDLDELFKTLSQRCSSGTMF

SEQ ID NO: 107973 - DNA, 1675 bp, Arabidopsis thaliana
  misc_feature (1)..(1675): Ceres Seq. ID no. 13652881
  misc_feature (1)..(1675): Ortholog of  Ceres SEQ ID NO 13594037 as cited in SEQ ID NO 55666
  misc_feature (1)..(1675): Ortholog of  Ceres SEQ ID NO 13657707 as cited in SEQ ID NO 66407
ggggcgacttaaaacgcatttcaagaaaattactaaacactacaacaatcttataataacatttactaaaaatgtccacgtttgtaaaagtcaccgacttaatcactatcatgttctttctagccattgctgccgtcataaccgcctcaaacacagccgagttggatgtacttgaaatggctagaactgctgtggttgaagccaagactagttttgggtcaatggctgtgactgaggcaactagtgaagttgctggtagttattataaattggggttaagtgaatgcgagaagctctacgatgagagtgaagctaggctatcgaaactggtcgtagatcatgagaatttcaccgttgaagatgttagaacgtggctaagtggcgtgcttgcgaatcatcacacttgtttagacggtttaattcagcaacgtcaaggtcataagcctttggtccatagcaacgtcacgttcgtgctccatgaagctttggctttctacaaaaagtctagaggtcatatgaaaaagaggctgcatggaccagcgagacagggccatggaccaacgagaccaaaacatagaccaacgagaccaaatcatggaccaggaagatcacaccatggaccatcaagaccaaaccaaaacggtggaatgttagtgtcatggaatccaacaagttcaagggcagatttcgtggtggctcgggacggttcggcgactcatcggacgataaaccaagcattagccgccgtttcaagaatgggtaaaagtcggttgaatagagtgataatatacataaaagctggtgtttataacgaaaaaatcgaaatagatagacacatgaaaaacatcatgctagttggtgatggtatggaccgtacaattgtcaccaataaccgaaacgtcccggacggttccacgacttatggatcagcgacattcggagtgtccggggatggattttgggcacgggacataacgttcgagaatactgcaggaccacataaacatcaagctgtggcgttgagagtgagctcagacttgtctttattctatcggtgtagtttcaaaggatatcaagatactcttttcacgcactcacttcgtcaattctaccgcgatcgtcatatttatggtacgattgatttcatatttggagatgcggcagctgtttttcagaactgtgatatatttgtgaggcggcctatggatcatcaaggcaacatgatcacagctcaaggaagagacgacccacatacaaattcaggcatttcgatccaacactcacggatcagggccgcaccagaattcgaagcagttaaaggccggtttaagagctacttgggccggccatggaagaagtactcacggacagtgtttctcaaaacagatatcgacgagttgattgacccgagagggtggagagaatggagtggcagttatgctttgtcgacgttgtattacggcgagtttatgaacaccggagctggagcagggactggtagaagggtgaactggccgggatttcacgtcctacgcggtgaggaagaggcttctccgtttaccgtcagccgattcatacaaggagattcttggatccctatcaccggtgtgccgttttcagctggggtttgagtcacttttgaatgaataaatcatcaacacaatataacatattt

SEQ ID NO: 107974 - protein, 519 aa, Arabidopsis thaliana
  peptide (1)..(519): Ceres Seq. ID no. 13652882
MSTFVKVTDLITIMFFLAIAAVITASNTAELDVLEMARTAVVEAKTSFGSMAVTEATSEVAGSYYKLGLSECEKLYDESEARLSKLVVDHENFTVEDVRTWLSGVLANHHTCLDGLIQQRQGHKPLVHSNVTFVLHEALAFYKKSRGHMKKRLHGPARQGHGPTRPKHRPTRPNHGPGRSHHGPSRPNQNGGMLVSWNPTSSRADFVVARDGSATHRTINQALAAVSRMGKSRLNRVIIYIKAGVYNEKIEIDRHMKNIMLVGDGMDRTIVTNNRNVPDGSTTYGSATFGVSGDGFWARDITFENTAGPHKHQAVALRVSSDLSLFYRCSFKGYQDTLFTHSLRQFYRDRHIYGTIDFIFGDAAAVFQNCDIFVRRPMDHQGNMITAQGRDDPHTNSGISIQHSRIRAAPEFEAVKGRFKSYLGRPWKKYSRTVFLKTDIDELIDPRGWREWSGSYALSTLYYGEFMNTGAGAGTGRRVNWPGFHVLRGEEEASPFTVSRFIQGDSWIPITGVPFSAGV

SEQ ID NO: 107975 - protein, 506 aa, Arabidopsis thaliana
  peptide (1)..(506): Ceres Seq. ID no. 13652883
MFFLAIAAVITASNTAELDVLEMARTAVVEAKTSFGSMAVTEATSEVAGSYYKLGLSECEKLYDESEARLSKLVVDHENFTVEDVRTWLSGVLANHHTCLDGLIQQRQGHKPLVHSNVTFVLHEALAFYKKSRGHMKKRLHGPARQGHGPTRPKHRPTRPNHGPGRSHHGPSRPNQNGGMLVSWNPTSSRADFVVARDGSATHRTINQALAAVSRMGKSRLNRVIIYIKAGVYNEKIEIDRHMKNIMLVGDGMDRTIVTNNRNVPDGSTTYGSATFGVSGDGFWARDITFENTAGPHKHQAVALRVSSDLSLFYRCSFKGYQDTLFTHSLRQFYRDRHIYGTIDFIFGDAAAVFQNCDIFVRRPMDHQGNMITAQGRDDPHTNSGISIQHSRIRAAPEFEAVKGRFKSYLGRPWKKYSRTVFLKTDIDELIDPRGWREWSGSYALSTLYYGEFMNTGAGAGTGRRVNWPGFHVLRGEEEASPFTVSRFIQGDSWIPITGVPFSAGV

SEQ ID NO: 107976 - protein, 484 aa, Arabidopsis thaliana
  peptide (1)..(484): Ceres Seq. ID no. 13652884
MARTAVVEAKTSFGSMAVTEATSEVAGSYYKLGLSECEKLYDESEARLSKLVVDHENFTVEDVRTWLSGVLANHHTCLDGLIQQRQGHKPLVHSNVTFVLHEALAFYKKSRGHMKKRLHGPARQGHGPTRPKHRPTRPNHGPGRSHHGPSRPNQNGGMLVSWNPTSSRADFVVARDGSATHRTINQALAAVSRMGKSRLNRVIIYIKAGVYNEKIEIDRHMKNIMLVGDGMDRTIVTNNRNVPDGSTTYGSATFGVSGDGFWARDITFENTAGPHKHQAVALRVSSDLSLFYRCSFKGYQDTLFTHSLRQFYRDRHIYGTIDFIFGDAAAVFQNCDIFVRRPMDHQGNMITAQGRDDPHTNSGISIQHSRIRAAPEFEAVKGRFKSYLGRPWKKYSRTVFLKTDIDELIDPRGWREWSGSYALSTLYYGEFMNTGAGAGTGRRVNWPGFHVLRGEEEASPFTVSRFIQGDSWIPITGVPFSAGV

SEQ ID NO: 107977 - DNA, 749 bp, Arabidopsis thaliana
  misc_feature (1)..(749): Ceres Seq. ID no. 13652889
  misc_feature (1)..(749): Ortholog of  Ceres SEQ ID NO 15178852 as cited in SEQ ID NO 0
gaggttacacagacctactcctcaaatccttaacgtactcggagaagaaaaatggtatctgggttgattaatgagaaccctatcatttacccaaagaaagagaggcgtcttcgtactgatacaagcattactgatgagcttacaccagaaccaattgatcaacttgagatttttgatcatataagagatatcaaagatccagagcatcctaatactctggaagatctcagagtagttacagaagactcagttgaagtggatgatgagaacagttatgttagggttacgttcactccaactgtcgaacattgtagcatggcaaccgttatcggtctttgtgtccgtgtgaaacttctacgaagccttccttctcgatacaagattgatataagggtagcacctggttctcatgcaacagaagatgcattgaataaacaactaaacgataaagaacgtgtggcggctgcactagagaatccaaacctcgtggagatggttgatgaatgcctgccatcagaagagtgaattgcttttattttcttgtgagcaagtaatttacacaagcctggtggtctcagtttacactatcaatacatgtctctgttttatttgcaaagattttgatccatcacatcgactaggacttgcattgtaatacttactctgatttcaagtttgttctcaatcatttcaataaagtctcaaacacaagttctttttaataaaagttgacgtgtcatttcgattcc

SEQ ID NO: 107978 - protein, 157 aa, Arabidopsis thaliana; identical to SEQ ID NO: 35345
  peptide (1)..(157): Ceres Seq. ID no. 13652890

SEQ ID NO: 107979 - DNA, 1219 bp, Arabidopsis thaliana
  misc_feature (1)..(1219): Ceres Seq. ID no. 13652895
  misc_feature (1)..(1219): Ortholog of  Ceres SEQ ID NO 14308120 as cited in SEQ ID NO 58423
  misc_feature (1)..(1219): Ortholog of  Ceres SEQ ID NO 14307004 as cited in SEQ ID NO 59551
  misc_feature (1)..(1219): Ortholog of  Ceres SEQ ID NO 13661504 as cited in SEQ ID NO 61294
  misc_feature (1)..(1219): Ortholog of  Ceres SEQ ID NO 12617197 as cited in SEQ ID NO 63406
  misc_feature (1)..(1219): Ortholog of  Ceres SEQ ID NO 13597804 as cited in SEQ ID NO 64182
  misc_feature (1)..(1219): Ortholog of  Ceres SEQ ID NO 13598565 as cited in SEQ ID NO 65250
  misc_feature (1)..(1219): Ortholog of  Ceres SEQ ID NO 13598597 as cited in SEQ ID NO 65496
  misc_feature (1)..(1219): Ortholog of  Ceres SEQ ID NO 13596284 as cited in SEQ ID NO 68273
  misc_feature (1)..(1219): Ortholog of  Ceres SEQ ID NO 13596227 as cited in SEQ ID NO 68750
  misc_feature (1)..(1219): Ortholog of  Ceres SEQ ID NO 15178902 as cited in SEQ ID NO 0
acgtgtatgaaaaaaaacgaaggatccttttttactggaaagatgttttttttttcttatcttctgagataaattgcgatagagagagagaacaaaaaaattctcagtgagcgcttattgatcaacaatggcgaaagagacagtgtgtgtaaccggagctaatggtttcatcggatcttggataatccgaacgttaattgagaaaggatatactaaaatccacgcttcgatttacccaggatccgacccgactcatcttctgcaactacccggatccgattctaagatcaagatctttgaagcggatctcttagactctgatgcaatctccagagctattgatggatgtgcgggagtgttccacgtggcgtcaccttgtacgttggatccaccggtagatccagagaaggagctggtcgaaccggcggttaagggaacgatcaatgtgttggaagctgctaagaggtttaatgtgagacgcgtggtgatcacgtcatctatctccgcattggttcctaaccctaattggccggaaaaagttcccgtcgatgagtcgtcgtggtccgatcttgatttttgcaagtcgaggcagaaatggtatccaatttcgaagacattagctgagaaagcagcttgggaattttcggagaagcatggaaccaacattgtgacgattcatccatcaacatgtctcggaccgcttctgcaaccgaacctaaacgcaagctgtgctgttctgctacagcttttacaaggctcgaccgagacgcaagagcatcactggctcggtgtggttcacgtgaaagatgtggctaaaggtcatgtgatgctattcgaaacacctgacgcttctggacggtttttatgcactaatgggatttatcagttcagtgagtttgctgctcttgtgtctaagctcttccctgagtttgctgttcacaagtttgataaagagactcaacctgggcttacgtcgtgtaatgatgcggctaagcgattgattgagctcgggctggtttttactgcggttgaagatgcggttaaggagacggtccagagtcttagagacaaaggcttcctctgagaatgtatgatatatctttgcaaatttcaaaatctgtgacctttattgtatgatacaagtagagaaactaagggcatctccattcatgagaaacccataaagtttctcaaacaaaaaaaatattaatattatatt

SEQ ID NO: 107980 - protein, 318 aa, Arabidopsis thaliana; identical to SEQ ID NO: 40384
  peptide (1)..(318): Ceres Seq. ID no. 13652896

SEQ ID NO: 107981 - DNA, 2304 bp, Arabidopsis thaliana
  misc_feature (1)..(2304): Ceres Seq. ID no. 13652905
  misc_feature (1)..(2304): Ortholog of  Ceres SEQ ID NO 15178173 as cited in SEQ ID NO 54139
  misc_feature (1)..(2304): Ortholog of  Ceres SEQ ID NO 14304136 as cited in SEQ ID NO 59024
atcttattctctatcttctctcttccctcttctctcttctcttcatatgtgtagggtcgaagacaagaacgacaccgtttcaagggttgcaatttgcaaccttttgattggtctctcttctctttgcccaaccaaaaacaacctttgatgatataaagatcagccaactttgtccatcccaattctctcttttttttttgtttccctaatgttttagacaaacacaattttccataattatttatttattcaatttttatctgtttttgggttacatatatcatcatcattggagactgccatatttgttaatcgtgatattaatttaactaatgtctcaaacaagctactaccgatcaccgttcggagacacgacttacaccaaagtgttcgtcggaggattagcgtgggaaactcctaccgacgaaatgcgtcgttacttcgaacagttcggagagattcttgaagccgtcatcatcaccgataaaaacaccggcaagtctaaaggctacggattcgtgacgtttcgggagtcggactcagccacgagagccgtcgctgatccaaatccggtgatcgacggaagaaaagccaattgtaatattgcatcttttggacggcctcgaccatcgccgcctcgaggtcgaggacaaacaggaagtccgagtcagtaccaaagtggaggaccatcaacctataccgggatggctgcaccactgccaccggctgcagctccccagctcatgtatccgtcgtacgggtacacctataaccctgatcaatttgggtaccaccaagcattgtacaacacacagttgcaacaagcacaatactatcagcagcagcaacagctttatggaggaggagcaacatcaccatcatcatcaggagcaaccatcatgccttctccatactattatggctattctcttcaagctcctagagtaccataccaacaccatcatcatcttcctcaaccatataatcctcaacaacatcatcatcaacggttttcttctccttctttcctcgtttacccatccaattcctcttttgcccctcctctccaaggagtactatcttcttccaccggtacgtacttaataaattcctttttttttttcatatttctttggatatatttctagttgtctactcatactaattagttttaatttagaaacccatataacttaacatgatatcaagacctctatatattttttaaaaaagtgcattcattgatcacgatatcataaccctagattgttaatccaaatagagtgtgttcttgatccaaaaagtatcatctcatgatgactagaagaaccaccttatcgaaaatacgttttttagaaatctcacatctaaaataaaatgtaatctaatgcaatagacagaaatcatcaaatctcttaatataaatagttttgagttaaaattcctaacaacttacatagttcagtgttttatctctataatatttgttgtccctcttattcaaacgacaccgttcatcaccacgtgtgattgcattgatcattcatgcacgtgatctatccgttttgctgtcttaaactcgaaaaagaaacatatatttgatgcactctaagcaaaaaaaaaaagaagggattgaaatggaaaagaaaaggagagtgaatgattggagagaacagtgaataaaggatagcatgtggagtgagctgtctgtttcaattacattggtatatgtgtctcttctatcatctgtcaatttggtcgccaatcgtcatgccagtgaagccaccatacactgacaacttctacccaaaacgatatatttatgtgtctatatttgcatattcgttttggacactattgatcatatattgatcattgcataaattattcatctacttaaatcagaataatttgcaacattagtaggaatacactatatattgtctgattttatatgttttttgttttgtttcctccagaatctgaagcagtaccacaacaagtaccagctgcagaaggcgaagcaacaacgactgctcctgaaatcacaacaagcaacaccaaagaacctatttcttcttgatctctctctcatttcccaatttgtacaatcttcacatttttacctctctctctctgaaaaaaagaaaacagctaattcatttatttctcaaccagagcaatgacttgagccccaagaagacagactcaacactgtcaaacttaaaaagacggctcaagataaatctcttgtcatattttgctctttttctgacgggatatatataaaaatttgagctattc

SEQ ID NO: 107982 - protein, 271 aa, Arabidopsis thaliana
  peptide (1)..(271): Ceres Seq. ID no. 13652906
MSQTSYYRSPFGDTTYTKVFVGGLAWETPTDEMRRYFEQFGEILEAVIITDKNTGKSKGYGFVTFRESDSATRAVADPNPVIDGRKANCNIASFGRPRPSPPRGRGQTGSPSQYQSGGPSTYTGMAAPLPPAAAPQLMYPSYGYTYNPDQFGYHQALYNTQLQQAQYYQQQQQLYGGGATSPSSSGATIMPSPYYYGYSLQAPRVPYQHHHHLPQPYNPQQHHHQRFSSPSFLVYPSNSSFAPPLQGVLSSSTGTYLINSFFFFIFLWIYF

SEQ ID NO: 107983 - protein, 239 aa, Arabidopsis thaliana
  peptide (1)..(239): Ceres Seq. ID no. 13652907
MRRYFEQFGEILEAVIITDKNTGKSKGYGFVTFRESDSATRAVADPNPVIDGRKANCNIASFGRPRPSPPRGRGQTGSPSQYQSGGPSTYTGMAAPLPPAAAPQLMYPSYGYTYNPDQFGYHQALYNTQLQQAQYYQQQQQLYGGGATSPSSSGATIMPSPYYYGYSLQAPRVPYQHHHHLPQPYNPQQHHHQRFSSPSFLVYPSNSSFAPPLQGVLSSSTGTYLINSFFFFIFLWIYF

SEQ ID NO: 107984 - protein, 147 aa, Arabidopsis thaliana
  peptide (1)..(147): Ceres Seq. ID no. 13652908
MAAPLPPAAAPQLMYPSYGYTYNPDQFGYHQALYNTQLQQAQYYQQQQQLYGGGATSPSSSGATIMPSPYYYGYSLQAPRVPYQHHHHLPQPYNPQQHHHQRFSSPSFLVYPSNSSFAPPLQGVLSSSTGTYLINSFFFFIFLWIYF

SEQ ID NO: 107985 - DNA, 1931 bp, Arabidopsis thaliana
  misc_feature (1)..(1931): Ceres Seq. ID no. 13652913
  misc_feature (1)..(1931): Ortholog of  Ceres SEQ ID NO 15178169 as cited in SEQ ID NO 58511
atcaaatacaacattgtagcaattgcgttttcgactttatagagatattttcatagagatggtctcgaagctaacaagttgacaaatttcttcgttataagagagatagatgagttgcaggagagtgctgaagtcgatacaagccttggcggctcatagtttactcttctgtttcacgcttttattggtgcttaaactcgatcacaccgtctcttcctcatggtggatggtgtttttcccgctgtgggcttttcatgcagttgttgcaaggggcagattctctcttcctgctcctgttgctccacgtaaccgtcattgggctccttgccatgctgttgtcgcgacaccgttacttgtagcatttgaattactcctctgtatatacctcgagagttcttatgctcgttggccaccagctgtcagtttgaagattgctttcttaccattgttggcttttgaattaacaatactggtagacaatttgagaatgtgtcgagcattgatgccaggagacgacgacagcataactgatgatgcaatatgggaggcacttcctcatttctgggttgcaatttccatggtgttcacgttggctgctacgttctttaccctcctaaagctttctggcgacgtagttgctcttggatggtgggatctattcataaattttggaattgccgagtgctttgcttttcttgtttgcacaaaatggtccaatccagtaatccatagaagctcacgtgcccgagaaaccgggtcatcttctaccagtatcagatatcttgactggaacagcggccttgtggttgctccagaagaggatagacaccaagatagatggtgcggtttgcaagatattggtggtcatatgttaaaaattcccgttattttatttcaagttgtcctttgcatgtatttagaggggactcctgaaagagctaaggatatatcgatcccagtactgttttctccactattcctattgcaaggcctcggtgttctctttgctgcttctaaactcctagagaagatcgtcctcttactccgcggggaagctggtccgggattgtattttagattttcatcaagtgcccatgattgcttgggattcttgcaccatggttccaggctattaggttggtggtcaattgacgaaggaagccgggaggaacaagctcgactgtactttgatcaagaatctggttacaatacattcagtggtcatccgcctgagatagtcaagaaaatgccaaaggaagatcttgcagaagaggtaactttacctctctggcatttttttgtttcccaattcagtgctgatattaactttaggttctctttgttgttgaatcttgtttcttctagtttcagcattgcttaagtgttgtttgcattcaatctaatttgatatctctaggtgtggagacttcaagcagcacttggtgaacaaacagaaatcacaaaattcagccagcaggaatatgaaagactgcaaaatgagaaagtgctgtgtagggtttgctttgaaaaagatatcagtttggtactgcttccatgtagacaccgtgttctctgcagaacctgtgcagacaagtgtacaacatgtccaatatgtcgtatagacattgaaaaacgactatctgtatacgacgtatgactgtgttaactttggcccatgatcaagagtaggatttgtggttgatgctccagacaaacattccagtttaccaaccatactgtttcccaaacttctgatgtttttgctgaatctttttgtttgtctgaatcagcagctagtataaaaaaaagtataggtgtatacgtgtatgtatttttctgtaggaaacctcattcaaactttagctgtaacatacaaagtttgtataatatccatctcttttttgtataaatcacaaactaagttatgcttt

SEQ ID NO: 107986 - protein, 423 aa, Arabidopsis thaliana
  peptide (1)..(423): Ceres Seq. ID no. 13652914
MSCRRVLKSIQALAAHSLLFCFTLLLVLKLDHTVSSSWWMVFFPLWAFHAVVARGRFSLPAPVAPRNRHWAPCHAVVATPLLVAFELLLCIYLESSYARWPPAVSLKIAFLPLLAFELTILVDNLRMCRALMPGDDDSITDDAIWEALPHFWVAISMVFTLAATFFTLLKLSGDVVALGWWDLFINFGIAECFAFLVCTKWSNPVIHRSSRARETGSSSTSIRYLDWNSGLVVAPEEDRHQDRWCGLQDIGGHMLKIPVILFQVVLCMYLEGTPERAKDISIPVLFSPLFLLQGLGVLFAASKLLEKIVLLLRGEAGPGLYFRFSSSAHDCLGFLHHGSRLLGWWSIDEGSREEQARLYFDQESGYNTFSGHPPEIVKKMPKEDLAEEVTLPLWHFFVSQFSADINFRFSLLLNLVSSSFSIA

SEQ ID NO: 107987 - protein, 384 aa, Arabidopsis thaliana
  peptide (1)..(384): Ceres Seq. ID no. 13652915
MVFFPLWAFHAVVARGRFSLPAPVAPRNRHWAPCHAVVATPLLVAFELLLCIYLESSYARWPPAVSLKIAFLPLLAFELTILVDNLRMCRALMPGDDDSITDDAIWEALPHFWVAISMVFTLAATFFTLLKLSGDVVALGWWDLFINFGIAECFAFLVCTKWSNPVIHRSSRARETGSSSTSIRYLDWNSGLVVAPEEDRHQDRWCGLQDIGGHMLKIPVILFQVVLCMYLEGTPERAKDISIPVLFSPLFLLQGLGVLFAASKLLEKIVLLLRGEAGPGLYFRFSSSAHDCLGFLHHGSRLLGWWSIDEGSREEQARLYFDQESGYNTFSGHPPEIVKKMPKEDLAEEVTLPLWHFFVSQFSADINFRFSLLLNLVSSSFSIA

SEQ ID NO: 107988 - protein, 297 aa, Arabidopsis thaliana
  peptide (1)..(297): Ceres Seq. ID no. 13652916
MCRALMPGDDDSITDDAIWEALPHFWVAISMVFTLAATFFTLLKLSGDVVALGWWDLFINFGIAECFAFLVCTKWSNPVIHRSSRARETGSSSTSIRYLDWNSGLVVAPEEDRHQDRWCGLQDIGGHMLKIPVILFQVVLCMYLEGTPERAKDISIPVLFSPLFLLQGLGVLFAASKLLEKIVLLLRGEAGPGLYFRFSSSAHDCLGFLHHGSRLLGWWSIDEGSREEQARLYFDQESGYNTFSGHPPEIVKKMPKEDLAEEVTLPLWHFFVSQFSADINFRFSLLLNLVSSSFSIA

SEQ ID NO: 107989 - DNA, 1311 bp, Arabidopsis thaliana
  misc_feature (1)..(1311): Ceres Seq. ID no. 13652963
  misc_feature (1)..(1311): Ortholog of  Ceres SEQ ID NO 14311489 as cited in SEQ ID NO 51404
  misc_feature (1)..(1311): Ortholog of  Ceres SEQ ID NO 12607391 as cited in SEQ ID NO 59508
  misc_feature (1)..(1311): Ortholog of  Ceres SEQ ID NO 15169292 as cited in SEQ ID NO 59616
accgggcatccattttcgtttgaatctcaacgttttttgcttgattttagcttctgagagagtccagatccaaggaattggaggaagaataatgtcggcaaggcatgggcaatcgtcgtatcgagatcggagtgacgaattcttcaaaattgtggagactctaaggagatcgattgctccggctccggcggcgaataatgtgccgtatggtaataatcggaacgatggtgcgagaagagaggatcttatcaacaaatccgagttcaacaagagagcttctcatattggtttagctattaatcaaacgtcgcagaagctatcgaagcttgcgaaacttgcaaagaggacatcagtgtttgatgatcctactcaggagatacaagagctgacggtagtcatcaagcaagagatctctgctctaaattctgctctggtcgaccttcaattgttccgcagttctcagaatgatgaagggaataactctagagacagggacaaaagtactcactcagcaactgttgttgacgatctaaagtatcgtttgatggatactaccaaagagtttaaggatgttcttaccatgagaaccgagaatatgaaggtccatgaaagtagaaggcaactcttctcttcaaatgcttcaaaagaatcaacaaacccattcgttcgccagcgtcctttggctgctaaggctgctgctagtgaatctgttcctcttccatgggcaaatgggtcttcttcatcttcatctcagttagtcccatggaagccgggagagggagaatcttcaccattgttgcagcagagtcaacaacaacagcaacagcaacagcaacaaatggtcccattgcaagacacatatatgcagggtcgagcagaagctctacacaccgttgaatcaacaatccatgagctaagcagtatcttcacacaactagcaaccatggtttctcaacaaggggaaattgcaatcaggatcgatcaaaacatggaagatacattagcaaatgtggaaggcgcacagagccaactggccaggtatctcaacagtatatcatcaaaccgatggctaatgatgaagattttcttcgtactcattgcatttctcatgattttcctcttcttcgtggcataaacattgagactaaaaattgattttaaagagtttcaacatctagacatggttcttttgtcctatcgtatcttattgacatgtaaagacttaagagaaaaaagggatcttatgctctgttcagattaatggagagatatataatgtcactttcatgtaaaattgctttcaagttttcc

SEQ ID NO: 107990 - protein, 377 aa, Arabidopsis thaliana
  peptide (1)..(377): Ceres Seq. ID no. 13652964
PGIHFRLNLNVFCLILASERVQIQGIGGRIMSARHGQSSYRDRSDEFFKIVETLRRSIAPAPAANNVPYGNNRNDGARREDLINKSEFNKRASHIGLAINQTSQKLSKLAKLAKRTSVFDDPTQEIQELTVVIKQEISALNSALVDLQLFRSSQNDEGNNSRDRDKSTHSATVVDDLKYRLMDTTKEFKDVLTMRTENMKVHESRRQLFSSNASKESTNPFVRQRPLAAKAAASESVPLPWANGSSSSSSQLVPWKPGEGESSPLLQQSQQQQQQQQQQMVPLQDTYMQGRAEALHTVESTIHELSSIFTQLATMVSQQGEIAIRIDQNMEDTLANVEGAQSQLARYLNSISSNRWLMMKIFFVLIAFLMIFLFFVA

SEQ ID NO: 107991 - protein, 347 aa, Arabidopsis thaliana
  peptide (1)..(347): Ceres Seq. ID no. 13652965
MSARHGQSSYRDRSDEFFKIVETLRRSIAPAPAANNVPYGNNRNDGARREDLINKSEFNKRASHIGLAINQTSQKLSKLAKLAKRTSVFDDPTQEIQELTVVIKQEISALNSALVDLQLFRSSQNDEGNNSRDRDKSTHSATVVDDLKYRLMDTTKEFKDVLTMRTENMKVHESRRQLFSSNASKESTNPFVRQRPLAAKAAASESVPLPWANGSSSSSSQLVPWKPGEGESSPLLQQSQQQQQQQQQQMVPLQDTYMQGRAEALHTVESTIHELSSIFTQLATMVSQQGEIAIRIDQNMEDTLANVEGAQSQLARYLNSISSNRWLMMKIFFVLIAFLMIFLFFVA

SEQ ID NO: 107992 - protein, 196 aa, Arabidopsis thaliana; identical to SEQ ID NO: 97009
  peptide (1)..(196): Ceres Seq. ID no. 13652966

SEQ ID NO: 107993 - DNA, 2336 bp, Arabidopsis thaliana
  misc_feature (1)..(2336): Ceres Seq. ID no. 13652971
  misc_feature (1)..(2336): Ortholog of  Ceres SEQ ID NO 13598023 as cited in SEQ ID NO 66487
tttcttcgtcttcttcggacggacaatctcgtttacgcattttatcgaacagtttgtgtgcataaaagctaacgagtggtgaatctaacggactatgggattttcgcttgctgttcgactgaatagatcttcgtctcgttcgtgttgttagccgatgaggaatgccgttgttgcgctccgccatcaccgtcgtgtttcgctgctccggagaattgtagcgttccgtgatgacaatactatttgtctgtctccaagcttgaagaataatgaactctcaagacagacaaattcatgggtttcaccattttgcttgcaacgcagagcgtattcgacgggtttcaccagcgtacatggtggaatacctacggcagagtatgcaaagttgcggagagaatcccttgaaactgaatttggacatgctctaggagcatatagctcgaaaagtttttctgcagtgtatcgttttggaccctttttggctttgtatagagctgcaatcatttcgtatcatgtggtgaagcttgccttttggcagctgtttgttcaggatatgaggaaacgggctgtcaagttccgtgagactcttatcagcttggggcctttctacattaaggcactgagcacgagaccagacatattaccatctatatactgtcaggaactttcaaaattgcaggaccagattcctccatttccaactactgttgccatgcgatgtattgaagagcaactgggtgctccagtgtcaaaactttttgcagatattagtcttaaacctgttgctgctgcatccctgggtcaggtatacaaagctcatctgcattctggacaattggtagccgttaaggttcagagacctggaatgtcactcattctaacacgtgatgccctcttattcaaaatgattgggggacaactgaaacgatttgctaaagcccgtaaggatcttttggtagcggtgaatgagatggtcaggcatatgtttgacgaaatagattacgttctcgaggcaaaaaatgcagaacgatttgcctctctatacagttttgactcagggaatgagcagattgatgataacgctggacctaggaatatgtccaggaatcacagagcagagaacatcaaagtccctaaaatttactggaattttacacgcacagcagtgctcacaatggaatggatcgatggcataaaattaacagatgaaattaagctgaaaagggcttcccttgatagaagggacttgatcgatcagggcttatcctgttcattaaagcagcttcttgaggttggattctttcatgctgatccgcacccaggaaatcttgtggctactaaagaagggtctcttgtttactttgacttcggaatgatggggaatattccacgccattaccgtgtgggacttattcaaattctggtgcattttgtcaaccgtgattctctaagtttggcaaatgatttcctgtccttgggatttttgcctgaaggggttgatatacaagcagtttcaaatgctttgcgtacttcatttggttctactacgagaatatcacaagatttccagggggtgatggaacaattatatgatgttatgtacgagttcaacttttcgctgcctccagactatgctcttgttataagatctcttggttcactggaaggcacggctaagattcttgatccagagtttaaagtgattgagagtgcatatccatttgttatcgggaggctattagcagatccaagcccagatatgaggaaaatactaagggagcttgtcatttgtaatgatggatcaataaggtggaatcgtcttgaacgcctggtagcagcaatatcagaacaggcttctgcgacttcaggagactctccagaagataaaacgttgaagaaatcatcggaactgaaatcattcgacatgcattcagtagtttccgcaacagaagatctgctactgttcatattatccgagaaagggcagagagttcgggtcttccttcttcaagacataatcagagtggttgatattttcctggaagtagaggctcttgagctcaacaagaccatcaatcttaagacggaagaagggacaatgaaaagagtgagcaatggattcaaaggtctgagtgaggcggtgaagcttgcaccgggaatgtggatatcaatgcttcttcggatgtcaaggaagtctgaggttcatagttatgctttagatattgtttctgcattgtctacacattttggccacaaagtgcctcacacttgttggatccttctctccaaattgctccatcacaataagagccaataattaaacgttcgtctatgctatt

SEQ ID NO: 107994 - protein, 719 aa, Arabidopsis thaliana
  peptide (1)..(719): Ceres Seq. ID no. 13652972
MRNAVVALRHHRRVSLLRRIVAFRDDNTICLSPSLKNNELSRQTNSWVSPFCLQRRAYSTGFTSVHGGIPTAEYAKLRRESLETEFGHALGAYSSKSFSAVYRFGPFLALYRAAIISYHVVKLAFWQLFVQDMRKRAVKFRETLISLGPFYIKALSTRPDILPSIYCQELSKLQDQIPPFPTTVAMRCIEEQLGAPVSKLFADISLKPVAAASLGQVYKAHLHSGQLVAVKVQRPGMSLILTRDALLFKMIGGQLKRFAKARKDLLVAVNEMVRHMFDEIDYVLEAKNAERFASLYSFDSGNEQIDDNAGPRNMSRNHRAENIKVPKIYWNFTRTAVLTMEWIDGIKLTDEIKLKRASLDRRDLIDQGLSCSLKQLLEVGFFHADPHPGNLVATKEGSLVYFDFGMMGNIPRHYRVGLIQILVHFVNRDSLSLANDFLSLGFLPEGVDIQAVSNALRTSFGSTTRISQDFQGVMEQLYDVMYEFNFSLPPDYALVIRSLGSLEGTAKILDPEFKVIESAYPFVIGRLLADPSPDMRKILRELVICNDGSIRWNRLERLVAAISEQASATSGDSPEDKTLKKSSELKSFDMHSVVSATEDLLLFILSEKGQRVRVFLLQDIIRVVDIFLEVEALELNKTINLKTEEGTMKRVSNGFKGLSEAVKLAPGMWISMLLRMSRKSEVHSYALDIVSALSTHFGHKVPHTCWILLSKLLHHNKSQ

SEQ ID NO: 107995 - protein, 587 aa, Arabidopsis thaliana
  peptide (1)..(587): Ceres Seq. ID no. 13652973
MRKRAVKFRETLISLGPFYIKALSTRPDILPSIYCQELSKLQDQIPPFPTTVAMRCIEEQLGAPVSKLFADISLKPVAAASLGQVYKAHLHSGQLVAVKVQRPGMSLILTRDALLFKMIGGQLKRFAKARKDLLVAVNEMVRHMFDEIDYVLEAKNAERFASLYSFDSGNEQIDDNAGPRNMSRNHRAENIKVPKIYWNFTRTAVLTMEWIDGIKLTDEIKLKRASLDRRDLIDQGLSCSLKQLLEVGFFHADPHPGNLVATKEGSLVYFDFGMMGNIPRHYRVGLIQILVHFVNRDSLSLANDFLSLGFLPEGVDIQAVSNALRTSFGSTTRISQDFQGVMEQLYDVMYEFNFSLPPDYALVIRSLGSLEGTAKILDPEFKVIESAYPFVIGRLLADPSPDMRKILRELVICNDGSIRWNRLERLVAAISEQASATSGDSPEDKTLKKSSELKSFDMHSVVSATEDLLLFILSEKGQRVRVFLLQDIIRVVDIFLEVEALELNKTINLKTEEGTMKRVSNGFKGLSEAVKLAPGMWISMLLRMSRKSEVHSYALDIVSALSTHFGHKVPHTCWILLSKLLHHNKSQ

SEQ ID NO: 107996 - protein, 534 aa, Arabidopsis thaliana; identical to SEQ ID NO: 74171
  peptide (1)..(534): Ceres Seq. ID no. 13652974

SEQ ID NO: 107997 - DNA, 1966 bp, Arabidopsis thaliana
  misc_feature (1)..(1966): Ceres Seq. ID no. 13652975
  misc_feature (1)..(1966): Ortholog of  Ceres SEQ ID NO 14314108 as cited in SEQ ID NO 63184
atcaaagtgcgtgtatcctgattcttacttgctacctttcttcttccttcttcatcattcatcattcatcattcatcattcatcattctcatatctctcttcttttactggggatcacaatatctatctagttgtaaattgtgaatgatagatcctgagccttcttgccgccacctcttgaacttaatgtacttgaaaccagtctccacatagcgatagagagagagatctgttatgtgtgtattcatcaagttctctttttttgggctcaaagtgtaaaaggagacattttcaattctgagttcttttgttttcttataataaaatctgggttttctgagattttcttcacatcgtccgaaacgtggacacattttgatcttttgggtgtcactgtgtcaataaaggttgaaactttgattacatttctctcaaaaggattaatttttatttctctatctgggtgagatttggattaattggtgaggaatcggaagaaactggcgagattacaagcgattgtgaaatatcagaatctaataagaggaagaagaggcatggcggctcctacagggaacgggccagtgataccaattctaggtttccttacatgtgtggcttttatctatctctcctttggagatttgtggttcggtctcaaaacggagggcgagttagcattcgtgaaacggaatgggacacagtttgtggtcgatggtaaggctctgtatgtgaatggttggaactcttattggttcatggaccatgctgtgaatgatcatagtagacatcgcgttagtgctatgcttgaagctggagctaaaatgggtctcactgtttgtagaacatgggcttttaatgatggaggctacaatgctcttcagatctctcctggtagattcgatgaacgagttttcaaggccttagatcatgtaatcgcagaggccaaaacacatggtgttaggttgcttctgagcttagtgaataacttacaagcttatggagggaaaactcagtacgtcaattgggcatggcaggaaggtgtaggcctcagctcatccaatgattccttcttctttgacccatctatccgcagatacttcaagaattatctcacggtgctgctgacccgtaaaaactctttaaccgggattgagtacagaaacgacccaacaatttttgcatgggagttgataaacgagcctcgctgcatgtctgatgtctctggggatactctacaagactggattaacgaaatgacagcattcattaaatcaattgacaacaagcatcttctaactgttggcttggaagggttctacggtcccagtagcccaaaaaagctgacagttaaccccgaacggtgggcctctgagcttgggtcagattttgttcgaaactctgattcgccaaacatcgattttgcctcggttcatatctaccctgatcactggtttcacgatcaagggtttgaagaaaaactcaagttcgttgtaaaatggatgctatctcacattgaagatggggacaaggaactgaagaagcctgttctgttcaccgagtttggactctcgaatctgaacaaggactacgatccatcgcagcgggatcggttctacagaaccatctttgatgttatttacaaatcagccaagaggaagcggtctggtgcaggaacactagtgtggcagtttctgatagaaggcatggaaggtttcaacgatgactttggaatagtcccatgggagcaagactccattcagagattaatgattgaacagtcttgcagattgagtcgaatcactggacgccatcttcttgacaagaagtccatagaaatgtgttcccatagaccatgagaatacagattcttttttgttcttgcctctcatatgggcatataaccaaactcaaaacctttatataagagatagtaaatttaaccttcccattttgcttttttccc

SEQ ID NO: 107998 - protein, 433 aa, Arabidopsis thaliana
  peptide (1)..(433): Ceres Seq. ID no. 13652976
MAAPTGNGPVIPILGFLTCVAFIYLSFGDLWFGLKTEGELAFVKRNGTQFVVDGKALYVNGWNSYWFMDHAVNDHSRHRVSAMLEAGAKMGLTVCRTWAFNDGGYNALQISPGRFDERVFKALDHVIAEAKTHGVRLLLSLVNNLQAYGGKTQYVNWAWQEGVGLSSSNDSFFFDPSIRRYFKNYLTVLLTRKNSLTGIEYRNDPTIFAWELINEPRCMSDVSGDTLQDWINEMTAFIKSIDNKHLLTVGLEGFYGPSSPKKLTVNPERWASELGSDFVRNSDSPNIDFASVHIYPDHWFHDQGFEEKLKFVVKWMLSHIEDGDKELKKPVLFTEFGLSNLNKDYDPSQRDRFYRTIFDVIYKSAKRKRSGAGTLVWQFLIEGMEGFNDDFGIVPWEQDSIQRLMIEQSCRLSRITGRHLLDKKSIEMCSHRP

SEQ ID NO: 107999 - protein, 366 aa, Arabidopsis thaliana
  peptide (1)..(366): Ceres Seq. ID no. 13652977
MDHAVNDHSRHRVSAMLEAGAKMGLTVCRTWAFNDGGYNALQISPGRFDERVFKALDHVIAEAKTHGVRLLLSLVNNLQAYGGKTQYVNWAWQEGVGLSSSNDSFFFDPSIRRYFKNYLTVLLTRKNSLTGIEYRNDPTIFAWELINEPRCMSDVSGDTLQDWINEMTAFIKSIDNKHLLTVGLEGFYGPSSPKKLTVNPERWASELGSDFVRNSDSPNIDFASVHIYPDHWFHDQGFEEKLKFVVKWMLSHIEDGDKELKKPVLFTEFGLSNLNKDYDPSQRDRFYRTIFDVIYKSAKRKRSGAGTLVWQFLIEGMEGFNDDFGIVPWEQDSIQRLMIEQSCRLSRITGRHLLDKKSIEMCSHRP

SEQ ID NO: 108000 - protein, 351 aa, Arabidopsis thaliana
  peptide (1)..(351): Ceres Seq. ID no. 13652978
MLEAGAKMGLTVCRTWAFNDGGYNALQISPGRFDERVFKALDHVIAEAKTHGVRLLLSLVNNLQAYGGKTQYVNWAWQEGVGLSSSNDSFFFDPSIRRYFKNYLTVLLTRKNSLTGIEYRNDPTIFAWELINEPRCMSDVSGDTLQDWINEMTAFIKSIDNKHLLTVGLEGFYGPSSPKKLTVNPERWASELGSDFVRNSDSPNIDFASVHIYPDHWFHDQGFEEKLKFVVKWMLSHIEDGDKELKKPVLFTEFGLSNLNKDYDPSQRDRFYRTIFDVIYKSAKRKRSGAGTLVWQFLIEGMEGFNDDFGIVPWEQDSIQRLMIEQSCRLSRITGRHLLDKKSIEMCSHRP

SEQ ID NO: 108001 - DNA, 1726 bp, Arabidopsis thaliana
  misc_feature (1)..(1726): Ceres Seq. ID no. 13652991
  misc_feature (1)..(1726): Ortholog of  Ceres SEQ ID NO 15176922 as cited in SEQ ID NO 55251
tttcttcctcctccgccgagatttttctccgtctctcgttctccgcaatggcggcggtcgctacctccttctgtttctctccacatcgatcgccgtcacgttttggaaaccctaattcatccattcgaagaacaatcgtctgtaaatcatctcctcgcgatgaatctccagccgtctccacttcttctcagcgaccggaaaagcagcagaatcctctgacttcacagaataaaccggatcatgatcacaaaccggatcctgggattggtaaaattggaatggagataatgtcaattgcattacctgctgcattagctttagctgctgatcctataacatctcttgtcgacactgccttcgttggccatattggttctgcggaattagctgcagtaggagtgtcagtttctgtattcaatttggtgtcgaagctcttcaatgttcctttactaaatgtcacaacatcgtttgttgcggaggagcaagcaattgctgctaaggatgataatgattctatagaaacaagcaagaaagtgctgccttcggtttcaacttcattagttcttgctgctggagttggtattgcagaggccattgcgctatctctcgggtctgatttcttgatggatgtcatggctataccttttgattcaccaatgcggataccagcagagcagttcctcagacttcgagcgtatggtgcaccaccaattgttgttgcattggctgcgcaaggagcttttcgaggtttcaaggacacaacaacgcctctatatgccgttgttgcggggaatgtacttaatgcggtattggatccaatcctgatatttgtccttggttttggtatctctggtgctgcggctgctactgtgatttctgaatacttgattgcatttattcttctatggaagttgaatgagaatgtagttttgctctctcctcaaatcaaagtgggaagagccaaccagtacctcaaatcaggtgggcttctcattggtagaacggtggctttgcttgtgccattcacattagctacttcgttagcagctcaaaatggacccactcaaatggctggccatcaaatcgtcttggaaatctggttggctgtctctttactcaccgatgctttagccattgctgcacagagtcttcttgccaccacttactctcaaggagaatacaaacaagcccgggaagttctcttcggagtccttcaagtaggtttagcaactggaactggtttggctgctgtattgttcatcactttcgaaccattttcaagcttattcacaacggattcagaagttttaaagattgctttgtcagggaccttatttgtggctggatctcaaccggtgaatgctctagcgtttgttttggatgggctctattatggtgtctctgacttcggatttgccgcttattctatggtgattgtcggattcatatcttccttgttcatgcttgtggctgcaccaacgtttggccttgccgggatctggactggtttgttcctcttcatggcgttgcggttggttgctggagcctggagattggggacaagaaccggtccatggaaaatgctatggtctgctccagagaagccagaatgaagcggatcactgttttttgcggtatgatgcgtgactcttaagttaagataaatgaaaatggagtaaactaacaatgtaaaaaacatagtctcatagtcatagtatattgatgc

SEQ ID NO: 108002 - protein, 536 aa, Arabidopsis thaliana
  peptide (1)..(536): Ceres Seq. ID no. 13652992
SSSSAEIFLRLSFSAMAAVATSFCFSPHRSPSRFGNPNSSIRRTIVCKSSPRDESPAVSTSSQRPEKQQNPLTSQNKPDHDHKPDPGIGKIGMEIMSIALPAALALAADPITSLVDTAFVGHIGSAELAAVGVSVSVFNLVSKLFNVPLLNVTTSFVAEEQAIAAKDDNDSIETSKKVLPSVSTSLVLAAGVGIAEAIALSLGSDFLMDVMAIPFDSPMRIPAEQFLRLRAYGAPPIVVALAAQGAFRGFKDTTTPLYAVVAGNVLNAVLDPILIFVLGFGISGAAAATVISEYLIAFILLWKLNENVVLLSPQIKVGRANQYLKSGGLLIGRTVALLVPFTLATSLAAQNGPTQMAGHQIVLEIWLAVSLLTDALAIAAQSLLATTYSQGEYKQAREVLFGVLQVGLATGTGLAAVLFITFEPFSSLFTTDSEVLKIALSGTLFVAGSQPVNALAFVLDGLYYGVSDFGFAAYSMVIVGFISSLFMLVAAPTFGLAGIWTGLFLFMALRLVAGAWRLGTRTGPWKMLWSAPEKPE

SEQ ID NO: 108003 - protein, 521 aa, Arabidopsis thaliana
  peptide (1)..(521): Ceres Seq. ID no. 13652993
MAAVATSFCFSPHRSPSRFGNPNSSIRRTIVCKSSPRDESPAVSTSSQRPEKQQNPLTSQNKPDHDHKPDPGIGKIGMEIMSIALPAALALAADPITSLVDTAFVGHIGSAELAAVGVSVSVFNLVSKLFNVPLLNVTTSFVAEEQAIAAKDDNDSIETSKKVLPSVSTSLVLAAGVGIAEAIALSLGSDFLMDVMAIPFDSPMRIPAEQFLRLRAYGAPPIVVALAAQGAFRGFKDTTTPLYAVVAGNVLNAVLDPILIFVLGFGISGAAAATVISEYLIAFILLWKLNENVVLLSPQIKVGRANQYLKSGGLLIGRTVALLVPFTLATSLAAQNGPTQMAGHQIVLEIWLAVSLLTDALAIAAQSLLATTYSQGEYKQAREVLFGVLQVGLATGTGLAAVLFITFEPFSSLFTTDSEVLKIALSGTLFVAGSQPVNALAFVLDGLYYGVSDFGFAAYSMVIVGFISSLFMLVAAPTFGLAGIWTGLFLFMALRLVAGAWRLGTRTGPWKMLWSAPEKPE

SEQ ID NO: 108004 - protein, 444 aa, Arabidopsis thaliana
  peptide (1)..(444): Ceres Seq. ID no. 13652994
MEIMSIALPAALALAADPITSLVDTAFVGHIGSAELAAVGVSVSVFNLVSKLFNVPLLNVTTSFVAEEQAIAAKDDNDSIETSKKVLPSVSTSLVLAAGVGIAEAIALSLGSDFLMDVMAIPFDSPMRIPAEQFLRLRAYGAPPIVVALAAQGAFRGFKDTTTPLYAVVAGNVLNAVLDPILIFVLGFGISGAAAATVISEYLIAFILLWKLNENVVLLSPQIKVGRANQYLKSGGLLIGRTVALLVPFTLATSLAAQNGPTQMAGHQIVLEIWLAVSLLTDALAIAAQSLLATTYSQGEYKQAREVLFGVLQVGLATGTGLAAVLFITFEPFSSLFTTDSEVLKIALSGTLFVAGSQPVNALAFVLDGLYYGVSDFGFAAYSMVIVGFISSLFMLVAAPTFGLAGIWTGLFLFMALRLVAGAWRLGTRTGPWKMLWSAPEKPE

SEQ ID NO: 108005 - DNA, 1360 bp, Arabidopsis thaliana
  misc_feature (1)..(1360): Ceres Seq. ID no. 13652995
  misc_feature (1)..(1360): Ortholog of  Ceres SEQ ID NO 14306443 as cited in SEQ ID NO 53658
gttcttctccgacaacttcttcatcagttggtttcgtcgtctccgaacatagttttctcgaaagcacgaacctcacagtgggctgaagagttctcggaatagccatggatggggtgggtgaaagttcgactcaaaatgaggtagaagagaagcctgtgattgttagagttaagcgaaaagttggacagtctctgctcgatgctttctggttggagataaatgaaagaccactcaaacggccgactctggatttctcaaagctatctatttcagattcaggggagagaggtccttctgtggcagaggatgtgaaaccgaagaaggtgctagtgcggcatttggagacagttacggactctgaaaccacagctgatattatccactctttctttgagtctgatcataatgagaaaagttgcagtaaaggaaagtttgaggagaggaaaattgctttcaagaaagacaatagaaaggaacagcgcctgaccaaatctgtacaaaagcaacagattgcttcagagaatgctcggtttgagcaaatatggcggagtaggaagggaaacaaggaaggcatccatgagaagtgtcatttctttgacgttattcgtgttgatactgaagaaagacgagacaatgcacaagagtttacatccctggaggaccagaaaatgctcgctagtttcttgcctctccttagagaatgtattccaacagcagctgaagagattgaagctgatatacaatctagtcacaccgaagaatacgtttatgattattatgctgtgaacgaagagatggatatcagcgaagatagttccaagaatcagtttcctcttgtcatagtagaggatgaagaagaattctgtgatggatctgatgaatcagactacgactctgaagattcaaacgctgaagatcatccaaagactgattacccagaggaggaagaagaagaagaagaagaagatgatgatgatgatgatgatgatgaatcagaagaagaaaagagtgaagcctctgatgaatcagacgacgaggagacttcaaaacgacatgtgagaagtgtccttggagatgacgagtttgatgattacgcagaggatgtgtatggttacagcgagagcgatgaggagtttgagtcttagttaatgcctaaatgtgtctactattcttattgagagatactaaagagaattaccgtaaggctgtgaatcaaaattgtgtctccacttttaaacgaaattagaggtgaaatcactgaaatgcatgtaagggtgatgttttgaacagagtagatcatcatatatatattctacagaaaacataaaaaaaaaataaaatcaatacattttgaaagatt

SEQ ID NO: 108006 - protein, 346 aa, Arabidopsis thaliana
  peptide (1)..(346): Ceres Seq. ID no. 13652996
MDGVGESSTQNEVEEKPVIVRVKRKVGQSLLDAFWLEINERPLKRPTLDFSKLSISDSGERGPSVAEDVKPKKVLVRHLETVTDSETTADIIHSFFESDHNEKSCSKGKFEERKIAFKKDNRKEQRLTKSVQKQQIASENARFEQIWRSRKGNKEGIHEKCHFFDVIRVDTEERRDNAQEFTSLEDQKMLASFLPLLRECIPTAAEEIEADIQSSHTEEYVYDYYAVNEEMDISEDSSKNQFPLVIVEDEEEFCDGSDESDYDSEDSNAEDHPKTDYPEEEEEEEEEDDDDDDDDESEEEKSEASDESDDEETSKRHVRSVLGDDEFDDYAEDVYGYSESDEEFES

SEQ ID NO: 108007 - DNA, 1637 bp, Arabidopsis thaliana
  misc_feature (1)..(1637): Ceres Seq. ID no. 13653001
  misc_feature (1)..(1637): Ortholog of  Ceres SEQ ID NO 15170155 as cited in SEQ ID NO 64363
agttcctttttttttgttctccgaacgttctctcctctctgtctatcatcgaacgccgtcgctctcgccgttgacttctaccagtgaccccaacgccttcaatttccgcctcgtcggataatttcatcggagaagacaatggtgatggaagttacagagactgagcgatggtgcgttgtaactggtggtagaggattcgctgcaagacatcttgtagaaatgctcgtacgttaccaaatgttccacgttcgtatcgccgatttagctcctgcgatagtgctcaatcctcacgaggaaactggaattctcggtgaagcaattagatccggtagagttcaatacgtctccgctgatcttcggaacaaaactcaagttgtcaaaggttttcaaggagcagaagtggtgtttcatatggcagctccagattcatcgattaacaatcaccagcttcagtactcagttaatgttcaagggacaacaaatgtaattgatgcttgtattgaggttggagtaaagaggctaatctatacaagttctccgagtgttgtgtttgacggggtccatggtactttgaatgctgatgaatcactgccgtatccacctaagcataatgattcatattcagctactaaagctgaaggggaagctttgattttgaaagcgaatggaagaagtggactactcacttgttgcatacgtcctagcagcatatttggtcctggtgataaattaatggttccatcgcttgttactgctgccagggctgggaaatccaagttcattataggtgatgggagtaacttctatgatttcacttatgttgaaaatgttgtgcacgcccatgtctgtgctgagcgagctctagcatcaggaggagaagtatgtgcaaaagctgctggccaggcttacttcattaccaacatggagccaattaaattttgggagtttatgtcacagcttcttgaaggacttggctatgagaggccaagtataaagatacctgcaagtctcatgatgccaatagcatatcttgtggaactagcatataaattactcggaccgtatgggatgaaagtaccagtgctaacaccttctagggttaggctactctcttgcaacagaacatttgattcttcaaaagcaaaggatcgtttaggctattctcctgttgtcccacttcaggaaggtataaagaggacaatagattcattctcacacttgaaagctcaaaatcaacccaaaacagaagttactgaaacaattcaatggaaaaagcagactctcattgccatagtcattctgattactctctatcataactttgttgcaaccaccggatcatcttccgtcataataactgctgtttccaaggttttgttggtatcatcaatttttatgttcatcaatggcattttaccagagaaaatgaaagtgttcgggagcaagaagatcgactaaagaatactccaaatttgagctttgtgtaaggtaaacaacgacttattttttcctctatacattgataaacatgactcctgcctgtgtagatggatgttgtttggtctgagttttgcgtcgtttattttacgatttgtaatttgaactctgtaactgtcgatttcggttactctgatacc

SEQ ID NO: 108008 - protein, 439 aa, Arabidopsis thaliana
  peptide (1)..(439): Ceres Seq. ID no. 13653002
MVMEVTETERWCVVTGGRGFAARHLVEMLVRYQMFHVRIADLAPAIVLNPHEETGILGEAIRSGRVQYVSADLRNKTQVVKGFQGAEVVFHMAAPDSSINNHQLQYSVNVQGTTNVIDACIEVGVKRLIYTSSPSVVFDGVHGTLNADESLPYPPKHNDSYSATKAEGEALILKANGRSGLLTCCIRPSSIFGPGDKLMVPSLVTAARAGKSKFIIGDGSNFYDFTYVENVVHAHVCAERALASGGEVCAKAAGQAYFITNMEPIKFWEFMSQLLEGLGYERPSIKIPASLMMPIAYLVELAYKLLGPYGMKVPVLTPSRVRLLSCNRTFDSSKAKDRLGYSPVVPLQEGIKRTIDSFSHLKAQNQPKTEVTETIQWKKQTLIAIVILITLYHNFVATTGSSSVIITAVSKVLLVSSIFMFINGILPEKMKVFGSKKID

SEQ ID NO: 108009 - protein, 437 aa, Arabidopsis thaliana
  peptide (1)..(437): Ceres Seq. ID no. 13653003
MEVTETERWCVVTGGRGFAARHLVEMLVRYQMFHVRIADLAPAIVLNPHEETGILGEAIRSGRVQYVSADLRNKTQVVKGFQGAEVVFHMAAPDSSINNHQLQYSVNVQGTTNVIDACIEVGVKRLIYTSSPSVVFDGVHGTLNADESLPYPPKHNDSYSATKAEGEALILKANGRSGLLTCCIRPSSIFGPGDKLMVPSLVTAARAGKSKFIIGDGSNFYDFTYVENVVHAHVCAERALASGGEVCAKAAGQAYFITNMEPIKFWEFMSQLLEGLGYERPSIKIPASLMMPIAYLVELAYKLLGPYGMKVPVLTPSRVRLLSCNRTFDSSKAKDRLGYSPVVPLQEGIKRTIDSFSHLKAQNQPKTEVTETIQWKKQTLIAIVILITLYHNFVATTGSSSVIITAVSKVLLVSSIFMFINGILPEKMKVFGSKKID

SEQ ID NO: 108010 - protein, 412 aa, Arabidopsis thaliana
  peptide (1)..(412): Ceres Seq. ID no. 13653004
MLVRYQMFHVRIADLAPAIVLNPHEETGILGEAIRSGRVQYVSADLRNKTQVVKGFQGAEVVFHMAAPDSSINNHQLQYSVNVQGTTNVIDACIEVGVKRLIYTSSPSVVFDGVHGTLNADESLPYPPKHNDSYSATKAEGEALILKANGRSGLLTCCIRPSSIFGPGDKLMVPSLVTAARAGKSKFIIGDGSNFYDFTYVENVVHAHVCAERALASGGEVCAKAAGQAYFITNMEPIKFWEFMSQLLEGLGYERPSIKIPASLMMPIAYLVELAYKLLGPYGMKVPVLTPSRVRLLSCNRTFDSSKAKDRLGYSPVVPLQEGIKRTIDSFSHLKAQNQPKTEVTETIQWKKQTLIAIVILITLYHNFVATTGSSSVIITAVSKVLLVSSIFMFINGILPEKMKVFGSKKID

SEQ ID NO: 108011 - DNA, 2322 bp, Arabidopsis thaliana
  misc_feature (1)..(2322): Ceres Seq. ID no. 13653017
  misc_feature (1)..(2322): Ortholog of  Ceres SEQ ID NO 14315634 as cited in SEQ ID NO 53029
gtcgtcgttgtaaaatggctaccggaaacttggcttctcgtcttcatctcttgatcgatctttgtgttcgccaattccctgaaagagaagaagtaactttgccgacgaaggaaacggaaaaagatctgcttctttctctatctcaggtgttgagagaaattcaatcttggaggagcgaaatttcatgtgataaggcggtggaatcgcgagaggagactgttgttgatcatgatgaatctgctgatgctttatatggtccagactctatagagtatttatgcttagaaagacttgtggcggatcttgtttgtttgttgggtatggagaatgtgcatgttaaacatttggctggcaacatacttgtggaagtatccggttgtcttgttgaatctggaagtcaatgggatgagttcattcgtttgctttgtgaatgtttgcggttagcagttatctacagtttcccaattcctgctgtaggatctgaaactggatttggaagtctagatcaatgtttcttcggttctgatgttcttaaatgtaagctggaaaaggctaactggtccacggtgtcggatatctttcgagttcttcgtaatatattgaagcgcttgagccaagaagacaatgaggaaatttttgatgtatacttggaatctgtcaactctacacttgcaaaagttccttggtgccgattggatactattttttctcatcagcatggtagtggtgaaagaaatttccaaggtcagagtggaaacagtgaggaagcaactgtatttcttgggagctttgtccagtttctctgttccatggttcagcaggttcatgttgtagaagattctgatgattttgaaccttcatatttgatcctccaaaaaaccatcaagcttattccggatctcctccgttggtgccaaccaaagttgaaaagtcaaagtggctcttgcatgtcaagatacctagggcacaagttactggtgttgatgatcaggcttactgataagtccaaaatcaaatgtaccattcttctttcatggctgcaatatttgcaacgggattctcaaggctttcttcaacacaccctaacaaagtttaaacccgttcaagataattgtttggagggttcgccattctttgtgagtttgtctgatagggaggtcaatgagatgcattctaatcatttgcaaagactctctgtgtttctgttcctacggtgctccttcactttgatttactcaagtagacataacgacaagctatgtgagtttgattgtagaaagaaagggatggcagagatgtttaaatggattgaacgacagattccaggcaatatgttttctgatcacagaatttatagcaagaagaatgttgaattttctgcatccttcgttcggctgttcatgcatgaggatgatctattatttaaagtcctcctgcaattgctgtctgtaccattgcatagacaggaattgcctaacgtggaagggggttcgcttgaagatgaggaacaaattactctcttccgtttatcaaccttgttcaatcctgtaagattattctgtatatttctttcagagctgcattatgatcatcaagtacttcttgattaccttatatctaaagatattggggctagctgcgcagagtacctgctgagatgcttgcgtgcagtatgtgattcatggactctatttgtggaattcccatttgaaggaagtacagatgctccatctccgaagagaagaaaagttttgcctgagacttctgaggttgaacaaaactggagattacatgcccaggcttttgaagacgccaaagattgtctgctttcgttacaaaattcagttgttaagctacatcagaagaaactgtttccatacaacccagaggctcttctacgacgtttgtcaaggtttcatgagctctgtctatcccatgagtaatatatctggaccaaaggtgagattctctgagacagaacagaaggatcagatgccaacacaaagaagtctcctttccagatcaaatttcaaactaatcggctcaccagtagaagtgtatagagatcctacattctttggttggtgcagctgctatgaaacagagagcattatgttcttgcctccacaatccaaatctgaatggtataagatactctctagtcaagctaatgtgaaactgccccagccaattagagtaagcaatgaagtgtagaatatcaagaatcacaaatattgaaactctcttattcatatcatagatgtaactgagcccaaatcatacacaggtgtcatcattttacatttagttatatttcgctgc

SEQ ID NO: 108012 - protein, 646 aa, Arabidopsis thaliana
  peptide (1)..(646): Ceres Seq. ID no. 13653018
RRCKMATGNLASRLHLLIDLCVRQFPEREEVTLPTKETEKDLLLSLSQVLREIQSWRSEISCDKAVESREETVVDHDESADALYGPDSIEYLCLERLVADLVCLLGMENVHVKHLAGNILVEVSGCLVESGSQWDEFIRLLCECLRLAVIYSFPIPAVGSETGFGSLDQCFFGSDVLKCKLEKANWSTVSDIFRVLRNILKRLSQEDNEEIFDVYLESVNSTLAKVPWCRLDTIFSHQHGSGERNFQGQSGNSEEATVFLGSFVQFLCSMVQQVHVVEDSDDFEPSYLILQKTIKLIPDLLRWCQPKLKSQSGSCMSRYLGHKLLVLMIRLTDKSKIKCTILLSWLQYLQRDSQGFLQHTLTKFKPVQDNCLEGSPFFVSLSDREVNEMHSNHLQRLSVFLFLRCSFTLIYSSRHNDKLCEFDCRKKGMAEMFKWIERQIPGNMFSDHRIYSKKNVEFSASFVRLFMHEDDLLFKVLLQLLSVPLHRQELPNVEGGSLEDEEQITLFRLSTLFNPVRLFCIFLSELHYDHQVLLDYLISKDIGASCAEYLLRCLRAVCDSWTLFVEFPFEGSTDAPSPKRRKVLPETSEVEQNWRLHAQAFEDAKDCLLSLQNSVVKLHQKKLFPYNPEALLRRLSRFHELCLSHE

SEQ ID NO: 108013 - protein, 642 aa, Arabidopsis thaliana
  peptide (1)..(642): Ceres Seq. ID no. 13653019
MATGNLASRLHLLIDLCVRQFPEREEVTLPTKETEKDLLLSLSQVLREIQSWRSEISCDKAVESREETVVDHDESADALYGPDSIEYLCLERLVADLVCLLGMENVHVKHLAGNILVEVSGCLVESGSQWDEFIRLLCECLRLAVIYSFPIPAVGSETGFGSLDQCFFGSDVLKCKLEKANWSTVSDIFRVLRNILKRLSQEDNEEIFDVYLESVNSTLAKVPWCRLDTIFSHQHGSGERNFQGQSGNSEEATVFLGSFVQFLCSMVQQVHVVEDSDDFEPSYLILQKTIKLIPDLLRWCQPKLKSQSGSCMSRYLGHKLLVLMIRLTDKSKIKCTILLSWLQYLQRDSQGFLQHTLTKFKPVQDNCLEGSPFFVSLSDREVNEMHSNHLQRLSVFLFLRCSFTLIYSSRHNDKLCEFDCRKKGMAEMFKWIERQIPGNMFSDHRIYSKKNVEFSASFVRLFMHEDDLLFKVLLQLLSVPLHRQELPNVEGGSLEDEEQITLFRLSTLFNPVRLFCIFLSELHYDHQVLLDYLISKDIGASCAEYLLRCLRAVCDSWTLFVEFPFEGSTDAPSPKRRKVLPETSEVEQNWRLHAQAFEDAKDCLLSLQNSVVKLHQKKLFPYNPEALLRRLSRFHELCLSHE

SEQ ID NO: 108014 - protein, 540 aa, Arabidopsis thaliana
  peptide (1)..(540): Ceres Seq. ID no. 13653020
MENVHVKHLAGNILVEVSGCLVESGSQWDEFIRLLCECLRLAVIYSFPIPAVGSETGFGSLDQCFFGSDVLKCKLEKANWSTVSDIFRVLRNILKRLSQEDNEEIFDVYLESVNSTLAKVPWCRLDTIFSHQHGSGERNFQGQSGNSEEATVFLGSFVQFLCSMVQQVHVVEDSDDFEPSYLILQKTIKLIPDLLRWCQPKLKSQSGSCMSRYLGHKLLVLMIRLTDKSKIKCTILLSWLQYLQRDSQGFLQHTLTKFKPVQDNCLEGSPFFVSLSDREVNEMHSNHLQRLSVFLFLRCSFTLIYSSRHNDKLCEFDCRKKGMAEMFKWIERQIPGNMFSDHRIYSKKNVEFSASFVRLFMHEDDLLFKVLLQLLSVPLHRQELPNVEGGSLEDEEQITLFRLSTLFNPVRLFCIFLSELHYDHQVLLDYLISKDIGASCAEYLLRCLRAVCDSWTLFVEFPFEGSTDAPSPKRRKVLPETSEVEQNWRLHAQAFEDAKDCLLSLQNSVVKLHQKKLFPYNPEALLRRLSRFHELCLSHE

SEQ ID NO: 108015 - DNA, 1761 bp, Arabidopsis thaliana
  misc_feature (1)..(1761): Ceres Seq. ID no. 13653021
  misc_feature (1)..(1761): Ortholog of  Ceres SEQ ID NO 14305780 as cited in SEQ ID NO 52430
agttagtaaacgagcaaaagaagaagagaaacaacaagaagtagtaatggcttcctctatgctctcctccgccgctgtggttacatccccggctcaggccaccatggtcgctccattcaccggcttgaagtcatccgctgcattcccggtcacccgcaagaccaacaaggacatcacttccatcgcaagcaacgggggaagagttagctgcatgaaggtgtggccaccaattggaaagaagaagtttgagactctatcttacctccctgaccttagtgacgtcgaattggctaaggaagttgactaccttctccgcaacaagtggattccttgtgttgaattcgagttagagcacggatttgtgtaccgtgagcacggaaacactcccggatactacgatggacggtactggacaatgtggaagcttccattgttcggatgcaccgactccgctcaagtgttgaaggaagttgaagaatgcaagaaggagtacccgggcgccttcattaggatcatcggattcgacaacacccgtcaagtacataaaggatcctcaattattgtctttcattgatgcagagtgtttcattgtgagcacagtcaatgctttgcagacgccaatgatcaatgcaagtatggttttatgtgacaggcactatggaggaattaactacccggttggtggagttggtgggattgccaagtctttggcagaagggcttgttgatcaaggcagtgaaatacaatacaaggctaatgtaaaaagtataatacttgatcatggaaaggcagttggtgtaaggctagcagatggaagagaatttttcgctaagacgataatttcaaatgctacaagatgggatacgtttgggaagctgttaaaaggagaaaagcttcctaaagaagaagaaaatttccagaaagtgtacgtcaaggctccatcatttctttcaattcacatgggtgttaaagcagaggttctccctccagatacagattgccatcattttgtgctcgaggacgattggaagaatctggaggagccttatggcagtattttcctcagcattccaaccattcttgattcatctttggctccagatggtcgacatatacttcacatatttacaacttcgtccattgaggattgggagggactccctccaaaagagtatgaggcgaaaaaggaagatgtggcagctagaataatccagagactagagaaaaaattgtttccagggctcagttcatctattacgttcaaggaggtgggaacaccaagaacacacagacgatttcttgcgagggataagggaacttatgggccaatgcctagaggaaccccgaaaggtttattaggcatgccattcaatacaacggctatagatggtctatactgcgtgggggatagttgttttcctggccagggagttatagctgtggctttttcaggagtgatgtgtgctcatcgggtagctgctgatattgggcttgagaagaaatcacgagtacttgatgttggccttcttggtttacttggttggctaaggacactcgcatagatccaatacattatttccttttcttctttattatgttaatttctattgttttactatttcttcatagaattttacttttctttattttcttatttcctcgtttacttttttctagttctatataaagaagaccttcttgtaagaaatacatctcataataattttcttaagaagcatagagtttttctctcttctactg

SEQ ID NO: 108016 - protein, 313 aa, Arabidopsis thaliana
  peptide (1)..(313): Ceres Seq. ID no. 13653022
MINASMVLCDRHYGGINYPVGGVGGIAKSLAEGLVDQGSEIQYKANVKSIILDHGKAVGVRLADGREFFAKTIISNATRWDTFGKLLKGEKLPKEEENFQKVYVKAPSFLSIHMGVKAEVLPPDTDCHHFVLEDDWKNLEEPYGSIFLSIPTILDSSLAPDGRHILHIFTTSSIEDWEGLPPKEYEAKKEDVAARIIQRLEKKLFPGLSSSITFKEVGTPRTHRRFLARDKGTYGPMPRGTPKGLLGMPFNTTAIDGLYCVGDSCFPGQGVIAVAFSGVMCAHRVAADIGLEKKSRVLDVGLLGLLGWLRTLA

SEQ ID NO: 108017 - protein, 308 aa, Arabidopsis thaliana
  peptide (1)..(308): Ceres Seq. ID no. 13653023
MVLCDRHYGGINYPVGGVGGIAKSLAEGLVDQGSEIQYKANVKSIILDHGKAVGVRLADGREFFAKTIISNATRWDTFGKLLKGEKLPKEEENFQKVYVKAPSFLSIHMGVKAEVLPPDTDCHHFVLEDDWKNLEEPYGSIFLSIPTILDSSLAPDGRHILHIFTTSSIEDWEGLPPKEYEAKKEDVAARIIQRLEKKLFPGLSSSITFKEVGTPRTHRRFLARDKGTYGPMPRGTPKGLLGMPFNTTAIDGLYCVGDSCFPGQGVIAVAFSGVMCAHRVAADIGLEKKSRVLDVGLLGLLGWLRTLA

SEQ ID NO: 108018 - protein, 200 aa, Arabidopsis thaliana
  peptide (1)..(200): Ceres Seq. ID no. 13653024
MGVKAEVLPPDTDCHHFVLEDDWKNLEEPYGSIFLSIPTILDSSLAPDGRHILHIFTTSSIEDWEGLPPKEYEAKKEDVAARIIQRLEKKLFPGLSSSITFKEVGTPRTHRRFLARDKGTYGPMPRGTPKGLLGMPFNTTAIDGLYCVGDSCFPGQGVIAVAFSGVMCAHRVAADIGLEKKSRVLDVGLLGLLGWLRTLA

SEQ ID NO: 108019 - DNA, 1650 bp, Arabidopsis thaliana
  misc_feature (1)..(1650): Ceres Seq. ID no. 13653029
  misc_feature (1)..(1650): Ortholog of  Ceres SEQ ID NO 14314620 as cited in SEQ ID NO 56872
  misc_feature (1)..(1650): Ortholog of  Ceres SEQ ID NO 15178460 as cited in SEQ ID NO 66107
ctcttccgttgccttttcgctttctccgtacacttggccttccttctagcgatcaaaccctaggtcccgccattgttggtcccagacttcaatcgaagctccaatttcactaatttcaggtgttgtttattctctggaagttggcgatacaatggattctactgctgcaaccaaacgtgttgttgacccacttactgttgggagtgcgtttgtcaatcagtactactacattttctgtaacatgcctgagcatctgccccggttttatcaagagatcagtagagttggccgtgttggacaggacggagtcatgcgtgatttctccacttttcaaggtataagtgaggagcttaagagactgacttatggagattgcaactcggctgagataaccagttatgatactcaagagtctcacaatgggggtttccttctcttcgttactggatacttcactctaaacgagagatcgagaaggaaattcacccaaacttttttccttgccccgcaagaaaagggtttctttgttctgaatgacatcctcagatttgttaatgatgatgctaaggataatgttccagagaccatagatggggaagttgtttctgggataaactctacaacacccactattatcaatggcatgaagggttcggagcaagctgcatgtgtttcagtgaatcctgtttgtaaggaagtgtccaaacccttggataatgagaatgctaaggataatgttctggtacctgagattgctaatgaagttgcaaggactgagataacttgcaaagaagttgcagatgattcacagaaaaattatgaccctgatgatggacttgcagatgctcccaagaaatcctatgcctctgtgttgaaggttacgaaagataaatttggagttccagctgtctctttaccttctccaaagaagatacctaaagaccaagaacatcaagcgccttcagatccttctacaggccagatactcaaagaccaaggtcaacaagcatcttcagatccttctcaagtgatagaatctgatacagtttctgagtctgttgatgcttctgaaaatgggcacaatcaggaagcggtagctgagggtacatctatttatgtgagacatcttccttttaatgccaacattgacatgcttgaggctgaatttaagcaatttggagctattaccaatggtgggattcaagtcataaatcaaaggggccttggttatccttatggttttgttgagtttgaggaggcagatgctgcccacagagcaatagaggcttcacctgtgaagattggtggactgagagcttttgtggaggagaagctatcgacatcaagaggtaaaagaggaaatggaaacgtgggatacggaaataggaatgtgggagtgggaatgagaggaagaggaagttatggatatggctatgattacaggaggggaggtcgaggtcctggaggaggaggaaggtcttttaaccgtagaggcaatgaatacgtcgccagcatcaactcgtactagagcggatttgggttctcttgtggcggataattgatttttggaatggtggaaagaagatggtagcaagacagacagaattggtagatatctctctctcgggtattcaaatattagtaaaaggc

SEQ ID NO: 108020 - protein, 458 aa, Arabidopsis thaliana
  peptide (1)..(458): Ceres Seq. ID no. 13653030
MDSTAATKRVVDPLTVGSAFVNQYYYIFCNMPEHLPRFYQEISRVGRVGQDGVMRDFSTFQGISEELKRLTYGDCNSAEITSYDTQESHNGGFLLFVTGYFTLNERSRRKFTQTFFLAPQEKGFFVLNDILRFVNDDAKDNVPETIDGEVVSGINSTTPTIINGMKGSEQAACVSVNPVCKEVSKPLDNENAKDNVLVPEIANEVARTEITCKEVADDSQKNYDPDDGLADAPKKSYASVLKVTKDKFGVPAVSLPSPKKIPKDQEHQAPSDPSTGQILKDQGQQASSDPSQVIESDTVSESVDASENGHNQEAVAEGTSIYVRHLPFNANIDMLEAEFKQFGAITNGGIQVINQRGLGYPYGFVEFEEADAAHRAIEASPVKIGGLRAFVEEKLSTSRGKRGNGNVGYGNRNVGVGMRGRGSYGYGYDYRRGGRGPGGGGRSFNRRGNEYVASINSY

SEQ ID NO: 108021 - protein, 428 aa, Arabidopsis thaliana
  peptide (1)..(428): Ceres Seq. ID no. 13653031
MPEHLPRFYQEISRVGRVGQDGVMRDFSTFQGISEELKRLTYGDCNSAEITSYDTQESHNGGFLLFVTGYFTLNERSRRKFTQTFFLAPQEKGFFVLNDILRFVNDDAKDNVPETIDGEVVSGINSTTPTIINGMKGSEQAACVSVNPVCKEVSKPLDNENAKDNVLVPEIANEVARTEITCKEVADDSQKNYDPDDGLADAPKKSYASVLKVTKDKFGVPAVSLPSPKKIPKDQEHQAPSDPSTGQILKDQGQQASSDPSQVIESDTVSESVDASENGHNQEAVAEGTSIYVRHLPFNANIDMLEAEFKQFGAITNGGIQVINQRGLGYPYGFVEFEEADAAHRAIEASPVKIGGLRAFVEEKLSTSRGKRGNGNVGYGNRNVGVGMRGRGSYGYGYDYRRGGRGPGGGGRSFNRRGNEYVASINSY

SEQ ID NO: 108022 - protein, 405 aa, Arabidopsis thaliana
  peptide (1)..(405): Ceres Seq. ID no. 13653032
MRDFSTFQGISEELKRLTYGDCNSAEITSYDTQESHNGGFLLFVTGYFTLNERSRRKFTQTFFLAPQEKGFFVLNDILRFVNDDAKDNVPETIDGEVVSGINSTTPTIINGMKGSEQAACVSVNPVCKEVSKPLDNENAKDNVLVPEIANEVARTEITCKEVADDSQKNYDPDDGLADAPKKSYASVLKVTKDKFGVPAVSLPSPKKIPKDQEHQAPSDPSTGQILKDQGQQASSDPSQVIESDTVSESVDASENGHNQEAVAEGTSIYVRHLPFNANIDMLEAEFKQFGAITNGGIQVINQRGLGYPYGFVEFEEADAAHRAIEASPVKIGGLRAFVEEKLSTSRGKRGNGNVGYGNRNVGVGMRGRGSYGYGYDYRRGGRGPGGGGRSFNRRGNEYVASINSY

SEQ ID NO: 108023 - DNA, 2702 bp, Arabidopsis thaliana
  misc_feature (1)..(2702): Ceres Seq. ID no. 13653033
  misc_feature (1)..(2702): Ortholog of  Ceres SEQ ID NO 14309727 as cited in SEQ ID NO 1030
  misc_feature (1)..(2702): Ortholog of  Ceres SEQ ID NO 13581686 as cited in SEQ ID NO 57695
  misc_feature (1)..(2702): Ortholog of  Ceres SEQ ID NO 15224315 as cited in SEQ ID NO 66131
ggtgaatgcgggaggaagaaatggaatcttcgtcagaaggtgagacaaacaagatttcccgatgcaaagccactggttcagacaatcctgatgaggactacgtcgagatcacactcgaagtgcgagacgaaaccatcaacacaatgaaggccaaggcgacacttcgttcggttctttccgggaggctgaaaacgatggttaagtcgctatcgtttgcttcacgccggctcgaccgtagtaagtcgttcggtgctatgtttgctcttcgagggttgaggttcattgccaaaaacgacgccgttggtagaggctgggatgaggttgcaatgaggtttgataagttggccgttgaagggaaactccctaaatccaaatttggacattgcataggaatggttgaatctagcgaatttgtgaacgagctttttgaggcgttggtccgaaggagagggactacgtcatcgtcaatcaccaaaactgaattgtttgaattctgggagcagatcacaggcaatagttttgatgataggctgcaaatcttttttgatatggtggacaaaaatttggacggacgtattacaggagatgaggttaaggagataattgctttaagtgcttcggctaacaagctatcaaagattaaagaaaatgtagatgaatatgctgccttgatcatggaagaactagatcgcgacaacctcggatatattgagttacataacttggaaacattgcttctccaagttcctagccaatcaaataacagtccatcttccgcgaacaaacgtgcactcaacaagatgttgagccagaagctcataccaacaaaagatcgaaacccggtgaaaagatttgctatgaatatatcatacttcttcttggaaaattggaaaaggatttgggtgttaacattgtggatatccatttgcatcactctcttcacttggaaatttctccagtataaacgcaaaaccgtgttcgaggtgatgggctactgtgttaccgtggccaaaggcagtgcagagaccttgaaattcaacatggctctcattctcttgcccgtttgtaggaacactatcacttggctaaggaccaagtccaagcttattgggtctgttgttccatttgatgacaatatcaatttccacaaggttgttgcatttgggatcgcggttggaataggcttgcacgctatatctcacctggcatgtgatttcccgcgtttgctgcatgcaaaaaatgtagagtttgagccaatgaaaaagtttttcggagacgagaggcctgaaaattatggatggttcatgaaagggacagacgggtggaccggtgttaccatggtggttcttatgttagtggcctacgtcttggcgcagtcgtggttcagacgaaaccgggcaaacctaccaaaatcgttgaaacgattgactggtttcaacgcattttggtactcacaccatttgtttgtcatcgtttatgttcttctcatcgtgcatggctattttgtttatctctcaaaggaatggtaccacaagacgacgtggatgtatctggcagttcccgtactactatatgcatttgaacgattgattcgtgcatttagaccaggtgccaaggctgtcaaggttttgaaggtggcagtatatccaggaaatgtactttcactttacatgtcgaagcctaaaggtttcaagtacacaagtggacagtacatatatattaactgttctgacgtctcaccattacaatggcatccgttttcaattacttcggcttccggggatgattacctcagcgttcatatccgcacactcggagactggacatcgcaactcaaatccttatattccaaggttactatttttcaagagtaacatttgtgaattaatgatatatgtacttgatttgtttaattacaaaaccataggtttgtcaacttccctcaacaagtcaaagtgggctcttcatagctgacataggtcaagccaacaatataaccaggtttccgaggctgttaatcgatggtccatatggtgcacccgcacaagattaccggaactacgatgtattgcttctagtaggtctagggatcggagcgacgccattaatcagcataatcagggacgtccttaacaacatcaagaaccagaattccatcgaacgaggcactaaccaacacataaaaaactatgttgccacaaaacgagcttatttttattgggtaacaagagagcaaggatcattggaatggttcagtgaggtcatgaacgaggtagctgagtatgatagtgaggggatgattgaactacataattactgcactagcgtgtatgaggaaggagatgcgaggtcagcactaatcaccatgttgcagtcattgcaccacgccaagagcggcattgacatcgtatcgggcactcgggtccgaacccatttcgctcgacccaattggcgtagtgtcttcaagcacgtcgcagtcaaccacgtcaatcaacgagttggggttttctactgtggtaatacatgcatcataggagagttaaagagactggctcaagatttctctaggaaaactacgaccaagtttgagttccacaaggaaaatttctagtttcgattctattcatccatcagaccatcattagaaaataataagcaaaatatgtcaagctgatatctattataattataaccacactttg

SEQ ID NO: 108024 - protein, 622 aa, Arabidopsis thaliana
  peptide (1)..(622): Ceres Seq. ID no. 13653034
MREEEMESSSEGETNKISRCKATGSDNPDEDYVEITLEVRDETINTMKAKATLRSVLSGRLKTMVKSLSFASRRLDRSKSFGAMFALRGLRFIAKNDAVGRGWDEVAMRFDKLAVEGKLPKSKFGHCIGMVESSEFVNELFEALVRRRGTTSSSITKTELFEFWEQITGNSFDDRLQIFFDMVDKNLDGRITGDEVKEIIALSASANKLSKIKENVDEYAALIMEELDRDNLGYIELHNLETLLLQVPSQSNNSPSSANKRALNKMLSQKLIPTKDRNPVKRFAMNISYFFLENWKRIWVLTLWISICITLFTWKFLQYKRKTVFEVMGYCVTVAKGSAETLKFNMALILLPVCRNTITWLRTKSKLIGSVVPFDDNINFHKVVAFGIAVGIGLHAISHLACDFPRLLHAKNVEFEPMKKFFGDERPENYGWFMKGTDGWTGVTMVVLMLVAYVLAQSWFRRNRANLPKSLKRLTGFNAFWYSHHLFVIVYVLLIVHGYFVYLSKEWYHKTTWMYLAVPVLLYAFERLIRAFRPGAKAVKVLKVAVYPGNVLSLYMSKPKGFKYTSGQYIYINCSDVSPLQWHPFSITSASGDDYLSVHIRTLGDWTSQLKSLYSKVTIFQE

SEQ ID NO: 108025 - protein, 617 aa, Arabidopsis thaliana
  peptide (1)..(617): Ceres Seq. ID no. 13653035
MESSSEGETNKISRCKATGSDNPDEDYVEITLEVRDETINTMKAKATLRSVLSGRLKTMVKSLSFASRRLDRSKSFGAMFALRGLRFIAKNDAVGRGWDEVAMRFDKLAVEGKLPKSKFGHCIGMVESSEFVNELFEALVRRRGTTSSSITKTELFEFWEQITGNSFDDRLQIFFDMVDKNLDGRITGDEVKEIIALSASANKLSKIKENVDEYAALIMEELDRDNLGYIELHNLETLLLQVPSQSNNSPSSANKRALNKMLSQKLIPTKDRNPVKRFAMNISYFFLENWKRIWVLTLWISICITLFTWKFLQYKRKTVFEVMGYCVTVAKGSAETLKFNMALILLPVCRNTITWLRTKSKLIGSVVPFDDNINFHKVVAFGIAVGIGLHAISHLACDFPRLLHAKNVEFEPMKKFFGDERPENYGWFMKGTDGWTGVTMVVLMLVAYVLAQSWFRRNRANLPKSLKRLTGFNAFWYSHHLFVIVYVLLIVHGYFVYLSKEWYHKTTWMYLAVPVLLYAFERLIRAFRPGAKAVKVLKVAVYPGNVLSLYMSKPKGFKYTSGQYIYINCSDVSPLQWHPFSITSASGDDYLSVHIRTLGDWTSQLKSLYSKVTIFQE

SEQ ID NO: 108026 - protein, 576 aa, Arabidopsis thaliana
  peptide (1)..(576): Ceres Seq. ID no. 13653036
MKAKATLRSVLSGRLKTMVKSLSFASRRLDRSKSFGAMFALRGLRFIAKNDAVGRGWDEVAMRFDKLAVEGKLPKSKFGHCIGMVESSEFVNELFEALVRRRGTTSSSITKTELFEFWEQITGNSFDDRLQIFFDMVDKNLDGRITGDEVKEIIALSASANKLSKIKENVDEYAALIMEELDRDNLGYIELHNLETLLLQVPSQSNNSPSSANKRALNKMLSQKLIPTKDRNPVKRFAMNISYFFLENWKRIWVLTLWISICITLFTWKFLQYKRKTVFEVMGYCVTVAKGSAETLKFNMALILLPVCRNTITWLRTKSKLIGSVVPFDDNINFHKVVAFGIAVGIGLHAISHLACDFPRLLHAKNVEFEPMKKFFGDERPENYGWFMKGTDGWTGVTMVVLMLVAYVLAQSWFRRNRANLPKSLKRLTGFNAFWYSHHLFVIVYVLLIVHGYFVYLSKEWYHKTTWMYLAVPVLLYAFERLIRAFRPGAKAVKVLKVAVYPGNVLSLYMSKPKGFKYTSGQYIYINCSDVSPLQWHPFSITSASGDDYLSVHIRTLGDWTSQLKSLYSKVTIFQE

SEQ ID NO: 108027 - DNA, 1631 bp, Arabidopsis thaliana
  misc_feature (1)..(1631): Ceres Seq. ID no. 13653049
  misc_feature (1)..(1631): Ortholog of  Ceres SEQ ID NO 13654928 as cited in SEQ ID NO 62546
actcgtaaacttaaaaaaaaaaaaaaaaaaaacagaacaatttcttcttcctctgggatccataagttttgaggtatgttgttgctgattttgtccttttatgtctgcaaataacagagaagataaatgaggattttctcctaggttgaagttttatattttggtggtcagtgtctgatggagtgtaatgcaaagccaccgtttcaatgggaattggaaaacttgatatcttttggcacttctacagctgaagttcctagaaagctaaaaccaatggagtgggaaattgatggatttgattgcacctctctgtattcttcaagctttgcctatgctggtagttcaggttctgatatagctcatgctttctctaaaagctcaaagtcaacttccattagctcttcatcagctgaagtaagaacacacaattttacatccgaaactggtgaaagtcttcctggagaatttgcaaaggggattgatacttctccaagtcttgaactttcttttggctctggtgatccggttctcggtttaaagcttggtaaacgaacgtactttgaagactttgggaagtggagaatgctaaaggtttgggacttccagtgactctggcttcatcttctgtttctcccgtgaagaaatcgaaatccattcctcagaggttacaaactcctcactgtcaagttgaaggctgtaatcttgatctttcatcagctaaagactatcatcggaaacataggatttgtgaaaatcattcaaagtttcctaaagtcgttgtgagtggcgtagagcgtcggttctgccaacaatgtagcaggttccactgtctctctgagtttgatgagaagaaacgtagctgtcgccgacgtctctcagatcacaatgcaagacgtcgcaagccaaatcctggaaggacatatgatgggaaaccacaggtggattttgtatggaacagatttgcacttatccatccaagaagtgaggaaaagtttatatggccaagttcgaagcacgtaccatcaagagtgttaatgccgcaacctgcaaagactgagatttccgataccgagcacaatagatttggattgttggaccccaaaaccaaaaccgcaagagccgagttattcagtaaagaaaaggtcacaatctcttcacacatgggtgcttctcaagatcttgatggtgctctctctcttctgtcaaattcaacaacatgggtttcttcctctgaccaaccaaggcgttttacccttgatcaccatccctcaagcaacctccaacccgtagctcaccggtctgcggctcaactcaattcagtttccggctattggcagccggacccacccgcagttgaaggcccgaccgctctgcatagaaatggggtaggccagtttaatgaaaactacttcagcttgaaccagttttataactgaaaattgtatgcctttaaatcctaataagatatttgatgttaaaggatcaagcaagctagtgataagttaagataggagctttgaaacttgcaagacaccaaatcctctcttgtttttttgtccaaatattttcatgggttagagagctttgacaattgtcttaatatcatctttgtcgtgttatacattaggatt

SEQ ID NO: 108028 - protein, 143 aa, Arabidopsis thaliana
  peptide (1)..(143): Ceres Seq. ID no. 13653050
MECNAKPPFQWELENLISFGTSTAEVPRKLKPMEWEIDGFDCTSLYSSSFAYAGSSGSDIAHAFSKSSKSTSISSSSAEVRTHNFTSETGESLPGEFAKGIDTSPSLELSFGSGDPVLGLKLGKRTYFEDFGKWRMLKVWDFQ

SEQ ID NO: 108029 - protein, 133 aa, Arabidopsis thaliana
  peptide (1)..(133): Ceres Seq. ID no. 13653051
MPQPAKTEISDTEHNRFGLLDPKTKTARAELFSKEKVTISSHMGASQDLDGALSLLSNSTTWVSSSDQPRRFTLDHHPSSNLQPVAHRSAAQLNSVSGYWQPDPPAVEGPTALHRNGVGQFNENYFSLNQFYN

SEQ ID NO: 108030 - protein, 111 aa, Arabidopsis thaliana
  peptide (1)..(111): Ceres Seq. ID no. 13653052
MEWEIDGFDCTSLYSSSFAYAGSSGSDIAHAFSKSSKSTSISSSSAEVRTHNFTSETGESLPGEFAKGIDTSPSLELSFGSGDPVLGLKLGKRTYFEDFGKWRMLKVWDFQ

SEQ ID NO: 108031 - DNA, 1635 bp, Arabidopsis thaliana
  misc_feature (1)..(1635): Ceres Seq. ID no. 13653063
  misc_feature (1)..(1635): Ortholog of  Ceres SEQ ID NO 15176457 as cited in SEQ ID NO 55547
  misc_feature (1)..(1635): Ortholog of  Ceres SEQ ID NO 13594349 as cited in SEQ ID NO 58161
  misc_feature (1)..(1635): Ortholog of  Ceres SEQ ID NO 13663419 as cited in SEQ ID NO 66561
tgatagaacctgattctagacttatagtgggttcttgctcatttacgttctctgcaattctctgtttcttgttctgttttcaagtcctcttcaaagttctttacaaacgagtgctaatcgaaaagagataaacatggtatcgtctcgggccgttgtgatggccattatggtattggtcacagtgcagtggttggtttttgctgaaggttatccggaagaagacttggtggccaggctacctggtcaaccaaacgtcgggttcagacaatttgctggatatgtcgatgtggactcggaaaatggtcgtagtcttttttactactacgtggaggctgtaaaagaacctgacactaagcccttaaccctttggctcaatggaggtccaggttgttcttcagttggtggaggagctttcactgagttaggtccattttatcctacgggcgatggccgtggccttcgcttgaactccatgtcttggaacaaagcttcgaacttgttatttgtggagtcaccagccggagtaggatggtcatactctaacagaagttcggattacaacactggggacaagtctactgtcaatgatatgcttgtgttcttgttgagatggttcaacaagttcccagagttgaagtctcgcgacctctttctcactggcgaaagctacgcagggcattacatacctcaactggctgatgtgatactcagctacaattcacgctcaagtgggttcaaatttaacgtcaaaggcattgcaattgggaatccacttctgaagcttgacagggactttgcagctgcatacgagtacttctggtcacatgggatgatctctgatgaagtaagactcacaatcatgaaccaatgtgactttgccaatccaaagaacatgagcaatgcttgtatatatgcaatcgttgaatccagcgtcctcactgagtatatcaacagctatcacattctcctcgatgtatgttacccttctattgttcagcaagagctaaggctcaagaaaatgaatgcgcttcacgctaaccgcactcgcctaccttatgaatggactatgtgcagcaaccggttaaactacagtggcatagacgggtacattgacatgcttccgagtcttaagagaattattcagaaccaaactcctgtttggatcttcagtggagatcaagattctgtaattccacttcaaagttcaagaacactcgtacgagaacttgctgaggatctcaacttcaagaccactattccctatggagcttggttccacaaagaacaggttggtggctgggtcacagagtatgggaatctactgacctttgcaacggtgagaggagcggctcatatggtgccgtatgcggagccctcacgagctctgcacatgttcagtagctttatgaatggccggagattgcccaacaaaccagatttaaagtcttctactgatgattgaaagagaagatatctctttgagtaagttgagatagaaacatattagggtttgtgtaataatgaaccgtgaaccccacggaactatttttatatactgccaaacattgcgatgagaatatagtatttctcatagattattagagtgtgattgtatcaatattatttgttacttat
